United States Patent Application Publication US 2005/0228172 A9 - sequence listing, part 190

SEQ ID NO: 858130 - DNA, 646 bp, Homo sapiens
ctgagtccatttagaatatggattttttttaagcctttctaaggactggatgaagcaggttatttcactttaattatggcagctgcagctgctgcttgtggactcaaagaccaattttcacattaaaaaggggraaaaaaaaacatccacacccacacacaaactcaccgagaaacttcactgcatacacagaagagcatctccttcagagagcacgtcagtgaggtggaaaaatctggaatgccctgttctagacactcagagcccagtggaaatccctgtgcgtgctcacccctgcctctcctcccaccttgcctcctctctgtcctgaacgtcaaagagcagctcgtgagccacacagcgtaatggaatgtttctcggtgagcagctgcatatttttaatgcacacaaggggaaataaaggcagcagatggttttatgtaatcttcctatgaattttgaactgagagtcctcattcatgaagacttgaaaaggttttgttgttttttttctttttttacacgtcctctgtgggtcaagccaaccagctctggacatgccctggtgaggctgtgtgtgtttgcctctgccagggcagggaagctgagaggagcctgcttgccttcttctggcctggtttccact

SEQ ID NO: 858131 - DNA, 638 bp, Homo sapiens
gcgatcctggtctgggcttcccaggcccctgtatctgctgccttcaaaaccctgcatgcrggtctcttgtgtctcccccacccccccccatctcccagctcagtgagaatcatctttcacagtttgatcacatcactcccagctctgcttatctctcctggcttcccttctcaaagccaaacagctagctctgcccccagggcccttctcctgacccctggctcctgacagcctactccccaacccctgctcatcacttcccaggaatttgctttaagcaagggacctgcctgtgcactggcctccactcagcacgagtctgagagagtccaagtagaaaacaggacacttagctaccatctactcccaacctctctcctgaggaggactcaccctaaaggtaagctggctgagtccatcagaatttgctcccatgactcgagtaaccgggagctcatgcacacctgtacggaagaaaagcagacagaggacaaggcttgcagacgaaaagtgtacatccaaacccatctctcccagctaccagctgtgccatactgggcaagcgatgggtcttctctggggctcagaccttccgtctggaaaatgaggctaatgagtcctacctcatagccatcaac

SEQ ID NO: 858132 - DNA, 618 bp, Homo sapiens
aatgcctgggaaatcagatcacctggcttattaaactctggtataaagtaaacatagggcctggcatggtggctcatgcctataatcccagcacattgggaggccgaggcaggcrgatcacctgagttcaggagtttgacaccagcctggccaacatggtaaaaccctgtctatactaaaaatacaaacattagctgggtgtggtggcaggcacctataatcccagctacttgggaggctgaggcaggagaatcacttgaacctgggaggtggaggttgcagtgagccaagttcgtaccactgcactccagcctgggcaacagagcgagactccgtctcaaaaaaataaaaaaataaagtaagcacaaacaaatcagttgtgagtgtgggttgagaggatttcgtatcacaaaaatctgaagactgcagtgcacggccaaatagaaatgtgttttgtcggctcagaggctctttttcgtttcctgcttggctagctctctgctgcattccaaatagctgagggacttccagataatcaaagttctctaaccatacacactgttagtaactcctttcagcccccttcctgtccagatgtacaaagagaatagcaaaggg

SEQ ID NO: 858133 - DNA, 644 bp, Homo sapiens
ctgtgactggctttagcttagtttccttgtccctcaggagggtgataacagcacctacctcacagggtcattatgaggactgaatgactgctgcccatagaatttaatgctgctgtgcctaagtcaagaagcaacaatgggacttgtggattctcagcacttccatgacatggactctaccctaacattggctgggcaatgttataacttataaacttataagtttataagtccatcccttgattttaacaggtctgagcaataatgtggaaaggctactggtagccactgccaataaatcaaatccatcataggccacctcctccagaaagcccacctggactatgctgtcttattgtgactacttccttggctgaatttctatgggatttgaaattcagagaaattaagtaactcatccaaggtcacacaactaataaatggtaaactggtttaccatttagtaaccaggttactagtaaccatttactggtaaatggtaaagcaggatttcagtccggccatctgaccccaamgcttgtctgctatgcaagcatgggaatcttatgttttttgctacctggaaagtttcagcattgaatcatcttagcctggggtcttttaaaaataaatgattccattaa

SEQ ID NO: 858134 - DNA, 615 bp, Homo sapiens
caaagagctttcatttatgtggattataacctttaatatttaccatactagaaatcaaaacagaaaaaattataaactttatatattaatttaaaaactaataaacccattatatatatttatatrttttatttttatttttatgttttttgatggagtctcactctgtcactcaggctggcatgcagtggcgcaatcttggctcactgcaagctctgcctcccgggttcatgccattctctgcctcagcctcccgagtagctgggactacaggtgcccgccaccacccctggctaattttttttttttttgtatttttagtggagatggggtttcaccatgttagccagggtggtctcgatctcctgacctcgtgatctgcctgtctcggcctcccaaagtgctgagattacaggcgtgagccaccacacccggcctaaacccattatatttttaaatgagacaattttaaatgaaaaataacatttttcaaaacaataacttaagaagaatggtattactttacagttttataaatctctttaatattttacttaatagaagacaactggattttcatgtctgcttctgatttcaatctgttgcagtatgttg

SEQ ID NO: 858135 - DNA, 544 bp, Homo sapiens
atttagttaccagctatctacaaggaataatttgcataactgtttcaccattacatgtcatcagatatgatccactggaaacaggatcattaacgcctttgcatctaatgaggtcagataattgattccagaaaactcagaaccaattgagaaaattcctcattaatattcagcttcccctgggcactctcagggcagctggttaagccattctctgtaaggtttactgtctttgaacctgaagcctctagtccacaggtcagagcaaggacagctggaatccacaatcatgagctacagagcaggatagactgaaccaggtcagctcttgtctctgaccttgatggtgtggatgccctgccatcagcctccccactgagcccagctcacctagggggagagggagcttctaaaatgcaaatcgcatcagatcactactctgcttaaactcttcagcagctcccagtgcccgmaggacagtccagactccttactggtatgaggatccctcctcctcccatttctccttccattgacaccaggc

SEQ ID NO: 858136 - DNA, 609 bp, Homo sapiens
ctagtagaatgttctgtacacattacattgcatgcactgcacacacaactacaaaacaagtatttaatgaaagggcattatcagcatataaactagactggaaatccagcagcttgacaataaactgcattttaggtaccctgagatctgacctctgagaacagcagtgaccaccttggagctggcacttcctggaatgctttgctgcattacacattaaaggtatatgctcagggagtaaaggaaacagagcttaatgaaaaatacctctatcgaggccaagccaagagataggtcaggtctatatccatacagctagtctaaggctgaatctcagtttctcagtgtacaaccagcaaccagtagaaataggctccaccccaaagtggccccaggctctcagcttcctggctcacttttccactctccgtggatagtatatgcctgcctaaaaatttataaaagaggttaataatgaagcagggtacagaggtcacctctcaggctgcccatattttacctcataggtagttgccttcmaccatctactaggatttagactaaggcattacattttaaactaagagggaaagctcatcagtcaagaaa

SEQ ID NO: 858137 - DNA, 362 bp, Homo sapiens
acagatttgtgtctttagcatgacaaaagctgtaaaaaaaatagttttttacacagaggactgagaccctttttcktaattttcccttgttcccaacaaaatctttagaaaactagaagattgaaattttttaaaaaaagaagttctgacattctaggaaaagaggagtggaaggcattcaaaacccctcaaaaaaaaaaatccagtaacaggataaactatttatcaggaaagaacgtctctgcaatgcatgtttgtgcatgcaaatttctcatgtgtgtgagaaatagggcaatggtaaaatgtgtaaaaatagaaatctgttttgcaaataattaaaatcatttagctactttcataat

SEQ ID NO: 858138 - DNA, 362 bp, Homo sapiens
acagatttgtgtctttagcatgacaaaagctgtaaaaaaaatagttttttacacagaggactgagaccctttttcttaattttcccttgttcccaacaaaatctttagaaaactagaagattgaaaytttttaaaaaaagaagttctgacattctaggaaaagaggagtggaaggcattcaaaacccctcaaaaaaaaaaatccagtaacaggataaactatttatcaggaaagaacgtctctgcaatgcatgtttgtgcatgcaaatttctcatgtgtgtgagaaatagggcaatggtaaaatgtgtaaaaatagaaatctgttttgcaaataattaaaatcatttagctactttcataat

SEQ ID NO: 858139 - DNA, 631 bp, Homo sapiens
aactactaggtttcaggtcttaatttgtctttaatccagtttgagttgatttytgtatatggtgaaaataaggatccaatttcattcatctacatttggatatccaattttccccacaccatttattgaaaaagctgtcctttcctcattgtctcttcttggcacctttattaaaactcagttttccataaatatttggggttatttctgaactctatcctgtttgactggttttgtgtctgtttttatggcagtactgtgctgttttgattactataactttgtaatatattttgcagttaggtactatgatgcctccagcttttttctttttggtcaagataggtttggctattcagggtcttttgtgtttccatacaaattttaggattgttttttctatttctttaaagaatgacgttggaattttgacagggattacactgaatctgtagattgctttggatattatggatatcctaacagtattaattctttcaattcataatcatgcctttccatttacttctgttttcttcagttcctttcatcaatgctttatagttatcaatatatagatcttcacttccatggttaaatttatacctaggtattttattttatttttttg

SEQ ID NO: 858140 - DNA, 631 bp, Homo sapiens
aactactaggtttcaggtcttaatttgtctttaatccagtttgagttgatttttgtatrtggtgaaaataaggatccaatttcattcatctacatttggatatccaattttccccacaccatttattgaaaaagctgtcctttcctcattgtctcttcttggcacctttattaaaactcagttttccataaatatttggggttatttctgaactctatcctgtttgactggttttgtgtctgtttttatggcagtactgtgctgttttgattactataactttgtaatatattttgcagttaggtactatgatgcctccagcttttttctttttggtcaagataggtttggctattcagggtcttttgtgtttccatacaaattttaggattgttttttctatttctttaaagaatgacgttggaattttgacagggattacactgaatctgtagattgctttggatattatggatatcctaacagtattaattctttcaattcataatcatgcctttccatttacttctgttttcttcagttcctttcatcaatgctttatagttatcaatatatagatcttcacttccatggttaaatttatacctaggtattttattttatttttttg

SEQ ID NO: 858141 - DNA, 555 bp, Homo sapiens
tagcgcaatggcacgatctcggctcactgcaacctttgtctctcgggttctagtgattctcctgcctcagcctcccgagtagctgggattacaggcatgygccaccatgcccagctaattttgtatttttagtagagatagggtttctccatgttggtcaggctggtctcaaacttctgacctcgggggatccacctgcctcggcctcccaaagtgctcggattgcaggtataagccactgcacctggactataatctaattattaatgtgccaaacagcctaaagaaattggctcaaaaagacaaagaggttaaggtaaatgttaacaattacaaaatcatgcttcaagtttatgaacagcagtcatatttcatcatacttttaactctctcattagattgcatttaaatacattgggaaagttgtttgcagtttgaagcttcctctgcttttgctcacaagggtctcttctcaaagagttatttattatttgaaagtaatgagggtctcagaaaggaaaagtcactcctaccactccactctacaatacatct

SEQ ID NO: 858142 - DNA, 623 bp, Homo sapiens
cctcccagtagttggagtagaaaawataggggagtttgcatgatttctgctctccagggacttacactttaattgggaggggaaatagtgaaaaatagggaatgaatgccccacataggtcctttttttttttttttctgagacagagtcttgctctgtcgcccaggctggagtgcattggcacaattttggctcactgcaacctctgcctcctgggtctatgtgattctcgtgctaaagcctcccccacacgccaccacactgggtaatttttgtgtttttagtagagacggggatttcaccatgttggccaggctggtcttgaactcctggcctcaagtcatctgcccgcctcggcctcccaaagtgctgggattacagcctatacagattcatgatctaattagaggtgttttgtgagctggcatccttgactgctcctgggtctgtctggcaagaggagctgcagtgcagtttcctttttggtgacctcacgcttcttcctctgcttccagccgtagagtagcaaagattgcttcatctgaggttagtcatgtgcaaaagtaggtgtaactcaatggccttcctgtttgagtgtgagaactaaaagatacccctagttt

SEQ ID NO: 858143 - DNA, 623 bp, Homo sapiens
cctcccagtagttggagtagaaaaaataggggagtttgcatgatttctgctctccagggacttacactttaattgggaggggaaatagtgaaaaataggraatgaatgccccacataggtcctttttttttttttttctgagacagagtcttgctctgtcgcccaggctggagtgcattggcacaattttggctcactgcaacctctgcctcctgggtctatgtgattctcgtgctaaagcctcccccacacgccaccacactgggtaatttttgtgtttttagtagagacggggatttcaccatgttggccaggctggtcttgaactcctggcctcaagtcatctgcccgcctcggcctcccaaagtgctgggattacagcctatacagattcatgatctaattagaggtgttttgtgagctggcatccttgactgctcctgggtctgtctggcaagaggagctgcagtgcagtttcctttttggtgacctcacgcttcttcctctgcttccagccgtagagtagcaaagattgcttcatctgaggttagtcatgtgcaaaagtaggtgtaactcaatggccttcctgtttgagtgtgagaactaaaagatacccctagttt

SEQ ID NO: 858144 - DNA, 623 bp, Homo sapiens
cctcccagtagttggagtagaaaaaataggggagtttgcatgatttctgctctccagggacttacactttaattgggaggggaaatagtgaaaaatagggaatgaatgcccmacataggtcctttttttttttttttctgagacagagtcttgctctgtcgcccaggctggagtgcattggcacaattttggctcactgcaacctctgcctcctgggtctatgtgattctcgtgctaaagcctcccccacacgccaccacactgggtaatttttgtgtttttagtagagacggggatttcaccatgttggccaggctggtcttgaactcctggcctcaagtcatctgcccgcctcggcctcccaaagtgctgggattacagcctatacagattcatgatctaattagaggtgttttgtgagctggcatccttgactgctcctgggtctgtctggcaagaggagctgcagtgcagtttcctttttggtgacctcacgcttcttcctctgcttccagccgtagagtagcaaagattgcttcatctgaggttagtcatgtgcaaaagtaggtgtaactcaatggccttcctgtttgagtgtgagaactaaaagatacccctagttt

SEQ ID NO: 858145 - DNA, 637 bp, Homo sapiens
tgcctctcgagtccagtccctcctgctacttcagagatgaggcttagaaagggactcttagatgaagagaggcttaatagaacaggctttgaaagcagaaattcaggacacaacaatctgaacagggaggtcaaagtggcatgtgaaagtgccatgaaagaaacatgaagtgttaattttagttcgctgagaacagtgaaaggtgttgaaaagccattacccttaaaataataattttctttttcctttgttttttaaagatcaatgacttttttccagaaaaagaaggaaattcctgtatattttagtatgtccaactaaaagcatgctcaatatatgttgacttaatcaatttatcaaagttcattaagattccctcctgcattaaataacatgcaggttgaaactctcactgcactcagattttgctaatgttttcttgttccctaaagaaaaataggcaataaagagatagaaatattcctgttttaagttaaatctcaataatgttgtcttatgacttttgaatacttttgaaattacaatccctctttcctactataatgtgcaaaggyattttgattctgtggtgatagaaaaaataaaatttataaaaataattcctcatctttataag

SEQ ID NO: 858146 - DNA, 541 bp, Homo sapiens
aagtgtggagaaaatcctaccttccaaagctgttaagcgtacgttgcaggttagtgattacaagaaagcactcggaggcagcaatggkattctctccctaaactgagatgatactcatagtggcaagaatggtttgtaggaaaataagtgatcagttattgagctcgtccgtgataagtgcttttctccatcattttatttaagcttcacaggtgccctatgtagtccgtattattattattcccattttgcagatgtggggcctgaggcacagagaggtcagccttcccaaggccataccctgaggaaatgacgaggcagaatctgagcccagggcagtttgacttcagctcttggagataacttgggccacttctccatctgtgccctgcggccggcatcaccttcggtttgtatggtgctctccggtttataaagcccgttcaccggcatcatcttactgaatcctcccaaacacatctgcgggagacacaggtttaacagacaaggaaatcaaggcttgggggcactgagggacctg

SEQ ID NO: 858147 - DNA, 540 bp, Homo sapiens
aacatgataaatcgctgctaatgctgctgggtgactgagataaaggcttgattgtttgggcagcgtaaatcaacaccctgagctgggtgggaaataaagcaataatttaaatctattttcagggtcttgtgggccaagtgaccaactaggaattggtatctgaggacggaataatggatagaggagggttatatatggttaaaccacaccgactggatagttctgcactcgtctgggatggttacaagccctgtgagtgagctccagccagaactgtgactcctgcccctgctgtgtgaagagggcccaataattcacttacctgcttccccagccaacccaccctcggacagcctctgcctctcctccaggcatcccagtcccgtactcatcacactttgtggaggggctgtttctgcgaggccctgtgccrggcacaggggattcaaacgttcacaagacaaaatcggcatcaccagactgtaaattccatgcaggcaagagctatcgctgtctagttcaccaccacatccccagtgc

SEQ ID NO: 858148 - DNA, 619 bp, Homo sapiens
attatccccattgcacagatgcagaaacgcggactcaggmagattgactaatttgcccagtgccacacacaaagccagtatttggaccaggtagtcaggccccggggtttctgctttaaccacagtgctctaaccatggtgctaaccagtgccgtgctgctctgtggactgctggagagacaggtgcaaagatgagtggctggcaggtggttccagggacttccctcagtagtagtgtctggggtgctggggtaattccaccaccactgcccaccacccaccaccacctccacacagccacaggctgctgatcccacaaagtgtcaagatggatggactccgcagaatctgtcaaggcccgacaaggggacacatctgaactggtgacggaggtcataaatttttatgttcattatgtttgttttgtttggtataattaatgaatctattaagctcagtcaagctctgacctcttttataaccattataaatcagctcaaatggctctgggagggggacggtgagtgtcattttgcaggcctccctgggaaattgtggtcattccacagagtaaggctttggaaaggggtagagggtagggaaaaggccaacgtgggtt

SEQ ID NO: 858149 - DNA, 619 bp, Homo sapiens
attatccccattgcacagatgcagaaacgcggactcaggaagattgactaatttgcccagygccacacacaaagccagtatttggaccaggtagtcaggccccggggtttctgctttaaccacagtgctctaaccatggtgctaaccagtgccgtgctgctctgtggactgctggagagacaggtgcaaagatgagtggctggcaggtggttccagggacttccctcagtagtagtgtctggggtgctggggtaattccaccaccactgcccaccacccaccaccacctccacacagccacaggctgctgatcccacaaagtgtcaagatggatggactccgcagaatctgtcaaggcccgacaaggggacacatctgaactggtgacggaggtcataaatttttatgttcattatgtttgttttgtttggtataattaatgaatctattaagctcagtcaagctctgacctcttttataaccattataaatcagctcaaatggctctgggagggggacggtgagtgtcattttgcaggcctccctgggaaattgtggtcattccacagagtaaggctttggaaaggggtagagggtagggaaaaggccaacgtgggtt

SEQ ID NO: 858150 - DNA, 622 bp, Homo sapiens
ccaggtaaaaaggcaaaacatacttgcattcagtctactatagttactccaygatgacaccagctggcaattgtttctccctaacatatagcagctactatgattcccacacaaattattaaaataataaaaataatgttttcaaagagctttcttccacttcctttgccggtctagcaatgagcttaacactatctgtgaagcaatttgttcacctaattttatgccttaataagctttactacaattattttcttgcctgattcgttctctgccttgactttagtatacttcctccctgttcttctgcaatattctcaaacctgttaacaacatcgcactcccccaggattcaaacttttgattagaacagtccccatttaatcaagttcaattgggaaataaaattgcatctcaacttctccattttccctttggtgccagaaactgccttgagaatgttgaagaaaccctggagagattaacaatccaaatgatcacagaggatagttttggatcccctacatttgcacagaggaagagagatttgaatgcccctcaatagagatgaaaataaaacagataatgtaagtcattggcagcatgactctctcctacaaga

SEQ ID NO: 858151 - DNA, 582 bp, Homo sapiens
caggcccttgacaagtctatacattagggaaacttgggtagggtgtccacccatcccttatctctgctatggccaagggaacatggtcatgagatatcacagtagccacttasacttatgcaatcatctagggctattttgcttagcaggagaccttgggaagagaatgattggcctgatccatgacaactttttttttttttttttttttgagacagagtctcactctgtcactcaggctggagtacagtagcacaatctcagctcactgcaacctccgcctcctgggttcaagcgattctcctgcctcagcctcccaagtagctgggactacaggcacacaccaccacacccagctaatttttgtatttttagtagagacagggttttaccatgctgtccaggatggtctcgatctcttgatctcatgatctacccacctcagcctcccaaagtgctgggattacagatgtgagccaccatgtctggccaacaaattttaaaaactcacacatacaccataaatccacgttaccagagatatatattgtaatataaatctaacacataatgccatgattt

SEQ ID NO: 858152 - DNA, 622 bp, Homo sapiens
ccaggtaaaaaggcaaaacatacttgcattcagtctactatagttactccatgatgacaccagctggcaattgtttctccctaacatatagcagctactatgattcccacacaaattattaaaataataaaaataatgttttcaaagagctttcttccacttcctttgccggtctagcaatgagcttaacactatctgtgaagcaatttgttcacctaattttatgccttaataagctttactacaattattttcttgcctgattcgttctctgccttgactttagtatacttcctccctgttcttctgcaatattctcaaacctgttaacaacatcgcactcccccaggattcaaacttttgattagaacagtccccatttaatcaagttcaattgggaaataaaattgcatctcaacttctccattttccctttggtgccagaaactgccttgagaatgttgaagaaaccctggagagattaacaatccaaatgatcacagaggatagttttsgatcccctacatttgcacagaggaagagagatttgaatgcccctcaatagagatgaaaataaaacagataatgtaagtcattggcagcatgactctctcctacaaga

SEQ ID NO: 858153 - DNA, 693 bp, Homo sapiens
atctttatttataattgttgactcattgagtggtaatgtattaaatttttgttactgaatatttatttctataataattatatttgaaacgtatgactcaaattccaaataagggcayttttctgagtaactgaagttagaatttcaacatatcttttttgggagtatatattctatccacaacacattctaagtacacagttttctcagaaacatagcctataatataggctgtaagatacaagataatttttccaccaaatggaaagtacagttgacccttgaacagcagggttttgaactgtgtgggttcacttatactgaattgttttcaataaacacacacagaccatacatgaaaccatacacattcacagagcaatgtaaacaagcataaaactgcaggattaaattataactgcatgaaattaactagcatatactgtactactgtaataatttaatagccacctcttattgctatgggtgaaatgaaatgttgctagtatttgcttaaaacactacgtgacgtcatctccttgtgatcatttcatctgactagcaaattgtatcacagcaaaaagttacctctcatggtcagtacaaagtgattgttcgtggttctcagctatttttaattgtgtttagggcaatactgtaaactttgaataacaccatgggctcataggaagt

SEQ ID NO: 858154 - DNA, 620 bp, Homo sapiens
atttaattctaatcatggtcattataattaaaattgatgagaaaaaatatataaaagatagcatctgaacattttaatattatgtgctaaacattagataaaggtaataagagcatgaaaagatgtttaacaatgtaattagatgacaaaggatttcaattatcttaaagaaaaaatagaattttttttcttttacaattgcttgtagcacacgtcaaaaagcagcaaagaggaatgatttagaaaaagacacttacgagtgtctcttttcaattaaatgtccatcaccaatcttccagtggctgcaaagttttgtgttagatatgaaattaggatatgatttttactctataaatacctgacagaagcttataacttgagccaaaattcatggatggtaactcagaaatgcatttgtcaagattataaattacaaatcttacaggaagtcttatgttaacttttatgatttctctaagatcttgcttatacagatcaactgaatcattttaccttacatactataaaatttccttaaaayctgtgaaattgttatgtttataatcatgtttaataaagtatacttaaaaacgaatatggttataattatatttaggcca

SEQ ID NO: 858155 - DNA, 623 bp, Homo sapiens
caattgagatagcttgatctaagctcaaaattcttctgtagctgggactacaggtacgtrccaccatgcccggctaatttttgtatttttagtagagacggggtttcactatgttggccaggctggccttgaactcctgacctcaggtgatccacccctcccaaagtgctgagattacaggcgtgagccaccacgcccagacaaagctgaaaattattttcagtaatctttggcaaaatatctttgacatgggcagtaaagtatccccaatcctttatttcctactcacactgctggttccttttgtgcttttctttgtccttccagggcctagagacatttgtgttctatactctggacctgtaagctccttttttttctcattgcattgatgaaattcttttatgtgggggtggtgaacactcaattcccatgttaactagcctaccagattgaaagttcaagaagcctgctctcacaggatcctttgctgatcttccaaggtggaatgtggatagaaatgtttattgaatgatctgagatgacactggagtcattggcatcggtggctattaaccttgtcaagaataacctttggcatgttcaaaaatgaaagctgcagt

SEQ ID NO: 858156 - DNA, 623 bp, Homo sapiens
caattgagatagcttgatctaagctcaaaattcttctgtagctgggactacaggtacgtaccaccatgcccggctaatttttgtatttttagtagagacggggtttcactatrttggccaggctggccttgaactcctgacctcaggtgatccacccctcccaaagtgctgagattacaggcgtgagccaccacgcccagacaaagctgaaaattattttcagtaatctttggcaaaatatctttgacatgggcagtaaagtatccccaatcctttatttcctactcacactgctggttccttttgtgcttttctttgtccttccagggcctagagacatttgtgttctatactctggacctgtaagctccttttttttctcattgcattgatgaaattcttttatgtgggggtggtgaacactcaattcccatgttaactagcctaccagattgaaagttcaagaagcctgctctcacaggatcctttgctgatcttccaaggtggaatgtggatagaaatgtttattgaatgatctgagatgacactggagtcattggcatcggtggctattaaccttgtcaagaataacctttggcatgttcaaaaatgaaagctgcagt

SEQ ID NO: 858157 - DNA, 604 bp, Homo sapiens
aggagtcagcagcagctcccactgggggacggcagggctgccctcccatcaccgtgkgcgaacctgtccagctgctgcttttccttaacgctttgtccttggacctcccacctcgctgctgtttttctgccccctcagtctagagagcgcccatctccatccccagcttggcaagagggtggtgtacttcaatggagatgccaggagcaggtggtgggctgaggactcgtttgggcccaagctgtgcgactctcagactgttgtgtgcaggagtggcttctcctgctcttttccggagcctgactgctctctgggaagtacttggtgcttctgaagagggccggcctacatttgggtggcctgggacctgtgggaagactgagccagggacgtggaggcttgcccagaatcaggcagagaggatgtggcccctcgggggtggggcccaagctccccaaggattctaggcctttgtttccacatggcccgcctgtcactccttactcttcctagaccgggagggacagaagttttactctaggggcagaggaagaggtgaggatttcttttgttttgtttttgagacagggtgtcgctctgtcgc

SEQ ID NO: 858158 - DNA, 607 bp, Homo sapiens
attgcttaaatttctcaaagatcaaatgaatgggcaaccgttttccaaggagggagtaaaatacaaacaagcgcacactcttccaaaaatggagaaaaagatccaaagtataaagaaaacacaagtattcaacgttgaaatttaggaaaattttgggtagtacacaggcattttattctaccattaatcgtagaaactcatcttttgtgagattttatgacacagaatttgtgattttttatataaaacatatataaagaatctttcaaaagtttaataactatctcattcatcaatcaacatattgaggacctactgtgtacctgtcaccgtattaagaatctcagttgaaccacctcatgttgtcattggattatctgtaaagttgatgctacttcacatacattttgagagaagacacctcatgtgagggatcccatctgtgctctacacagaacagacaaaacgttttcaataatggaattgaaagaacttaatatttcaaaatgtattatactmaaatagacagatgaacttcaaaatatgcccaaggtccacaggctattactatcggaacacgcactaagaaatgccactaacacagtca

SEQ ID NO: 858159 - DNA, 566 bp, Homo sapiens
ggatatgatgaacacttgaactgtatttttttaaattgctattttttaaaaatgattgtatgagtaaggtgtaaaatgccaaagggagtaagatcttaagagagccatctaggaatgacacctgttagaaaaagtcttcttgaaccagaaatcaggaaacatgctatggagaggcagcctggggtagtgttacaccttcagactgtggagccagaaagacctgacttcaaaagcatactctgggtattatcaaaaacacaaaaaataacaaatgctggcaaggatgcagagaaaagggaactcgtatacactgttggtgggaatgcattctagtacagccactatggagaacagtacagaggtacctgaaaaaaactacaaaccgaactattataagatccagtattcccatgactgggcgtttatgcaaaggaayggaaatcagtatgtcaaagagatatctaccaccatgtttattgccacattgttcacaatagccaagatatggatcaacccaagtattcaacaacagatgaatggataaagaaaatgtggtatatatacat

SEQ ID NO: 858160 - DNA, 584 bp, Homo sapiens
actaaggtgaattttatggaaaaaaaataaaagatcaggacctaagtgggagtaggatgagaactaattcttctgggtttttttttttttttttggaatttttaatccccccctgttaaaaaaggctgacctttyccaacaggggttttcattcgggagggaaatgcagtgttttccagccctctccaagaacagtaattaataagaggaaggaaaagagagatgggaaagcaaatcgtgcattgttctgctttgagttgaggcagagggtaggctggtgtttcttcctcatcttcccactagtgttcttccttaaagaagggagctttggtacaccaccttggttcctagtcagaaagtgccctaccggacccttttaaactacaatgagatagctgggtaatcagatatgtaactaaggaggagagcaggtggtttccctttggtctggcggacaactggctccctccccacagcccccacttgaaagactcctaggccctgggaggggcgagtgggcctttagaggatagaatcatagactctctcctactcccatcttagaattccaagattgggcagga

SEQ ID NO: 858161 - DNA, 535 bp, Homo sapiens
accaagcaatggagtcctcttcctctttgttatttaatttttttagaaagaatttcaagattcccacagttgcctggtttcaggacaaatcagagttaaaacaagacttcgtttcagggatatttagttgttttttttttcttttccttaatttatttttcttttctttcttctcctccctctctttgcttcttcctgactttctcttttattcattatctgtctagatcattcaagttaaattttcctttaacattttagtgttattcctatcatccgaatgtcaatttagtgaaaattgtactcaagctagttttttattcttttcctttggtttttcttatttgcttttcacttgagtaagcataggtcttgcttttaaagaagaaacatgaagactatggaaggcttgctaatagtgagaaaaagaggggagtggtggtgtggaggatatatrtttgagtcggttggttgacgctgcagatgatctggtgatgtcacttgaggctgccctgcccttatattctggggtgta

SEQ ID NO: 858162 - DNA, 575 bp, Homo sapiens
gaattctgaacaagttacttgcaaacaaactttaaggccatagtcacttttaagttgagaattgcttaattgcagcaattccaggttatctaggtttttcctctctaatatgctcctcaaataatagatttttttccttgtcttaatgcagctctttgattaatcatctagtagtataaccattgaaagaaagtaataggttttctttactttataaaatctcttttaaaacctatcaattaccattggtttggaagtgtttcaatgttttgtttgatttttcagaaaccaagccatctcctgccttgtagttttgtagctattggcattttagtagcattttttctgctgattcaagcctgtccctggacatattatgtatatggtttgttgccactgccaatatggtatgcggttctaagagagtaagtaatgcatcttgctgccttgttttttcacttcattgacagttaaatctgtrtttaaaatgcagtagatttctgtaccataagtcatcaaatatatttataatactgtactttcaaacctccagtccctctcacttcatttataac

SEQ ID NO: 858163 - DNA, 597 bp, Homo sapiens
ctcagcctcctgagtagctgggattacaggcatgtgccatcacgcctggctaattttgtatttttagtgagatggggtttcaccatgttggccaggctggtctcaaacttgtgacctcaggtgatccgccctcttcagcctcccaaagtgctgggattacaggcctgagccactgcacctggctgatcgttttcaaattaattcagaaattacattttccctaaaatacttctagattaaaaaaaaataggtaaataaagcccttgaaacaaatccgttagagcttattttagtttttgaataatctataaatggaaaattatgtagtgttttagctttgtgcaaagtttgtattgttatactatgtatgacctaactttaaaattcaatcagtctttttatttgaaacagatttcaagttattcaggaccttgttgtatcagtgttgacctatcctctgagccattttgttgggtacctgttagcctttaccctgggaattgaagtattagtaagtaacttaccagattacaacatttgcaartttcttttatatatttgtaactagtattaaatgaccttatttttcattccttc

SEQ ID NO: 858164 - DNA, 622 bp, Homo sapiens
gtggccagggttggcctctggtaaatgacgtttgagcatacacctgaagtaaggaagtgaatcacggaatatttgaggaaagactatccaggtggaggaaacagtgyaaagctctgaaagcagacactcatgttcatagtaattgagaagagcaagaccaatatggctgaattatatagcaaatggagtggtagaaaatgcactggttttgtaaggtgaggggactgagagatattggcataccatagaactttctagactacggtaggaatttccgttttactctgaaaggaaggcaggggaaattttaagaagagataaacatcacatgacatgtttgcaaaagattgttcttgctgtagtgtggagaatagaatggagagggcattttattgccttagaggcaaaagcagctttatgtcttattcctagtgtctccctcaactaaatgtattagccctttggcaatttgtattttctgagctcatatgtgccaggcatacgttttctcatttaatcctcaaaacaaaactgcaaagtagatatcaaaaaagagagggaaaacaaaaaaggctcaggcaaggtcaggacacttgtccacagtaaagagctaataaaatag

SEQ ID NO: 858165 - DNA, 631 bp, Homo sapiens
ggtaacacaagagatcccttagggtatcgtttagtgttaccctactctgtgattaaagttagtggaaaactgcaatgcaattcaygcagaactattaatgacccagattccaggaatgaaaattggggtcaccctgccaggtaaagaaccacaactagccaagatgcttgctgggagcaaagggaatccagaatgggttgtaaaagaaggtagttataaataccagctatgaccacatgaccagttatagaaataagaactgtaattgccaggaatatatcatctctattttcttatgaatatttgtgtgtctatcatctatctattgacagattgttcaaatgactttgtttactttcctcttattgctttatcatgtaccataaatgaactgactttatatcacagtatttaagttacagaatatcaacaagaagattaaacatcattcaaggactttacattggttctgaggaaaggattagtgaattctcagtcgaatacaggatggttgtatcatgttaagtgaaagtatgacatcattattgttttattggcgattaagcacggcttaaagaggtgtgtgggttgccaagctgacaaggatccggacatgtgatggttgatttta

SEQ ID NO: 858166 - DNA, 606 bp, Homo sapiens
aataatttgggattaaaaataagaaataagaaagggactgagaattaatataaaatggaaaacctgaaatattatgtggattttattttgaatcagggagagaagacagctaaatcagttaaatttactrttttcattggggcacctactcttatttttgtgctaaagaaatgaaagtgaaggttgaaattataaattctttgaagagtttgaccatttatttgagggacatgtgactaaggaaagccgtaaccatggatagaagactaagaattactcacatacattttagttgcttgcaaaaggctcttgcatacaacaaaagagtctttaaattgtacaaattgtagaaagtctttaaattgtgtaaactgctgattcttcaccataaataggttcttgttttatatatattaatattataaataaggttagagtctattcttccaagcttggaaaattaggacatttttcaaaactttgctctgatctcttattagtggatttcatagtctatgtctcagaatacctggaaaagttgcttttcctctaatgtccattgctttgtttggttagagaaagtaacatgtttttaaaaaaataaaa

SEQ ID NO: 858167 - DNA, 627 bp, Homo sapiens
gaacagaaaaccaaatactgcttgttctcacttataagtaggagctaaatgatgagagcaccgggacacaaagagggsaacaatagacaatggggcctaccagtgggtgaagggtagcaggagggagaggatcagaaaaaataactattgggtaccaggcttagtacctgggtgatgaaataatctatacaccaaacccccatgatacaagtttacctatataacaaacctacacatgtaccccgaacctaacagttaaaaaagaatcggctgggtgagtgcagcaaggtggcagaatagaagcctatactgtctgtcctcccccaacaggaacaccaaattttaacaactatatgcacacagaaaagcaccgtcacgagaaccaaaaatcaggtgagcaatcacagtacctggttttaatgtgtacggctaaaagaggaactgaaaagtgtcggagatatagtcttgaatcaccacccctcccctatctatcagcagcagctgcctggtatggcgagctaacttgcacacttggaggagggagagagcagcgactgggggacttcacactgaattcagtgctgctctgtcacagtggagagcaaagctgtgctgggctcagccaac

SEQ ID NO: 858168 - DNA, 520 bp, Homo sapiens
tccagaaccttctgtcccactcctatgaatttagaatagatataaagcttgtggacatgaggaytgtctgagctggtgtgcactgggctgacagatatgtccctttccatgacattgtgtggtgaacctcagccttttattatctttacctacatggaaagtaaaatgtccatgacagttaatttatatgatggagcaacacgaccagaatcccagagcaccgtgtcactgctcacaagctaaaataacctctactcaaacagatcaaccacaattttcagcccaatttagttttctcggtgaaactgggtatccagatgaaacatagtttccagcatcacaagtgagttgattactcaatcatggctattatgtggttgaatctttactttactgttgcctctgcccagatcattttttttaatgatctattgcattcaaaaaaatgcaaccggtcagttaatttgttttgtaagccctagtattgatctattcattttttgaacacacaaaaacctag

SEQ ID NO: 858169 - DNA, 520 bp, Homo sapiens
tccagaaccttctgtcccactcctatgaatttagaatagatataaagcttgtggacatgaggactgtctgarctggtgtgcactgggctgacagatatgtccctttccatgacattgtgtggtgaacctcagccttttattatctttacctacatggaaagtaaaatgtccatgacagttaatttatatgatggagcaacacgaccagaatcccagagcaccgtgtcactgctcacaagctaaaataacctctactcaaacagatcaaccacaattttcagcccaatttagttttctcggtgaaactgggtatccagatgaaacatagtttccagcatcacaagtgagttgattactcaatcatggctattatgtggttgaatctttactttactgttgcctctgcccagatcattttttttaatgatctattgcattcaaaaaaatgcaaccggtcagttaatttgttttgtaagccctagtattgatctattcattttttgaacacacaaaaacctag

SEQ ID NO: 858170 - DNA, 594 bp, Homo sapiens
gggattgcagacgtgagccactgcacctggtcacattttgaagttttctaaggacccraggaaagagttataagtagctgttctaagaattacgtgtcacagggctttgtcttggtcgctatatgataaacacacataccatgtttctatgtgtgccagtggctgttctgagaatttactcgtagttactgatttacttgtcacagcagcctgactgcccacgtttgacgtctgtggaaagtgaggtatggagagttgacgggacttatctcaggcttggtaactaataaatagaggggcagggattcagatgcgggctgactggcttcagagttcctattcttggccccagcactacttttctgctcaaagtggaagagaaaaactactctcatcaggagactcatcacaacagaagctggtgacggtggagctacagagcgtccttcttcaagaggtttatacaagtgataggtttcaggctgaaccaatgtctagagcaagtttaggcaaaggagtcggggagcgggggtggttcgtggtctcccgctactttatttcagctcgggatccttcgctgacgccaatgctatg

SEQ ID NO: 858171 - DNA, 618 bp, Homo sapiens
ctttggatccttctgctgtcataaacctgagctgtgacgtgggtacaggctgaaagctgtgtgtccttccagcaaatcccagatcctggggagggggcaccctgaacacaactgtgaaatagtgtgttggttgmcttttaatactgatggctcattttaagatgatatttctattgttataagaacatatacattctcatacttgttttatttgaaacacagtttgcatatacaataggccttatttctgtaggcaataagtaatgacatgtcttatatacatacatcttctaagtttagtaaagcttattccttttatgtaccaagtttttaaattatcatttttagatggaaagaattcgaagctggatagcatgtttctttgccttactaaacagaggacaatagatataaccatcctgtggctgtcctggtgtcctctgagcaccaagtcttgcgctttgctctatgtggtgggatataatgagaagcaagatggttaatccccgctttaaattaccttgtgccattatactcttgtatgtttgtttgtttgaatttggtcccctcgctcactacaaagcatcacctacctcgtttgttttcctcaatattcca

SEQ ID NO: 858172 - DNA, 576 bp, Homo sapiens
ttggttgaaagtcatggttttcaggctgcaataggattccagacagccggggtgtcacagtacaaacattcaagctttgatttcaggaggaagggaaattgtgctgccctctcagagcctggcatcatcctaatggtggggtgattgacaggttcgctttcccgaagagagacagcaatgaagaccattgggtttcatttcagtcctattcccagcagcagatgttgatggaattcttcgctgtgggaggcactcacaacatgctctgtgggttgaggggtgagaggtgtgttgtgggcaggaggatgtaacaaaaagataaaatgttctctgacctcactgggctcacactccagaggggacatttctctaatcgcagttgattgttcttgtgaatattgactcatgagagtctcatcacaattctgtgatgtaattagggctgctgccattgccatcagttgacaaatgaagagacacatccacagtaaggaatttgctggagtcggtcagttgaattgtgaaagatttaggatgagaatttcasattactggaccatggtaaactttcagaca

SEQ ID NO: 858173 - DNA, 567 bp, Homo sapiens
tatgtttttatgttgggtgattttttttcctcatcaaaatactttgatttctaaaatgaacacacaacaaaagaaacaataaaatttaattagaaaaaaattaatagaatagccttagaacaacaatgtttcctaaaacaaacagtgttggtgtaatcagaaaaaaaaaagcatacttgatgttgcatctttattaaagggcataatcctcaagtatcactttttctatttaatcaacatatatattaagaaaacacagtctccaacacctatttttgccagcctaaaaatgcatgtaaaacagtaacatacacaaccttgaatgacagccaatcatgttataatgctaggaaaggggaaaaaagggtcactaatagtttcacctttttacatgtatttacacttaaagcactcttgaaatatctggtgactgctagttcctaaaacagatttgagtcaaattcaattttcctaacacaaaacacgatwttactaacccatcctgtctcccaaaaggaatgctttgaccatctcaagaaagaaaaaaaacacatgggcgaacaaaga

SEQ ID NO: 858174 - DNA, 605 bp, Homo sapiens
aaatatatatatatacacatatatatttatttatatattttaaacggacaacggaagtctaaacaataatttttaaaaatgtaatgatsatgagatgacccatgagactagaacatttttaaaagactgataacactgataagactcagtagtatcagtaaaggtataggaaattatcagtagtaagagatccaagtgttacaggactttttaaagtacatttggcagttttcattgaaaataaaatgcacatactcatgagcccagcaattctttttttttttctataccaaggaatacttgaataggcacacaaaagagcatgtataggaatgtttactgtaatattgtttataatggtccaataatgtaaacaacatataaatgctcaccagtaacaatggtgacataaactatggttaaactataccatggaatacaatataaggatgtagatgtctatgtaccaacaaggaaataccgttaagtgaaaaaaacaagttgcagaaaaactgatgtaacaatttaaaaaatcacttaccaaaccatatatgtatccatatgtacatatttaaaaaaaaaacaagaaggacaaagtatacatc

SEQ ID NO: 858175 - DNA, 629 bp, Homo sapiens
ttgtattaaatacatttcttgtctcggacctagaagccacaacgttgttggtaggtgataggatgctcattattgaggagtctgtaattttttttaggtctcttcaatggacaaagctgaaaagatataaattcttgtaaagaaaaaagattatactcttagttctaattcaaattttagattatttaacagaaattctgatttgcttttttgaataacataaatataatgtttttctctttattctgttccgtgtatgtgtatatagttgtttcacaatattataactaattttaagtaagtgaatgaagtttaggatttttttgtgtgtgtttctatttgtccttagaatataacccactgagtatataatgtcatttctacattttaaagttattcaaaataatactttgtctagtttcttttttctttcttttttttttataaaataacagtacttttatccaaatgaccaaataaaggttgctgcctgattctcaatttttttttaaattttattattattayagtttaagttttagggtacatgtgcacaatgtgcagcttagttacatatgtatacatgtgccatgctggtgtgctccacccattaactcgtcatttagcat

SEQ ID NO: 858176 - DNA, 581 bp, Homo sapiens
cagagctacgcatattagttagatcgccccatctgaatcttcaaaggctttagagagatgtaggtggtgaagagaaacaaagtgttcggtaaattaagcttttggagctctggagatgcaaatgacagctggctctgcagaaagaaggggtcaggctcaggcaagggtggctgcggagactcccacaggctggaaggaataggggcgggccacccccaaaaccagtttgtcaaagaattgaaaaggagcaggtgagaaatctcctgagctggagaagccggccagccaggcccccgagcccgtctaggaacccctgtgcataaatgggggttcacacccgagaaacgaggcctaattccggcagctcctggggctgcggcgactgccggacactccggggcagcagacggctaggaaaccagggccaacaaagagtgaaaggaaagcaaggaaggacagacggggacccacagagctcgagcytggcctcaccctctcatggtgaacttgaccacggcgagtctggagcccgcgccgctcagctctggctggaaatccgggtcgctcccgacgggcttcac

SEQ ID NO: 858177 - DNA, 586 bp, Homo sapiens
caagatctgatgattttataagcatctgtcactttccctgctggcactcattctctctcctgctgccctgtgaggaggtgtcttccaccatgactctaagtttcctgaggcttccccagcaatgtggaactatgagccaattaaaaacctcttttctttgtaaattacccagtctccagtgtttcttcatagcagcgtgagaacggacttgtacaaatagattgtgatgccctatccacatttactaaataagagagtttctggaattaaagcctgaaaacttctttttcacaagcttcccaagaaattactggtcacagtcagatatggtaaattattctttatttttttgagacagggccttgctctgtcaatctggctggagtgcagtggtgtgattatagctcactttaacctcaaactcctgggcttaagtgatccacccgccttggcctccctaagtgctgaattacaggcatgagccatcgtatccagcataaattattcttaaactgtgaaatttgctgctcttactatggatgtcaaaattcacttgcagwcttcctcataaaataaacatgtccaa

SEQ ID NO: 858178 - DNA, 599 bp, Homo sapiens
gtagtcccagctactcgggaggccgaggcaggagaatcacttgaaccygggaggtggaggttgcagtgagccgagatcatgccattgcactccagcttaggtaacagagcaagagtctgcctcaaaaataaaaataaaaatataagaaaataattattattcagatgaattgaacaggcaagaccattttaacaagtaggattagtatataggaagacacagaggcataggaaatgtgccttcaggcagccataaattattctgcatggagatagggctggaaatgtgatgaggggagcttggtaagaagtgaacctggagggctgggcgcggtggctcacgcctgtaattccagcactttgggaggctgaggcaggtggatcatgagatccggagatcgagaccatcctggccaatatagtgaaacaacttctctactaaagatacaaaaatgagttgggtgtggtggtgtgagcctgtaatcccagctactagggaggctgaggcaggataattgcttgaacccgggaggtggagattgcagtgagccgagattgttccactgcactccagcctggagacagagcgagactccatct

SEQ ID NO: 858179 - DNA, 588 bp, Homo sapiens
tggttaattttgtatttttagtagagacaccgttacaccgtgttggccaggctgctcttgaactcctgacctcagttgatccacacaccttggtctcccaaaatgctgggattacaggcatgagccactgtgcccagctgcaatacaaatttcaacttaatagtttttattgatagaaatttagtacattttcagatatcttaatttttcttcatatatttaatctccatttttactttaaaaatgaagcatactaattctatcttctgtattttataaatctcatatctatagaattttcaggtcggattctacagtttttagtttctgctgattcttgttcatgacttctagccagtagatgaacaaggtcactgaagttatgcaaataacatgaataaagttagctccgcaatcacatctcaaacactcagtagcccatgctgctagtacttaccacgtttgacaatgcagctatagaatgcttccaaaataagttataattgacagycttggtccagacagtgaatctcaagcttatgcaaacatgttaaatacagatgtcctcttgagtatgttacatatata

SEQ ID NO: 858180 - DNA, 611 bp, Homo sapiens
caattcatcaaaattatcatttaaatcttcccataacctcagttttttcaacttttgtttcatttttaattgacaaataataattgtatatattcatgggtacagtgtgatgttttggtatatgtttacattgtggaatgattaagtaaagctaattaacatattcatcacttcacatgcttatcaattttttgtgggaatatttaaaatctagtctttaagcaattttgaaatctaaagtacattattattaactacggtcaccattctgtgcaataaatcactaaagcttattcctcctgtctagctaaaattttgtacccttttaccattgtcttccttttccctatccatctgcctcccatagcaccattctactctttccttctatgagttctactttttggattccacatataagtgagatcacatgttattcatctttctgtgtctggcttatttcgcctagcataatgtccatgttgtcccaaatgacagaatttccttccttttaaaaagtgatagtattccattgtctatatgccacattttctttatccattcatccgcttatggamacttagctccaacctcagttttttgatggatcc

SEQ ID NO: 858181 - DNA, 566 bp, Homo sapiens
aatttttgttttgattatatagattgggcatatcttcattagttgcrcatctgtcttgcccccagggacgctgtgctcaatgatcttctccttagcaatgtgtatccatactctgtggctaccactcctaccttgacactcattataataatggcatactcactatgtatttgattgctaatagctgtcacctggcctctatttcaggctcctctttatctgattgtttttggggagcccagataagtaacaacatctcttactgtcagccctatcagtaagaggaaagccaacactggtattctcaatgatgctggtgtctgcctcagcagtgtgtttcttatttctttagcaaatggaggggcatctgaatcctcagattcagagggttcaggggatctagttttaggaatttcaagtacatgcagctaagatgtccccattccatgcctcaggtttccctactttcaggaatctgcccttagtgtggcaaacttgctgacattgagaattttactttctttagagcattgttacctttataattaacacttgggcttgatact

SEQ ID NO: 858182 - DNA, 657 bp, Homo sapiens
tttatgtaggcccaaagttatttcaaaatagaaagctttttttttttttaaagtgaggggacttggaatagatgatttctagatctcttccatccagcctttttatgttacagtggtaaaaaacgaaaccaaagatgtaagcagttttatttcctgtctaccaattaagaaacatgttgaggcagctgaaaaataggatcagattctaaactgtcgattcagttcaatggaacatgtcctgaatagctactgttgtgcccaggactacactgaataagctggtccttgcctccagcatggtcagtactagaggttgaaaattgtgtgatcttctctttcactcactcatattattcaggtatctcttctttgatgttttaaaataatggaattggagagaatgaaatagaaattgataagttttagaaatttgtcaaaggaaataagagccttcaaagagggcctgaggtttttcaatctgggtgcctaaagagataataataaccattaaataagataagcaacctaggtggcctttggcattaaacactgtgtacaaggattcaatatgactatcacactaagatyacaaacagataattagatatgtcactgtggggttgtacaaagatatgtgtatttgaaaataaaggatga

SEQ ID NO: 858183 - DNA, 657 bp, Homo sapiens
tttatgtaggcccaaagttatttcaaaatagaaagctttttttttttttaaagtgaggggacttggaatagatgatttctagatctcttccatccagcctttttatgttacagtggtaaaaaacgaaaccaaagatgtaagcagttttatttcctgtctaccaattaagaaacatgttgaggcagctgaaaaataggatcagattctaaactgtcgattcagttcaatggaacatgtcctgaatagctactgttgtgcccaggactacactgaataagctggtccttgcctccagcatggtcagtactagaggttgaaaattgtgtgatcttctctttcactcactcatattattcaggtatctcttctttgatgttttaaaataatggaattggagagaatgaaatagaaattgataagttttagaaatttgtcaaaggaaataagagccttcaaagagggcctgaggtttttcaatctgggtgcctaaagagataataataaccattaaataagataagcaacctaggtggcctttggcattaaacactgtgtacaaggattcaatatgactatcacactaagatcacaaacagataattagatatgtcastgtggggttgtacaaagatatgtgtatttgaaaataaaggatga

SEQ ID NO: 858184 - DNA, 535 bp, Homo sapiens
taccattgagtataaaatataccttcataaataccatcatattaatacaatcaacatagaccaataaaataatttactaatgtttagtgctagtgctatcatctagtggtaagttaaagaacctgtctatcgagggtggagccaagatggctgaataggaacagctccagtctagagctcccagcatgagcaacacagaagatgggtgatttctgcatttccaactgaggtaccaggttcatctcactggggagtgttggaaagtgggtgcaggacagtgggtgcagcgcattgagcctgagccaaagcagggcgaggcatcgcctcacccaggaagcgcaaggggtcagggaataccctttcctagtcaaagaaaggggtgacagacggcacctggaaaatcaggtcactcccaccctaatactgygcttttccaatggtcttagcaaacggcacaccaggagattacatcccgtacctggctcggagggtcccatacccgtggagcctcgctcattgctagcacagcagtctg

SEQ ID NO: 858185 - DNA, 636 bp, Homo sapiens
caggctttggacatttcttccaaatgagagtatataaacatgtatgacattttttggatgattttatataaaaaaattactttatatatgttgtatatatagcatatgctagatatttttgtatatataaattatatacaaaaatttatttatatataaattatatacttatatataaaattaaattaaattaataatcaattaaattaaaaattaattaaattaattaattaaattaaaaatgattaaattaattaaattaaaaatgattaaattaattaaattaaaaattagttaattaaattaaaaataaaattatatatttatatataaattatataaaattcatatataaatatatacaaaaatatatagtatatgctatatatacaaacataaatggtagaatatactatatatacaaacatataatgtatgctatataaagtatatactatattaaaaatataaatatagtataatttttgtcatcttttttagtgtgtttaatagaatgagaccctaaaaaaattggaagtgctgcatttctgtcttctcctgagaggccctatagcatattattgaagtaatatcattatttaatacatatartaaataacaaccttgcataatggg

SEQ ID NO: 858186 - DNA, 655 bp, Homo sapiens
gtgttatcttttctatacttagctagatttaatttgctaagttttagtcataaatgagattgactaaaatctttctgcgatattccttgtcaggaatggttttcaaaataytggaattacttgctacttaaatgtatggtggaacttgacagtaaaacagtttgggccagatgttttctttgaggaaagaaattttactaactgatttagtttctgatttatttaggttttctatttcttcttgagtcagttttgttatgtttttagttacatatacgtatttctgttgaatacatatgcaggaggggaatttctggatcataaggcaggcatatgttcagctttagtagatactatcaaacagttttcaaaaatggtgtatcaatttaaaaatttatgccacaatcaggagtgtatgagggttctaattagtccacatattttccaaaacaaggtgttttctgtttttgtttttttagttaagctcttctggtgggtatgtagtaacatcatattgtttaaatttgcatttccttatagactaatgaggtggggcaccatttcatatattaattggccatttgggtatcttattttgtgagaagccccttcaggtcttaaaaatgtgaaaaaattgggttgttttaaaaattaa

SEQ ID NO: 858187 - DNA, 538 bp, Homo sapiens
gctcactaactgaggtgctccagctctactgcctggacacagtaggtgtacggccttagccttctttctctaaagagactttaagtctcatcaactggatgggacagtggaacaagtctttggtcagacagtgagggagggtgaaggggtgatagctccttgtgatttctctcagctcaggaaacctgtggccaagatggaggactctagtccatgggacagcctggcctcctcaccatgaccagccagctccatggagagactctggatggtttattcagttgttcaatcgtgtatccacccattccttcaaaaatacactgactgcatgtattagttattactattgaaatgtaggtgtgcaagggtctgtaatgagcattgagggaggcatatattatcgccattttgcagatcccaaagctggcactcagagaagccaggtgacttcctcatatctwgtggctatttaaaagggtaggctcagagttctgactcgagtttgcttctccctaaagctcaggctcttaaaacacac

SEQ ID NO: 858188 - DNA, 656 bp, Homo sapiens
agctaattttttttgtatttttagtatagacggggtatcaccgtgttagtcaggatggtctygatctcctgacctcgtgatccacctgtctcggcctcccaaagtgctgagattacaggcatgagccaccgcgcctggcctctggaataatttttaatggagattcaacatctaagaaactttcatattggatcaagacatagttgtcacaattcttagtgtgtaaattcattaaaagtcccttctggcttttgcagccaatttaatcatcttatgcttaatagaatgcaagttatacaggtaaagtcagtcagagaggggatggggatgctatttgagatgaagttcctagaagtaataagattttttttgtcttaaaacagtgatgataggatgattaagtgatctaagatggacaaatatgtgtgagttcttaataattgggaaagatcttttttaaaaagtgttaatgtgaccatttagttaccataactggaaactagatagcattaggggccatttgtatatgtaaaaatatcaggaagtataccggcaaattatatctttgggttgtgggatgttttcttttattatgattgtgtttttcagatcttcagcgttaagcgtataatgttttggaaatactgaaaagcaat

SEQ ID NO: 858189 - DNA, 637 bp, Homo sapiens
cataatcaggctctactcacgaccctctgtgactgtgggacaggaacctccctgtgcacagccttcctcatctacaaaatggggatagtatgatctacttcttaggaatctccagaattaaatagaaagttcttagccccgtgcctgacacacactcaagctaggcagctggtatacgtgaaagacatggaaaaatgaagagtaagttggagccggcttgtgttacatttcaactgcacagctctactgctgagaccgtgttcagttttctcaattccaggtgtttagaaatatcaatctgttttggttttacccacaggatttaaaatagaatggaacagtatcacatgttaattgacaagaattagaaagagaatgtatataaatattaaaagttcaacatggtatggtaatattttatacatattttacatgtattaaaagttttcgttaaaatggagatttacgtcattgtattgtagttgtcttcattacagtctttaaatataaatgtcagaaatgwactctctgtactactttttaaatccaatagcttaattttcacttttatgtagtgtggagtccaatactaaagtaagttttttttgttgccactctattaaaaggttaaatgttc

SEQ ID NO: 858190 - DNA, 571 bp, Homo sapiens
catcaggaatgtatattccgacttcaccatttggctacacatctgcatatttgttttcaagcttgtgtgcagtgaattttaaagtctcaatttatatttctagttgaatatactgtgtactgctctttgccctgccattttgataagttgatgaaaaccagctctatgcctaagtaccccaaagcttctgtttataatgaggtaaaattgtgtcaaaaataggctctactaaagttttgcatagaagattttatgtaattatataatagttcttccttgggtccaaaggctctaaaatgaccctttgccctttacaattttggccctatttctgaggatgtttttgaagtctgcattttttgaaacctcatagtttcattgcctgaaaatgatacaatgaaagtactttgtattaagatatgtaaatccattcctacctccaaagtttctttgaaaaatgcaaaaaaaagagttcttacttcraaatgcttcatattcatgaaagcagttttaatgcaaaatactttattctgttagctattagttctttgatcaatgaaaattgtttctt

SEQ ID NO: 858191 - DNA, 469 bp, Homo sapiens
aatccggttttatacataattgaatttctctagaaactggagttttaggagttataagtcctcccttcccagtgactaaatggatccttttttttttttttttttttttttttgagacagtcttgctctgtcacctaggctggaatgcagtggtgtgatctcagctcactgcaacctccgcctcctggattcaactgattctcctgcctcagcctcccaaataactgggcttacaggcacctaccaccatgcctggctaattttttgtatttttagtagagatggggtttcaccacgtcggccaggctggtctcgaactccttacctcaagttatccacccacctcggcctcccaaagtgctgggattaaggyatgagccaccgcacccggcctacatttttttttttaaaggtttagcctggtgattttatagctcatctaggttgtaaggaatagcaatgaatccta

SEQ ID NO: 858192 - DNA, 616 bp, Homo sapiens
tgctttcttgtcattgcagcacttgtaggacgtgtgtggttcctcacactcctaacacatatgggacytgcctcgtgaattttctggcagtaaataatggctgctgcttctccaggcctttccgaacaccatgtgtttataggttcagagctgggcctccctgtcttggctggattcgagtccttgctgttcagtaccctggcttctcatcaactccagctgtgtggccacggtgattggggggaggtgggagtggcctcaagtcccagcgagggctcgagttcaaaggtcttcagtgctccgcatggaccacgctcctctgggcctggtaggaagccccttctccaggagagacagccagtcatgtcctcaaaggtcatggtccctgtgccaaggtcattatcttccccgcccttattggaacctcaggcttgggacctcctgggaagcaattcctggaccagtcacttggtcagtctagtcattgtcaacattaaaccctcaaagttagaggtgaacctacattgtctagtataaccattcaagggatagaactgaaatacaaaatgccaaattgagagatgaaaaaaaaagagagggggtgaaatataggaaa

SEQ ID NO: 858193 - DNA, 616 bp, Homo sapiens
tgctttcttgtcattgcagcacttgtaggacgtgtgtggttcctcacactcctaacacatatgggacttgcctcrtgaattttctggcagtaaataatggctgctgcttctccaggcctttccgaacaccatgtgtttataggttcagagctgggcctccctgtcttggctggattcgagtccttgctgttcagtaccctggcttctcatcaactccagctgtgtggccacggtgattggggggaggtgggagtggcctcaagtcccagcgagggctcgagttcaaaggtcttcagtgctccgcatggaccacgctcctctgggcctggtaggaagccccttctccaggagagacagccagtcatgtcctcaaaggtcatggtccctgtgccaaggtcattatcttccccgcccttattggaacctcaggcttgggacctcctgggaagcaattcctggaccagtcacttggtcagtctagtcattgtcaacattaaaccctcaaagttagaggtgaacctacattgtctagtataaccattcaagggatagaactgaaatacaaaatgccaaattgagagatgaaaaaaaaagagagggggtgaaatataggaaa

SEQ ID NO: 858194 - DNA, 493 bp, Homo sapiens
acttatggctcgcctcacccccatcctgtgcctataaagaccccaggctcagctggtagagaggggaaatggctggacattggggagaggygaattggcttctgagccactgctgaatgtcatagagaggcaacctggcctcggaggagaaaggaagagagacaacctgacttcgggggacagtgaccttcccctcccatcccctttccagctccccctctgctgagggcctctttcatcactcaataaaattgtccgcattaatcatccttccatttgtctaggtaaccttattcttccagtgtaccagacaagaattcaggacccaacaagtgcgggtaccccaaaaggctgttataatgcccctttgccctcactggcagagggaagccactgcactccatgaggcaaagggcccgctgaactgataacacactgttgtctgctgacagcagacctaagagagcattgtaacatgccctctgaggccttt

SEQ ID NO: 858195 - DNA, 643 bp, Homo sapiens
tcctctgctcattctgccctgaaaactgtattattttgatccctctaacatttaatacattgtaacatatttaatatctgctatagtaaattctccaaattgctgtcacattttcttttactagtcacacagattaatttttctacatgatctataattttttatgaagtttgaaaataaatcagatggacttatttttaacacctaagttaagcatatcatcctggagaaatatggacgagagagaatgtactttaaacacagatcatataatggcaagttatatctcattttttagtttctgagaaaacctagcacccccaaaattaattctttagttgatacagtttggatatttgtcccctttaagtcttttgttgaaatttaatccccagtgttggaggtggggcctggtgggagatgttcgagtcatggggacagaccctttgtgaatggcttggtgcctcctcaaggtaatgagtgaattctcacttgatgagttcttgcaagaactgattgttaaaaagagcctagcctctctctmtatatatatatctctctctggcctgggcccctttcctctctttctctctgtctgtctttctcttcctgccatgtggtctctatatgtagactccccttc

SEQ ID NO: 858196 - DNA, 621 bp, Homo sapiens
aataaataaataaaatgcaaatagtttttatactgtgttggttcttcaacttgtagttttcaattgttttattacttttttatcattttgkttcttttggttgaatctgtggatacagagcacaaactgtactgttttttcctatacatgcatacctatgacaaagcttaatttatgaattaggcacggtaagagattaacaacaataatcataaaatagaataattataacaatatgttggataataaaagttatgttaatgtggtctctctagcaaagtatcttattttaccatacctgcacttcttgttatgttgcgttgataaaatgcctacctgattggattgagcaaggtgaacggcccaggcattgtgacgtagtgttaggtcagaaggaggattatctgcgtcaggtgattctggatcatccagccgtgagcatgttcaagtttcaatgtcaggagcagacaatgtcaatgaacaatggcaggctgcagaaacagggtggatacgccggacaaagatgattcccatcataggcaggacagagcaaggtggcgtgagatttcatcatgctactcagagtgctgcacacttccaaacttatgtattgcttatttc

SEQ ID NO: 858197 - DNA, 621 bp, Homo sapiens
aataaataaataaaatgcaaatagtttttatactgtgttggttcttcaacttgtagttttcaattgttttattacttttttatcattttgtttyttttggttgaatctgtggatacagagcacaaactgtactgttttttcctatacatgcatacctatgacaaagcttaatttatgaattaggcacggtaagagattaacaacaataatcataaaatagaataattataacaatatgttggataataaaagttatgttaatgtggtctctctagcaaagtatcttattttaccatacctgcacttcttgttatgttgcgttgataaaatgcctacctgattggattgagcaaggtgaacggcccaggcattgtgacgtagtgttaggtcagaaggaggattatctgcgtcaggtgattctggatcatccagccgtgagcatgttcaagtttcaatgtcaggagcagacaatgtcaatgaacaatggcaggctgcagaaacagggtggatacgccggacaaagatgattcccatcataggcaggacagagcaaggtggcgtgagatttcatcatgctactcagagtgctgcacacttccaaacttatgtattgcttatttc

SEQ ID NO: 858198 - DNA, 621 bp, Homo sapiens
aataaataaataaaatgcaaatagtttttatactgtgttggttcttcaacttgtagttttcaattgttttattacttttttatcattttgtttcttttggttgaatctgtggatacagagcacaaactgtactgttttttcctatacatgcatacctatgacaaagcttaatttatgaattaggcacggtaagagattaacaacaataatcataaaatagaataattataacaatatgttggataataaaagttatgttaatgtggtctctctagcaaagtatcttattttaccatacctgcacttcttgttatgttgcgttgataaaatgcctacctgattggattgagcaaggtgaacggcccaggcattgtgacgtagtgttaggtcagaaggaggattatctgcgtcaggtgattctggatcatccagccgtgagcatgttcaagtttcaatgtcaggagcagacaatgtcaatgaacaatggcaggctgcagaaacagggtggatacgcyggacaaagatgattcccatcataggcaggacagagcaaggtggcgtgagatttcatcatgctactcagagtgctgcacacttccaaacttatgtattgcttatttc

SEQ ID NO: 858199 - DNA, 602 bp, Homo sapiens
gttttgcagttgacatgatcctcgtttaaactaaagcaactcttacaaaatgaaatagtattgaagactatactaaggcacttcaccagccacrttaacaagcaaaaaaagaaaagaaaaagatggttttatcagatctgacaagagttaagcactatttgaaataagaattcatatccaccactattaaccatgagccttgtcctcagggagtgttgtgcaatgtgatgctgactgctaacagtgtgaggctgagaccatggtcaacgctcttaccaagaaatcacctaaaacttgaagacaaactttggtgaagtcatcggtaattaaaaaatttcaccagcattagagtaccattggaagcttttcgttggtttcctactcaatagtgaaaaacaaataaccacgtgtcaacattgtaattctctcatttggatctgttcttaaattctaagcagtgtgtattttatggtgtacttaatctcttagtagagtaatgcatataaaatttgtgaataaacaagatgctttgggggctgtgtgctcacattttttactagtaagtatgcctagtcaatcacacgtggaaacaaccatgcaag

SEQ ID NO: 858200 - DNA, 640 bp, Homo sapiens
tttaaatggaaacatgtaatacgtggtcttctgtgactgcctgctttcrcttatgacgtttaaaagttcatccatatttgcgacttgtggtacctcattcctttttattgccaaataatattccattgtatgaatatactgcattttgtttatgtattcatcaattgatgggcatctgggttgtttctacttccttgctattagaaaaatgctgctgttactgatcatgtacgagtttttatatggacatacattttcttttcttttggatatatacctagaagggaagttgctggagatatggtaacactattttaaggtatgccactctttaaaagtggctgtaccaatttccctttctgccaataatgaatgagatttacaatttacctatgttcttgacagcacccgttattcttttcttgtttgttttaaattttagcaatatttgtaggtgtgaagggacatctcataattttgatttatatttccctaacgactaatgatgctgatcttcttttcaagagtttattgggccatttgtataacttccttggaaaaatgtctattcagattctttgcccattttttaattgggttatttgtcttctccttgttaagttgtaaatgttctttatat

SEQ ID NO: 858201 - DNA, 308 bp, Homo sapiens
aactaaataataatatttctatgatgatgatggtatctgagcattcactrgaaatctaataaacttcttatttaataagcatagttgagttccagtcataattatcaagatcataaagccagctgaggtaactatgaatctttatatgatgataaatattattcaaatagatttacatgccatgaattgaaatgagtgctaccatctcaacagctagaaacatattttgctgcctgaaactgcctctaatctgagctacagcaaactttcctccatgcaacagccagactatttttagtaaaggaagc

SEQ ID NO: 858202 - DNA, 269 bp, Homo sapiens
aattctgggagatacaattcaagttgagatttgggtggggacacagccaaaccatatcatctcccaagctataaaatgacttatttgaaattttaaaaggaggactccaaggaagtgttcaaatattcacgtacctaaactgaaacatgtgtttatatttttgaaaaatagcctgagyacttgacaactaatgttatatattgagttaccatttctgaaactttaattttatgaaagctccttctcctaatttgttaaacggggcatgg

SEQ ID NO: 858203 - DNA, 269 bp, Homo sapiens
aattctgggagatacaattcaagttgagatttgggtggggacacagccaaaccatatcatctcccaagctataaaatgacttatttgaaattttaaaaggaggactccaaggaagtgttcaaatattcacgtacctaaactgaaacatgtgtttatatttttgaaaaatagcctgagtacttgacaactaatgttatatattgagttaccatttctgaaactttaattttatgaaagctcyttctcctaatttgttaaacggggcatgg

SEQ ID NO: 858204 - DNA, 524 bp, Homo sapiens
tcttgtaacaaaatcttaacttggtggtgttttcataattagtaaatgtagttactgatttcctacccaccagataggaaaatgtccaccatcctgacatgayggtgacatctgtccgacatcggcctctgaaggaaagagatacagttagcaaggatttcactgtagttcatggtaaaacagtaaataaaaaatgcttatttatttgacatgtattttttaaaactgtgtctgaaaagtgaacaaaacaacaaatacttttatgataaatggactttgttactttgtaaacttgtagccttggacatatctcagcatctccaagcctcagtctctccatctgtaaaaaaggctgtggcactgcccaccttgttttgtttataggtcactagggatgaggtgtacatatggtattaactatggcttctggcaagtggcatatattcgttacaccattgctctttttagaaagctaagtcatcatgtgcatgtcgcgtgtaatctgctgaaataaggatggacta

SEQ ID NO: 858205 - DNA, 493 bp, Homo sapiens
gtttatattagtaaaaaatggaaaactatcaagaggtacaaccataggttctgaatgtttggcagttctataaaatgaaacactatggatccattgaagatgatgttgagaatattatttaatggcatggaaasacaccacatgacaaaattcaattccaaattactgagtagtttgtgatcttactctataaaaaataactaaccatatatatccccgtttatgcatgtgcatacataaagaagaatattaaaatgcagatgcaagatttaatagcagtttcttcttgtgatgggattgtgacttatttttatttcgaatatttggtttatatgaactttctagaatgaatatgtattactatttaagataagaaagaaattcttcaactgctaagcatatctaatatactggatcccaaggtctggaaatgtggctgcttggagactgtaactcagcactcccgcctagtgggccccggagtgacttcatt

SEQ ID NO: 858206 - DNA, 654 bp, Homo sapiens
agatgctgttagcagggataaaggatagggaagaaaggtgaatattgcttacttattgagagacaaccccaagctggagccttaacaataccatgatagtgtttttgtctcccttgcgctaataggaattgtgcttctcagtagaatcttacatattcctctgattgatgtatttattaatactcttttaaaaatttaaaactgggcatggtggctcatgcctgtaatcctagaactttgggagggcgaggtgggcagatcacttgaggtcaggagttcgaaaccagcctgaccaacatggtgaaaccccatctctactaaaaatacacacacaaaaaattagctgggtgtggtggcacacgcctgtaatcccagctacttgggagggaggcagagtcaggagaatagcttgaatccgggaggtgggggttgcagtgagctgaggtagcaccattgcactccaggctgggcaacagagggagactgtgtctcaaacaaacagacaaataaacaaacaaaaaaatgtaagtagtgggaccaagtctgagaagccagagcagtaaggagaaggaacatgtggatgygtgtgtttgtttttctgcttccttcttcctacccccacacagaggctgtagaaagggatgtggaaaccat

SEQ ID NO: 858207 - DNA, 645 bp, Homo sapiens
gtgtgtgtgtgtgtatggtttttttttggaaatatttttactatagtaataattctacaaaatatayattttttttatttttttaaggcagggtgtcattctgtagcccaggctgaagtgcagtgacaccatgttagctcactgcagccttgacctcccaggctcaagcaattctcccacctcagcctcctagctattcctagctggaggtacaggcatgtgccaccatattcagctatttttttgtttattttttgtagagatgaagtctcactgtgctgcccaggctgatctcgaactcctgagctcaagctcaacttgtctcagcctcccaaactgctgggatgacaggcatgagccactgtgcccagcatcgttttactattgtgagcatgctaggctccttcccagttgtgtatgcattgtgaaatacccttcacggtgtttcggaatacatctcagtgttattctaggatttgaaaactgttaaagggaggcttgtcttgattgtttcattattttctcacaaactactagtgttgagtccatgagatttcccccaatatttattgttaacattattgatagatggcatcttgataggtttttaatattcttctgtttctttaggaccaccaccccact

SEQ ID NO: 858208 - DNA, 645 bp, Homo sapiens
gtgtgtgtgtgtgtatggtttttttttggaaatatttttactatagtaataattctacaaaatatacattttttttatttttttaaggcagggtgtcattctgtagcccaggctgaagtgcagtgacaccatgttagctcactgcagccttgacctcccaggctcaagcaattctcccacctcagcctcctagctattcctagctggaggtacaggcatgtgccaccatattcagctatttttttgtttattttttgtagagatgaagtctcactgtgctgcccaggctgatctcgaactcctgagctcaagctcaacttgtctcagcctcccaaactgctgggatgacaggcatgagccactgtgcccagcatcgttttactattgtgagcatgctaggctccttcccagttgtgtatgcattgtgaaatacccttcacggtgtttcggaatacatctcagtgttattctaggatttgaaaactgttaaagggaggcttgtcttgattgtttyattattttctcacaaactactagtgttgagtccatgagatttcccccaatatttattgttaacattattgatagatggcatcttgataggtttttaatattcttctgtttctttaggaccaccaccccact

SEQ ID NO: 858209 - DNA, 619 bp, Homo sapiens
cccctgctggtcatcctagagactgagtggcccatgtgctcgtggcctgtgggccctgggcggcctctcagtttcctgcatggaaggcagcagaagcacttatcyggccctcagctcctcggtggtgtcagtttgtctgacctctgtcagtttgttgtcttcttttttttttttttttaagacagagtctcgctctgttgcctaggctggagtgcagtggcacaatcttggctcactgcaagctccgcctctcgggttcaagcgattcacctgccacagcctcctgagtagctgagactacaggcgcatgccaccatgcctggctaatttttgtagtttttgtagagacggggttttgctgtgttgcccaggctggtcttgaactcctgggctcaggtgatccacccatctcagcctcccactgtgctgggattacaggcgtgagtcactgctcccagccttgtttgtcttctgtgttaccaaagtagaaaacttcttctgttctgtaaccttggttcaatcaaagttccaaattcataaatggcacttatattattatgacgattgctgaaagtcatgccacagtttaatttgctttatacttggatttggtatactt

SEQ ID NO: 858210 - DNA, 563 bp, Homo sapiens
ttacttgcgtttcctagacgggggggcactcgcgccaagcaggcccacrgggcacactggtgtcagtcaaggggcagaaaggagccacaggaaagcccaggacagagcctgagtggggtttctgtgggaaaggcagggcagggcacccgtgtaggaatggctagtgtgaacagttccagtgggccctgggctgtaggagagatcactagctgcctgctaccaggccctggggtgatttcgggcaggcgggcagttagataagggaggtgggtagagccgaccacctgcctggaaccctgtgctggctataagccctgggagggccagtctctccctgtgtctgtaaggcccacaaatgccaaagcattaggaataagaaaatggacgtaatagaattgatcctgtgaggactggatgcctaactgccacatacagaatgtgagaaagcacagaacaactgccttcattgacaagatggtgcccagagctcaagacaggcacacagcaggaggatgccggcaggatccctcaacaagcttaccgtggtatctttcacaatgtta

SEQ ID NO: 858211 - DNA, 639 bp, Homo sapiens
aacaagtctgagaggaaacaggatccatatgtacttatttttaataaaacaaataaatttaacaaaatctgaaacccttccaaaaggaatgttcagaaatgttttgttgttacttctgtcatatgattggctttcttagttttaaagtgttcaaagcaaaatgacaaattgcaatacatgagcaccttctgactctattcctactctttcctcttcaaagtagacatggaagttactgctctcagattatagacaggaaaactgagaagcagagtggttaagtgacttgcttttctgaggtctaacagaaggttgctcccatgatatatatcaatctcctcacaagctgccataaatataattaataataaaaacattctgtgatgtagatagttggcatttctgtcaaatttatgtaaagtgtgaacaaaaatatcttaagaatttattatttcgttcacctataacatattatctaagtgaaagtggtgtgcaaactcagtataaagaacttaccctttcttttaaccaaaaatttttactccggaggccctcctgtgtagcattctggagcaacratttatgaccacccatggccctagatttctatagaactggagactttccgttgtctttctg

SEQ ID NO: 858212 - DNA, 578 bp, Homo sapiens
agcaattcttccaaaagcagtcgtgtcctgtgaaaaccaagaatttttcaaacaatacccagagcactttccattagtcagactagctcttgatagagacccagatatgcaatgaaatggaaaacgtgaagcacagacccaagaaaaaccatcaacaatgcttctcttttatttttcaggaggtagagagagagcctttcaactacaatgaacaattctaagtacaggaagcatggatgctccaagccttgtatagacatctttactttagtctattcacttggaaaattttcctcaggcaagtcaagaggaatctgctacttgaaacaaactaaaagaaaacgggctatttatttaaaaaaaactataaaactcatcaagagatgcagttaagaaactaagcaagccacaggctgtgagaaaatattcacaatgcaggcctaaaaaaagtatttgtatacagaatacacaaaaaagtacgaytcaaaaagttaaatacaaataggcaaaatatttatacagtcacttcactaaagaatgcatataaatggtcaataagcacataacaatgtgtccaa

SEQ ID NO: 858213 - DNA, 654 bp, Homo sapiens
gactcacactctactgtatgtatggaccacattttctttatccgttcatccatccatggcattggcttgtttctaccttttgactacgatgaataatgctgttatgaacacgtgtgtacaaatacctgaggcttctttgcagatttcctggctgagtccactgaggttccttagatactgccccatctcttacttgagccaaatatgaggaagataagaaattgattaataatctggcaaagtttagaattaagtcacagctaggcacattggcccacgcctgtaattccagcacttggagaggctgaggcaagaggatagtgcatgcttataatgccagctactcaggaggctgaggcgggaggaccttcaggagcccaggagtttgaggctgcagcgagtgcctcaagcctgggcgctgcactccagcctgggcgacagaacgagaccctgtctctaaaaaataatgaaaattttaaaaatgagaattaagttactagttcaggtatgggttctgggctgtagttaaatggtaagtttttctatcactcccaactcttgctcctgaaaactccctcctcaaagtatattccgcaggaaggggygcatgcgtgtctcgtacagtgccaggctcctagcccctgggactctggc

SEQ ID NO: 858214 - DNA, 619 bp, Homo sapiens
tcacatatttattaactactctggttttacttctggtgcacttctcattcaggttttgcctacttaaaacttttttcttgcaattgcaagtgtcccttagattttttacattttaatcttcagtcctggttctgcaaaatattttcttccagcccatctcctgtctgttacctttcatctagggtgtttacttttgatgttgttaaatccattaatttttcctttgagatttacactttttgtgccctgcttgaatcagttagcttttgctatgtaacaaaccacaccaaagcatagtggcttaagccaacaaggattcattgctgtgggattaattgcttctgaacggggcctgatgggcgggggctggatgatctggggggcctcactcacatcatggccccagctgggatggctgggcctcttactccacacggcctttcaccctccaacagggcagcccagggttccgcacacggcggctccgggattccagcgcaggaragggcaagcctggtggacctgagctttccaggcctctccttcttcacatttgttaatgcccagtggaccaaaacaagccacatggccacacccaaactcaaggagtcaaataaaa

SEQ ID NO: 858215 - DNA, 310 bp, Homo sapiens
gcacagaacacaaagaaacgattacgaccttyattgacctctattgacctggtcctaaatcccattagatggccttaaaaatacattctctgattgagcagccataaaagaaaaagtatacatactttcaatgtaaggataagatccattgagtatacacaaaataattcaaaaaaggttaattttaggacatcaagcaaataaatcagataacgtaaaaattatcttgccataaaacacacagatactctgtttaaaatatcacaaggattattttaaatgtgtatctgagctcacaagaaaataatga

SEQ ID NO: 858216 - DNA, 310 bp, Homo sapiens
gcacagaacacaaagaaacgattacgaccttcattgacctctattgacctggtcctaaatcccattagatggccttaaaaatacattctctgattgagcagccataaaagaaaaagtatacatactttcaatgtaaggataagatccattgagtatacacaaaataattcaaaaaaggttaattttaggacatcaagcaaataaatcagataacgtaaaaattatcttgccataaaacacacagatactctgtttaaaayatcacaaggattattttaaatgtgtatctgagctcacaagaaaataatga

SEQ ID NO: 858217 - DNA, 626 bp, Homo sapiens
acatgaatctttcatgaaatttgattgcattaaaattaatttttccctttatagtatctattttgactattttaaaaactgatttcctaatctacccccaaggtctyaaatatattcttttgtattttttctttagctttatagttttgtatatactgtgtttttccatttatatacagaatttacttcataatgcatcttattcctactgatttatgatgcctctttattacaaaactaatatattgtttcccactggcttaatagtctattcttgcaccaattactacctatttattgatccatctctatctattcatctatccatctgtctattctatcaactatctttaattgtttggcttcgtaatatctgctaaagcaagttattcattttctttttctaaactgtcctgctgactgattctgtgttcttacttataattgtgggaagagcctatgaaattgcaaattttactcaattctgtttttggaatgacatgatataaatagagtagtctgagtgacaattgatgtgttttaaccatttaatggtttcatccttgaacatagcataactttctactcagttttaaaaatctttaatagagttattttttcctgca

SEQ ID NO: 858218 - DNA, 646 bp, Homo sapiens
atttgataatttggtacattcagataataatatcagggtaattgggatatccatcactttaaatatttatctgtcttttttttactctaggaacatttaaattgttctcttctaactatttggaaatgtgtaattgattaatgttaactataatcactctctaagctatcaaataccaggttgtatttcttttacttaagtatatatttgtacctatcaatcaacctctctttacctaccctttcccctactgttcccagcctctggttattgccagtcttctctatcttcatgagatctacttttcatctgtcgctctgtcttttgattggagtatttaatccatttacatttaatgcaattactgctaagtagaattacatttcatgcaattactcctaagcaggaattaagtctgcaagtttgttatttatatccatatgtcttttgccctttctgtttctctatttctccattactgttatctttgtattaattagatattttctaatatgccatttgaagtccataagactgctggtttccacagctcctctgatttttatactgttggttctcaaggctactgtagagctagayagtgatgggaataggccaagacagaacaccacaaacctcattgtcc

SEQ ID NO: 858219 - DNA, 631 bp, Homo sapiens
agattgtggaataaacttgtatttcccagtactctctacattataatcctacttagggaatcggctagtatttgcataaaatgtagtggtatatcatactatacgtctgttctattctttttatgataaatttcttcttgtaaggggaatgacattagcaataatttatttctagttgaggaagatataatacttttcttcgtacagtctttttggttcttcattcctgtattaaaacataaacaacaaaaactgtaaaaatacatttgaggaatcaatgctacatcattctaaaaatgaattagtttagtcaatataataaagtccataaaacattctctggtgaaaagaaattgtagctggagctttggtattaagtgttagaaaaaagttacaacaggacacaattcatgctatacaatagttgaatgagtcattttgacttagtaaacagatgtgttccttacctgtatccttgaaaactttttttgggtaaatgtttggagcttttgtaattttagaggcgtcatcttgagtttaaaaatctcctttttcttttttcaatttattatgraagtctagttttgttgtccttgcatatttttataaatatgattaactatgtccttcc

SEQ ID NO: 858220 - DNA, 530 bp, Homo sapiens
aatttcacttgtttgtggtgcatgatgtttttatacattgttggattcacttttgtaaatattttgtaaggacttttgcacttatgtttatgagaggtattagtctagctttcttttattgtrggtatttggttttgattgtagggtaactctagactcaaaaatttagttagaaaatatttcttctgcatctgtttacaggtagagtttaatacttggaacaatttcttattgaactattttgaataatttataagtaaaataatctggatttggtaatacttttttttggaaaggcaatgttatttcaatttattttatatacaaacatataattactcaagttatccatttatcttgtgtgagttttggtagttttacattttcctttcaagaaagtaatctatttcatccaaattatttaaattattgacatgtgtttttagtagtattttctcgttatccttttaatgtccttgagatcagtagagattattgatatggtttggctgtgtcctcacccaaatctc

SEQ ID NO: 858221 - DNA, 530 bp, Homo sapiens
aatttcacttgtttgtggtgcatgatgtttttatacattgttggattcacttttgtaaatattttgtaaggacttttgcacttatgtttatgagaggtattagtctagctttcttttattgtakgtatttggttttgattgtagggtaactctagactcaaaaatttagttagaaaatatttcttctgcatctgtttacaggtagagtttaatacttggaacaatttcttattgaactattttgaataatttataagtaaaataatctggatttggtaatacttttttttggaaaggcaatgttatttcaatttattttatatacaaacatataattactcaagttatccatttatcttgtgtgagttttggtagttttacattttcctttcaagaaagtaatctatttcatccaaattatttaaattattgacatgtgtttttagtagtattttctcgttatccttttaatgtccttgagatcagtagagattattgatatggtttggctgtgtcctcacccaaatctc

SEQ ID NO: 858222 - DNA, 620 bp, Homo sapiens
tgagtctattccttctgtcataatttcaatagtcctattaaatacataggaggtctgagaatttattgcaactctgtgcatatttatttccagtcccatacttaacatacttacaarttaagtctaataaccgtgtcttagtgaatttcctaaaacttgttatgtgaatgagattgtgcatttaaaaagaaaaatattttttcccctagagtttttgaagggctgcaaaaatatatatctaaatagcagagcttgcaaaaaggtgtttatttagaaaatgacaaaccctacacataatgcaaaaccttagcatgaaagtttgcttgctacttctacaagtgatatttaatctatacattctcacatagagcaaataaatgtcacactgattagttctcctgtttaaacattgggataggttaacttacaagttgctcttgaccttagtgcaaaacatgatatttctttaaagcatatggactatttgaattcaaatatcatcgaggtatcagaatataaccttagcagtaatttcataaactgacctccagatggaaatctaataggaaatttctttgaaagcatagatgtatcatagataagaatataggccctctggg

SEQ ID NO: 858223 - DNA, 665 bp, Homo sapiens
aagaatataggccctctggggtccagaaaaaagtttcattaatcaaaaaaaacaagctaaagactctaagtaacgcaccttgtgcttaacactaaaatgtacacaagttcatatgagaatggagattgaatgagttcctaacttagaggagaccctatgaaaggtgggcagtttctggaaatccttggtagactggggatgagactcagagtaagtatttctttaacttgaatatgagggtagtgcattgcaccaagatggcaaattgaagaaatattttctacgaaagttgaaatcaaaatttggttagaaatttaaatatctagtctcaaaatgaaggttcaatactgctaggcaaagaactagaatccagttataaagcaacactactgagattagagatagacaaaagggaatgctcgaagaaagaaataagtggaaaatagacctgtaaatgtttagtttcttgtcaaagaatgacttgtgtgactaagcagttgagaaatcatttaacatttatgaaaacatcttaggctgagcaagttgtaaataaaatattaataaagaatccaacrtgttgctagttgtcacactctaattctctctctctctcttttagtttcttttgaaacaaggtcttgctctgtcgcccaggctgcagtgca

SEQ ID NO: 858224 - DNA, 640 bp, Homo sapiens
gctattgtctgcttaacttacactttatattattgttgttttcatttttcaataaattaagtggagctccaaaatgctggagcctgtccagggctgcatagagagttagtgaaatagcaggtgtagactcacagtcagctgtcccagaagtactgttgttcacatctcaacatgccatccttcatgtggtctggcattgcagatggagaatcttccagtggagattgaatgcatgtattatatatgaacagcgcgtctgtattctgcgggagtgttagcaaaataaccctatttccttcacataaacaaattatccgggatagtcactaagagtatctgatgattacagcatatattccaggaggtgcttgagagcaaaaatatgctcttaaagaaaattactttttaaaatgtcagtgtgattatctctgtctttaaatatgggtacctatgcctaaaaatgaatacatatatttattcttgaatgtttttcttctattttcccagttgttttatacaaacttaaacttcagagatatctttaaccttctcctgcccaccctttttctcactaaccagcgttatttcaygctttgcatttctgcctcagcagtatgactcactttaatcatcttttaaa

SEQ ID NO: 858225 - DNA, 602 bp, Homo sapiens
aaattgttaaatccaagaccgcagttaggtatacgatgagtcagtcagtgactgtactctaaaaagtgtctgcagtctctctgtgaagtccaactcacccacacctgcactatagggaggtgtagatgatggcatacacctgggctgagggacttggacaggctgttgtcactgcatcatgctggagccacgcaacaaccagaacagagaccataaactcatggagcttaatactaggagggatcttggggaatccccagcctcagccattccttttacagctgagacaagaaatgttgggagaaattaagtcacttgcctgagatcaaacagagagccaaatgagagacacaaaccaaattctgggttcctgtcttaggcatttctttactcaggtatccaccaaacatgcaattgtatcttttttttaatcccattttctagcataattaaatacagttgaacattcaattaatayatttttcttctaaacatgtgcaattctctaagtgaacgatatacagtcttgtgttacttaacaacagggatacgttctgagaaatgtgttgttaggtgattttgttcctgtgcaaacattatag

SEQ ID NO: 858226 - DNA, 491 bp, Homo sapiens
gaggtgggaggatcactcgagctttggaggtcaggctgcagtgagctgagatcacaccactgctctccagcctgggggacaaagtgagaccctttctcaaaacaaacaaaacaaacaaacaaacaaacaaaaaaccttagaaaaaaaatttttttttaagtaaaacaagaaaatgtctacacaaaaatttggacatggccgggcacggtggctcccctgtaatcccagcactttgggaggctgaggcaggcagatcacgaggtcgggagatagagaccatcctgaccaacatggtgaaaccctctctctactaaaaatacaaaaattagttgggtttggtggtgcacgcctgtaatcctagctacctgggaggctgaggcaggagaatgacttgaacccaggaggcggagattgcrgagagccaagatcgtgccagttcactccagcctgggcaacagagcaagactctgtctaaaaaaaaaaaaacaggt

SEQ ID NO: 858227 - DNA, 491 bp, Homo sapiens
gaggtgggaggatcactcgagctttggaggtcaggctgcagtgagctgagatcacaccactgctctccagcctgggggacaaagtgagaccctttctcaaaacaaacaaaacaaacaaacaaacaaacaaaaaaccttagaaaaaaaatttttttttaagtaaaacaagaaaatgtctacacaaaaatttggacatggccgggcacggtggctcccctgtaatcccagcactttgggaggctgaggcaggcagatcacgaggtcgggagatagagaccatcctgaccaacatggtgaaaccctctctctactaaaaatacaaaaattagttgggtttggtggtgcacgcctgtaatcctagctacctgggaggctgaggcaggagaatgacttgaacccaggaggcggagattgcggagagccaagatcgygccagttcactccagcctgggcaacagagcaagactctgtctaaaaaaaaaaaaacaggt

SEQ ID NO: 858228 - DNA, 561 bp, Homo sapiens
cagtaatgtttaaggttccaatcaacatgaaggatctgaaaacagggaggttctgcattcacctattttctttttaagtaaaatacccttggtgtgtgaatcaacatctctgcagccatcagctattgattctttgctagagaccactccaagcccctggagatcaatgagaataggcaggctcaaaaatgaagaaaaagattaatcatccctgctcagaagagccaggaaatggcatacaaaactctaggtggtagcagaactctgaggagagaagatggagggagaagaagaaaagccaggggaatacacaatttcacagaatttccaggacttctaagaaagtgcagaacaaatatcacatagaatctctggcctgctccaaaggaatcacctgatcctgcgatggccagctggcatcgtcccatcagaagaacaacaggacaaggctagtagctatacatgtgaggtgagtatcaatagggggstgcagagactttacagggcaaatgtacaaaggcagaaagtgggcacttcagggtgaacacgcctgatggaaca

SEQ ID NO: 858229 - DNA, 424 bp, Homo sapiens
tggatcccttgaggtcaggagtttgagtccagcctggcaaaaatgatgaaaccccgcctctactacaaatacaaaaattagccgggtgtggtggcacactcctgtaatcccagctactctggaggctgagacagaagaatcacttgaacctgggaggcagaggttgcagtgagcagagatggccccactgcactccagcctgggcaacagagtgagactccgtctcaaaaatgaaataaaacaaaaaaataaggatacagaaatcttccttttcttgatgagcctgaagacctaccagtgatattatcctggtttcagacccaatgtctgttgaaggggtggagggccacttytttgcctacaaggggaagaggatcacatcaatgactcaggatttctttaaacccaagagccattatgggtc

SEQ ID NO: 858230 - DNA, 530 bp, Homo sapiens
tggtgtgatctcagttcactgcaacctctacttcccaggctcaagcgattctcgtgtctcagcctcctgagtggctgggattacagacatgtgccaccacacctggttaatttttgtatttttagtagagacaggttttcaccatgttggccagactggtctcgaacccctggcctcaagtgatccacccccctcagactcccaaagtgctgagattacaggcatgagacaccatgcctggcctacattctgtaattctgtcctggggtctaaggcggttgtcactttaagccttgttaattcccctacccatccctcaccctaccataccccacactcttatcccataacctcagagaaataaaaatcccaaatttctttgagtgataatacatgcaactacatgggtgtattattcattcttaaamttacattttcttttgttcagcatttattgagtgcttactagattccaggcctttgggagtaaataaataaaaaggaatggtcattgctctaaaaaaaaaaaa

SEQ ID NO: 858231 - DNA, 600 bp, Homo sapiens
atactccttgcccctgtccctatgttatacagttaaatctaagtctaagccaatgcaaagctgtgaaccatgggccactcccttccaatggacttctactcgtggggtacactttgtctgagcatggacttgccagcctttccccacgagccccaaatttccctgaattgcaacaggccctgaaacatttgtaacactaaatctgaggctgattattccatgatgatactcagaattttctagggcatgacagactttatgaagcgtttgaacagctccatgtcccacaggaagaaagacaatttccaggctgtgccaggatggagtgtggggagcatccgacagtttttctgaagggaacaattctgttgattggaacagtattttgcaaaagcctacttagttttcataggttgcagctttttaaaatctcctaacatcagttttatatttatccttgttgtcgctttttttaagtggaactaataatcaagccttttagggcragtttattgttttggatacaactgttccccatccaactccacacaactaccttcccactgttaggtgggaagaaaagttttcagttcctttcat

SEQ ID NO: 858232 - DNA, 595 bp, Homo sapiens
ttaaaaatgattactgacagtgatgtctgtgtgtgctaactgatgagaacatcacaagccgcagacaggaacccaggagtcctgatgtgtggtgcaatctcctcaccctctggagaaagtccyattggaggaggaatgggtggcacatgaatcagttacccgggacagagtgctttccatggtgtgcccttttatgcggcaaaaattatgcttctggagttgtaacgtaagttgagtcatttggactcctgggggtgaaggctacaagtactcagtggattctgtgaaattattctgagatcaccactaccaatgatggcctggagaagaaggagggaaaattaggggccttatcatactctgcaccatgtcctccctgctgggaaatgggctgtcgcagaggcccagaagacccaaatagacctacatctgtgactcagagcttgccttggccttgctgtgatggcttaatttgcctgctgaagtgttggtgccgtaccctctgtgagtgagtcaagccccttaatagacgacatccaaagcccccgagaaatccagtccactttgccaaggaatcagcagtgactgcctctcc

SEQ ID NO: 858233 - DNA, 595 bp, Homo sapiens
ttaaaaatgattactgacagtgatgtctgtgtgtgctaactgatgagaacatcacaagccgcagacaggaacccaggagtcctgatgtgtggtgcaatctcctcaccctctggagaaagtcccattggaggaggaatgggtggcacatgaatcagttacccgggacagagtgctttccatggtgtgcccttttatgcggcaaaaattatgcttctggagttgtaacgtaagttgagtcatttggactcctgggggtgaaggctacaagtactcagtggattctgtgaaattattctgagatcaccactaccaatgatggcctggagaagaaggagggaaaattaggggccttatcatactctgcaccatgtcctccctgctgggaaatgggctgtcgcagaggcccagaagacccaaatagacctacatctgtgactcagagcttgccttggccttgctgtgatggcttaatttgcctgctgaagtgttggtgccgtaccctctgtgagtgagtcaagccccttaatagacgacatccaaagcccccgagaaatccastccactttgccaaggaatcagcagtgactgcctctcc

SEQ ID NO: 858234 - DNA, 629 bp, Homo sapiens
ttagttgcgtggtcaaaattatagacctgaaataggatcgtatgatataacaaaaatcaaaacaaaatctgtctcctgaaaatattcagtcatatttccttcaacattttcaatgcagtgaaatcagcagtagtttaactcctgagcaaaacaaatgtctatcagcaatattttccctatttaaaatccatgctttacaatttgtataaaaaatgagtttgaaagtcaagggaaaaaaatagaaagtaaattactttgaaatggttgggcatcttgagtggtgttttaaaattgaattattcttgtgtttggaaaacaaagaggattgtaatataaattgtttttctcccagaaatttctttcaggatttatggcaacaaccagtttatccatggccatacgtggcattgtgttaaataacacactactctcactttatgaattacaaaacacccatggaatgttaaataacctaaattcaatcgtgtatatcagtgaattactaaagtgcatttaaaaagctgyttgcctatgaaaacatgtaaaataagacatttaagaaaatgcaaattgttcaacttcatagaattcctacaaaagaagaaatagtttaatatcgagcagtaaca

SEQ ID NO: 858235 - DNA, 612 bp, Homo sapiens
gtatctaagtggtatgattaagaccacctttttgcattttgacgacacttgcattttgccaataatccttaaggctatttttatttcttaaagattatagtcatgtgagctaaaaaatattttaagtgcttatttttctttaatcaattagagctctttttgtagacattacgcataacacatatatagcaacacagaattcagaactagtatgatttttcatttgccagtttcttattgggattattggcttcagggcggagcccttggaggaacagggccaggaaggcatgcatttctagggcataaaaaacaggcacagctgaaggcaaagacagaccccccaaaaatattggtgccgttttataatggattttggatccccaaaaggagggagagcctatgggagaagagagtatggtaattttaccatgcatttcattgcaaggcaacccaaatccattcagcttattttgtaatcagcccaacccccacatgattcttatstcttgggggagtggggaagtttgtatgtttcaggtgaccaagagtatgcttctctgattcaaaagtgcaaagagttaactatccttccgtaactacgattagaca

SEQ ID NO: 858236 - DNA, 626 bp, Homo sapiens
aatttctatatctttacattttgcttctggttttttattggctattcttacctaatggtttttcccagatgacttttayaataattgtattaattttcctaagtatctactacacttataaacacccctccctgcagaactccttcccaaagacagagagcctgcttttctctttcacactggtatgtttttatgtttccacctagggtctcatctgttgcatgcaagctcagaattcacttgacatgctgatagcatataatgttaaagaattcttctctcagtgtaaaaaatatttagctactgtggaaggtcaaactgctaaaaccgactggtgtaacatttgaatgctgccctttatataagctttatttttataaataagcatctgactagaaagtcagtaaaagagcatgatataatcagtctgaagcccagtgttttaaatataatacactaattttagacccaagtattttagttttgctttattgtctacagtttcttaagaagatgtaacttaaaagaaaaaaaaaatcttttaaatggctcaatcaatttattagaaataagcggcaaagagcatctgttcccacagagcaactgttaagttaatccccattaag

SEQ ID NO: 858237 - DNA, 635 bp, Homo sapiens
ggccttactgattactttagtatcttaccaatcaattgcattccaaggcttgcttacttaggaggctgactgcttagtccaagaagaaacactggctgaactctttgacttattttgctggaggcagagaagataagtggttaagagtaaagacaatgaaaacatagtttaaacccagtccactggccagctccctcccagctggggataacagtaggtacctcacaggctgctgaaaagaaaaaattaagtgaaagcacttttcaacaaggcctggttcatagaatgagctacatacagtacctggtaattagtattactattgccacaaccaaggaggcctctcagcaaactatttttacatatgccagaaatacagttattttttccagactaataaatcacaaacaatatggcacggttgaccgccaggttactgatgcaatttcttttcactggaaccaaaaaacaaaaccaccaccaaatctgaactaagtataatacaataattctccctgtcttaaattttaaaatacagaagaaaagatgaattgctgtatactctaaacgctcttttaaatgtttggagtacmgaatgtctttcatgaaatcatcttgattaaaatgtacattct

SEQ ID NO: 858238 - DNA, 667 bp, Homo sapiens
atgagggagaaacctccctttttgactttgaataccactgctgagaattgtgcttctatttcactttgtggaatgcttgaagtgatttttacagaattctttttggaaatgttaatacttgtggaacaaatggcttattgttaaacttggagctggaagacctggatttgaatgcggatattgccagttactagcagtgtgacctcagtttcttcagtaaaacaggatattatcattgtctgacaaagttttttgggcctcagttaaaaaaatgttaagttaaagtcatttcggttcttgaaagtgccaagcaaatgtgaggcactattagtattttgtaaaaagccatttctttaaagggaagacaattcatgaagaaaaaattcaaatgaaagcaaagtaataaataaaattaccgtaagaactgatgagagaattctgattttgtagatggaaatttgtttttgaatttaatgaatatacatatatttactcctttaagtagttattttatgtttcaaaaagattcaaacattttaattgcaaaaagtctttgccttgctttaaaagcaagtttaatttcagggacaatacacctattmattacccaaaccattcctaagcagtaacagccttaagagcctattaatgtaagggggggtgttaa

SEQ ID NO: 858239 - DNA, 564 bp, Homo sapiens
tcttagtatcaaatactatatcttattcattctatctgattatatttttgtatgccttaagcatgctcacttcccgccactccccactatccttcccagtctctgttaaccatgattctacactctatcttcatgagttgaattgtattcatttttaactcccacaaataactgagaacatttatcagcagaattgattaagcagaagaaagaattagtgagcttaaagacaggctacttgaaaatacacagtcagaggagacaaaaaaaaaaaagaataaaaaagatgaagcatttctacaatagctagacaatatcttcaaaagggcaaatctaagagttatttctcttaaataaaaggtaaagagagatagagtagaaagtttactcaaagggttaatatcagagaatgtcccaaacctagagaatgatataaatattcaagtacgggaaggttatacaactygaagtagattgaacccaaataagactacctcaagatatttaatgatcatacccttgaaagtcaaggataaagaaaggatcctaaaagcggcaagagaa

SEQ ID NO: 858240 - DNA, 506 bp, Homo sapiens
atatctccaccatatacttttggaggattgagaaaatgtgtcatcgcttggaattcctaatcttattttattcattcaggttgaggaataatgtaagatattgctccactgtggctttatgaaattttttacttaaaaaaatccaaagcatgtaagtatttatctcatggcttaaatgttcatcactgtaaggagaagtttaagattggaatgtatctctagccttgctctctctccccctgagatctggctttatactttacagcagtaggtttgcaaatcaaaatgccagcttgacctagctgccagaaagtcctgaatatgaatcccacaacagaatttattaattttcctttacaagttggtaatttcttattttctcttaagtaaygctaatttcgggtacacccttgccatgagggaggttctaggtctccagtgttattgtcatacactggcatgtatactgtcatctctactggtattatataatgttgttgctggta

SEQ ID NO: 858241 - DNA, 612 bp, Homo sapiens
gtatctctcaacttcacttactttggtgcgatctaggcccttcatccaggcttcatctcttcaaaagagttcccagcatgttttcctgcttatgagttattccagtcacaaattcayccagccgtctcctatagaaacaggtgttcataaaaatcaaatgcagagagatgtcaaagatagaatacattaaaagaatataaacttacagcttattttcagaagatttaccttaatgggatgttaagctttgtttaggtatttaaataactggagtaaaattcaatgttatgcagacatttatcataagaatatcaataatcaaattaagtccctgaataataagagctacatgctcttattaagttaaattatggtcactcattcaatctgtttcccctcaccaacatgaaaatgggcttttcctgtttcatagaaaactgaacaatttatttcagtcattgatggagtaggtcagtgtttatcttcatgagttgatattaaatattctctaactataaaaattattagtgctactgtagcaaagaagcattccaagataaagagagggaaaatcccatagccaaattggagttaaagtagtaggatacagat

SEQ ID NO: 858242 - DNA, 512 bp, Homo sapiens
tatcaacatgtcaagttgactttctgtttctgtagccttgatccttcctttagaaacaggatagatcctttatactgactttagttacacttgattgaaagactaagcaatataatattttgagtatttcagtataggaatcacaaaacagagtctccctttcttaactagaacagggacacaggtatttataatcacatagagggaccatggtgaatattccctttgtgttcaaaagtgaggctttaaataagtggcagcttattcatttcagatgcattttattgcagtggaggaaggaggagaagcaagtgaagacaatgaaggtaagatggttaggaagcttcagatagcgttgtttctttatacttcaggggcagaggatgatggaagacgtaggatcygacgttggttctgccctttggaatttgtacgtaggctttagcttttcccaacaataagcacggcaatctgcaatttcttcacatctgagtggcagtgacttcactcat

SEQ ID NO: 858243 - DNA, 693 bp, Homo sapiens
tgagatcacatcacaaattattatatctycagacaatttctttttttgcagggactatgccatagtgtcagaagtcctgttttatgaggcaaataaaatacatttcactttgcattatttgactgttacagagacataacattctatctctatggcttcactctgtttaaaagcaagaaactttttataactgaaagaaaaaaaacaagtgcactttaattaaccaaagacataacctcttacaaatatactaaaatgtaatttgagaaccatttaagtcaaaaatcatctgcatttttcaaactttcacacaccaccacatgacaggaattttttgaaaaactacttatccataataaagattgctccaaatataagcaatacaatttattcaattttacagtattgcattttttcattctcatattttcatcctactaagaaattagggtttgacatttttggacgtgaaactctatcctccttttctgtggtgattatgttaagttcttctccctctctgcatttcacagagcatacaggagtgtggtcagagaaggggcttggaaagagcatatgtcaagttgtcagaaaatgtggttttcagtttccattttggcatcttagccatgtgacctcgagacaggcacctaacctctgtatgtctctaacaagagggtatcaacagttggt

SEQ ID NO: 858244 - DNA, 606 bp, Homo sapiens
cttttttatggacatatattaatataagtttatatgaccagtcctatgcrtctataacctgaggaaagtggagaggaactggaaatgtgagcagtttgagcatctagcactacatcagggaacattattatcttccattcaagctaccctggaggatctgtcttctcccttcttggcgcaaagctgacagaaaacagaagaatgcatgaaaatattgggaggtgttggatatgttaattaccttgattatgttgatactatcatgggtatttgcatgtgtacaaactcatcaaatggtatacattatacctcaataaagctgttaaataaatagaaatgaataactagatacatgtataaaaatggtgacacttgctttctcagctgaggtcttgctacatcagggaagagccctgctgccactgactctcattgccatggcaacacatgccctctcagggcttctctttcctactgctttgattcccagtgggaaggagaccccacaggcattctcttacactaaactgtcagctaccctaatcgccagccttttctcctcaatgttttaggaagttgctgtagttctgccataatttcctgtag

SEQ ID NO: 858245 - DNA, 638 bp, Homo sapiens
ttcccccaaccagaggaaaactgctatatttacttcttacaccataattcaatgttgacttttttgaatagcacaaaagtggaatcacactctatgttatcttttgtgtttggcttttttcctcaatattgtttgtgagattgattcttggcaaatgtgcggatattcatttgtttttcattgcttaatggtacttcattctgtgaatattccaaaatccatagctatttgcattgatgaatatttgcactattttcagtttggattcttgcaaataggactgcaatgaatatttaaggatgagaatagacacttcagcggtgttgtggtaaacattcctttacaggtctttaggtgtgcataagtacagaattctgttggttatataatgagttgcttaattgctgggtcacgaagcctgcatttgttgagctttagtagctactgccagttttccaaagtggttatatcaagttacatctccatcaacaggatatgatgatttctgttgctccacatcctatcctagccaacactyggtattgctagtttgtttacttttggtgagcataatgtgtacttcatgtgcatttccttggtattttgaggccaagaacctctttgtatgtttattggtc

SEQ ID NO: 858246 - DNA, 505 bp, Homo sapiens
gagatagtgactaaaaaaaggctacagtggatgaaaaactttttaagaaatccttatttttaaaaactaggtgttaaggttgcatgataaaagcagtttaaattacctttgcttggcatggttttttgaataaagagagctgttaaaatatggcattgagatataaagggcatcacttgagcaaaaatgtgaagcacagaaatatagtttattattaattgggttttactattagtatcttgcatttttctggctcaaagacagcaagatactacatttcaaaaggtttaaacttagctcaaaatagctttaaattgtagcaagaggagctgtgtaattcaaattttctctttgtacttgtctcatctttaagactaatggaattgattggtgaattattattaaaacatccttcaagtttgaggcatttcccagcgagttattcagaatgctgattgttwtccttttaccagctttcatttgtactttatgggtcagtgactaa

SEQ ID NO: 858247 - DNA, 633 bp, Homo sapiens
ctgtgtctcccaagcattctagcttaaactcttcttacttactatactttctaaagggtcctcttaggaatttgttgaatcatgtgttcacttctgagtgggttagtactataaaagaaaatttgttattattgtaaaatatttcagtcataatacaagacacaaaggctgttacaataacctctcatgtactcacagcccaatttaaagaaaattaatggaaaattcccatctcttagcccacttccatttgtgcagaggtaactattatcctctatttgatattttcattcttatatcgttcttgatacgttttctacacctgtgctgttatttttattactttaagtgtttgaataaatagtataacattcttttaaatttgcttttttcctttgctcaatatttgtgagaattatccaggtagatacaagaagcccatgtttagcgattccagtgccatatcgtgttcattttaaggttatatcacaatgtattaattgttctgtttataagacatttatgctattttgactatttcataaacatgctrcttaagaacatttttgtatatgtgttgttatgcatgtatctgagagtttcttaaaacatataattaggggtagaattact

SEQ ID NO: 858248 - DNA, 633 bp, Homo sapiens
ctgtgtctcccaagcattctagcttaaactcttcttacttactatactttctaaagggtcctcttaggaatttgttgaatcatgtgttcacttctgagtgggttagtactataaaagaaaatttgttattattgtaaaatatttcagtcataatacaagacacaaaggctgttacaataacctctcatgtactcacagcccaatttaaagaaaattaatggaaaattcccatctcttagcccacttccatttgtgcagaggtaactattatcctctatttgatattttcattcttatatcgttcttgatacgttttctacacctgtgctgttatttttattactttaagtgtttgaataaatagtataacattcttttaaatttgcttttttcctttgctcaatatttgtgagaattatccaggtagatacaagaagcccatgtttagcgattccagtgccatatcgtgttcattttaaggttatatcacaatgtattaattgttctgtttataagacatttatgctattttgactatttcataaacatgctgcttawgaacatttttgtatatgtgttgttatgcatgtatctgagagtttcttaaaacatataattaggggtagaattact

SEQ ID NO: 858249 - DNA, 625 bp, Homo sapiens
tattatgtcagtgcttaatatgcrttgtttgactctaggccaatccaccactaccttcattaaagcattagagtcaaaaacctttgtctcactggttttcacctctaattaacttcatttctgaaagtgctttgaaataaattttccattctgagggaaagaagccaaaacaaaaaaatccaacaaaacccacgaagtttcccacatgtgaggatttgtttgctgcttttatctatcgcaacattctctctaacaatctcgttcacaattgtggactactcagggttctccacagaaacagaatcaatagggtgtgtatgtgtgtgtggaggcagagagagagagaaagcctgagataaatttatcttaaggattagttcacatatttgtggggcctggcaagtcccatatttgcacgataggacatcaggttggagactcaagggaaagccgatgttgcagttgagtccagaggcagtctacaggcagaaatccctcttcctcagggaggttaagtctttttcttaagaccctcaactaatcggatgaggcccacccatgtaatggaggataatctgctttacttaaagtctgatttaaatgttaatcgcatctaaaattacct

SEQ ID NO: 858250 - DNA, 602 bp, Homo sapiens
gttttaaatttttgttcccccttgaggatgagactttaacatttataagctgttgtcatctacctttggctgtaggtgttttcagtggtgaagactttgtgtgagttttcagttgtagaaaatctttgtgtgatgaattgctctgatgaggatttagtaatgatatgctggatgtgtgagcagattcactgtctcctgtggggctgaagtggcagaggtctcaggaagcttatctcatttcccagtggtgtgcacttttataaatgttttccccactgttttactcactgggttgaacagttcaggctttgggccattaggaggtgcccatgaggaaaaactggccaaggataaagcagatgggtaagttcaataccccagtggtgaccagaggtcccagctggggaatctctcagtgaaatgcactgaggtcttttcagaaggaagggagaaagccaccatacctccccttcaggaaattcatcccagttacactcttgaccccatgttccagctactcagattagacaarcacctctttatctgcttcatgtagacagggatggtgactctacgtcttgtgcaagccaagcctgaatcaa

SEQ ID NO: 858251 - DNA, 578 bp, Homo sapiens
agggaagttctcctggataatatcctgaagcgtgttttccagcttgtttccattctcctcatctccttctggtactccaatcaattgtaggttcagtcttttcattgaagtcccttatttctgggaggctttattcattccttttcattctttttcttgtatgcataccttatttcagtaaggtggtcttcaaactctgatatcctctcttctgcttggttgattcagctattgatacttgggtatgtttcaggaagttcttgtgctgtgtttttcagctccatcaggtcatttatgttcctctgtaaactggctattctagttagcaattcctctaacctcttatcaaggttcttagcttctttgcattgggttagaacatgctcctttagctcatcacagttttttattacccatcttctgaagcctacttctgacagttcatccatctgttcttccattcaggcacccttgatggagagatgttgtgatcatttggagkagaagaggtcctctggccttttgagttctcagcatttttttctttgattctttcttatctttgtgagtttgtctag

SEQ ID NO: 858252 - DNA, 639 bp, Homo sapiens
aaagaacaaaggtgacattacaaccaagcccacggaaataaaaaaatattcccagagactattaygaacacctctatgcacacaaactagaaaatctagaggaaatggacaaatttctggaaatatacaaccttccaagactgaggcagggagaaattgaaactctgaacagaccaatataaagttacaaaattgaatcaatagtttaaaaaaaaaaaccttccaatcaaaaagagccctagaccagatggatttcagctgaattctaccagatttacaaagaacaggtagcaatcctactgaaactattccaaaaaaccgaggaagagagacttctccccaacttattcagtgaagccagaatcacattgataccaaaatcgggcaaagacaaaacaaaaaagagaaaggcacaggccagtagtccctgattaacatagatgaaaaatcttcaagaaaatactagctgactaaatcctgcagcacatcaaaagttaattcattgtgatgaagtaggcttgattcctcagagctggttcaatatgtgcaaataaataaatgtgattcaccacacaaacagaattttaaaaaaatattatcatgtaaatagatgtaagaaaacttttgataaaatccaat

SEQ ID NO: 858253 - DNA, 529 bp, Homo sapiens
taattcattgtgatgaagtaggcttgattcctcagagctggttcaatatgtgcaaataaataaatgtgattcaccacacaaacagaattttaaaaaaatattatcatgtaaatagatgtaagaaaacttttgataaaatccaataccactttatgataaaaaccctcaacaaattaggcatcataggaacatacctcaaaatagtaagagcttgtataacattccacaaccaacatcatagtgaaagggcaaaagatggaagaattttatgtaagaattggaacaagtcaaagatacttgctctttccagtcatattcaacagagtactggaagtccttgccagatcgttcaggcaaaagatagaaaaaaaggtaccctgatagaaaaagtagaagtcaaaagatctctcttcactgatgacataattctatatctagaaaatcccaaatactccactaaaagacctctagaactgataaatgrcttcagtagggttttaggatccaaagtaaatgcagaaaaatcagt

SEQ ID NO: 858254 - DNA, 546 bp, Homo sapiens
atatatatttttacagttaagattgtatcttaacatcacctttctcaagctctaaaatattatagtcttcctcaaaactatttggtctctccatgttaaatacattcttctggtaaataaggtaagaactggaagtaagttcacataaagctgataaatatcagttggttacagtctcacccctggcaagtagggaaatggaaactgtagcttcttgatcaatgtaattatctcctacccatgatgttggggtcattgcaagttgcttatgtggtcagtggaagaaaacatacagtttcttttttcagactctccatacactattacatacctctctcatacacacctttcctagtcagggactaacaggtggaagagcagttatctgtgttacactcctagacctgggttcaagtaaatacattacaggtttttctcactttatttgacttaggaggtgttgctcttcctacrtctctgcttcttactcttttaaatcaagctggaaagaggaagtgacaatgcactgtcacttactggctgaat

SEQ ID NO: 858255 - DNA, 638 bp, Homo sapiens
tttttatttattttaaaaattattaggtctgtcttacaatgataaagtcatcgcatcttagcagctttgattcagagataggaagcaaccaggcaaaaaagttttgacataatataagaacaagaaacttaaaaaggaaaaagaaatattaaaaaatataagaactctaattcaatttatatttaaattttgtaatctaaaatataaaaattaagaatatataatccatggctcaaataatacccatctgggcttcaatatattccacgaatcaaatttagatattgtttgtcttgagcagagcgttttttcaccagaataccttttttagttgaaaaagcaaaggcaaatgaaaactatagaagttctaattgctaataaagaaatgccatctgaaaattacagataattttattttaaaattttatttcaatagttttgggggtacaggtggtgtttgggtacatggatacattctttaatggtgatttctaagattttggtgyacccgtcaccggagcagggtccactgtacccaatatgtaggttttcatccctcacccccctcccactcctcctcagtgagtccccagagtccattatatcattcttatgccgttgcatcctcatagcttagc

SEQ ID NO: 858256 - DNA, 568 bp, Homo sapiens
aagcatatgtcaccatctatcatggaggcttgataaggtttggctgtgtccccacccaaaccacaccttgaattgtaataatcctcacatgtcaagggcagggccaggtagagataattgaatcatgggggtggtttcccccatactgttctcctggtagtgaataagtctcaccttgatctgatggttttataaatgggagttcccctgcacaagctctcttgcttgctgccatgtaagacatgtcttgcttccccttcaccgtccacaatgattgtgaggcctccccagccatgtggaacagggagtccattaagcctctttttctttataaattacccagtcttatgtatgtcttcatatgggagattttaaggacagcttgtggtaaatattctctcaggtaagaactttgcaatacttgtacattgtgagtaaygtgagaaaataagaaaggagaacattaaatatgaggtatacttactgcttggattatgtttcctgtttgtgttactacatttcaaccataacataattcaacatttagatttcacatcttatttgtttc

SEQ ID NO: 858257 - DNA, 530 bp, Homo sapiens
tataatcaccctgtgctactacacagtattatggtagaatagaaagagatattactgagtctgcagatctgagagtacttaacaatgaacctgatgggagtttaacaggtgaatttaattccagcacagaggggacagtccgctagaagtatatttaattcaaaaaaaaaaaaaaaaaaaaggcgggggaaacagatgtagttgcatgaaagaaaataaagtgtaataaaaatagtgtggttggggcataaggtgactttgaggtgacagaagggtacaagtagataaaggtcaaaagacagtttgactgtgaggctatgatccggaatttggacttgtcctgttaataacaggttcatctctgaatgcttgaaagcagaggcattatcccagtatctgtggacttagcaagatagctctgacagtgttatcaaaaattacaaaattttatrtgagaattcataaaatgaagtctacgtctctttaaaatattaatttgtgagggtttttttgtgggggaggtgttctct

SEQ ID NO: 858258 - DNA, 427 bp, Homo sapiens
gacataatgtctttgaatatatttcctgtaaattggagcagygataactgtcagggttgtttagagataacatgtgcattactgaaacctgtgcctggcctagaatagatgagctctaaattgtagcagttattattattgttatcctcccatttctatattttctcttgcttcttgaaggaaatgtaaactatatacgtggtgacatgtgctaatgataaacttgcacacaagtctttttgatcattacatggcttgccatttacattttgtcttagtctgttcaggctgctgtaacagaatgccacagactaggtggcttataaacaacataaatgtatttctgacagttctggaagcagggaagtctaagatcaagatgctggcagatttggtgtttggtgagaatccattttttggttcatag

SEQ ID NO: 858259 - DNA, 427 bp, Homo sapiens
gacataatgtctttgaatatatttcctgtaaattggagcagtgataactgtcagggttgtttagagataacatgtgcattactgaaacctgtgcctggcctagaatagatgagctctaaattgtagcagttatyattattgttatcctcccatttctatattttctcttgcttcttgaaggaaatgtaaactatatacgtggtgacatgtgctaatgataaacttgcacacaagtctttttgatcattacatggcttgccatttacattttgtcttagtctgttcaggctgctgtaacagaatgccacagactaggtggcttataaacaacataaatgtatttctgacagttctggaagcagggaagtctaagatcaagatgctggcagatttggtgtttggtgagaatccattttttggttcatag

SEQ ID NO: 858260 - DNA, 616 bp, Homo sapiens
gttacaaggtcaagttgaaatgcttgttacaattaagtcaaagtgccacataggtaggtgatgtacatttctgaagttcaggcaagaggttgttattaatgagggtctcattggtggaytgcatttaagacatgggacatgagataaatgagattagccggagaaagagagtacagacagagaaaagacactgggacactgagcccctcagaatttagggttcctactggaatgcttttagagataaaattactactgcttcaattttttcaacttttattaatggctgtaatcctaacaactcatagtacagttatttcatactccatatgtataaaatccaaattattaactttttaatacttgtattagatgcctcgttcttatccttcagttttcatctatatttatttgcttttcatggcaaaggaatttcttcttggccatgaatggcaaggcagaatgaaaaatattggaaattataataagatggtgcttggcaccaaactttcttttactcatgacataattcagtgactacattttttcctgatagagaaaatacccaaaaaccaaatacggcttcaaaatatgtaaaaatattctttctcttatg

SEQ ID NO: 858261 - DNA, 575 bp, Homo sapiens
gaacttggccctgcgtagggcgtcaatcacatgctccttgttctgcagcttggtgaggatcgacatgataacttggccaatacaaaycccggccacagtgccctggggctttccaaaggcacctcgcatgcctatttgagcctgtcagccccagcacaggacaacgtcttgttgatgcggatgacgtggaaggagtggagccacacccggatatggaagccatctttgccacagctttttaccatgtacttattggcacaaattcgggcagcctccagggcttcagaggacagctgctcaaattcatctgacaccatgtggccataaagcggaaactcatccacttttaccttcttccgccccaggtcaaagatgcgaatcttgacatcaaggacaccttggcagaagcgagactttgggtacggcttgttcttacaataccggtaacaacccgcggggcggcggcccatggcgacaccaggatcttcagtagtgctctcaagggaaagagagcatgaattcttattaatataataatttatgtactttacctcaatttatttttattttttatg

SEQ ID NO: 858262 - DNA, 588 bp, Homo sapiens
atatgtgtctgatactggcattagacagatattcatatgccattatgttttgtagtaatgtaaccaagatctaaaacaggaagtaggaaaacaacccatatggtctgcmtgaaatatgcttcttccggccaggcgcggtggctgacacctgtaatcccagcacttttggaggccgaggtgtgtggataatgaggtcaggagttcgagaccagtttggccaatatggtgaaatcccatctctactaaatacaacaattagcagggcatggtggcacgtgcctgtagtcccagctactcgggagactaaggcagaagaaccacttgaacccgggaggaggaggttacaatgagccaagattgtgccactgtactctagcctgggcaacaaagcgagactccatctcaagaaaaaataaaaaaaaaaataaaagaaatatgttttttccaaaagcctcactgctgatgattatggagaattcttaaacagtgactgacaacccaactgggacttctcactaaccgttgctggaaagtttcatttcacccccaaaagtagactgcagtagcttagcactggattatacataa

SEQ ID NO: 858263 - DNA, 618 bp, Homo sapiens
gatagcaggtctaaatcttgaatgtcaaatttagttgttgttgttgtttaatttgctttgttttaaagttattaaaaaattatctaaccagcagcagcagtacagattacacatagccccaacttacctgggtctttgcgcatttctttcaattacacaagagtattttaaccacattattggttaccataattttacttgaaaaaatatgcaactagttagcatataaaagatctgtttttatggcagtttataattatatctactcaaaacaagtcattcagagaaacagtaattcaaacttactctaaaatgttcacaaagcatttattccattaaatatttataatatttaatatataatacaaacagtccccaacttataatattggcttagaatttttcaactttatgatggtgcaaaagtgataagcattcattagattccatacaatcattctgtttatcactttcagtaaagtattcaatatgttatatgagctattgcacacttaattataaaataggcttactgttwgatgattttgcccaatcataagctaatgtagatgttctgggtatgtttaaggtaggctagtgtagataagctatgatatt

SEQ ID NO: 858264 - DNA, 570 bp, Homo sapiens
tggccctgcgtagggcgtcaatcacatgctccttgttctgcagcttggtgaggatcgacatgataacttggccaatacaaaycccggccacagtgccctggggctttccaaaggcacctcgcatgcctatttgagcctgtcagccccagcacaggacaacgtcttgttgatgcggatgacgtggaaggagtggagccacacccggatatggaagccatctttgccacagctttttaccatgtacttattggcacaaattcgggcagcctccagggcttcagaggacagctgctcaaattcatctgacaccatgtggccataaagcggaaactcatccacttttaccttcttccgccccaggtcaaagatgcgaatcttgacatcaaggacaccttggcagaagcgagactttgggtacggcttgttcttacaataccggtaacaacccgcggggcggcggcccatggcgacaccaggatcttcagtagtgctctcaagggaaagagagcatgaattcttattaatataataatttatgtactttacctcaatttatttttattttttatg

SEQ ID NO: 858265 - DNA, 630 bp, Homo sapiens
aagatcctacaattatgtgcttccccacggtcgagatgtcagggattagactcataaaaggcaaatcttagccaattggatgaatatcaagaatagagtacaattcccaaattagagagtctataaaataccgtctatttaccacctttttttaccctccgtgatcttatagcctatttgcctctttttctagattgccttacttaattctctggcgggaatgaggcagatagataaaagaaaagcaattgatatgcatgaatttaatctcacaaacggagtattttgtttatcaaagcagaaaagatacccttagggataactttattcacaataccatgagtaaagtaaatttcaagacaacatttgagggtaaataaactattctaaaaggtctgtcaagaaccattatccttgaaaatgttagcaataaataacataggtttcaaggaagttctacaatagggtaaagcaaatatgttaaactaattttcattttggtaaagaaataatattttgagaaatatkaatgtaacttgggtttgaaaaatgctgtatcaaatgtgagatttttttaatctcatggacagtaaaatgctattctctgaaacagatgaaaatatgcttttt

SEQ ID NO: 858266 - DNA, 549 bp, Homo sapiens
acatatacccacatattacacatatatctatatacatagatatagacmtacaaatataaagactaaataaatttcttacactgtgttagatcatcttatcataaagccatagagtgtggggaagaaaacagtctacatgtctatgtatttggctggtggagatcctcttttgcaggtttcatttattcctgttcaataaaatcttgtctgtagtgtatgctgggattacattttttccctccctccctcccttgcttgcttcctctctccatccttccctctcctctttccttccttctttctctcccttctttcttttttcttcctccttccctcctttcttccttccctcccattttcttatctcctttttccttttcttccctttttcctttcctttccttttttctttccttcctctcctgtcttcccttcctttccttccctccttccttcctccctttcttccttcttccttccctctcccccacctttcttccttctctctgtctttctttcttcagaccctgatcactgagatataatcac

SEQ ID NO: 858267 - DNA, 575 bp, Homo sapiens
tggtttgctcctgtgcctggatatgtcactcgaggaggctggagaacagcaaagatgggtgcctgctccttcctctgggatctctaaamtcaaggcgtatcaacctgaggccagtaggaacgctcccatgtagggtgtctgacaaaccctgttggagggtctcacccagttgggtggcatagggagtaggacccatttaacaaagcacttgagctgtccctttttggagggggtgtgctacgttggggagaaatccacttgtctgggctgcctggattcctcagaagtaccaggaggaaagactaaatctactggtccatggggactatggccaccccttcccctagaagctaaggtccaggcagatcagagttctgtccctgagaccctggctggagttgttggagttcctgcagggaggcgccaccaagtgagaaggtatgggtcaggatcaggcctgaagaggcactctggccacagtctgccacagccagtgtgttgggctgtggggaataccttttgggactaagccgtccagcctccctggctccagcatgggcaaagcacagcctgga

SEQ ID NO: 858268 - DNA, 501 bp, Homo sapiens
gctgctacctttcccccaccctaggagcttagtgtgttaggcagctggcagtcccagtgttggctaccaccccttccctaaggagttcaaatggcttagacagcaggcagccttagctgtggtgctggctgcccctacccccaggtacttggcaagcttaagcagattctagctgagtggatgttgagaatctgtgcatctctgtggttgggaccctaggccctggtggcaggggcttacaagtgggatcttccgatccgtgggttgcacagtccacagagaaagcatggtttcctaggctgggtagcacgctcactcaccgcctcctttgactgggggatggaggctcccctgcccagtgtggctctcaggtgggcggcctcaacacactgctcttcyttcctctctgtgggtcatgccagccacctagtcagttccgatgacagcgcctggatccccagttgacgatgcaggattcgcatgctgttatggttctttttg

SEQ ID NO: 858269 - DNA, 498 bp, Homo sapiens
attagagcttataatgggttaattacagttattttaaattccttmtctgataatttcaatatcagtgtcatatctgtgtctgtttctgatgtttgccttgtgtcttcagactgtggggtttttttcttgccttttatcatgcttttattttttgtttaaatctggacctcatgtattgggtaataggaactgagataaatagtcctttagtgaaatggtttatggtgatctggctaaaaattgagctttgtttattgtgtgccataggcgtaggtaccagaagcttcaaatttctttagtctgtttgattttgtcttccctgttgtctctgagatttgctaagaactcatccttagataaagttttgtcatgcagcaattttgtctgtaatccactattggtaacctggatccttgctggtattggggtaaggtgtgagggagggtaagttttccataatatcatgattaaatctcagtattttaactagtatctcac

SEQ ID NO: 858270 - DNA, 617 bp, Homo sapiens
aattctcccagtgaaagatatttcatgaaatcatgaagaattctttacactgttactttgtaagctctaattttaraaggatcctcttataaagaaccaatttctaccttccttttcattttaactgatggctggcagtgctattgtcagcaattatgcagccctttagtattagcttcttcattctaagtgacagctcaaacaacattaaaaaccatcatctctttccataactgccttgagctcaccaacactttcacacatttatcacagccacctgttcatgaaacacaacatttagtttttttccttcagtgtatagtgtgtttgtagttcttttagctaatctgaatatgctatttcccttgccctgattttatgccatcatgattatctcataaaagactttttctgtgccagttgtatcatggtcctacaatcaattaacagaatgtcaaaaaagtaacttcatttctttgtattcctaaatagtctcctgatataaaacaggaaattaaatgaccaagttatatttctttttctgctaaaatatataaagcaaagcagggagacaatgacttgactgaactgtctcaaactttgtgctctttttatgt

SEQ ID NO: 858271 - DNA, 617 bp, Homo sapiens
aattctcccagtgaaagatatttcatgaaatcatgaagaattctttacactgttactttgtaagctctaattttagaaggatcctcttataaaraaccaatttctaccttccttttcattttaactgatggctggcagtgctattgtcagcaattatgcagccctttagtattagcttcttcattctaagtgacagctcaaacaacattaaaaaccatcatctctttccataactgccttgagctcaccaacactttcacacatttatcacagccacctgttcatgaaacacaacatttagtttttttccttcagtgtatagtgtgtttgtagttcttttagctaatctgaatatgctatttcccttgccctgattttatgccatcatgattatctcataaaagactttttctgtgccagttgtatcatggtcctacaatcaattaacagaatgtcaaaaaagtaacttcatttctttgtattcctaaatagtctcctgatataaaacaggaaattaaatgaccaagttatatttctttttctgctaaaatatataaagcaaagcagggagacaatgacttgactgaactgtctcaaactttgtgctctttttatgt

SEQ ID NO: 858272 - DNA, 673 bp, Homo sapiens
agactaataacagactgattcatctgactcagaaatatttgaataggacatctaaaaagggccttgcaaggtatgtwttatgtgtattgatgaagatggatggagttttcatgaaagttacacgcaaatgcacagaccagccaaggtgaataatgaaagaaataaaaattagcagagatggacagaatagaaaccaaacacgactcatttatttacttctctttaaagtgccaaagcacatacttaatttttttttttttttttgaactggagtctcactctgtcacccaggctgcagtgcagtggcgcagtctaggctcactgcaacctccacctccccggttcaagaaattctcctgcctcagcctcccaagtagctgggattcaagcaattctcctgcctcagcctcccaagtagctgggattcaagcaattctcctgccaaagcctcccaagtagctggcaccagccaccacacctggttaaatttttttgtatttttagtaaagacggggttttaccatattggccatgctggtcttgaactcctgaccttgtgatctgcctgccttggcctcccgaagtgttgggattacaggcatgagccaccatgcccaaccacataattaatttttatcacagatttcacagattttaaactcctcaagttaca

SEQ ID NO: 858273 - DNA, 609 bp, Homo sapiens
ggtagatccactgacaacgtgcaccatgcacctggaaaaactgcagacactcaatgccagctcatgaaagcagccagaaggggagctgtaccctgtaaagacacaggggcagagctgcctaaggtcatgggcgcctacctcttgcatcagtgagacctcgatgtgagacatggagaaaaaaggatcattttggagctttaagatttgactgctctgctggattttggatttctatggggcctgtagccccttcattttgccaatttttcccatctggaatagctgtatttacacaatgcctgtatctccattgtatctaggaagtaactaacttgcttttgattttacaggctcataggcagaagggacttgccttgtcttagatgagactttggactgtggacttttgagttaatgctgaaatgagttaagattttggaggactgttgggaaagcatgattggttttgaaatgtgaggatgagatttgggaggggccaygggtggaatattatttgctgtgtccccactcaaatctcatccagaattttagctctcacaatccccatgtgttgtgggaggggcccagtgggaagtaattgaatcttag

SEQ ID NO: 858274 - DNA, 643 bp, Homo sapiens
caataaacatactgtaagaaggtgtttggaaaaataggagaaagggattgaagttgtttctgcaaaatgtgagcatattaagtaatcgttttatacagaaaatgatttacaagcaatgctagttgtgtaaagwttgcaaaatgtttccactttataactgtcaccaaacaaggggggaagtttcctttaagtaagaatttgaatagctttttgactttaaaattgagagttcagcaaaggtatgtttctttatgaaatcagcagacaattattgatcatcaactgtgacggagaacacaacatttgaagtttcttgctcttctacgatctagatgctttagttgactgcaaaagccaacataacagctgttttgtttttatttcattattcactgtgaccacttccagaagcattagcatggccaaagtaaaatcggaaaatcccactctgggaacgtgaagatggatgaaaagggatgacttgggtcatcccgtttttacgtttaagcacgtcaaaaatttattcctatgacgttctgcaaaatacctgcccagtaccctctgaactataaaggtcatcagaaacaacaaaaatcttagaaactgtcacagccaaggggatcctaaggagatatgacaacta

SEQ ID NO: 858275 - DNA, 528 bp, Homo sapiens
attctgtgggaagtctgtgttgttcctctgtgtgtctcacctgggctcacccatgcgtcacagtcacacagaagctagacaaggctgggaggtccaagggagcctcactcttcaaactacatttccataaggaacacttgggtttcattagcactgatttccaaaagtaagaatgtcaacctaaaaggaagaagctggctattttttttttttcagagggaaaatggtgggtaagaagcaggactaatgtgcagtttccacttggatggatagaacagcatgtggagactcacattgtgagctttttctccaagaaccaccacaggaacataccaggaaaaccaaaagaattcacagaccctttgaacaaagtggcttgtcactgcaaacactgtgagacagccaaaaaactgtgagcacccgaaatgtaagaggggaaagcatctccaaacacacatcctcactggggmacccaaaaatccagatcagaggggaaggatttaacagtatctagagctgaaataaatt

SEQ ID NO: 858276 - DNA, 571 bp, Homo sapiens
gcaaaggtgctcaaagaggctaagtaactggcttttttttttttttaatggagtcttgttctgtcacccaggctggagtgcaagggcacratctggcctcactacaacctccacttccccggttcaaagggattctcccacctcagcctcccaagtagctgggactacaggtgcgcaccattatgcccagctaatttttatattttttgtagagccagaattttgccgtgttggccgggctggtctcgaacttctagcctcaagtgatccacccgccttggtctcgctaatgctgggattacaggtgtgattcaacatgcctggccccacatgctttttaaagcagcttggctgggatttgaatgcatgagtttctgacaacacaggtcaagaaacatctcccaccataccctctttaagaggccaccagcacttctgttagaagttgcagcagagaaaggatcctttaggcacatctcccagatccttgcgaagaggggcaaagggaacttggaggaggccaagctcctgggagaagaactgtatctaaatgcagatgtcctattgttgc

SEQ ID NO: 858277 - DNA, 656 bp, Homo sapiens
tctcagccaagctttttctggggggaatttggatgagtcagtttatcgtttggtgcggttacttccttaactatggtggggaaatccaactaatcttatacgtatgtgtgttttacaacgatttgataccacgctctgggcaaggcactgggtggttattggacgataaggtgattgtatggggcttccttgaaagcctagtgaccttcattcaagcatttcattttagttcatttcaacaagcattacctggagcgtctgttacacagatgtcctgaagcccaggatgagtaagacaccatccctgccccgaaaattgaaatctgtcataaataattattcttggaacaggagttgccaatgtgaatgcctagggaacaagacggtgatgctgtaagtccagaaggcagtgaacaggaaaagggttatttatgtgagcacaaaaagcaaggcgctcattaacccagctgtctaaacaagggcatctccaagtcgacttccgtgagaccttatcactaaaataaaagctggcgaactttggaggaattaaagcactcccttctagaatcaaactgctgcccagcctctcagggttttccacactttcatatgcgtgaaaacccccrgcacgcttggtgtaaaatgctgattccctg

SEQ ID NO: 858278 - DNA, 647 bp, Homo sapiens
attccatgagttaatactaatgaagtgcttcatgcttagcataaaatgagtgctatataactttccattaaataagaggaattataaagctgataaacatttaacaacctgctgaaggaaaagagggctgtcttgattcgcaggtttgccttcggtaagtattcccaggctaccaacatgaagcccaccacggagccaagtagagtggggccggcttcagtacaccatcgctttcctgtgtcctaagcagaactggttgctgaatcattaaactataaaaccccaacagcctgccatgaatgaaaatgagtatatggctttttagtctcgagaaacctcacccaacaggttacaacaaacatgcaccaatcatttatttactcttcaattacagataaaaatacaagaaccaggtcatgttgtagctttgggactttttctaggattaaaactaaagttcacaccttcctgggtataaggaaaggaaagtgactaatgtacaggtgggaaggatcaccatttaaaatgtatcaaaaacgtttaagccttttagccacatcttaacagaccttgcctatgtctgctttgygaagagagaggatcctcaggcttgacaacacaataaatcccgcattcttgtctcataa

SEQ ID NO: 858279 - DNA, 660 bp, Homo sapiens
agcagaggaatgacaaagacctgaattacatttccaaaggattgctctggctctgttgttgagattagacaacagagggtaggttatgggggaagctgcgggccagcttgcagtccactgtaatgacccagatgagagaggatggtggctgggaccagggtggtagcaacggaggtaaaggcagagtcattagaatttctagtggacagactgcaggagaaaacagaaggtgtggagttaagtattctgccaaaataactggaagggcatccttaggagagatggggtttgacagaaaaaccaggagttcagattttttaaagaattcagttttgatatcctacacgtgagcagcaacctgttcatcaatgtaccctttatgagcctccatctccgccttactgtccctacttcctttcttgtgcttcctgggatcagttcccaaataaacgtctacctctgaatccttgtcttggggtctacttttgggggaatccaaactaagacacaaacagaactcgaagcacaggtaamggctaaccacttcacactaaaacctcccttccaagggcttgtcctggccctttagtgtgaagactaaaccaaggggagttttctacatccctggacctgaagcaaatggtattccacagaccgtat

SEQ ID NO: 858280 - DNA, 582 bp, Homo sapiens
tctcttttgatctagtaatacaatgaacaccattaacagatttccttatgagaaagcacacrtacatccttacattcctggtatgaacacagctggttttatttttcatgtgctgctagattctgtttgataatattttatttatgattcttaccccattatttatgcatggcctacatttttccctatctcgattctttttttttttttttttttgagatggagtctcactttgttgcccaggctggagtgtgcagtggtacaatctcagctcactgcaacctctgaatcccaggatcaagtgattctcctgcctcggcttcctgagtagctgtgattacaggcacctgccaccatgtctggctaatttttgtacttttagtagagacagggtttcatttaccatgttggccaggttggtctcgaactcctgacctctacccacctcagcctcccaaagtactgggattacatgtgtgagctactgttcccagactttctttctttttttttttttgagacagggtatctctctgtcacccaggctggaatacagtggcacaatcacagctcactgaagcc

SEQ ID NO: 858281 - DNA, 661 bp, Homo sapiens
gagcagaggaatgacaaagacctgaattacatttccaaaggattgctctggctctgttgttgagattagacaacagagggtaggttatgggggaagctgcgggccagcttgcagtccactgtaatgacccagatgagagaggatggtggctgggaccagggtggtagcaacggaggtaaaggcagagtcattagaatttctagtggacagactgcaggagaaaacagaaggtgtggagttaagtattctgccaaaataactggaagggcatccttaggagagatggggtttgacagaaaaaccaggagttcagattttttaaagaattcagttttgatatcctacacgtgagcagcaacctgttcatcaatgtaccctttatgagcctccatctccgccttactgtccctacttcctttcttgtgcttcctgggatcagttcccaaataaacgtctacctctgaatccttgtcttggggtctacttttgggggaatccaaactaagacacaaacagaactcgaagcacaggtaamggctaaccacttcacactaaaacctcccttccaagggcttgtcctggccctttagtgtgaagactaaaccaaggggagttttctacatccctggacctgaagcaaatggtattccacagaccgtat

SEQ ID NO: 858282 - DNA, 387 bp, Homo sapiens
ccaccagctcctgggtgccacgaaggggatcctgcaggacccatccttgtggcctgagactgttgtacccaggygagttagagaaaacgccatactttgagacgaattaagagtcttttattagccggcgaccgagagacggctaacgctaaaaattctctcagccccgaagaaggggctagattttcttttatactttggtttagaaagaggagcgggggtctagttaaaacaattttacagaagtaaagtaggcaaaaaagttaaaaggataaatggttacagaaaagtaaacagttccaggtgcaggggctttaagactattacaaggtgatagacacgaggctttgggcgttatcaatcagacgaattcctgggaactgcgga

SEQ ID NO: 858283 - DNA, 387 bp, Homo sapiens
ccaccagctcctgggtgccacgaaggggatcctgcaggacccatccttgtggcctgagactgttgtacccaggtgagttagagaaaacgccatactttgagacgaattaagagtcttttattagccggcgaccgagagacggctaacgctaaaaattctctcagccccgaagaaggggctagattttcttttatactttggtttagaaagaggagcgggggtctagttaaaacaattttacagaagtaaagtaggcaaaaaagttaaaargataaatggttacagaaaagtaaacagttccaggtgcaggggctttaagactattacaaggtgatagacacgaggctttgggcgttatcaatcagacgaattcctgggaactgcgga

SEQ ID NO: 858284 - DNA, 580 bp, Homo sapiens
atttagattctcattagaagcgtgcaacctagatcccttgagtgctcagctcacaatagggttttcactcctatgagagtctaatgccgccactgatctgasaggagggagagctcaagccataaagctccctcgcttgccgctcacctcctgctgtgtggccccattcctaacgggccacggactggtctgcagcccaggggttggggacttgtcttacatgacagggtgagctaccctgagttaatctgagtgagcttcattctgtcgaccttcttccactccaccacagcgctacaccaacctgaacttcgcttcctgagacctaagattcagccccgtgctcagcagacatcagggatcaccgactctgtgccaggagctgttcttgatgctgggaacgcaggggtggacaaaacagagaaagccctgccctcaggtgtggtcagaagagacagggaaggatttggaagctaaagctcagatccagactgggcttgtttcaactcgttccgtgggcctgatgtagtctagagatgattcttggtgtgggctgtgggagctcctgcggtgtagtttg

SEQ ID NO: 858285 - DNA, 335 bp, Homo sapiens
agccatggcctgagaaattagagaacagatggagtgcatgacrtgaattgtgcacgttcacgagcagctggagaggagggagatcagtgctggctggacagtcagacagggtggctctggggtctgagagccagagttgggcctctgaaggtctcagctgctctggacgggacaggctgcacgggggaccccaaacctgtgggtgcacttatacctgctctcacctgtgcacctgtcctgctactgatggctttcagactgggttgctcatgccagccatggagactgaaccagaagccctcaggggcagcaacaacaatgatctcaaggacgta

SEQ ID NO: 858286 - DNA, 616 bp, Homo sapiens
tctaattgcctttgtaatttgttctttagcctatgggctatttaaatgtgtgttataatttccaaatacttgaaagatttttcacatatttttctcttattgattcctagtttaattatcttatggttaaaaaasaaatactacataattcaaaccactttacctttattatgatttgtttaatggcctgggatatggtctatcttggtaagcatgctacatgtacttggaaagaatgtgtatttatttgtcagtagttgggtggagtgtcagtaattgtgaactgggcaagcaggttgatagtggctagtactttgttcctgagtaaggaacatattcttactaacttcctgtctacttgttctatcaattactgagaagaatgtttaattgccaactctaattgctgatttgtctgttccttctttgagatctgtcagcttttcctttatgtatttttggagttctataattaggtacattcacatttagaattgttatatcctcataatacttttcttcctttatcattctgaaatgtccctccctatccctggtaatattccttgttctaaagtctactttgcctgatgttaacatagctatgccagctaat

SEQ ID NO: 858287 - DNA, 616 bp, Homo sapiens
tctaattgcctttgtaatttgttctttagcctatgggctatttaaatgtgtgttataatttccaaatacttgaaagatttttcacatatttttctcttattgattcctagtttaattatcttatggttaaaaaacaaatactacataattcaaaccactttacctttattatgatttgtttaatggcctgggatatggtctatcttggtaagcatgctacatgtacttggaaagaatgtgtatttatttgtcagtagttgggtggagtgtcagtaattgtgaactgggcaagcaggttgatagtggctagtactttgttcctgagtaaggaacatattcttactaacttcctgtctacttgttctatcaattactgagaagaatgtttaattgccaactctaattgctgatttgtctgttccttctttgagatctgtcagcttttcctttatgtatttttggagttctataattaggtacattcacatttagaattgttatatcctcataatacwtttcttcctttatcattctgaaatgtccctccctatccctggtaatattccttgttctaaagtctactttgcctgatgttaacatagctatgccagctaat

SEQ ID NO: 858288 - DNA, 611 bp, Homo sapiens
ttgggagtgaaaaaggctagaagcattgtttcatatatctttattttgttataatttatcctattttttcgaaagagatcttccgcttctttttgttttctgaataatttggtcctaaagtcatgagrtgggctgagcaggatagggttctattctggcatggacagggcagtaccctgagtcagaggaggtgcaggagtttgagcagggtgagggtcgtgctcatggaggggaggcctggtgtagaggtgagagctgggggagattgggaggcatcctttggtgggggcagctgactcagattgtatgtaccccagcaggggcaggtgggtaccccacaggggggctgaacgctgcagctcatgtctattccttatgtctttcagggttcacccagggcccgaaagcttgtgtctggaccattgagaaagacaactggaccgttctatgtggatacgaacatgcaggaggaagtccatgcttcctagcacaggccctagaatcagagtaaacgaggtcagaagtcagctgccccactggctgtgtgccctagacaagccaggggctcctctgtgcctcagttacctcacctggaaaatgggaatcacttt

SEQ ID NO: 858289 - DNA, 586 bp, Homo sapiens
atttagattctcattagaagcgtgcaacctagatcccttgagtgctcagctcacaatagggttttcactcctatgagagtctaatgccgccactgatctgasaggagggagagctcaagccataaagctccctcgcttgccgctcacctcctgctgtgtggccccattcctaacgggccacggactggtctgcagcccaggggttggggacttgtcttacatgacagggtgagctaccctgagttaatctgagtgagcttcattctgtcgaccttcttccactccaccacagcgctacaccaacctgaacttcgcttcctgagacctaagattcagccccgtgctcagcagacatcagggatcaccgactctgtgccaggagctgttcttgatgctgggaacgcaggggtggacaaaacagagaaagccctgccctcaggtgtggtcagaagagacagggaaggatttggaagctaaagctcagatccagactgggcttgtttcaactcgttccgtgggcctgatgtagtctagagatgattcttggtgtgggctgtgggagctcctgcggtgtagtttggtgagg

SEQ ID NO: 858290 - DNA, 553 bp, Homo sapiens
aggggggctccctgcaggaggaggttcaccaggtgaagatggagccgcatgggcaaaggccattccagagacccaggtgtgttcaggaggtggaaacccattgcaggtaaggtragaggaccgggtggggtggtctaggaggagccgacagagggtacaagctgtgaaacagcttgaagcagggcagtgaggaaagggatctagaggaggaagacacgtggacagatggggctggctgggggctgccgcaggatcttatgcaagaggttctaacaccagagcttcaggctctgagctccgcggaatcaaaggtctcagaaagcaacctattaggatctggtggttgacagcctgcagcagggggtgaaagaggagcccagagcaccctccggtccctgtccctgccttggggcataggaggggaggaactcagtctggccacactggctcaggtgagggcgccccaggggaggccgagaggggctgttctcttgtctgctttgctatcagggactgcctcgagatgtctttggagaaagtgttcctggcttgc

SEQ ID NO: 858291 - DNA, 578 bp, Homo sapiens
aagatcactagaacctggtaagcgatagctccccttcccctcccayttaaaatgagagttttcaaggagattgggtccagggtggctgtgagcactaaaattctggagcaaggtgaaaaatagaccccacttctccttccatgctaagccactgattcattaaagaaacacagggaaggagcctatactcaaaattagcatctccagtggaaacatggcttgagaattatgcgtccttacggaccagagaccaggcctccaagaattctcccaggaaacaaatgtccagcaggaccatggctgggctgtcacgtccagaagccaccaggccacagcaggggccccggcaggcaggccaccgtcggaagccggcaggccaccgtcggaagccaccagaccacagcaggggccccggcaggcaggccacggtccagaagccaccaggccacagcaggggccccggcagacaggccacggtccagaagccaccaggccacagcaggggccctggcaggcaggccacggtccggaagccaccaggccacaggaggggccccggcaggcaggccacggtcgga

SEQ ID NO: 858292 - DNA, 578 bp, Homo sapiens
aagatcactagaacctggtaagcgatagctccccttcccctcccatttaaaatgagagttttcaaggagattgggtccagggtggctgtgagcactaaaattctggagcaaggtgaaaaatagaccccacttctccttccatgctaagccactgattcattaaagaaacacagggaaggagcctatactcaaaattagcatctccagtggaaacatggcttgagaattatgcgtccttacggaccagagaccaggcctccaagaattctcccaggaaacaaatgtccagcaggaccatggctgggctgtcacgtccagaagccaccaggccacagcaggggccccggcaggcaggccaccgtcggaagccggcaggccaccgtcggaagccaccagaccacagcaggggccccggcaggcaggccacggtccagaagccaccaggccacagcaggggccccggcagrcaggccacggtccagaagccaccaggccacagcaggggccctggcaggcaggccacggtccggaagccaccaggccacaggaggggccccggcaggcaggccacggtcgga

SEQ ID NO: 858293 - DNA, 578 bp, Homo sapiens
aagatcactagaacctggtaagcgatagctccccttcccctcccatttaaaatgagagttttcaaggagattgggtccagggtggctgtgagcactaaaattctggagcaaggtgaaaaatagaccccacttctccttccatgctaagccactgattcattaaagaaacacagggaaggagcctatactcaaaattagcatctccagtggaaacatggcttgagaattatgcgtccttacggaccagagaccaggcctccaagaattctcccaggaaacaaatgtccagcaggaccatggctgggctgtcacgtccagaagccaccaggccacagcaggggccccggcaggcaggccaccgtcggaagccggcaggccaccgtcggaagccaccagaccacagcaggggccccggcaggcaggccacggtccagaagccaccaggccacagcaggggccccggcagacaggccacggtccagaagccaccaggccacagcaggggccctggcaggcaggccacggtccrgaagccaccaggccacaggaggggccccggcaggcaggccacggtcgga

SEQ ID NO: 858294 - DNA, 520 bp, Homo sapiens
tttggagtccctcagacgctttcggcaccacttagtcagcggggggaataatagctttccgggaaataggcccgagacgcgggaagggaagggaagggaaccccgtgggaaagaccttactcattctgccccttgcagtcagcacctgaggagaagcagcggggaaaagaagtgccaagctcgccgcgttgaccagtgtcagggccgagtagccacaggacggaactgagaagcgagtaccaacatcaagcctgccgcgccatttatatccacgcatgcgtttccccttacctgcaccgagcctcccgccccgtttacatccacgcaggcgtttccccttacctgcaccgagcctccattcccgtttacatccacgcaggcgtttccccttacctgcaccgagcctsccgccccgtttacatccacgcaggcgtttccccttacctgcactgagcctcccgccccgtttatatccacgcaggcgtttccccttacctgcaccgagcctcccgccccgttt

SEQ ID NO: 858295 - DNA, 520 bp, Homo sapiens
tttggagtccctcagacgctttcggcaccacttagtcagcggggggaataatagctttccgggaaataggcccgagacgcgggaagggaagggaagggaaccccgtgggaaagaccttactcattctgccccttgcagtcagcacctgaggagaagcagcggggaaaagaagtgccaagctcgccgcgttgaccagtgtcagggccgagtagccacaggacggaactgagaagcgagtaccaacatcaagcctgccgcgccatttatatccacgcatgcgtttccccttacctgcaccgagcctcccgccccgtttacatccacgcaggcgtttccccttacctgcaccgagcctccattcccgtttacatccacgcaggcgtttccccttacctgcaccgagcctgccgccccgtttacatccacgcaggcgtttccccttacctgcacygagcctcccgccccgtttatatccacgcaggcgtttccccttacctgcaccgagcctcccgccccgttt

SEQ ID NO: 858296 - DNA, 474 bp, Homo sapiens
ctcacagttgttttcggaaacacagactccactgggaggatttctccctcataaacacacatgtcaaaatcaatgtatcactcgtcaccctgtgtcctcatcttcggcttggaaaacctggcctcagtccctcgggccaagagtctcctgactgcccaggtggcaggccctccgtcccttgcggttctaaactgctacctgggaaagaatcgttgctgcccacaacttccatcttggctacgcctcaaaacccttcaacaggaagcttcccagcagcagcacagtaacaaagcaaccatgggacagagcctagggtctcgcccagctcaggggcatcctgcagcggtgcagggcctcagtgaaatgcagagaggctaggagtacatggaacctytaaaactgaatggaggtggatgtgctaagcgtgggcggttttctggggagcgggtgcatcagatctaagagtctgagatc

SEQ ID NO: 858297 - DNA, 474 bp, Homo sapiens
ctcacagttgttttcggaaacacagactccactgggaggatttctccctcataaacacacatgtcaaaatcaatgtatcactcgtcaccctgtgtcctcatcttcggcttggaaaacctggcctcagtccctcgggccaagagtctcctgactgcccaggtggcaggccctccgtcccttgcggttctaaactgctacctgggaaagaatcgttgctgcccacaacttccatcttggctacgcctcaaaacccttcaacaggaagcttcccagcagcagcacagtaacaaagcaaccatgggacagagcctagggtctcgcccagctcaggggcatcctgcagcggtgcagggcctcagtgaaatgcagagaggctaggagtacatggaacctctaaaactgaatggaggtggatgtgctaagcgtgggcggttttytggggagcgggtgcatcagatctaagagtctgagatc

SEQ ID NO: 858298 - DNA, 616 bp, Homo sapiens
tcttgagcacgaaacttgataagatgcaatgygctttaggtgggtcgtggcaaacatgaaaaggcaagcttccgttttagaatccatggctcttcttgaagacttctctaaagtgcatgatccctaacaagcgcggctccgtcctgtgtctgctctccatcctctgtaccgccgccccttgccttatgtgccttacatgacgccttcttgttcttggttcgttgtgcgacaggatctatgtgttttcccccctctccgtctgctctttgatcagtacgccaagtgccggtgcttgccagacttcccagcccttaggaactgcatttcctgatgctgctgctttcactcctcctgctcgaaaatggagacgaataacacaactcgcaggataaaaacagaattgggagttttcagactgcaaacctttctgaagagaaagttctaatatttcacgggtgtgttgtttcttaactatcttctgtgcgcatgcgcagagcccaccttgcagagccgtgtctgtatggggccgcggtctcactaggcagtccgtgccccagtactggccttccaggtagagtggttttagatcagagttttgtaacccacgtcttggtca

SEQ ID NO: 858299 - DNA, 571 bp, Homo sapiens
agttggggagtcctcggactctcactgcagttggtgtgctgagtatcacagtgtaggggcctgtccacttcggtggtagctttttgtgagggtcagkttggccgataaacacgtctgtgcctgcaagacagttatgatgttgagaggataaggaggtgtcggcagggagaggcatggcctcactcactgcttcacgagtgaaagaccgtgtctggattaaggaggggaggtaattcctgagtggctcagagtctgttaagggtggaggctctaagacaaaagttcggccatacatgatctcaaagggactataaaaaaaggctgcctttggtgttgccagagtctcatgagggcgaaagggagacttctcgtacacgactggcagatttctagagtgagcttggtgagttgggctttaaggacagagttgaccttttcaacttagcctgaagattgaggccggtagggtgtgtggagaacccattttattcccaaggatgtagaggcgccttgggtgatttggctgataaaggcaggcccgttatcggaccggatggatgttgggagtctg

SEQ ID NO: 858300 - DNA, 503 bp, Homo sapiens
agcctggtagttaaaattcgacccctgacctaggaactgatgttatctatagattccagacattgtgtggaaggacattgtgaaacctcccgttctgttctktttcactctgaccaccggtgctcgcagcccccgtcacataccccctggcttgctcaatcgatcacgaccctctcacacggacccccttagagttgtgagcccttaaaagggacagaagttgagcactgaggagctcggattttaagacgctagcctgcccatgctcccagctgattacagccactcccttcactatcttggtgtctgaggggttttgtccacagctcatcctgctaaaacagctcactacaatctcaaactcctgagctccagtgattctcctgcctgtgaaaggaaaacaaatcttgcccctgcccccaccccaaatcactaagctaaagggaaaagtgaagctggaaactgcttagggccaacctgcctcccattctattcaaagtcac

SEQ ID NO: 858301 - DNA, 605 bp, Homo sapiens
ctggcagcattttgggtgggggctgccctgtcagcctggcccccrtgaagacagctctgagctgcaggaccgatggcaggcatgtaggtgagcgggacatgagtcctgggatttcagggctgttgtgacctggtgctagtccttcctgacaaccccagtgtgttcctggttcctgccgcaggaaatctgccctcactgctccacgcgccaggacgtgcactcctcctcctctttccgcacctgtctcccggctgcggctgctcacttgtacctgcaccattacttactgctgtattctttgctttttccagactgatgcacccaccagctgcaaatcttaggccagctacacccaacacagttgaatattgtggacaagctgtgccagacaaaatcatacatgatttcacttctaaaagcaggcaaaactgtcatgtttagtgaaccatatgtagtttgtaaaatagtaaaagcaaaacaaaatgattattgcaaatgtcaagatagttgtttcttttagggggaggaagaattttatggccggggagggctggcctggatgctggctttgtgttgcttcttgaccacgatgatcaccttgcaat

SEQ ID NO: 858302 - DNA, 480 bp, Homo sapiens
tttgtaattaataagtgtcttgagcctggtgctgtggcacatgcctgtaatcccagcgctttgggaggcggaggtaggaggacggcttgagcccaagagttcaagaccagcctgggcaacagagtgagacccctgtctacaaaaaaatgcaaaaattagccaggtatggtggcatgtgcctatagttctagctactcaagagactgaagtgtgaggattgctttaacctgggaggttgaggctgcagtgagccagagtcttgccactgcattccagcctgggaatagagcaagaacccatctcaaaaaaataaaaaatgaaatgtatcttgtggcaggtactttgagattatgtacatttcctgtttctcatactttcacaaactagtgttagcatccatcratgattcctgtctgaaacggcttactgtggtggttgccgaatggtgatgtttgaaagctgtcgtcatcctctacacgt

SEQ ID NO: 858303 - DNA, 625 bp, Homo sapiens
aattgtttccttaggttgcatattatgcaataatgcaagaaactaaaaacccatacaaatactggcaaagcagcagcaaattactttgtttgtagattacagtattacacatttagaaaatccaagagacttcgacaaaaaaaaaaaacaaataatgccccacacaaacaggattttaaacaacagtgggacatatttggaaatcaagactacaaacacaaagcaataacaaaataataatgctcagaaatataacaggaaaataatttaataatcttaacaaatagtataaaatacctaagggtaaacttaatggaaaaatcacttagtttatcacaggaaaacactaacattttaccagatggcatagaatgcaaactgaaaaaaagtgagaaaaagaccatatttcttgatgaaaaaatttagtgtcacaaaaatattaattcttccaaaattgtcgaaaaatgctcctccaataccaatcacaactcsaatagttatttgggatagttggtggggaactggaagaattagtttatgttcatatagctattaagtttataagaaataggaaagtaaaaaaagattggtgaagggtgatttgctttattagatattaaaattt

SEQ ID NO: 858304 - DNA, 440 bp, Homo sapiens
gagaaaagactagaaaaaatacagaaacagatacaaaaatatataacatgttataygacaaaatagacatttatatttcagtagggaatgacttatttaagaaatggtactaacataattagccagccataaggaagattaatataaaagaatgttaattcatgctattcaaaaatatattccaaatagaatgaagtttgcaatgtcaaaagtaacaattaactcactgtaagacaaaatgagaaaacagttgtatgatcttcgagtagcaaaaatcttcctaattattaactaaaaaaacccaaaacctcagaagtcatagtgaaaaagataatatatttgattacatgaaaataaaaaatttcttaatgtcaaaatctccatcaataaaatagaaaataattataaattgggcaacaaatttgtagcatacacctttt

SEQ ID NO: 858305 - DNA, 613 bp, Homo sapiens
acctagaggctcatctgtaaatgaggtcctatactttttctaatctactgaaacgtggccatccatcgacctccaggaatataaaacagaggcagggaaatcaagccaatccatttatayaagttttaagtgcatacaaaaaaaaaaaaaggaaatttaggctatcatctaaaatgaccttgatgggtccaataccaagaaaaataggatagcacatagtaggtgttcatttttttaactttttctttgcaaataatttcaaacttacagaagagtctcgagaaaaacaattgctcaaaaaacacccccacacccattacccagatttcttacgattcacattgtatcccatttgctttctcacttgctattactgtgtatataatttttctgaaccatttgagaatatgttgcacacgtcatggccctttccccctaaactgcatttcctcagagcagagacagtcttgcatgacgataaaacaatcttgttttgtaattcttccaattttgtaattgttccactgaagttctttatagaattttggcctccagggcaggatactaccctggatctggtcctgcatccattttcgtgtctccttagtcatct

SEQ ID NO: 858306 - DNA, 674 bp, Homo sapiens
agaaaaggaaccctcacactggatcctgggacaccccaatatgaggtcagggagatgacaaggaacttcatgggtggaatgtcaggaaattttcattaagtcagagatttgctacttttcaatcccacatcttgccagctcccagaagtggtattgtgaaagaatgagattttatattgtgtttaatgtctaatcagttaaagtcatttacctattttatttgcaaaataatttttggcaaagaggaacatttttacatatcttcctagcaataagaatgtgttcaatgtttacaattgtttggttacttatgaccccagatgtgagattatagtaagtgattatcacaacgttgttgagacaaatcagcctcctaagacaaagacactttacattaattgaacaaaacacaatcttctgaaatagtctaacaaatgtaatgtctcaaatttaacacctgcggtctgaaggttttatgtcacagtccttgcaattattaaaacaaacctttcgatattacagaaaatctctttgtcctacttsgtatgtacacatggggaaagaaacccctctgttttatgaagacaggtaaaaagtaaatatagattcaatttaaattttgtgataactgtggatattcactagcctttcctatctatctaaacaaagggaag

SEQ ID NO: 858307 - DNA, 531 bp, Homo sapiens
tctctggaagagtataaactgtgacaacacaccccatatgaaatgggtaatttgaatagtcctataactattaaagaaacttaattgatagcttaaaatctcaaaaagaaatctcyagacccatatggtctcactggagaattctaccaaacctttaaagaagtctaacattaatttcacaaaatctttttcagaaaaatagaaaaaatagaaaagaaggtcccaatttattctatgaagtcactattaacctaacatcaaaaccagactattacagtacataaaaagaaaaccatacaccaatatctctcataagtacagatacacaaattattaacaaaacattaaaaatataattcagcaatatataaaaagaattatattccataaacaagtgggcttaattccagagatgcaaggctatttgaatatttgaaaatcaataaatgtattccatcatatgaaagtctggaagaaaaattacattatcacattaactgatacagaaaaataattagataaaattcacac

SEQ ID NO: 858308 - DNA, 618 bp, Homo sapiens
ctgttctcaacctagtcacctgatgtacttgaaataagcttgtgtctcttcaacagtcttttctgccattgaataaatagtaacatcattcttgaatttctaaaatactatgaaattcattgacatgaaatattttgtaaaagattcatggtcattcaacctttgaaatttgtgatggttaattttatgtgtcaccttgagtggaccaaaggatgccaagacagctgttaaagcattatttctagctgtgtctgtgaggttgtttctggaagagattcacatttgcatcagtaggctgagtaaagaagatctacctcaccaatgtgggccaacagcatccaatccaaatagaataaaaaggaaggtaaaggaagggtacgttttctctctttcttcttaagttggggcacccatcttttcctgccctcagacgttggatattggagctactgggtgtctggccttcaaactaggattgaattacaccaccagccttcttggttctccagcttgcagatggcatattgtgagactttacaacttccgtaattatgtgagctaattgccataacaaatmttcttgtatctatatctatagctaactgtctacatatatgg

SEQ ID NO: 858309 - DNA, 338 bp, Homo sapiens
tggaaagggaaacagatacatgtggacagaaaatagtcatgcatggaaggggagacagcatagagggataaactcagaatgaaaattaaagcctaaggccagctaaacccagtctgctgttatgtaagtcttgtatattttttgtgagggacacaaaaaaagccagcagtttacaaactgcatctggtttacatgaatttctttaaaaatgtaacactaaatcctactaaatattagagaataattccatatacatgcatccaagcacatacatattcttacacaaccacccaccyccccaactcacccacacccaccactaacttgggccagaaaaa

SEQ ID NO: 858310 - DNA, 557 bp, Homo sapiens
attctcacagcatctcgttatcacagcgcgaaacaactttaggcagcatcggtggagctggggttttctcagccgggtcctgcttggcccctgtgtcctggrccccttggcccgtgtgcttctcctcttgggtcccaggccgccccctgatagaaggttccacaacagtccggatgttagggatgggcgatctgcgcagcaccgtccttcggagactgttctttaggaggactgtcctggaaaaccacatcccatgtcctcctgtaaggtgccctcatgggtggcgcctgtgtggggtgctcacctgcagctggtcagggcacaggccgtccccttccctcaggtcttcatgttcccaccagagcctatcctccctgcccgcctggcaccgctgtcctctggagagagccaccattctgtttgcatccagaaggcagcagaggttcttgaggaggaaaacagctcctgtgtatcttcaacagtagcagaaaaatgcagatagttctattcaggacagactcgtctcagtaactcaggtcatcacctttagacgccag

SEQ ID NO: 858311 - DNA, 538 bp, Homo sapiens
gcccaccaactgcagagtcacctccgggagcccgtgtcaggcccctcccacctcagaccccgcactcacctgggcccccggccccctgccgcgctcctctcgctggacgcaggtgccccgagcgtccgctccctgcgggtccctggcttccggggctggggctcctcctcctgctcctcaggcctcctcttctcgctgtcgctgtcgtcgctgccttctccaaggatgtcgtccacctgacaaacagccaagagtcagcgacagacctccttcccgggccccgttcctccgcaacaggcttctcccggcagagtccagggctctgagtgcagcagggtgggggctggaggtagcactctgctttctacctgagccctggggcttgaaactcaaccaatccttaacaaagcccygggcaaaagacgcttggaaatccacagagcaaacccagtcggttcgcaggcaaagattgggtttaaattccttctgtcccttatgtgaacagggactttattcctggtgcactgttggattttat

SEQ ID NO: 858312 - DNA, 603 bp, Homo sapiens
ctgcaattcccattttgggggccgggaatttggagggtggtcagagcctgttcactctgggggctgccgctgcctgccagggagcctggtgggggctgctcggcagctcctgagccagctgcaccctctgaacctgttttctccagtgagccggccgcaccccctgaacctgtcaggatcacattctcctttgtggccatgaatattcagcccccaaacaatgaacataaacagggttttgccttttctattcctctaaattgtatctgaggcctcactaaaccttcctcacctgtgcaatgagaagggaccagatgacttctaagattaagtagaagcaactgaaatctcatttcagctctaaaatagcccgatttcctttattttaacacagtttggggtgggcatgcaggtgcatggtcccctcaggtcaaccctgccctcatcccaccccaggggcactggcaatacctggaggcagttctgattgcacagcatggcggggggtcccactggcatcaagcgggtggggccrgcctgctgctggcaccccgagacacacaggatgcccatgtggggaagcccagccacaggcctacatgc

SEQ ID NO: 858313 - DNA, 623 bp, Homo sapiens
gctgagactggggggaaaatcaatatcccattaggcaaaagtgaggagcagcagcagctcctctgtagcctgtctgtggacctaacatgctacgggagtgctcaaaggctgggttagcctgtggtgtccagagatatcctaaagtgatggaatagccctagggataatgtagaaaagccaatgacagaatgctcaagatttgtaaatccatttccttgaactaaatgaagtggagtcactttttgagaataattttacttgtcaaagcttgctccggaggaaagaagttctctcttgagaactttcataattcccagtcactttgaattttctagtgtaagtaaaattgttggttagctgtaagacaaattatttagctttcatttcccctggggttctcaaaatgaaagaggaatgacagcattgagatgccaggatactatatgtttctgaaacattatgttgtaaatcccatttttaaataccatcgcaaaaggctcgttatggtagctcttcctggatgagtctctttaaaaaggaagastttctttggaagactattgtcacattctatttcatctggtaataagtttagattttgtgtttcagatttttgtaaagaa

SEQ ID NO: 858314 - DNA, 352 bp, Homo sapiens
gactgggccatttacaaaagaaagaggtttattggactcacagttgcatatggctggggaggcctcacaatcatgttggaaggtgaaaggcacatctcacatggcagcagacaagacaagagagcttgtataaggaaactctccttttaataccatcagatcttgtgagactaattcactatcacaagaatagtacaagaaagatctacccccattattcarttacctctgactagctccctacaacaacatgtgggaatttaagatgagatttgtgtggggacacagctaaatcacatcagggccctgggggtatacattttccaatagtttttctaggaagctgctgtga

SEQ ID NO: 858315 - DNA, 614 bp, Homo sapiens
tgaaggggtaggatcactgatttgcttcatcctttccagcatcagcatccgatggactaaagtgattaatgttgggcctgtggcaagcgcagattttatggggttccacctagtggctttgctccatattacrgttctaagtgagtatggcatggttgtatagaatagaggcttttgaggctacagaccttgctctgagtcctgactttgtgctcaatatccaagtaaacttgggcagcttcttagctctttgtgatttgtttgcttttctataaaaatggaaaataatacctattatataaggtggttatgaagattaaatgttagcacaaaacacaggaataaaagtgagggcagcattattagattctagggaaattaaagtgacagttaaaaatagtgacaactggctggtagatggggacctgctctgggtgcatatccatgaaactcactgtgcatcatataaagatggccagctagacataggtaatatgtgcctcctcctaggagaggaaccaggatagtaagtagatatcagaatagttggcagatactcacattttaaacagatcatatagggcacaatgctaggattccccagagcagtgaca

SEQ ID NO: 858316 - DNA, 671 bp, Homo sapiens
aatgggaagaaacttccaaactatgcatctgacaaagggctaatatctagaatttacgaggatctcaaacaaatcaacaagagataaacaaaaaactctattaaaaagtaagcaaaagatgtgaacattttttcaaaagaagacatataagctgccaaaaaacatattgacaaatccttagcatcactaatcatcagagaccacaatgagataccatcttatactagtcagaattgctatcattaaaaagtctaaaaacaaaagatgttggcaacgatgtggagaaaagggaacacttatacactactggtgggaatgcaaattagtgaaacatttatggaaaacagaatggagatttttcaaataacagaaaatataactaccatttgatccggcaatttaacctctgggtatatacccaaagagaaataaatcattatataaaaaagatacctgcaccttgtttatcacagcactatttacagtagcaaagataaggaatcaacttaagtagctatcaacagaggactggataaagaaaatgtggtgtgtatatgtatatgtatatatatgaaatatagtgatatatacatgtgacataaatayatatgatatacacacaccatggaatactactcagccataaaaaagaatgaaatcatgtttttagc

SEQ ID NO: 858317 - DNA, 620 bp, Homo sapiens
agattgaaccattgaggaaaatcttgttaagaaaagaaacaggaatagattaaaagaacagaaatcagcaaacgtttaccacaaaaatggattaaaacaataagaattgaacgtgtcaacaaaatgtattcatattttctaagtctagtttagctttttaaaattaagatttaacaatcttagaaaaacagacttgttcaccaaaatacaatgaattgtataaaggaagtggaaaaataatgaaacaggtcagcgggacactaataggtagctctcaacaagctactgcaatgaagtaaatatttgggtacttgcaaaagttttattatgaaagcataatataatttcattagcataaaacagaaacagttactaaggttattgacaaaagaaggttaagtacccagtcacgtacagagtagtctgggatacaaactcattttccatatattgtaactaaatggcaaagcaaagaactgaagatacatatctaatttggtcaaggcagcactttaggatttgtctggggttggtgtagacagctgaaaacatatggaataaaaattgtgtaattaagaaaaaaagaaaattarattatcttatatgactatattaattca

SEQ ID NO: 858318 - DNA, 649 bp, Homo sapiens
tattttatttaatttttttatggtggggtcaagtagamagtaaaagttttacatcctcaagagagattttaatgattgactatttagccaagggaagatttatgtgccaggccttgcttgaagtctctatcttcttctctaacctagtaaactgaattgaacaaatagaaacaaactgcaatgtcttcctaaactggtgaatctttactcaggcctcacttcaccttacctctcaaaagcaaaagttacatctatcaccatattgtacccttccagatcttaccactaagaaggccatgacaaagggcctgagaaataaaatagcatgagagtggacatttactcctccaaacacagtcctctcagctccaccaccactgcagtctggagagcactgagtgcctgatgtttactgaggttcctaagagggtaggagagaagaaaagggaatgtgaaactaacccaagattttaggaaacaaattggaagtactaaatgaaaatagagagatataactcaggtatgctcttcagtgtatccctggccaggtgtgtattccaaccaattggaaccctgggttgggaaagtaaagggtaagatgccgtttattttcatttctctctacctctgcttcctacacttactctgg

SEQ ID NO: 858319 - DNA, 591 bp, Homo sapiens
tttacaaaagccacaaacagaattttaatgttgtaaaatacctgtggagacagtaaatatttcctttttcatgaggacaggctgtatgtcaacaagtctyagagaagataatgacatgttccaagttaaagtttattgttcttaaattgtccatgaattgagtcatttgcattactgttctgacattattctctctacatatagttaaagcttaggcattggcatacatttcttgttattggatgcatgattcttaaaatatttttttcttacacaaccaaatattaattgcttctataattgcaaaacattcaccctaccaatttgcaaatgtatttattatgcattccaagcatcagctacagaaacatggtaaaattaatggatattccaatccccattgagaagaaaatataggctcagagaaacttactgatgaaggatatactgagtgcctaaacatgaaggcttcaataagccacagtgacttttcaagatagcttagataaatggactctcaaatgtgtcaaatcagctggcaagtaaacactacaaagtaagtaagactgcatcacaaattagttttttaag

SEQ ID NO: 858320 - DNA, 421 bp, Homo sapiens
ccatccattcagcaaaagcatagaaggcaacacataaccctaaagtgagcaggacatggatgcatatgtatacactgacaaggggaaaatacataggtagcagacattatttagttctcacccctactattgttgtgcttacctctggccagacttgtagtctcccaccattaaaggagagaaaaattttgttatgttcatagcccatgcagaggaaaatacttttatgtaccttaaagtttaaaccagtgagctgggattgtagaagcaggtgttggagaagttagctcggaacagaagtgatcctccccacaatggagaagagtagatggaggttgtttgaaaaaggtaagmgcttgagtgacatagggttttgtgagtgatagactctgcaccccttatccaaggccagaactctgat

SEQ ID NO: 858321 - DNA, 609 bp, Homo sapiens; identical to SEQ ID NO: 817330

SEQ ID NO: 858322 - DNA, 641 bp, Homo sapiens
acactacattcatttaatgtttcatcaggcttttttggtgtatctaccttttggttattttaaaatgtttcatccttatcgcttcagtcatgaaatgtagattcattaaatcactgtgctgggtgrttccgtggagcaggctgggtgaagaagtagctcagcttcagccgtcaacatgctgcagcacctgcagagccaggcaggttcctccccacacagccttaaagacatttctgtttcaaagaacagaacaagggtgttttctgactggaccaggcagtgtctaggacttcagaattttagtggaccccttatagacataaggccagacaaaggctcctggaaactcacacaggatttgctctcaacgtgtacaaatagtaggtagtcgtttgccaacaataataacaacggcaaagcagatatcatcaggatgataataccctacgtgtgtgttgcctcgtgtttaacaatgctttcacatatatcacctgaatagctgttatcttcagagttgaatggattgggagagacgtagccatgtgaacagaataaataaagcttctgaaataagtttgtgccaactgcatattcacctagaactggattttactcacctctcattaacaactggatcctct

SEQ ID NO: 858323 - DNA, 630 bp, Homo sapiens
actcatttagtaaacatttactgaacactactaggtgtgaggcactgtcctgaggacacagtaacgaacaagacagaaartgttctatgcacatggagtctccattctaaagggagaagacatataataaacaagtaaaatgactaaataactactaaaatatcaaatataaacatgtttaatagagagaattaaagttaggtgttgtgcaatagcaaagacatgaaatcagcccaaatgcttatcaatgatagactggatagagaaaatgtggtacatatacaccatgaaatacaatgtagccataaaaaggaatgagatcacatcctttacagggacatgaatggagctagacaccattatccttagcaaactaatgcaggaacagaaaaccaaacactgcatgttctcacttataagtgggagcttaacaatgagaacacatggacacagggaggggaacaacacacactggggcctgtcagggagtggggtagggagagggagagcattaggaaaaatagttaatggatgctggtgcttagtacctaggagatgggttgataggtgcggcaaaccaccatggcacatgtttaactataaaacaaacctgcacatcctgtacatata

SEQ ID NO: 858324 - DNA, 602 bp, Homo sapiens
cactaaccaacaagacctaatttatatttatgaaataattcaccccaaaccagaggagcacacgttcttttccaaggcccttagaacatacagcaagatgggccatgaaaatccaaagcaaatttaaaataattrcaatcatatgcagtgagttcaacaaggtttcaggatacaagatcaacagacaaagatcaactgtgtttatgtatactagcaatacatacttgaaaagcaaaattaaaaatataattccttttacagtttcttaatatgaatgaaatagtcataaatgtaaaaaaaattaacacaagcttttattctgaaaactacacaacattgataaaaaaaaaaaaaaaaccaaagaagatctagatagagagagatactgtgttcatggattagaagacaacatagtaaagacttcaatttatctattgactaaattgatgtataggcttcataaaatttacattaaaaaccaagcaagatttttttttgtagagacaagattattctgaaatttgtttggaaaggcaaagtaactagaatagcaaaaacaatgttgaatacaaagaatacatttcaaagggtcactctacctg

SEQ ID NO: 858325 - DNA, 614 bp, Homo sapiens
acagcaggaggactgcagataaaacagtggtgctgtgtatgggcttcatgctaaatcagtaagtggtagctgccctcactacaaaaacactgaaacaatgagtaattgtgaaatagtgaatatgttcatttgtttcactacagtaacccttttactatttataggtattccatatcgtcatgttttatttatttgtttatttattacttatttatttattttgagacaggttctccctctgccacccaggctggagtgcagtggcaggatcttggctcactgcagcctcaacctcccagactcaagtgatcctcctacctcagccttccaagtagctgagactacaggtatgcaccaccactcccgactaatttttcttcttttttcttattttggtagacagggttttgccaagtttcccaggctagtctgaaattcagactcctgggctcaagccattctccacctcagcctcccaaattgctgggatttgggaagtgtsagctgctgcacccagctaacatcatgttttattaccttacatctactgtacaagataaaatttgttttagaaaaatataagtaaataaataaggagatgcacctgtgtcctc

SEQ ID NO: 858326 - DNA, 333 bp, Homo sapiens
tggtttggatccattgctggtgaacctgtgtgatttggggagggtgttacagaacattgttttattcacattaccagggttggttttctggttccttctcatttgggtaggttctgttagagggaaggtctagggctgaaggctgttgttcagtttcttttgtcccagagggtgttcctttgatgtagtactctccccatttcctatggatgtggcttccygtgagccaagctgccgtgatggttgtctctcttctgggtctagccacccagcaagtttacctgattccaggctggtactgggggttgtctgcacagagtcccgtgatgtgaa

SEQ ID NO: 858327 - DNA, 599 bp, Homo sapiens
actactaaaacccttcccccaaaactctgattgggtcagaaccttttagatttgtccctggctgccatgtgctgatgtggcttcattttttagcttaattttctctaatcttttctagcccgtgagaattttgctttttaaattccctagccacttttatctaatctgaattttgtctcatattttaagtgtatttgttactgttgtttatccagcatttctgtatgatttacatgtatgaatgaatatatgtagctagaggaatcttccaacaactaactatgggctgtgaatagattacttagtacctctttttcttttttgtaaaatgatgagcttataatagatgacatctgaagcccttctggtttttagattgtgtctatgaagttagcttttttttttttgagtttgcctgttcaaaatgacagcagtaacaatttatcaatgaatatgtgtgtatatatatgtacttaaatatgattaagtacagatatatcatgcatgacctcattggawcatgaagccagacttaattggatatttgtcagacaacaattatgtagctacaggtcagacaacaattatgtagctacaga

SEQ ID NO: 858328 - DNA, 602 bp, Homo sapiens
aaagacataatgagataattcatagaaaatgaaaccttaatatccgataaatatatgaaaaatatcctcacaagaagatgggtaaatgaaaatcaaaactacatgagacgttgtttttacacacatcacattggcaaagattaaaataaaatgtttgtgacagatgttggctagaaagaggagaaatgggaaatgctgatggaagtgtaaaatggtaacatggctcaaaatactttgaatagcactttgccaatatcttttcatttatttatttatttatgtatttattttttgaggcgcagtctcactctgttgcccaggctggaatgcaatggtgcaatcttggctcacagcaacctctgcctcccggttcaagtgattctcctgcctcagcctcccaagtagctgggactacaggtgtgccccagcacaaccggctaatttttctatttttagtagagatggggtttcatcatgctggtcaggctggtcttgaactcctgaactcaggtgatccacccaccctgacctcccaaartgctgccaatatcttttcaagttgaaggtaaaaatagacttaagtaaggagttccacatttaca

SEQ ID NO: 858329 - DNA, 607 bp, Homo sapiens
tgaaagtgctgagaggaaaactcaagaaaaactacaaggctgtttattgataagtggatcctgaaatttaccagtttatggagcagccagagttaagtagtacccaggaaaggatcaggtgtgaataagacatacattatttgtcctgggacctttcaagtttaatctgagagatactgtgttaattttaatttttcatatgccccatcttcttactaatctttctttctatctaacacctatgatttatagagaattatttgaaaataactctccattcctgaggctattgtgtttcagtccactagaaccttccagcaaatcaactggaacctcgagaaaggcctataaactccactttcctaccattaccagggaggcagtgcagatttgggtttttagaaaagccaaccttaaatcctttctattgaggctaattgatcaataattagtcaccacagttactaatggtttaatgtaaacagttttttaatttaaaattttctgatatttcagttcaataattgagaattcatccagaatggwtcatctgaatgtacaaaaagagtcacttagaaaaggaataactttccttatccttctcctg

SEQ ID NO: 858330 - DNA, 496 bp, Homo sapiens
attgaggataaaggtatggcaaagatctggtaggccagggattttgaatataggtgtcaattgatgaaatttgtgaagctatgtgtggtagtctaaaaataaattgctttaaagagggtgggcttcaaccttggactaggtttagataagaggcattttgggtgctaactttaaggacagtcactctcagagtcatgcacacacaggattgcctcttgaattacactgagagggttcctttttaaaagttacgcccttgacttcacttttgcttcacccttgtcctggtgtctccagaataatcatcttactatgcctgtggctggaatactatttatcccaggggttgcagcctctgcacaygaatgcatgctacattatgagcaagtaagctactatatttcttttctgtcatgtgccattgattaattttgtgccagaaatgtattttttggcttctgtagactcataggttagtgtaattttctgtccttac

SEQ ID NO: 858331 - DNA, 567 bp, Homo sapiens
atttttaccatgaagggatgttgaattttgtcgaatacrttttctgcatctattgagatgatcatgtggttttattttttagttctgtttatgtggtgaattctgtttattgatttgtgtatgttgaaccatccttgcatccaggaataaagcctatatgattctggtaaattaacttcttgatgctgctggattttggtttgctagctttgttaagggtttttgcatctattttcgtcagggatattggcccgaagttttcttgtttcattgtgtccctgccaggtgttgtatcataatgatgctagcttcatagaatgagttagggaagaggccctcgtccttatttaaaaataatttcagtaggatttgtactggctctttgtacatgaagaccattttagacataatgttgatgctagggctagagtgtcaggataaaaagacgtggatgactagtggatgagcaacctgggattatttttaattgtttcactcataaagtgtgagattgatatgcaacaataagacatcaattatgtcatttatttgtggaacaaacacaaa

SEQ ID NO: 858332 - DNA, 582 bp, Homo sapiens
cagtgcaacaatgggtcaggatgaagaaggggagctgtagtggtccacggtcaggtgtcagagcccaagcagggtgagaggtattaatgcctgggaggcagcctgcatgttggcaagaaggaagtcatgactggagctcactgtggagtgtcagagccagagcacaatgaggaatggggaatgacatgatttgtccaagcaagtaaggcaggcatccatggagaggggaggcccagcatgcagtgttgaagaatgtggaagaggtcattcatgtaggagacagagatgggaagttggctttatacagggagatggatcaaaaattaaacatattaaggataaaaagagccaagattctccctttcagagaagacaggtataaatattgaaatgtaggggaaagaaactaaaatagtccctgctatattggattagaattggaggctttgctatgaacttttggttttcaatacaggcagacatatgtrgaaatatagacataaatgcgtgttccctggtcctgtccactaagagagtctggaaacagcagtagcccaatagtagtgagcacacctggcactt

SEQ ID NO: 858333 - DNA, 601 bp, Homo sapiens
cacacacacacattctaaaacccatagcaatgtagtaacctacatttatataagagataacaccgcattactctaaaagaccatttttatgggttttgcgtctcagacttctgcacatcctttagtgggacacccctccctctgtttcagactatcttttccagatgcctgtgtcatgagcagccttggaagaaaggaatagcatcttcctgatgtgcaaaggttgggtttgtctgcagctctggaagacagagatagtatctaccttagcagctaaggcaagcatgctgactgcccaatatagcagagcctccctctggagcaagggtcggcagatcactgccctttacgaaagattcaggtccctaaagcttaggttccccttcccgtaactgagcccactgcatatgcagctgtcaccgaggtctgctcatactgctctgtggcagtgttttgctcaaggcactggcacaaaggtgatggcattctggctgccactgttggagctcgtgataaaccacctgtgtctctaagccaggagtcttgtgtctcctccagcayccctgaaactgtggcaggctaacaggttggtgtccaagca

SEQ ID NO: 858334 - DNA, 408 bp, Homo sapiens
acttctttgcacagcagcatataatgtaggcaccaacatgcttattgaattctgcagatgttgtctatgtgattagtttatctgttatgctgatttagtgatgactcggtggccagaccttaaataattctgaaagcaatacctctcagagataaacaggagttgtggttttcaagcgttgtttatttctttagaagatttgcattgaaagcaggatagaaaacactaaggaccaccaactccagctgatccattctaaagctggaacataaattagtgacaatagtgaattctcacttgataaataaatacaaaggagatttggatgatttttcttctgccttagcaattgaacagtgcagggctstgtgtgatgccaacagtgacgcgtgtgttatgttagagcca

SEQ ID NO: 858335 - DNA, 631 bp, Homo sapiens
actgtatggacttttgctccagcttccatttatgagctgtcagtaactctatgattaaaatggggacagtaatggtactcagctcactgggttgtgtatgcccaaatacatgcaaacacacacacacatatttcrcatataaatattttatataagcctattgtaccatggtagtttatttgacctaaagatattcacgttcaagtttctctcaacactcaattataacaaaagctattataacacatgttgagcatttcccatgtgcaggcacttttccacatgcttttcaagtattaattcatttagtactccccaaacctgtgaattaggtggtgctatgttcctgttttagagatgaggtgtttgagacaaagaaagataattagattcacttgctaagatcacaaaatgttgggatttctttaccatgtttattgtccttcaactattgaacaactctacacatgcacacacataagcatgcaaacacacacgcgcatgcacacacacagactctcaagggatccaaagccatagccaacatgtgtttgctttcttgtcattttcacaccccaaggaaaaggaagcctcccttttcactctcctttcctgggatgttgaagaaact

SEQ ID NO: 858336 - DNA, 685 bp, Homo sapiens
tccaggtgattctgatgtccattaaagcttgggaacattattgttattggcatagttgaagcgcgatagacacagatgtggtcccagaagatgctaagaaggaagagaattttgaggagtcacagtagtgctacacggcccagggctaagagtagctcccagaacttccacctgcagctctctggtgagatatcagccatgtgaacaaacctacccctaatagaggctgggagatacagggcagccatagcacaagatgtgtttggttggacaactagctctttccatcctgtgtgtaatatttggacaagctaatcaggtgcatacctgtgttcaggcaaaggtagcacattcagagaaaagttagcctcattaatgcaaaattatgaagtggggttcctaaacatatcatgcttccctactctgagcactaaaaccttaactctagtattaacgtctacccatcaaggtatctattttgctgtaatagtatctcctagaaaggctctttaacttggagcctgttggggacaaaggaagagtttgcgcagaatgrctgaatccacacactacaccgaaaatattcaacacttcagaggacactataaagctcatatagagggtcttgcactggtccgcagggccttctccatgatgggcaggtaagaatgtaatgacagtggct

SEQ ID NO: 858337 - DNA, 618 bp, Homo sapiens
gctctgttatagatgcatagcatgattttgtgtacatgtattgaagaatgaatgaagacagaataaagttacttgatcatcagacattaatcaggtaattctgtcagacctcaaagttgatttagctagatattaattttcagatttcagttactcatttcacaaatattttgttaaatcaggtgcacgtttttaagttatttgagttattcagaggaatgatgctatgaaatttaaaaattattttaatatcaaaatattaaatctttatattatatacctagatatttgcacactaaattaaaccaggaacagaaatacatgcagtttaaaatgattaaattgatcatacaagagacaaacttctcagtattatctattatataggcatatctgtgacatccacaaacacacatattcatagcaatcttatattggataaacttgtcttgttctctgaaacaattgtacctattttgcctctgtaatttaatgggttgctggggaacttggtgtttttggatttatttcttaaaaaggtcatacaatgagyagccatcccagaatacactttttcaaaagctctttttcagtgtccctaatagaagcctcatttca

SEQ ID NO: 858338 - DNA, 549 bp, Homo sapiens
tctttgagaccctgatttcaattattttgggtttattcccataagtgggattgtcggatcatagggtagttccacttttactttttgagagaccctcatactgtttcctatagcggcgacatcattttcccattcctgctggcagtggctgccgtcatcatgccggctgcagcagggaggcatggctgggattacagactccagaagacccagcctcctgggcggggctactacgcagactgcggctgtggatccaagcctccttgtgctcttccagcgggccaggagcaggtaggatctgccctcctgggtgagtgcagctgcaatcacccaacatgtggctgcagacctaggcctcctactccatggagcaagcaggcaccagggacaagaaggaaccccgcccttctgagttggcagggcaggggggagctctactgtggcagccygcccaggctcaggacctgaccgtctctgccgcctgcaccctcgggggctgggaaggccctaccccctttacagcatccatgcaggctcagaggtgtctgc

SEQ ID NO: 858339 - DNA, 531 bp, Homo sapiens
ggtggatacagcaacctacacatgcactaaaattgtatagaactagtattacatcgcattgatggttgcacaatattgtgaatatactagaagccacttttaaatgatgmaaatagtgaaaaatgtttggaagtaagtacatgtatacacagacatgagtacaagtaaaatctgagtgagcctaggtggagtgcgtcaatatcagtatagtgattgtgatattcaaagaaactggactaagctattctttcttatatctgtatgttcatccaaaactattcaataaggtctcagcataaacaatcaccgcagtaaaaataccaacaaaaaattaccaaatattgtctttcatcactcaagtaaccatacgtatagtaaaaacaattgtgaaatttaaatatggaattttttgagaaaacggtaatgaaatacacagagtagaattgtatggagaaaatggactaatctttattatgcatcatatattatactagcaaagacatgaatttccgtgatagagattagtaatac

SEQ ID NO: 858340 - DNA, 541 bp, Homo sapiens
atacacacatatatgtgtgtatatatatgtgtgtgtatatacatatatatgtacatttgatgttatacctaaartatcacccaaatcaagggcacaaagatgtttttctatgtttgtgttctggaagttttatacttatactctatcaatcaatcaagttttcagttaaatttcctataaggtcagaaatatgcctctaggttattttaatttatcatcattattatatttcttgcatatatacttccaaattttacagaagtatttgctgaaaaggctatcttttctgcccataaccgtgtatatattcagtgtctatactgatagaggtctcctaattgtttttctctcctataatattgatctattataaattcctaatataagggactgtgaagcatccacttgtttttttagaaatgttttggatattctgattcctttgcttttgcatacaaagtttgtaatcagctttcttatttctaaaaaatgaaatatttgcttaggatttttaataggataatgttgaatagaaaaatca

SEQ ID NO: 858341 - DNA, 650 bp, Homo sapiens
aaagatagttaaattttgtcaaatgttttttttctgcatcagctgagatgacgatgagatttgtgtttattctgttaaggtggtatatcacatcaatagatttgcatrtgctgaaccatccttgcatcacagggataaactatactttgtcatagtgtttatttctttaatgagctgttgaatttatttagctagattttgtttcaggtttttgcatttgtcaggcttaattttattttcttttagtgtcttttttctggcttttgtatcactgcaataggagcttcataaaataagtatagaagtgctcccacttgagttatttttaaggttttaagaaggattggtattaattctattttaaatgctgaccggttttaccagtgaagtctactggatttaggattttctttgccaggaggtttttgattactcattcatatctccctactaattaaaagtctgtccaagctttatatttgttattctgtattatttggttgtatgtttctaggttatccaacttgttggcatatgattttcacaatagtctcttggtattttttttttcatttcttcagtatgagctgtaaggtcgtctttttcatttctgattctatttgaatcctctctttaaatctagataaggg

SEQ ID NO: 858342 - DNA, 487 bp, Homo sapiens
gctgcagtgggagtaggaaaaaggatagccttattgttcytaatacactcgcccctatccatttatcagacagcaattgataagcttttgttccacagatccaatataatcctgcaggtgttcctcaaattcaggcaaggtaaaactgtcctgtggcatcagttctctggcttccagggccattgatcttctatattagtacctccacatacatcagcttggcaggcatcaaaatatatggagacaggccctttatgcaagtaagggaatacttctgttttgtttacaagtttattgaccccggtttctgtggggtttgtatatgatggcattagggatttgccaatttggacttcaaatgagaaatcacagggcaagaactctgggtcataacatacttagggttgcctgtttccaggatcacagactgagtaacaagtctggttatagacacaagttcctgtatgagtccctgtacactcatagt

SEQ ID NO: 858343 - DNA, 587 bp, Homo sapiens
gctgtatgcagtttccatttgatttttaacatctgcgttagctgttgtactatttctgccacaaatgctgagccattgtctgataagaaagtgcagacaaatactagcatgtaccggtagcctctggcttgagacagcttggtaaaatccacaagcaggttttcacagggtgtagctccagtttcttgaatccttgggggccgtgttggcccctgccatggattgttttgggcaccagccaagaattgctcagaaacagctccagtgatggcagttaggtgtggcacgtagaaatgccatcctacaagagtttctaatgcaatttttcccatatgtgttccttgataaaactgctttatgaaccagagggctattgcttctgggatggcaagcctcccatctgagaacttccaccaacctcctttctggtaacttccactctcctctcaaactaagccttttcattagaggagtagttarggggttctgtaagtggaagctccagtaagggcatggtaagtgttttctcttccttcttagttacctctgccattgcagttcttttggcttctctatctgcctttcca

SEQ ID NO: 858344 - DNA, 599 bp, Homo sapiens
aatgccttgaaacaggtggccatcccatagccaccaagtcttgtcgcttggacaaatatgccacrggcagataccatgatcctagtgtttgtaccaaaagtcacctgtagctattccttttcttgcatggacgtacagtaaaaaggctttgtgtgtctggcagtcctaatgccagggcctggatcaaagccttcttgatttctttgaaggccatgacctgctcttttccccacaggaggggttcctttccccccactttgtggcttcatataatggcttagccatgagcaagaaacttagggtccaaatgtggcagaaccctgctgtctctaggaactttcttatctggtgctgggtggttggagtaggaagtgcacaaacagcctgctttcattctccaccaagccatcttttcccttggcttacatagaagcctaaatactggaaacttttaaagcagatttgagcctttttcctgacactttgtagcttgccttccacagcaggtgcagaaggttttcggtttttcccaggtgcagtagcccttggccagtggctttcttatacgatgattctgaccattttccttagtctcttga

SEQ ID NO: 858345 - DNA, 577 bp, Homo sapiens
cataataaaacaaaaattcatgaagtctatgataatcatacaaatgaatgacaataaacaatgytgtgccaaaggactcagtgaggccaccatatttgtgattgaattttaacttcatagaggcaagaggtgctccttacaacttttgctttgcaaacatttatttctcaatttaacccaccactactgtgaccaccatcacacagactcaccaaaaattaggtaaataattatcttgtttttattaatatttattaaatgtatacgcagtttccatttagttcattgttttatattagaagtgtttgggttctttatttataagtttggtgatgtttttgtgaccagaaatatgctgtaggaacttaactcttctttatactaattagcttatggtaaaattaattttgttatatgttgtttcatttgaaattgcagtttccaagaacctattgacaatgttaagtgaggactaattttatatgggagtacacagggttagaaaaaaagagcagagagttggcaagttatttttgaatgtctgtttcctggaagaggtaaaattttttcctatttc

SEQ ID NO: 858346 - DNA, 596 bp, Homo sapiens
tcaaaacacatatcgctgagctccatcggtagagatcctgttttgatacctttggttggactgtggctcggtaatttgcatttcttagaagtgagtccrttcagctggtcaaccgccccgcctgtctctctgtgaccctcccagggcgtcagcggtgcttttttacttgcatcttgtgggaaaaggatccgcgcaggcagcccccttttagcaccgtcctgagtacacaagccaagcgcttaaatacctcactcagccctggatttgcagttactcagggcaggcgaaggcgcgtttccgcgtttggtatattcccgcgtgctgccagctgatggcgccagagaactaacctactggaatagggaggagaaaagaagcagggaagaaaagcgggaggtgaagattaaggccaatggtagcttccgttcttggactcgaagattcccttaatgggttgacatcaatgaaagccaatggtagcttccatgaaagccaaagctgaccacccccccaagcttcccattctcttaggaggctgcattttgggtgctaaatggagggatgggcgtgggagatgctgggacatgtgttggctg

SEQ ID NO: 858347 - DNA, 587 bp, Homo sapiens
atgaaagccaatggtagcttccatgaaagccaaagctgaccaccccccyaagcttcccattctcttaggaggctgcattttgggtgctaaatggagggatgggcgtgggagatgctgggacatgtgttggctgaagatacacctgttagtccaaggttgcttcggctcatagtggctcaaccctctttgtcaattaaccttctcagttaactaaggctgcctcacctgtctttaggcaaacctaccccccgtcacgctgggtttttagagtttttaaaagcgtcacggtgtaaggccagcgttgcttttcgtattcttagcgggtatttctggtgctgacagcggggagctgccgggcgggagtaggagtggagagagaatagggagagagataacaggtgtgaagcgtctctcaatgccaggcatcctgctttcgcaccttccataggttttttcgcaatcgtctttctatttaatcattttctgtttcatagattaggaaacctcaactaagttgcccaaggacagcccttgaataattttatcttctgtcagacaccaaagcctaaggtctcttattttgcaga

SEQ ID NO: 858348 - DNA, 606 bp, Homo sapiens
gaggctggccattccaccccaaacttttattatgcagatggggtctctacctggcaggtgccatgtcgcctgcacaggtgaagacagaaaagaaaagaggaggccaggtgcggtagctcatgcctgtaatactygcactttcggaggccgcggagggtggatcacaaggtcagaagttcaagacaagcctggccaagttggtgaaaccccatcctactaaaaaaatatgaaacaaattagccaggcgtggtggtgggcgcctgtaatcccagctactcaggaggctgaggcaaagaattgcttgaacctgggaggcagagtctgcagtgagccgagatcgtgccactgcattccagcctgggtgacagagccagactccttcaaaaaaaaaaaaaagaggaaacctccatgttgaatatgcctggcttccaggtatcccttttctattggcataggtgccggcatttacttatgcaagcttttggcttgcttatctatgcttgaggcttgatttttcaggctgattttggttagaaaatgaattatatgggggctggttttttattaaaagaaaaatcttaccgaaaactcccttacccacattaa

SEQ ID NO: 858349 - DNA, 642 bp, Homo sapiens
gaatacctgtttagatattagaagtaaaacagtgttttatttttctgtagtatatcttgtcataagaacattaagagaaaaaacacattttagaaaaacatgaaaatattgtacaggtttgactgcaaacacacaggaaagtaataagaaatagcctgtgttcatgtgatggttaagttaaaatcagactgcataatatttcatggtatatgtgtaccacatttcttatccagtctgtcactaaagagcagtgaggttggttccatgtctttgctattgtgaatagtgctgcaatgagcattcgtgtacctttatggtatgtatattcatgtgtgcatgagtgaaaatgcatgtgtcattatgatagaattatttgtattcatttgtgtatatacccagtagtgggactgctgggttgaatggtagtcctgttttcagctctttgagaaattgccttactgctttccacaatgatgacataaatgaactaatgtaaatactaatttatactctcaccgacrgtgtaagtgtatctttttcccttcaacctcaccagcatctgttatttttgagtttttcatactagccattcagagtggtgtaagatggtatctcgtacttttgattttcattcctctaata

SEQ ID NO: 858350 - DNA, 610 bp, Homo sapiens
taataggaggacgttggttttttcagtttttaatgaatatacccaacaaatctgttctaaatctctctctctcatcttattctaagtgtttttaaggtactacttcatttaacgaggtagrtatctttattacccccaagatactgataaggaaaccaacacacagagagtctttgtattgtgcccgaggtcgtacacctaacggtggcagagttgaagcttaaatccaggccaacaagttctagattccagggttttgtccatttacagcatactggctgtgctgcccttgacacagggagattatggggattaaattcaagatgagattttgggttggggacacagccaaaccataacaattgtcataactcaaaattaacatgctgaaaagcatatcaactactcacttttgaaagagtgagtatggttacaacctatcagactgagatgttgattttcttaaattcatagtttttagaaaagatttgcatttatacaagcaataaatcatgaccagttctcagaatcattgaaaaaaatatttttttcagtatatcttctaaagcagtccttttgaagcctaaataaaacagagttcccccagaag

SEQ ID NO: 858351 - DNA, 579 bp, Homo sapiens
tctattttggtaggtaggcaaagaaacagttcaccttcctcatccctccctctcctcctcccccttctccaccttctactcctttcccttactgccctcccctctgtctccttattccctctcttcctccttcctccctctgcttcttgcttttcttcctctgccactgcttcttcttcttcttgcatatattatgatgtaacatgctaggaatcttcctttgaaactatagataaaattgtaaaggagataaaggagttacctgctaatatgaaacacattttagttatatacaaataagaaatagttatttaaattaaaggaggtaatatatgatcatgtatagtataaaagtgttatgtatgggtgaggtatgatgattattaattgtctggaggaaacgggacattttaggaggtgatatttgaggtgaattatacaaagaggccatccataccacattctaggaaaaaagaatccatagcagagtgctcagggctgtatacatcaatatggaagtcatcaacatataacacgtatgtcaggcatggyaatgaatgagatccctttggcagagaa

SEQ ID NO: 858352 - DNA, 489 bp, Homo sapiens
cacaaggtgggcaggactggactggacaggcccacctacaggtgccctgaggtcatgcactagcatcagcactgagagagaatccagtgggtgaccaccaagcacccaaggtgtgcctagatgtggagctgggaaaactccttggccccaagtccactgcaccggcaggtgggggacagcctaaactcctaatctaggagattgggtgttctcggtgtctggagatacgcctgggcatgaagcacaaagggctccactgcaccacagtctctgtagagcatgggcggggcagctcatgctggtaatccagaggaaagggtgttctggctgcctcgagatgtacttgggcgtggattggaaagggtatggctgtaccgttatctctgtgcagtaagtgttgggcagctcaggctaccaatctgggcaaacaggtgctctgaacacatggagatctrcctgggtgcggagtgaagagggcctcacttcacc

SEQ ID NO: 858353 - DNA, 590 bp, Homo sapiens
gggcaatgtacatgatttcctttgacccataatgattataggaaagtgttttacatcaaataagttcatctctatatctcagatcataaaacaatgaagtactgcagacatgaacaaatccattytcaattaattttcttctttcaagacatgaatctgtcagtcaagtagttcattattgtcgaaaaagatatgctgtcaagatcacatagtgagattgtgattaattgtggaaattaaagtaaattgattatagaagttattgtttcgaattttctacaattaaagtgcctttaacaatatgtcaaacaaaaatagcctcagatgcaagatgacaagcccagatttatattatacttcaaaaaaatagatacatcttcacaggcataaagaacattaggaaaccaatacgatctgtatattacttctccacattgatttatttttaactcattacacattactaataaataatattcatttagtgttaattaagtaatttaacaaaacacattttattcaatccatgcttataattatacatgtggatattgatttatgttaaggtaaagccttcattttagaatatt

SEQ ID NO: 858354 - DNA, 609 bp, Homo sapiens
ctggcacatttggattttatagtagatgttgagaagtatctggagttaatcatgaaaacataaaacaagaacaggaaggtgtttgaatmcatcagagtttttacggagggtataatttgactagattcaaatttcaggaaaatcattttggaaacattgaaaaggattgaggttcaagaacaaagacaagttattcaaatatgaatctagtatattaatactcaagccaaaaggataaaaaataaaggtatgatcaaagacattggtaaaggagtttaaagtagcttgtcaacatatttattatttaagttatccaagatttactgactaactgcaggcaattagaaggagaagtaggatttttttttttcccacgggtttctgggttgtccagtcgtgagaagagttataccattcaaaaaggaacggaataaaataggacaattgaggggagtagatttggatgtgaagagagaagagaataaaatacaagatatgggaagaaaaagggatagtatttaagagaagaaatatcattaaatatataaccaatatgggaataattgacagcatagcaacattggatcttccaacctggaaaaatggtat

SEQ ID NO: 858355 - DNA, 645 bp, Homo sapiens
gtagacacatttacccaattttaatattggactgtaaggtaagatgtttatggaccctttttaaccctttataatttttgttaaagagcaggttagtgctttaagagaaacctgttgtgctcttactttaatratcaatttacagaaaaactggatgatgccccttcaactttagccaatatgtttatacccagcatttcctttacaattaaccttccaaaatgttcttaaactttcatttttattttattcaacttagaacaattctttaaacttttaatctaggtaaaaagtcacactcttatgcctctttataatctttttgccaaaagtatatgcaaactgttttctcaataatcttacatgcatgttacactgttaacttttagcaagctttacttttgttggtaagtttgggattttaattatgtactaggtatagagcctaggacctagacagaagtgcagataaggtctgactcattccagcatttaactccatgtgtcctgggtcttacctagctgtaaaccaggcaagttgtacagctaagggttatagtggcattttataacgcattcaggaggcctaatcacttttaaattgtttaacatgtcttgcataaattcccttttataaaatgtttc

SEQ ID NO: 858356 - DNA, 645 bp, Homo sapiens
gtagacacatttacccaattttaatattggactgtaaggtaagatgtttatggaccctttttaaccctttataatttttgttaaagagcaggttagtgctttaagagaaacctgttgtgctcttactttaataatcaatttacagaaaaactggatgatgccccttcaactttagccaatatgtttatacccagcatttcctttacaattaaccttccaaaatgttcttaaactttcatttttattttattcaacttagaacaattctttaaacttttaatctaggtaaaaagtcacactcttatgcctctttataatctttttgccaaaagtatatgcaaactgttttctcaataatcttacatgcatgttacactgttaacttttagcaagctttacttttgttggtaagtttgggattttaattatgtactaggtatagagcctaggacctagacagaagtgcagataaggtctgactcattccagcatttaactccatgtgtcctgggtcttacctagctgyaaaccaggcaagttgtacagctaagggttatagtggcattttataacgcattcaggaggcctaatcacttttaaattgtttaacatgtcttgcataaattcccttttataaaatgtttc

SEQ ID NO: 858357 - DNA, 408 bp, Homo sapiens
gtcatcagaactggtttcagcttcctctcaaatactcatgattgaaatgtacaaaagaaattttaaactattttataattatttaatmcaatatgccatttcatttctgtataataaatcattttaatgagaaatgatagagaaagtagctgaggagactatagaatttttgtagcagaatgggaggctgtgcctcttacgagctccagctctgaaggcagattgagtgttaagaaaaagcaagccaggtgcacctcattgagggcaatgggtttgctaataaagaacaatggtgctgctagcaggtgggttaccaaatattagctgttctctctctctttggactggtggacatcttcctttagggaacagagaagcccagttcatgtttctctgatccctgtctac

SEQ ID NO: 858358 - DNA, 623 bp, Homo sapiens
ctctcctgcagtgtggaactttgaccaaacaactgaatacaatgctgagaaacctcttagaacatggccatgggtaatagtgctatttgtaatcaaagacttaaaatagaaggacaaaggatctatggccatcccttgaagagttttaggattagtattcaataatttaggctctcaagtgtgctagttaccatacaggctataaaaataatatatctactttagtttgctattcatgtagtttatccatttataccttattagaaaacttggccaaggacagttgtgtaatacaattaatgtgcccctcagttagatggccacatttctcctgtattgacatttttacatctgcttttgaggcaggagaggtatccaaggaagtaaccatgttcttgggatgcagcaaccttggtgatcatacaatcaacaacacaaatctcagcatttacatcgtaactgagctcattcaagcaaagctattttcaatagggaattttccccatagagagcatgtgcattttgattttacctgtcctcacagtgaccctttgctcattatgatagtaaaaaacacascccttgggggagatttaagatgctaatgagacacgtaatgtatg

SEQ ID NO: 858359 - DNA, 633 bp, Homo sapiens
gcaggatgtggggcatgataacsccctgtggttaggataacagctgttctcagttgtaacataagcagtacaaagtgaaatactcacaaaattatcctcagggctgtggtaggaaggaagaatgttatagaggttgatttgcctacatccatataattggtatattgtaaagcctagtttggactcaagtccatgctttttcttttgctttgttaaatgtatttatttttacattgcactctatccttgaagaggatgtgtgagagctgcctgcctttcatgggaagaaagggttagtatgctgaaggctgaagagaatttggtggctgttaatgtaccatgtaatggtaccatgtaatgtgtaatatgcaaaaaagcacatcctactgcctcccagaccctcatcagctttccttacatttctgtaaactgttcatgttttactgagaaaacaattcacaacaccactctgcgggaagatgggacccagtacagatgggacatagtttaatcttcatgtgttagagagtgagtaactacatatcagaggttttcaaaatgtggttcctggaccagcagcatcagcatctcctgggaacatgttagaaatacaaactgccccaaatcgactga

SEQ ID NO: 858360 - DNA, 615 bp, Homo sapiens
tctcctgcagtgtggaactttgaccaaacaactgaatacaatgctgagaaacctcttagaacatggccatgggtaatagtgctatttgtaatcaaagacttaaaatagaaggacaaaggatctatggccatcccttgaagagttttaggattagtattcaataatttaggctctcaagtgtgctagttaccatacaggctataaaaataatatatctactttagtttgctattcatgtagtttatccatttataccttattagaaaacttggccaaggacagttgtgtaatacaattaatgtgcccctcagttagatggccacatttctcctgtattgacatttttacatctgcttttgaggcaggagaggtatccaaggaagtaaccatgttcttgggatgcagcaaccttggtgatcatacaatcaacaacacaaatctcagcatttacatcgtaactgagctcattcaagcaaagctattttcaatagggaattttccccatagagagcatgtgcattttgattttacctgtcctcacagtgaccctttgctcattatgatagtaaaaaacacascccttgggggagatttaagatgctaatgagacacgta

SEQ ID NO: 858361 - DNA, 681 bp, Homo sapiens
gccttccaaagtgctaggattacaagtatgaacccaccatgcctggcccaacattamtttggcatgctcaaaaaccttcagttgctcactatgaactatcaagcatatttcaaatgtttcaaaccaatatccccagctcctagctagaccacattattctagcgtgagaggggattgtgtaaagtaaataagatctgagaaatagacaaatcaaaaaaaaaaccctagctaagttgaagttaaagataaattttaccaggttagccacagagaagccacgtccaggtacagcaccaggacagggaagctggattcagagctgtatctcagggaggggtgaggtgtgctctaagaaaaagcagctcacattcgtaatgcccaaagcccctttgaagtgtggacgaaaaagagaaagttcctgcctctttaaataatcagagtagaatgatgaattttttattcctgcgtataaaaccaaatttatcaccttggctctaactagcacctcctcccaacttcctgccctaacccaggcacagaagtttaagtcatgattgtttcatcttttccagttccaacttttcttcatatccagttagtctgcaagtgttagagactctgcctccttgatgtttcagacgtctggccaatccttccctcccctggatccttggttgaagt

SEQ ID NO: 858362 - DNA, 488 bp, Homo sapiens
cattctgtatgtgtgtgtgcattttactggagagagagctcctaacttttgtaatattctcaaaggagttcatgactcaaaaaaatyatttacaaaccattgttctccggccaggcgcgttggctcatgcctgtaatcccagcactttgggaggccaagaagggccgttcacctgagaccagcctggccaaaatggtgaaaccctgtctctactaaaaatacaatcagctgggtgtggtggcgcatgcctgtaatcccagctactcggggggctgaggcaggagaatagctggaacccgggaggttgaggttgcagtgagcagagattgcgccattacactccagcttgggcagctgagcaagactccatctcaaaaaaagaaaaaaaaagaagggctcccatctgcttttgcagaatcagagaatgtgatcactgcaacggttgaggggagggcgcaggggaaggaagggggagggccaaaggctgg

SEQ ID NO: 858363 - DNA, 488 bp, Homo sapiens
cattctgtatgtgtgtgtgcattttactggagagagagctcctaacttttgtaatattctcaaaggagttcatgactcaaaaaaattatttacaaaccattgttctccggccaggcgcgktggctcatgcctgtaatcccagcactttgggaggccaagaagggccgttcacctgagaccagcctggccaaaatggtgaaaccctgtctctactaaaaatacaatcagctgggtgtggtggcgcatgcctgtaatcccagctactcggggggctgaggcaggagaatagctggaacccgggaggttgaggttgcagtgagcagagattgcgccattacactccagcttgggcagctgagcaagactccatctcaaaaaaagaaaaaaaaagaagggctcccatctgcttttgcagaatcagagaatgtgatcactgcaacggttgaggggagggcgcaggggaaggaagggggagggccaaaggctgg

SEQ ID NO: 858364 - DNA, 555 bp, Homo sapiens
tagaggcccctaaatttgacttcatttttttatttatttgtttattttaaattcataaaattctatgtattcattatgtacatggtgttttgaagaataaatacattgtggaatggttaaatatagttaattaaaatacacattacctcatatagttattttgcaacaaaagcattcaacatctactctgcatttttcaggaatataatattttgttattaactgtggtcaccatgctgcacaataaatctcttgaactcattccttctatctaactgtaattttctatcctttgaccaacatctccttaacaccttcccctcccaactgcccagcctctggtaaccatggttctactctctgcttctatgagatcaacttttttagattccacatgtgagtgaaatcctacagtctttgtctttgtgtgcctggcttattatacttaacataatgtccttcaggttcattcatgctgttgccaatgatgggatttccttctttattrtgtctgaatagtattccaatttatagatctctatctatctatcatct

SEQ ID NO: 858365 - DNA, 693 bp, Homo sapiens
ggcagctggtttctcccgtatatggatccccaactactcrctcctagcaaaacctttatatgaggcgatgaaagggcagggaaaggagcccctcctttggggaaaagaacaggatatggctttcaaggaaatcaagaaagctttaattcaggcaccagcactagggctgccagacatgacaaaggccttttacctgtatgttcatgaaagaaaagaaatggctacagtagtcttagtgcaaatgctagggtcatggtattggcctgtagcatatttgtccaagcaactagactttgtggctaagggatggccaccctgtttcaaggaactggccgccactgccttgttagccgaggatgctaacaagctcacatttggacagaagctgataattcaggtgccccacacagttgtcaccctgacggaacagagaggacatcattggctctctaaccctaagatgctaagatatcaagggctcctatgtgagaatacatacatcaccttagagactgtgaataccctaaatccagccacactgttaccaatagaatatgtggaacatgggaagcccccgttatgtgccccagggtaccactgctgtgtagaaacagtggatgaagtcttttcaagccagaaagacttaaaggatcaacccttaaaagacccagatgttgaatattttactgatgg

SEQ ID NO: 858366 - DNA, 617 bp, Homo sapiens
atttagaatgcctctacctttaggctcggacaacagaccagcttttgtagcagaagtagtacagcaactgactcagatsttatagattaaatgaaaactgcatacagcctatcaaccacaaagttctggaaaggttgagagaatgaacaagacaccgaaacaactgttgaagaagttttgccaagagactcatttaagatgggatcaggtattacccatggtccttctctgagtcaggtgtacccctactacattaaacgggtattcaccctatgagatagtgtacagccgaccaactgcacttatatctcaggtaaaaggaaatttaaaggaaattggagaactgaccctaagaagacaaatgcaggcattaggtgaggtaatacaagaagtacaagggtgggtaagagaaacaatacctgttagccttacagatgcaatacatccctttaaacctgctgactctgtgtgggttaaacgctggaatcctaccaccctcgggcccttatgggatggcccccatattgtaatcatgtctacccctaccactgttaaagttgcaagtattacaccttggatccatcacagccgacaaacctgcagcctcagttcaagac

SEQ ID NO: 858367 - DNA, 463 bp, Homo sapiens
ctttgatcaagaaagagcaaacctaggtgtttcattggtcattattaaaaagactcaatgagctaaagttcaagtcagtccaatgtcacagttcagatttttcagatccttcaataaacattttaaccccaaggatccaaaagttcagattccaccaatgtcagccaagaacctatttactcagctagctgaaagtattgctactaatctttgagtcacctcatgttatgtatatgaaagtaccagtataagtaaccaatggccctgggaggctagaaaactaatgccacaagataacttcaccatactggaatttgttacaaggttcaatgtatatccaagtgtctgtctattaaaaamccctatcattggaagatactgcatagcatgataggaaaagactttcagactcccgtaggagatacaacctgtttagatcagcaatattttgaagagtctaaga

SEQ ID NO: 858368 - DNA, 315 bp, Homo sapiens
attcacattctccacactttgaggcacatatttattagttgagaaaacaccagtaacatcaggaaaaatcaatgatgtaattaatagtctgttggtggagatggttgaatcaattacctcctctgtctctctacagcaatggtattgttttgtccaaatttgggggtgtaaaaataataatgaaagttgatcttaatgattactaaatgtcacccactgattaagcacatatatwttaattcaatattcatataaatatttttgtaacatgttgttattctatatgtacaaataaggaaatgcagcacagagagg

SEQ ID NO: 858369 - DNA, 630 bp, Homo sapiens
aaagtgagatttgagatgatttggcagccaacttaccgtgactgtgaccaggtgattccctggacaaggccctttaattcataccaagaggaccttcggaaactttgagayctggtacctctaggattaagcctgctgtgtcctgtatacacgctcacttatcgtattgtcctatacagctaggtatcacttgccaaaaagatacactcattcagccattcccctaaccgtgtaatgatccggaattacggggcaaatactgagggtgctgggaaaacaaattgacgagacatccttttatcttcctaacagggagaacttaaaattacaatgtttacgataatctataaaaagagaagggacatagatagaaaagtggttccgcgtgcgaactctgaggtcagcagtgtgactctgagcctgtcaatgaattcctcagtgcttcagtttccttatatgtcaaaagagagtagtagtatctgcagtataatgtggctatcggaatatgtggcctaatggtaaaatggctacagctgagtctagcactcgctgtttgctaccgctactactgctaatggtactgctgttattattagtaataatactaacatcaagagaaatcaatagtta

SEQ ID NO: 858370 - DNA, 596 bp, Homo sapiens
aaattattttaaaacatccttattaagtagttgactatttaaagcaaaccaataagattgtattgtggtgcttatatgtaaaaataaaatgtatttcaactataaataaaatttgtgggaggccattgttttggattgagctcctgcaccaagctccaacagaccagaccaaaccagaatggagttactggtgctaggcacccgtacaaattgaacttaaaaacaggccagttttccaaaaagcaaaagattcatgcaaccaatcaaaagggacccaggcaacctgaaccggcatgataaggaagccccctctgccttaacccacactaggaaagtaatctgaagtaacttgatgttaaccaatctgctgcttctactatattgtttccttgttcctgctcaagcgatttcacaaaaatctactgttctgccattcccagtggggcttatgtctatttatatactagatgctgcctggttcatgaatagctaataaaagtcaattagatcttcaaaaatcaatttttgaaattttgttttttgacatcacmataaccaaaattctaggaagggagaaattaaagtacactgctgta

SEQ ID NO: 858371 - DNA, 657 bp, Homo sapiens
tcatattataacattaaagggatttataaagattgaatattatawtcttacttgaaccgatattttactgcttttttcttattttaattagcatgtcagtaactgtagaatggtatcagataacctttagtcttgtttatttccaacaaaacttttctaattcttgaaagattaacataatcttgcactaatttgcattctagtacgatgcttttcaaccttgactgcacattagagtcacctggggagagttaaaaaattccaatgccaagggcaccacagaccaattaaatataaatatttgatggtaggacctaggccacagtatgttttaaagctccccaggtaactccaatgtgccgccaagcttgagaaacactgctcctgggaaagaaataattatctagtttttgttcatttttttccaattagaatttatttcagcatgctttcctggaagtatccgttttgttaaatttggcattgaaaaccaaaaactaaaataacaattctttgtttttagatttgatgtgaaaagaataaattctcagtaagagaaatcatattgtgtgtagagtttcagtctacattttggagtgttggggagagaagttcatagctttcttcagattctcagtgtgatgtttctgtggtagg

SEQ ID NO: 858372 - DNA, 669 bp, Homo sapiens
tgatttcactgttgtaattttccagtgtcatttatcatccttacttcatttttttttaaatccattatggtttctttcttttcttttttttatttttaagtgtatacctcygtttcattttcttccttttattttaagccatttcctccttcttgtcctgtatgatagggaacatggctttgtgaattttatttaaaatccctgttttcacctgttttaatagtagtatatttacttattgctctccttttaaaaatgttcttatcccattttctctgtagtatttgtgtataggctccacctttatatttgtttttttattggctcaacactctggattagcttagatctatccaatgtcatgtttacaaccagataactcctgttgttttcttactattcacttcttgctggttaaatcccattcatgctgattaaatccacttcatgttgctccagctgggtgacacgttggtgtgtggacctcccagcagctagagaccaggacacatctatgcaatctgactttgctctcaatagtaagtaggtctcttatgtcccaaaccttgttatatcacaaggatgaaaagctactattcctagtacagtaagttcatttcttcaccatcttcctctctctcctactgtataactcattttaactaattt

SEQ ID NO: 858373 - DNA, 612 bp, Homo sapiens
ctgtacaacacccatgacacgagtttacctatttatgaaaccttcacatgtaccctctaacctaaaagtttaaaaaagatatatttgttaatatgtgaaaagggatgtgatataaatatatgatcatcttcctgatacacacatgcacactataaaattaataagtcaaaaaatagttatatctgggtaaaggatcacaagctatctttatttctcacacttttctttattcctttaaaatattttgtagaaagtatgtatatcttaatctgcagaaaaaagtaagttactttaagagatgaatggcatcattctcaataattgggtttttgacataaggcttcagcaatggatggtattaggtttttaaaatattgagcaagccataccttaaaagaatcatttggtattaggaaattatttaaagcaatgccttttaggctattagcaacttttttttacttcgttaataattaaatataggaggctttaagtcktttctcagattacttctttttctaccctttgtgtttacatgaggttaaacatctagaactttgagatagaagatttgtttgtgttgtttgatgacggggaaagattcgggatgtg

SEQ ID NO: 858374 - DNA, 273 bp, Homo sapiens
gtagttctttaaaactgattaactatgaggatggtaagactgggggaaaggataggccaaaacttggcctgaacacgagtgtcagctgatcttgaaagagtttctaattttagtgtaattaaaataaaaatttttaatagcttcacctattgccacataatattaattaggcctccaaagacaagaaaagctcctctatgaaccacttttacgggaatctctgtgccctcttagagtttcaagtstgcgacttgaaagatttaaactacaaaa

SEQ ID NO: 858375 - DNA, 590 bp, Homo sapiens
cacttctttattgaaagcagaaatatgtaatatgtgttgtttggctctaaaaagagaatgactgtcatttctggaaaagttagacaagtaaacacctcatatttattcggagactttagcttgagtagtttttttgtgtcttctgatagtattgttatcaactatttcaaagttagtatctatataccctttttccttaagtaatcatgcatatttccagactattagtaaataaaaataatagatactcttcagtcaaaagaaattctattttagatcttcaaataaatcaacatagtttcattctcttaaaagagacttgaaagaaaatattgagatcccataatcaattatgctataaaacttttcacaaggaaaatttaagtcaacagtctcctataaaactttctgcagggttggaaatgttttatatccaggctgttcaaaatggtatccaccaccatgtgcccttctacacatttgaaayatggctagggcaacagaaaaaaaaatgaattttcactttaatttaaatttaaatagctacacgtggctggtcacagcttattggagaatgcaggttaagtaaa

SEQ ID NO: 858376 - DNA, 626 bp, Homo sapiens
tggacaagggcagtcctaatcataagccagactgcatttgcacaaaacagtagagttagcctatgccttcctgccttaaattgtggtgcttgcttgcttctcttccttactgaaaaaaaaatgtccwttgtgactttttgggcacttttgtctgcattaaaaaccagttcaggcagaaaacctttctcctcaatgattttcttaatggtgtctgggagctcatttgctacttcttggtcagcagaagctgcttcttcttctgttattttattttatttttttattttttgagacgaagtctgtcgcctgggctggggtgcagtggcatgatcttggctcactgcaacctctgcctcccaggttcaagcgattctcctgcctcagcctcctgagtagctgggactacaggcatataccaccacgcctggctctatttttagtagagatggggtttcaccatgttggccaggctggtcttgacctcctgacctcaggtgatctgcccgcctcggcgtcccaaagtgctgggattacaggcatgagccacggcacccagccttcttctgttatcttgacaatttcaagcaacacctcattctgaaattatcaagccatcctttgctggc

SEQ ID NO: 858377 - DNA, 523 bp, Homo sapiens
ttattataattatttgaatatgtgataattactaatattgtcataatagtctgccacatttacgaaaacactggacgttwccacctcagcattttaattgctcaccacagtgccattttctttaggactggttgttttgctttcagtttgcttcctagactatcatcatgagatcaaaagctgtgttttttataccacatgacagcccgatgccccacacagggtcagcattaaactgaatttttgataggatcaggtgagccaaaggatgaataaatgagtactcacgttcaggtggcatcaggtgggaattgtggctaggtaaaatggcatcttgttacaatggtaatttcagtcacctattccttacctcttctgggcaggcggattgatttgcaattggcttcttttcttctttctcactctactaatactagatggaaatctcattgactcttaacaacaaagcaattatcttaccatattcacaggttctaccccacctactagggaagtaaaagta

SEQ ID NO: 858378 - DNA, 627 bp, Homo sapiens
acttgattccatgttgctgagcaagtgccctaccagcacacgtgtagaatgctggaagcttattttctagaaatgattaaaaaaataaataaataaataaataaaagaggatactttcatttcctgtggttgtagtaaaagaagtcaccacaaatgggggtttcaaacttcaaaaatgtattctctctcagttctagaggtcagaactctaaaatcagtttcactgaatcaaatgcaaggtgttggcaggacctcatttcctccatgagagagtccctccctgacttcttctagctttctcaaatggctgtggctctccaaactctgcctgtatagtcacaccgtctcctttcctgtgcatgtcaaatctccctctgcctctctttcacaagggtacaagagatctcacccaaataatgcaatacagtcctaccatgtcaagattcttagttagatctgcaaagacccttatttcttataaggtaatattttcaggttccagggattaggacttgatgtgttttggtggccattaaaaatagtgcccttgctctaatacaaagaatatgtaatttgcraatgccaggcaccgttgagggcataggtaccataaatgactatatgaaa

SEQ ID NO: 858379 - DNA, 632 bp, Homo sapiens
ctcatgtagttttttaaataccaaaatattcaagaagtctaggttttgagaaaatcattgccagactgaaaattacctgatagtaaaatctctgagtaaatttarattttaaaaattttgtcagaagcaattggtactcaaagaacacaaagatttgtaaatttcagggaagctaaagttttctaacagcctcaaaaattttatttcccaacactactttccccaaagagaaaagttttgttgttgttgttgttgttgttgtttttgagacagagtctcgttctgtcacccaggctggagtgcagtggcacaatattggctcactgcaacctctgccccaccccaggttcaagcgattctcctgcctcagcctcctgagtagttgggattacaggcatgtgccaccacacctgtctaatttttgtactttcagtagagacggggtttctccatgttggccaggctggtctcgagctcctgacctcaagtgatccgcccaccttggcctcccaaagtgctgggactacaggtgtgagccaccacgcccagccaagaaaagatcttaatacataagtaaaatatagaacagtctccttgtaagtgtttccaacacataaaagaaaggggaggat

SEQ ID NO: 858380 - DNA, 663 bp, Homo sapiens
gcgaggcattaatttgaggggcaaattttaaagggatgcaaagaaacctcagtaataaaagaaaatacagtattttcttttttataataaaaatattttaattctttatttcaataaaatatattattccctcctatttgtcagaacatgaacatagaaaatatttccaataatacttttaagaatcaaaattaatgcccaaaaaatccacaaggaaaaaaacaccattatttgtttatttatttcatttatttatttttttttagacagagtcttgcctctctgtcacccaggctggagtgcagtggcgcaatctcggctcactgtaacctctgcctcctgggttccagtaattctcctgcctcagaatccagagtagctggattacaggcatgcaccaccatgcctggctaatttttttgtatttttagtagagatggggttttgccctgttgaccaggctggtctcgaactcctgagctcaggtgatctgactgcctcggcctcccaaagtgctgagattacaggcrtgaaccaccacgcctggcccaaaagtactaattaaaaaatatatattattattattaagttccggggtacatgtgcaggtttgttacataggtaaatgtgttccacggtggtttgctgcacctaacaacccac

SEQ ID NO: 858381 - DNA, 592 bp, Homo sapiens; identical to SEQ ID NO: 857262

SEQ ID NO: 858382 - DNA, 569 bp, Homo sapiens
taatattttatgtggatgttcaataatttatttgacctgtcccctactgatgaacaactagattcattctagtgtttctagtcttctgctattgcaaacaaggcttctataaataacattctactgatgtcaccttttacttttacaagttatttgggtcaaaagttatttgctttttaaaagttttgatagatactgaaaaaattatactgcatgagctgtgcactaatttatatacccattaactacgtttaaaagaaccagtttcccattagccttgctaacataatattttacactttttttttactttgccaagaacataattgaaaatatttcattgaaattttaatttatgtttttcctatgttgagtgaagttgagcatctttgcaaatgtttaacactgtactttctttcctggacatctcccctgcctattttsctatcgttttattgcaagtctttccatagtaaggaaaatagacttctactaaaatatgagttgcaataattttttctcagtttgttgaattgtcattttggtgtttgtcatgcagaacaatttta

SEQ ID NO: 858383 - DNA, 654 bp, Homo sapiens
ggaaatacattggtttggtctattggtttggtctagaaaggcaagacaactcaaagtgggaacttccaggctataggtaaatgtaaacattttctgcttggcaatttgttcagtttgtctaaagaccttagawctatagaaaggaaatgctcaggttaagataaaagattgcaagaccaaggttcttttgaagtcttattatcatggctgcccttagagacagtagatgacaaatgtttcctattcagatctttaaaaggtactagacttttagttaatctctttaggattgggagggcctggaagaaaaagacctagctatgttaatagagattctatgttaatagagattctttacagatgcaaatattcccctacaaaggacagctttgtagggccatttcaagatatggcaaagaaacatgttttggggtaaaatatttttattttctttcttgtttcataatgttatgccagagtcaggttggaaagtaagtcacaatatatagggttaaataaaacccaagtgatgagaatttatggtttgtatggcatgacttcccagactccttagataggaatttgggcaagataaaaaaaatcagaacttagtccttaaatgttctatcacctaacttccccttgggtttgatt

SEQ ID NO: 858384 - DNA, 625 bp, Homo sapiens; identical to SEQ ID NO: 857263

SEQ ID NO: 858385 - DNA, 649 bp, Homo sapiens
gtgcagcaaatcaccatggcacacgttaacctatgtaacaaacctgcacgtcctgcacatgtatcctggaactcaaaatcaaattaaattaaaaaaaatctattactttgtcttgtttaaaaaaatgagttacaagttacatacaataaaatatgcccttttgaatgtgtagtcctatgagttttgacaagcactcgtggttatgtaatgatcactactaccatgatcaagatatagaatatttttatcacctctcaaaaaaaaaaaaataaagtttgggcattgatccagaagaaatagaatgccgagaatgaaagtcttatatgggaggaacttcaactcctccatgagttttattggcaactgaagccacctttctctttctgatgatgctctttcccctttgcttgaagactcttaacaagccctcaaacaggctcatctaagagatttacctgaccagagaccctaatttgtcttttgttccatccataccctcttctttgtctctaaggccttaaatgttgtcagatcccaacatgttctgggagccaatttaaaggcraatttgcaagatgacagaatagccacaaaaaatggcaaaactttgttaatttatatcagacttgtgggtttgtgtgtatgtgtg

SEQ ID NO: 858386 - DNA, 626 bp, Homo sapiens
cgttcattcattcattcattcaaatgttcattaaatgtctaatatgttcacacacagtattttaggtactggagatatarcaataaactagggaaattaaaattttctcatgtaacttatattctagtggagaaagagaatgaacaaatgcattaaaatatacagtattttagaaggttatctatgtaatatgaaccccaaagtatctgagacaggtctcgatttagccaaagttaggcatgcacttgtgatacagcctcaggagatcctgatgacatgtactcaaggttattgggggtacagcttgcttttatacattttagggagaaatagtacatcaatcaatacatgtatgatttacattggttcgacctggaaaggtgggaaaactcggagccatggcttccaggtcataggtagatttaaaaattttctgattggcaattggttgaaagagttattatcaataaaaaggaatgtctggtttatgataagggattgtggagaccaaggttttatcatgcagcatgacatctccaggtagcaggcttcagagagagaatcaattgtatatatttcttaccagacttaagatctgtgtggatgttaattctggttggctcttc

SEQ ID NO: 858387 - DNA, 410 bp, Homo sapiens
tttttattttttatttattaatttattgtttttagagatcgtgggtcactgcatcctccacctcctaggctcaagcgatcctccaccycagcctcctgagttcctgggactacaggcacttgccaacatgcctggctaattcttgttttctttttttaatagagactaggttttgccatatggtctagtctggtctccagctcctgggctcaagggatcctcccaccttggcctcccaaaatgttgggattataggggtgagccagtgtgcctagccacttcatgagtctttaacttttattccccagctcttatcactctatagcaagctgtgctcatcttctgaacttacaactagaattagcaaatgccctaagaggaaaagtcatcctgactgtcgggttcacctc

SEQ ID NO: 858388 - DNA, 425 bp, Homo sapiens
gactaatttttcaaatttcttgtagagatagagtcttgttttgttgcccaggctggtctcgaactcctgccctgaagtgatcctcctgcctcagccttccaaagtgttaggattaaaagtgtgagccaccaagccctgcccatgatcaattttaacttgcaattgcatcatttaagaaaaaagttttattcagagctagtagctacagctagcagtacattcagttgctggtaacaaaatccagacagactgaacaaagtagggatcatattctctcatgtaaggacaaactaaaataaagctgtcctgggctggtatgaaagctcaaagrttaatagagaaccagactcccatctttctttagggcatggctttgcatcttcaagcacacatatgatgtttcctagaactccagacattgtgaa

SEQ ID NO: 858389 - DNA, 521 bp, Homo sapiens
ggtcagtccattcaggctgctgtaacaaaacaccagaaaccagggggtttacaaaagcttgcatttatttctcatggttctggagacgggagagttcaagatcaaggtgccagctgtgtttggtgagggcccgcttctttactgatggtatctcttcaccctcctctcacatggcagaagagtaatgggtctctctagggcctcttttataagggcactaatcccaaacatgggggcttcacttccatggtctaatcgcttctcaaatgcttgagtcaccagaaacaccaaggcatgattagaggtctggaactttcaccctaacactcaacctataggaagaggggctgaacttgagttcagtcaccaatggtcagtgatttaatcaatcatgcctacatagtgaaaccttcataacagaccctaaacaatggtattagaagaactttctggctggtgtacacattgaggtgctgggacggagactggccyggaggaagcatggaaactctgtgctcctc

SEQ ID NO: 858390 - DNA, 593 bp, Homo sapiens
agaaagataatttgaaacaaatagttgctaaaaatgcttttacatattgtattagaagaataagttttacctagttttctaatttgcaattatttttgatgcaaagttttttaaattatgttttatttatttakttttcaatttttattttattttatttatattttattttatttatattttgagagggagtctcactctatccccccggctagagtgcagtgctgtgatctcaactcactgcaacctctgcctcccgggttcaagcaattctcctgcctcaacctcacgagtagctaagattacaggcacgtgccaccatacccagctaattttttgtatttttagtagagacggggtttcacctttttggccaggctggtcttgaactcctgacctcaagtgatccacctgcctcggcctcccaaagagctgggattacaggcatgcgccaccgctcccagcctgcaaagtttttcttaagcatatataaacattaataaatattggttaatgtgttggcttcattacgttcaaaagaagcatttacaaatagttaaatgatattatgttttaagcagtgtcatcagatg

SEQ ID NO: 858391 - DNA, 577 bp, Homo sapiens
tctattaccccatattatatgataaaaatggaccacagaaaggtttagtacattstctaaagtcatgcgactggtaagtggtgaagccaggacttgagccagtagtgtggcttcggagttctttctctttctctctatagccatgatgtacagttgacccttgaacaatttgggggtcaggggcattgatgctctgccagtcaatatccacgtatcatttttgactcagccaaatttaactactaatagcttactgctgatcagaagatttactgataatataaacagtcatgtaatgcatagtttgtatgttgtatgtgctatatactgtatttttataataaagcaagctagagaaaaaagttattaagacaatcacacagaagagaaaatttatttactcttcattaagtaaaagtggatcatcataaaggtcttcatctttgtcatcttcacagtatgtaggctgatgaggaggaggaaaaggagggataggtcttgctgtctcagggtggcagaggcagaagaaaatccatacatatgtagacccacacagttcaaacctgtgttgttcaag

SEQ ID NO: 858392 - DNA, 577 bp, Homo sapiens
tctattaccccatattatatgataaaaatggaccacagaaaggtttagtacattgtctaaagtcatgcgactggtaagtggtgaagccaggacttgagccagtagtgtggcttcggagttctttctctttctctctatagccatgatgtacagttgacccttgaacaatttgggggtcaggggcattgatgctctgccagtcaatatccacgtatcatttttgactcagccaaatttaactactaatagcttactgctgatcagaagatttactgataatataaacagtcatgtaatgcatagtttgtatgttgtatgtgctatatactgtatttttataataaagcaagctagagaaaaaagttattaagacaatcacacagaagagaaaatttatttactcttcattaagtaaaagtggatcatcataaaggtcttcatctttgtcatcttcacagtatgtaggctgatgaggaggaggaaaaggagggataggtcttgcygtctcagggtggcagaggcagaagaaaatccatacatatgtagacccacacagttcaaacctgtgttgttcaag

SEQ ID NO: 858393 - DNA, 348 bp, Homo sapiens
aactaaaagtgatagcactatccatttcaaagacaaattttattacatcatgaaagtaaartaaaaaattaattggaattgtgccttatgaaaatggagtcaaagtatttttccctatttctacttctaagaccaactaaaaatcctggctattacatgtcaaacaaacagaatcctgtaaaagatttaaaaaaaaaaccagaaaaagtaaaaaaatacaagtaatgacacagaagtaagatctctggattttattttgccatgtatatctcataattggtgtgggtaaactggactggtaacccacccagcatggccaaggggttcagaacaaaaacagaaagcttc

SEQ ID NO: 858394 - DNA, 601 bp, Homo sapiens
tatatgggttctttaaagttggcgactaatgtgtttcctgctaatttatattatcccttctgttttctcaattctttstacctgttttaatctgttgtaccactttaatttattcataattattaagccaaaaatattttctagccaattttacacctttttgctattttattctatttcctgggctattccctctatttttatcttccaatcctttgttatcatattttaaattcccaaggctcttttctgggtctctgaatgttccctgcactcacctcatgatgcaataactttacattcttcaaagtttatttatcatgaagcatggtatttgaggtttcattttgttggctactcgcagaggataacacagagcgaggaattcttttttttcctttgaagcatattgataaattttcaaagaaaattaattgttttcatagatagataggtgcctatttccttattctaccagatacacaagtgttaatggcacaaaatcatttccacaggtagaactgagaatgtgggggtggatgtctggtgaaagttcaaacaaatagcattgatatacttttctttcaagtattgttgaagc

SEQ ID NO: 858395 - DNA, 332 bp, Homo sapiens
tgtctatgagtgaagtcagcctgtactttttcttccctaaatcatcctataatgccatttacaattatgaatcagtaaaaatttaattttttagagaaataatcaatttcatggyttttactcacatatattttaaaagaacatttacttacgttataaattatactttcttctaattatgaccctgtttttgttttgttttgtctttcaggtatttttgttgtttttattttgtttcatttgttttgttttttggaaggaggaaggtaataggtaaaccagtgtttgatttagtacttgttttaaatctccattttctgtttcaattattt

SEQ ID NO: 858396 - DNA, 545 bp, Homo sapiens
acacctttgaagataaaatctagccttgaaggtaaaatttaatgagacctaagttaaagctcacgctgacaaacacaaatgtcaccagcatcattgatttcaagagaaaaagcagaagcagcctgcatcaactatgctcattttcccctttcaattctcaggcataaatatatgcttagcagaagttatgtcacaggaaagttttgagagactctggaaaatatatctagctttctaaatgaaattgcactagagcatactaaaggagctttggagacagtggggtaacataatctttattcccacagtactttgcaaccattggccaattggagtcccccctccccacacacaattttcttctaaattttcaactataaatgaacagtagccatattctccaacctaagayaatatgaccatacttaatatgataagactgcttacttccttctctaaataatcattagtcattgaaaccagtttgacaagtgtttatttctcctctatctcagtctaactatcttgtaatcaaagaatggaat

SEQ ID NO: 858397 - DNA, 585 bp, Homo sapiens
gtttgctggcacctgaattttgtgtttgccagtctccacctatgagcaataaatttctatgatactktatatttcagcccagatcaactaagacaacatgtcttctaaaatgctacatataaaatgtacttatttatttgtaaaaattgtattgattggttatctctctagaaagtaagttttatggaagaactttgtaaataaataagtgaataaacaagtaaatgaataagctggttttacacttgttccctgaattatattgtaattttaagtataacttctcttacaattttgtttcatattatacgagtaagtaaaaataatctggaagcatataacttttcaatgaaactttaaacaaaaatattctaaattaagttaactggcaaggatttattataatggatgaaatatattgggatataattggtcaaaaaatataaaaattatgacagttatttaggaataaaaatacatttattaattatacattaaaataaaagaactaaaatagctatataaaaatcttttggaattaatttttactggctcatagtaattctaaatattacttacacaata

SEQ ID NO: 858398 - DNA, 635 bp, Homo sapiens; identical to SEQ ID NO: 845781

SEQ ID NO: 858399 - DNA, 623 bp, Homo sapiens
ttagcacatataattatgttcagtacataatacttgaaaaccaacaactatgttactggtttatgtatttaccatggtatactttttattgttagttttagagtgttcycttacttattaaaaaaaaagttgactgtaaaacagcatcaggtagatccttcaggaggtattccagaagaaggcattatcacaggagatgacagtttcatgcctgttattatctgtgaagagcttccagtgggacaatttgtggaggtagaagacagtagtattgatgattctcaccctctcactctgggtaggcctaagttattgtatttgtatttgtcttctttttaaacaagaaagttttaaaagtaaaacaaagattaaaaatataaaaaatagaatttgcatataaagaaataaaatatttttgtacagctgtacaatgtgtttattttattttatttttttttttttgagatggattcttgctctgtcaccaggctggagtgcagtggcctgatctcggctcactgcaacctccacctcccgagttcaagtgattctcctgcctcagcctcccaagtagctacaattacaggcacgtgccaccacacccagctaagttttgtattctt

SEQ ID NO: 858400 - DNA, 615 bp, Homo sapiens
aagatcacccactttatagttacaaagtcagaaactagtacacctgtatggaaatggaatatagaaatgttgatcttaataggtggcttaaaaaatacatcagyataggaattattattcctattctattagcgtaagaattagtacttgagttatcaaaaatatgttggaggcacttattggcattgttgaatccaatatgattccgccctggaatactgggtggaaaatttgtacatttttgaaaaagatatgtaattaaagatttgcagcagaaaatgtcattaaaatttttaagctaaaaaatacaggaaggaaaaaataaggaaggtaaaaaaaaggaaggaaagaaaaagaataagaaagcaaggactcaattgaccgatcaacaagactctcttgttggattaaagtcttaacaccctataatgtaatattcaaaaaacaagtttttttcaattaaaaagaaataacaagcatcttcaaaacaatgacatgtggagtaggaaaaaataataaaaagcaacattgaagattataaatcaacaaaaagggtaaagagaaacatcatatattaataaaatgtagcaggcataaaaatgttgtgttcctaat

SEQ ID NO: 858401 - DNA, 615 bp, Homo sapiens
aagatcacccactttatagttacaaagtcagaaactagtacacctgtatggaaatggaatatagaaatgttgatcttaataggtggcttaaaaaatacatcagcataggaattattattcctattctattagcrtaagaattagtacttgagttatcaaaaatatgttggaggcacttattggcattgttgaatccaatatgattccgccctggaatactgggtggaaaatttgtacatttttgaaaaagatatgtaattaaagatttgcagcagaaaatgtcattaaaatttttaagctaaaaaatacaggaaggaaaaaataaggaaggtaaaaaaaaggaaggaaagaaaaagaataagaaagcaaggactcaattgaccgatcaacaagactctcttgttggattaaagtcttaacaccctataatgtaatattcaaaaaacaagtttttttcaattaaaaagaaataacaagcatcttcaaaacaatgacatgtggagtaggaaaaaataataaaaagcaacattgaagattataaatcaacaaaaagggtaaagagaaacatcatatattaataaaatgtagcaggcataaaaatgttgtgttcctaat

SEQ ID NO: 858402 - DNA, 606 bp, Homo sapiens
gtgaaactccaactctactaaaaacgcaaaaattagcctggcatgatggcacacacctatagtcctagctacgtgggagtctgaggcatgagaatcgcttgaacctgggaggtgaagcctgcagtgagccaagatcacaccacttctctccaatctgagtgacagagcaagattctgtcttgaaaaaagaaaaagaaacacaatttttttcacaagcgccactaaaaaaagtgatcaagaagtaccagttactttaaaaaaattgttgaaggtagaaggttcagaagagtattgagattcatagaaacaaaacaaggagttagtgacactgaaagcataaacaaatataaaaaaaatcctgagccagagacaaagtgggcttcctaagattttaaatgtttaatatcttcacttatacatttaaaatctaaaataataaaatgtattcacatgagaatatattactttaatagtgttttattttcaaatataatttcayagtcagaataatagatgataaaaattattttgagcacttattgtcaatgtatataatgacatcaagattgactagatcccccttaatcccatttcttttacttggtc

SEQ ID NO: 858403 - DNA, 525 bp, Homo sapiens
tttaagtttcatagcactgtccagtttatttcatggtttgcattgttccaaatttagatataatttmtgtattatttttatatgaaattggaagtattcaagcagtaacacactttataaggaagtatccctgagagaatttcactgattgtgttttaataagatgagatatactaagatttcagttccatattattgtcttgttgtagaaactgtccttattcagtgatgcagaaaacatttagtttcctcttaaattcatagattcctattgagatacaaatgaattggatctggccttagagttttaatattcatattttaattttttatgaatgtgcttttcccctactaatctcttcttttcagcacacacttttattaatactaagtaacaacttttgtcttactagcatccatacttgctaacgacagatagattagcatagaaaatcactaataaaaaaacttaataaaagagttctcaaagtatatgacttagaaactcactaaaaagtgtttaaa

SEQ ID NO: 858404 - DNA, 641 bp, Homo sapiens
tgacatctctttgcgaccttgamccattcaaatgaatcttcatctgtttcctgcaacaccattgccaagcactgaattttcaaaaagacaatgaatatctcattaggtatagaatggaaaaaatgactgtattagttatctcttgctacctaataatattatcacaaatttagagacttaatataacatccatctatcatatcacacttttgcagatcaggattgcaggctttggttagcggggctctctgctgcagtgttaaacctgccatcaaggtgttggccagggcttcagattcctctgagatctgactggggagaaatcacctcctaatctcatgtggttgtttgcagaatttaactacttttaggctgtgaagtgacagcagtctcagtttctttctagtttttggacagaggccaccctcagctcattgcctcctcaatgtggaagtacaacatggcagctagcttcctccaggccaacaaggaagacattctcttcccagtataaatgctgcaggtttatgcaacataattatgtatggtaatcacatatatcctgtcaactttgccatattctattgaatagaagcattcatggttcctgccataccccagggaaggtgatgacacgaagc

SEQ ID NO: 858405 - DNA, 617 bp, Homo sapiens
tgtttctcccacctcccaatctccctttttttattttgtgtataatctcatgtgctsttttcatttcattgtaattttcttcataattaagaatctatgacttatttcctttccctatcatttcctttctcgtaacatagcaaaacaatgtggcaaaatcagtgatttgttacttaagtaatgtaatcagtgctcatttaaaaaaacaaaaaaagaatattttaatcatattttttctttatgagtctctacttgtttgcacatatttgtagtagggaaaaaagttgatatagtaaacattattttccttccttttctttttctttattctagcagttgctcattgaatcaactggtataccgaaattctgtcttttgagcaaaggcataggtcccagacagtggagtgggaagaaatatgtagagacagtgtctgggggaaaagggaagaaaagaagaatatttgtgcactctaacagcagagacaactcatatgctatttctttgcatctgaatgaagtcaacaaaactcatggaaaacagacactgttctctgagttctacaaaaaaacagagcctgaggcaaagaacccgtatgttaacaattatttggcaag

SEQ ID NO: 858406 - DNA, 614 bp, Homo sapiens
tgatacagtggaaactttgaaaaggtatagaagctttaaaaaaaagtcatcatagttctctgaattgtaggtattttctctttaggcagccttccaaagccctttcatgctagtgaaagtaagctgtgtgctactttttgatgatattgcccatgataaacctcaaatggtgaggaaattcattttcagacacagatctgaagctaacttatccaacttatctgatcagaaaatcttgctgtaaatctttcaaaaacaagatgacttgtgagatttttagcaatccagagtgtgtctggggagaatatgtgacatgagcagttttctctatggtttcagctaataataggaaatccatgacccaaggaaatagaaatcctcacgtgagcaagaatatcaggtcttcccaaagcccataaatgtaagaaggattaaattatgtgtgcttactgaatttataattttatttactccaagaagtttccccacttatcaaattcattgcacctagytttaggaattaatagctaaaatacagataattcaaatctattttgattcttaaaaatcaagatctgatcttcagtcctgttttctagaggtgatgtatagaa

SEQ ID NO: 858407 - DNA, 518 bp, Homo sapiens
cataacttgcgcatgttgacaaaaaaaaaaaaaaaccagcatatataaatctgtgcttgagccgaacattctatttgacaactactgagtttgtccagataaggctgtgtaagtatttagccttgcagctttatcacacgactgtcatatactccataattgcttttgtaaacttagtcttaatggtgtctaggttcacaccagagcaaccatctgaaaattcagtgtcagcttatgatgtatgaactttctttcagtgtgtagatgtttctaattttttaaattacatttttgtatatttccatataatgacctaaaatcactttgattctcatcactaaatgtttttcagttactgttcatgcgtacatggtattgcatcagatattattcaaagctagttgagtagcatatatggatgtttgtttaaactagcttatatgtgtgtatatatatatgtatatatacacatatgcataaatakgcagatatataagaagcatacaaaggataatcat

SEQ ID NO: 858408 - DNA, 321 bp, Homo sapiens
tgaattaagtgtttaaatgtgttttagcaatcatatgtatacaataaaatagaagcaggaggcctccatagaagcagggagacacaacagaagctatatatatatgtatacatatacttccacattaaagtacataccttttcaaaagggagagctggtcttttaaattattaatacatttatggagatcctgtaacatttccagtggcttccttgcacatttaaatagatcaaaaattcttcctaggggttaaaataktatatcatctgattacaaactgatattctgattttataatttctaaaagttggagcacaact

SEQ ID NO: 858409 - DNA, 481 bp, Homo sapiens
tacaaagagcctggcatctcccctatctytcttgcttcctatctcaacatgtgatctttgcaaatgctggctctccttccccatctaccatgagtggaagcaacttgaagccctcaccagaagcagatgctggcaccatgcttactatacagcctgcataactgtgaaccaaatagacaactttaaaaaaaaataaatcatccagcttcaggtgtttcttcatagcacgaaaatagactaaaaccagtcacattcttgggccctgtagtttctgttcgtttgttttacctcacagtttatggtggagtatatcttcttagaaatgatgattatcataaacttctcggtaccttgcttatctgaaaatatattcatattcctcctatatgtgactattttgcaagtagcattctgcctactcatttagcacatttctattttccttctttttttaagtaagtcttctttgtctcatatttga

SEQ ID NO: 858410 - DNA, 587 bp, Homo sapiens
tgcgttatggctgtcctgttttcccaacatggatccagagagagagattgtatgagagaaaaagagtgcagaactaggatggagtctggtggaaataattcatagaatatcaagtctaaaggtttccaaagttattgcatctttcaaattatgtttggcatataaatctaaagctgactaacttcatttaagaagtaatgtcatttttatgtggttacagaaattccaggaatatattatgtttgaaatacataatttccgtaaattccaggaatatgttatgtttgaaatacacaaaggattactgtgagtcttaagagtttttgtttgttggttggttggttggttggtttgttttccagccaggtgtggtggctgacacctgtaattctagcactattgggggccgaggtgggcgaatcacctgaggtcgggagttcgagaccagcctagccaatgtggcaaaacccygtctctactaaaaatacaaaaattagcagggcatggtggcacacacctgtaatcccagctactcaggagtctgaggcaggagaataccttgaacctgggaggtggaggcagcagtc

SEQ ID NO: 858411 - DNA, 610 bp, Homo sapiens
ttctgaaaacccaagttatgaggctccattaaggcaatgaatgataaaattaaaaatctctggctaatgcaagatggtacacgttctcatatactaaatgcccatctaattaaaaaataactgattgctaaactatgagttattgagaatgagttcaaatatgagagatcacaaaggatttccaaagtaaataaaattcaaaaaaaggcattgttaaaggagtaaaattttgcagatgaagatcagccaagatggattaaccaggttgagaaacacatcggcaaactccaaaaggtagatgggaatatgataaacagaggacagcaagacctcttcctggaaaaactggactgtccaattttgtaggaatattagaaatcaagggctgttatgagaagtgtagctactttatgaatgatgatgagtggcctttgcacaaaatcagttactatttacagttttctctttttaaaaaaacatgagttattcctatgggataaataatcttccrttaccttcatatacccagcaaaagcacagtgtctgaagaaaagaagtagccagtaaaaaagcataatgtgagtaaatgaagaaatgaatacaggaataa

SEQ ID NO: 858412 - DNA, 590 bp, Homo sapiens
tttctttttttttcctatgaaacggagtcttgctatgtcacccaggctggagtgcagtggtgcaatyttggctcactgccacctctaactccccagtacaagtgattctcctgcctcagcctcccgagtagctgggattacaggcacgcaccaccatggctggctaatttttgtatttttagtagagacggggtttcgccatgttggccaggctggtctcgaactcctgacctcaagtgatctacccacctctgcctcccaaagttctgggattacaggcgtgagccaccatgcccggccttcttttttctttctttttaaaactatgctagccacttaatgatcactctgtgtctgaagattcagaatacatctcagctcttagaatgtcggtatagtatatatatatatgtgtatatgtctatatatatatatatatataatgcatatatatctattataacccctcctctctaaattttttctctctttgggaattctatttatatatcttatcctttggagtgctttcctatgtttcttttccatcatattgtctgttgtttttgtcccccttctgcatccagaaa

SEQ ID NO: 858413 - DNA, 633 bp, Homo sapiens; identical to SEQ ID NO: 830111

SEQ ID NO: 858414 - DNA, 349 bp, Homo sapiens
tctaaaaatgctatatactgtatgattccaactacatgacatgcyggataaggcaaagctctgaagacagtcaaaaaagatcaatggttgccaggggttcaggggatggaatgaagaagtgaagcacaatgagaatattttgtaaaataccctaatgatagacacacataattatacacttgccccaaaccgtataaaatgtgcaatacggagagtgaacctaatgtatccatgaactttaggtggttataatgcgttactgtaggttcatcagttgtaacacatgtaccactctgatagaggatgttcgtaatgggggaagctgtccatgagtgagggcgggagtata

SEQ ID NO: 858415 - DNA, 349 bp, Homo sapiens
tctaaaaatgctatatactgtatgattccaactacatgacatgctggataargcaaagctctgaagacagtcaaaaaagatcaatggttgccaggggttcaggggatggaatgaagaagtgaagcacaatgagaatattttgtaaaataccctaatgatagacacacataattatacacttgccccaaaccgtataaaatgtgcaatacggagagtgaacctaatgtatccatgaactttaggtggttataatgcgttactgtaggttcatcagttgtaacacatgtaccactctgatagaggatgttcgtaatgggggaagctgtccatgagtgagggcgggagtata

SEQ ID NO: 858416 - DNA, 577 bp, Homo sapiens
gaacctaatgtatccatgaactttaggtggttataatgcgttactgtaggttcatcagttgtaacasatgtaccactctgatagaggatgttcgtaatgggggaagctgtccatgagtgagggcgggagtatatggaaatctttgttcctttctctgaattttgctgtgaacctaaaactgctctaaaaaaaaataaactcttaaaaacattagcccatactcaatatatatattttgtatatatatttactgtatcatatattatatgcatttgtatttttaaggatacatttatgcaacatccatcacaaagtgatagattcatcaaaaaatcttcatttctctatttgaagcctggtttaatcatgaatattatcaatgagtacttgtcacttaaaaacaattttttaagatcaatatgtgttcctcaattagtcttggcattcagatcattcttcacttgaaggattaaaaaactggataaattttaattgtggctttgaaaaaactttacttataaatttactgcagcttgatgaattttattgtcatttgttgcatcatttcttcgtgaat

SEQ ID NO: 858417 - DNA, 577 bp, Homo sapiens
gaacctaatgtatccatgaactttaggtggttataatgcgttactgtaggttcatcagttgtaacacatgtaccactctgatagagsatgttcgtaatgggggaagctgtccatgagtgagggcgggagtatatggaaatctttgttcctttctctgaattttgctgtgaacctaaaactgctctaaaaaaaaataaactcttaaaaacattagcccatactcaatatatatattttgtatatatatttactgtatcatatattatatgcatttgtatttttaaggatacatttatgcaacatccatcacaaagtgatagattcatcaaaaaatcttcatttctctatttgaagcctggtttaatcatgaatattatcaatgagtacttgtcacttaaaaacaattttttaagatcaatatgtgttcctcaattagtcttggcattcagatcattcttcacttgaaggattaaaaaactggataaattttaattgtggctttgaaaaaactttacttataaatttactgcagcttgatgaattttattgtcatttgttgcatcatttcttcgtgaat

SEQ ID NO: 858418 - DNA, 626 bp, Homo sapiens
aatcttgtctttctcttgagttgctgtatttagttgagaagtttcactggtcatttgtcactcaaagtatttattaaatcctatttcttattctttgggatcaaaaagaaggccgtgttttcactcatataagaacaaagaaataaatatcccaatctcactcttctcctaacttctgatctcttgctgctgctctccaatggccaaacacatcagggagcaaatgagacttttggtgcaggtcagtgtcccagggcacaaagcagagacgaatggagagtgcatttggagagacaaaaagcggatagcacagcacttacttcttacgatttttcttcatgtggatatggaaactcttttggttccagtttatattcttaagccctccatcgttaaaggaacacagaaatctttagtaacaattctaagacatattactacatatttaaaacctagacatatgcaattgaatttttctttaaatcattcataaattcactatcaatctcataattgtgaaatcacaagatayatctacttgaaattctgaaggtgataccaaatgttatgtccaaaagtgatatggtttgggaaaaaaaattagaaagagaatatactagtatttc

SEQ ID NO: 858419 - DNA, 504 bp, Homo sapiens
aggaaaatgaacaaatacaaaatctccaaattatgaggatccattctacccctgctgctctgacagcggtgtgggaagggaatmttataatttaatttcagtattttatggggcctgtgtgtctggggtgagaccttcacaactctttttccagtggtatagctgttttccccattcagctggaactggagagtaagaggaggctacagttgaaggaatgttcttccttcgttgtgataagaatctaggaaagtcttttctactgaaaaatcggcttttgtaatgcagaggtttctgaaggactctctcaatgactattcttcccgtcaaaagggaatcattctgggatcttcattttgaagaccttatggagttcctggaggtaaagctcaggaaagagtagcgggcctcctgaccgagcgcggtgtctcatgcctgtaatcccagcactttgggaggccaaggcaggttgatcacctgaggtcaggagtttgacaccagcct

SEQ ID NO: 858420 - DNA, 265 bp, Homo sapiens
ctctcttctaaattcctcagataaagagtttttgtctcatgtcctgttcaatggtcaccaggtgattttcgctctcctcattctkcactattggctctctggctctcaggtctactaaccacaccaccagcatttctgggtctccagtttgcaaacagcagcttgtgtgatgtctcagccttcatattcatgtgagacaataggctagaataagagaaagatataaagaaggagatgatagatacatagatagatagataagaga

SEQ ID NO: 858421 - DNA, 492 bp, Homo sapiens
tacatttttactgtatcatttttatgtttagatttttttttaggggggagggtggagtttcgctcttgttgcccaagctggagtgcaatggcatgatcttagctcactgcaacctccacctcccaggttcaagagattctccgacctcagcctcctggtcttacaggtgcacgccaccatgcccgactaattttttgtattttagtagagacagggtttcaccaggttggccaggctggtctcgaactcccgacctcagttgatccacctgcctcggcctcccaaaatggtgggattacaggtgtgagccaccacgcccatccatttttagatatttttagatacacaaataatgtgttacawtagcctaaagttttcagtacagtaacatgctgtacaggtttgtagtctaggagcaatgggctatagcctatagtctaggtgtgttgtaggctgtaccatctaggtttgtgaaagtatactgtatgatat

SEQ ID NO: 858422 - DNA, 608 bp, Homo sapiens
ggcacatacctgtaatcccagctacttgggaggctgaggagggagaattgcctgaacactggaggcagaggctgcagcagagattgtgccactgtactccagcctgggcgatagagcaagactccatctcaaaaaataataataatagatgcagagaaatcatttgagaaatacagtgaccatcttatttttaaaatctcaaaatactggaaaatggggggaggtgagagaaacaaaaaattcttaatttttaatgggtatttacaaaaaagctatgaagcatcattttttttttcatggatcaatataagggacaagacaaatatgacctttctcactagtttctcatacaccattgtactggaaatgttgggcagtgtaataagacaagagcaaaatataaaccatattgattttaactgaaaagtcaatctctctcggcaaatatcttaattgtacacagaaaatcctaaaacaaatctctaagagaaaacatcttggcagtattttatgaaacttaatatgcaattgtcawatgacccagtaattacactcaaggatattaatccatgacaaataaaacccgtgttcccacaaaaacctgtaca

SEQ ID NO: 858423 - DNA, 614 bp, Homo sapiens
ttcatgatgaaccccaaggaataaaacgttgaggatcaagtggatcagcaaatatatggaggtcatctcactgtcaagggagaatggaacaaaaaaactcctgcaattctgtgaacccagaggatggggagaaattaatgagaagggctgggagtgaaatactgggtccgagggaagaaaaagcatcaaggccaccctccctctgataagggggttttagtttctgttgaaggccccctataaaaaggcctctggacgaaagcatctgggctaggatgcacgtgtaaggacaaatttcggcacaggggtccaagtccttgattgcaactccctgcagcccacagtgccttggctgggcaacaacgctgatgtgggaaaaacagcttccccagtgaggtctgttgggtaaaagcctttccaattttctatggtcgggcttaaaaagatcacatataggtttctaacaagagccacactcctcagtgcttattcmtgaaatacttggtttctgaactttccattataacataaatctcttaagagattatgctgtgtagtctaatggtaaaaagtaagaactctgaaatttggctgcttgggttcaaagaccagct

SEQ ID NO: 858424 - DNA, 444 bp, Homo sapiens
aacaagcatattataatactcattttaaaggtaaagaaactgagactcagtgagttgaattgtgttccagtwtcacagaagaagagtgtcacacggaatagagaatggcaaagcaagtcataatatataacattttttaagagttcagatgtacccaatactacactggattcagaccacattttttttaatgcacattctctagtaaaggacacaaaaatttaaacaaataaacacattggcatcacaagtactttaacagaactacctacgaggcatagtagtggtataaagactaaagtatttaacctaggggctaaagttagaaaatgtgtgatagtagtcaatttttttgcactattcttataatgtgaataagattttaatgggtatgaagttgaaaattatcaaacctaataaaggaaacagcaaaattgtattagg

SEQ ID NO: 858425 - DNA, 628 bp, Homo sapiens
gtcttactcttcactgccccttgaatttctctgtactataagacttaaaaaaaggaaacttgtttcttaaacctctttaaaattactttttggtaacatagatttttgttgtctaacatccatccacattctgcttttcattttcccagctctattagttcctggtaaattttgtgcagatcacatcatgcagttctcttgggtgcacaagaatcaaataaagaggctcagccacccatgtctattcctctgccttttgcaaaagacaatctttcctaattagcaggtgtctggttggtttaattcccctgtcactgccaagttctgtaccttggctaccaagaaactgtttcttgaagagattactttctttgactattactgtaaaatacataattactagctttctttaatctgattaattttctccattgatgtctaattgtttatgtttctctactttttggcctgagaacacatatatagtaaatttgttttaaatcgatgtgttcctgaatatatactttgtaagagtaactgggcaatacatatatttttaaatawgtgtttcccctgcctctacctacccttatttaatcatatatttattgtctctctggttagccta

SEQ ID NO: 858426 - DNA, 322 bp, Homo sapiens
cccagttcttgaaaggtaaaaataacatgctgtccttcataagcaaatttaaaattactagcccatcaacagtaaaaacatrtacttaaagttatttttctcagggatgagaatagcttctagcaaattaaaaaaaaaatcctaccttcaattcctctgataaacaatagaattcatgtaatgaggcagcacggatgatgctgcttgtaaaagaaaaaaagataaacactctaactttaatagagactgtctttgatcttttactgttgaaagttttttgtccccctcacaccaactaattcaccaattctctgattctcca

SEQ ID NO: 858427 - DNA, 560 bp, Homo sapiens
agcttccacgctctttctgggtgcacacttccattatttccatatattcaccaacccagaaactctaaaccctgtcatttaggttttcttcagccattggtgaatagcccaatctacagatcctttcccattcctggaggttggggaaagtagggcttatagttaaccaattcttggtctttttggtaatcagcttccgccctgaaggtatgtgcccactaagagtttcctcatcagggcataaaagactccatcatccttttcactgagaaaattccaagggttttacaaattctgtgccaggtagcagggacaaagactacatgttttttttctttcttttttttgagatggagtcttgccctgtcacccaggctggagtgcagtggcatgatattggctcactgcaacctccgcctcctgggttcaagtgattctcctgcyccaggcccccgagtagctgggattacaggcgcgtgccaccacgcccagctaattttttgtatctttggtagagacggggtttctccatgttggccaggctggtctcaaactcctga

SEQ ID NO: 858428 - DNA, 620 bp, Homo sapiens
ttaaacaaagtacgttacctcaaaatgtatttctttgacatatcttaaaatgaccctgcaaagctgtctattgtggggggaaatttacattttgtagagaatctccttcacttactaggtcttttcaggagagtctatcaccttttaaggtctgataagaagacctaaaccatctactgtctctgaagtaagcttcctggaggcttcatctgcatgggaagaatcttggttttcacagcctaaccttaccttaaccccaagtatttctttctgttgacttgaactctttaggcaaaacttaactctttcagcaaattgccagtcaggaatctttgaatctctctaacacctagaaacctccttacctccctgaaagcccttcttagagatgtcctgcctttccaccctgaaccaatatacaccttacatgtattcattgatgtctgcctgtaacttctgcctccctaaaatgtacaaaataaaattgtgaccaagcygccttgtgcaaatgttctcaggacctcctgaggctgtctcatgggcatgtccttaaccttggcaaaataaacttccaaactgattgagacttgtctcagatacgttttggttaacacagtaaa

SEQ ID NO: 858429 - DNA, 546 bp, Homo sapiens
acatgtaccctaaaacttaaagtataataataataaaaaaaagaatgcttgcttacaaattgtgtttytttagcacttaatgttgttttgtgtttttcaaaaaaacagcatccaaatatactggttgacaatttgtttccagtttttttctataaatgacaaataggatatttaatttttgtctagcgtagagaagaaacattataattttgacaaaaatatggtttcacctttcatataaaattctaaacccggtagcacacttacctgaaaggtgagaaatatgacattgccccagtaagtgacaacatctgtggtgctatcacaaggctaaattcctttattgtgtcttttataagatactgttaagtctagcaaaataccattttgagatgctacttaaacgtggctcagaataaataaaaaattgtcaaagaaacgttttaaattaacacttctgattttaaaatataaagcaatcaaagacagtggttttccaacgtgaacacaccgggtatcagaggagtattattgaggcaatgtaaa

SEQ ID NO: 858430 - DNA, 575 bp, Homo sapiens
aagaaagaaaactgtcttgggtttatcttctatcacataacgtgtcaaaggacaaaagagaaattgctacattattgtgagacaaaggtttatggcataaaaattcaaaacaaaaccactttgctcttcccgtgtgaaggtaatcaaatgatactctttagatatgcagatctcagaaaatgtatcatccacaaaaatttcatgaaaaacattccatccacaaagttatattccagtcaactaagattttttttaaaaaatgaaaacaaaggcgtagtataaaattactgtcagagaatattgaaagcagttacatatatatacaaacacaacatataaataatcattttatatgcctacaaatgaaaatccaaaataccagatgtcaacacaaccttgaagctgataaacttaataaactgggaaagacatttaaatacagtaccattttacstttacataaatgataggcaacagtaattttattgtattatgtaaatatttaaagaaacatatatttaagtacacatttttcttttttttagttgttttatagaatttttttatttccaaaa

SEQ ID NO: 858431 - DNA, 511 bp, Homo sapiens
caacagattttcaatgtacataaagcagctttctattagaagaatagaccacctaggagttttagagctagagaggaatcaatrcctgacttcaaagcttcaaaaaataggcggcaagttggtggaatagtaagccaccaagggctacagctctctgtgactccaagtgaagttgaaaagcattctaggccataagaactgcaactcttaggtgagtcctacggctgaactaggcccagagaagggtaactagggagtcacatgacgtactgagatagaagctggggtagccaaaggagttccggcaagggagttcccctaacctcaggctgcacacctcagagctccaaaagcgactcttcccttctgcatgaggggagcaaagggaagagcagataggactttgttttgcattttggataccagttcagccacagaagaactctggacaccagccagagttgtgaggtccctgttccaagccctagctcccagatgacatttctagaca

SEQ ID NO: 858432 - DNA, 511 bp, Homo sapiens
caacagattttcaatgtacataaagcagctttctattagaagaatagaccacctaggagttttagagctagagaggaatcaatgcctgacttcaaagcttcaaaaaataggcggcaagwtggtggaatagtaagccaccaagggctacagctctctgtgactccaagtgaagttgaaaagcattctaggccataagaactgcaactcttaggtgagtcctacggctgaactaggcccagagaagggtaactagggagtcacatgacgtactgagatagaagctggggtagccaaaggagttccggcaagggagttcccctaacctcaggctgcacacctcagagctccaaaagcgactcttcccttctgcatgaggggagcaaagggaagagcagataggactttgttttgcattttggataccagttcagccacagaagaactctggacaccagccagagttgtgaggtccctgttccaagccctagctcccagatgacatttctagaca

SEQ ID NO: 858433 - DNA, 622 bp, Homo sapiens
gcactctgatgtttacataatgataacaactttattcataattgccaaaacttggaagcaaccaagatgttcttctgtagataaatggataagtaaatttccttacaaacgaacaataaaatactattcagcactaaaagaaatgtgctatcaagccatgaaaatatagaggagtaacttaggtacttatcgctaaacaaaataagtccgtttgaaaaggctacctaccatataattctaacaataagacattttggaaaaagcaaaactgtggagacaggagaaagatcaggaatttgtaaggttggagagaagggagggatgaataggtagatcacagaggatttttaagacagtgaaactactctccatgattaaaaagaaaaaagtggtggaaaaatgtcattataaattgttccaaacccacagaatgcacaattccaagaatgaaccctaatgtaaagtacagattttgagtgataatgatgtgtcaatataggttcattaattgtaacaattgtagcactctgttgagggatgttgttaagggcggagaccctgtgtgtgtggaagcaggkaatatatgggaaatctttaccttcctctccaacttgaatcacaa

SEQ ID NO: 858434 - DNA, 408 bp, Homo sapiens
tccatatttcctcaatctgaaagctgacctgatttattatctaagtccgtaaatagaatmaaattgattagtcttaaaataatagccactattatctaaagggaagaaaaatgtagtaaaccgaagagtggtattcatgagtctgtcccggtcacttgaaaataaaatttcaataggtgtccaagcaggatgtgacaagccttccctgccttccctcccctgtccctgtttcagcagagatcagtctgcactttgaagctgcaaatggcatgtgagttgttttcacaaacccatgatggataatggctaatgggtagtactgtggtaacaaagcactaagttttgaacaaaatagctgtgggacttgaggatattttagtgcttcttttgcttcacaaacgcaccaag

SEQ ID NO: 858435 - DNA, 583 bp, Homo sapiens
aagcaagagagagacgcaaatgctgccagaactttttaacaacctgttttcctgggaactaatagagtgagaactcacccttaaggaagggcaytaatttattcatgagggatctgcccccatgacccaaatacctcccactaagccccacctaccaacaccaacacgttgggcttaaatttcaacatggagtttgtagggaacaaacatctaaactatagcagccccctttgcttcctctgacatactcactcccttattgatttcattctgcttcctcactaaaagtaccaatcatatcgctctaaaatgtacctctctaactgaattttcctcttatactctggatttatatatttgactacctatacaatatatccatctgggtatcctatagacatctcaggttacacatgcccagacctgaattcctgattgccttcccaagatcttttgtacctgtttgctttgtcatcactatagatgggtaatctaccttttaatcaggcagcagatcctatgagacgaggggtgagatttgatcattggctttagtaatgtacaagtcattgctgaatttgac

SEQ ID NO: 858436 - DNA, 483 bp, Homo sapiens
ctcattctgtctttgcctgctgccatctctgtaagatggaaatygctcctccctgtcttgtgcaatgattgcaaggcttccccagccttggaactgttaagtccagttaaacctctttattttgtaaattgcgcagtcttgggtacgtctttatcagcagcataaaaatggactaatacaattaattcatgtcgggagtggcgcactgctgagaagatacccaaaaatgtggaagcgactttggaactgggtaacaggcagaggttggaatggtttggaggattcagaagacaggaaaatgtgtgaaagtttggaacttcctagagacttgttgaatggctttgcccaaaatactgatagcgatatggactataaggttcaggtagaggtggtctcagatggagatgaggaacttgttgggaactggaactaaggtgactcttgttatgttttagcaaagagactagcggcattttgcccctg

SEQ ID NO: 858437 - DNA, 596 bp, Homo sapiens
tcgcattttgttatagcagcctgaaccagccaagataacagccctctgactaggcttamggttagaaaaagaaccttatcacctcctctatactcttttctcagtggagagtaggttaaggctaacggcacttcctgaaaatgtggctcaaaactcatccttttctatccatactctcaaacacttcacatcatagatatgaacaagggaaccatttatcagtcaacagctttaaatctccacatggaccagcaaatcttttgagataaaacaaattttggactttgatagtttagctaagagttttgagtttagcttttttttataggtgctacatattagacattatcatggagatgcaattctgaacacaaataattatggtgtctgtgctcatggagcttagtgtctattaattgaagggaaattagacattatttaaataataataaagtgtataagtatgggaggtgcttggaaagggaagcgaatgttgttgtgagacgtattctaaagatggttggacgagtagaaggataagtggagccttctctaggtaaggaaacatttctttgagatttgaatgttgataacaa

SEQ ID NO: 858438 - DNA, 577 bp, Homo sapiens
tatactgccataagttaggaatacttacaactagtttccaaattctgtagatgccaggcagacagagagagacaaacatgstccaaattttgttcataggagtataccttgctcaattattaaatgctgtaaatagctcaaaataaatttccatgactctgaaaaagaaaacaaggatcagcaatgttccaagcaagtgtcagaaagattactgcagttttatattagtttagtctgtttagttaactcttactttgcttgatattcatgaacattccagctcttcctttattccaatgtcacaatctccaaagttatcagaaacttgcatttgagagcacgtgttaaaattctatagctgattataaaccatcttttaaagaggatgaaaataagacaacaattttctgtgaataacaaaatgtctaaaatagttacagtcagaaacatgattgacaaagaaatttgattatctccgtggtttgcaataacttaacgtaacaaccttaattgtgattgacagcatacactcacaccttagaattttagatatcccatacaattttggaacacatat

SEQ ID NO: 858439 - DNA, 598 bp, Homo sapiens
gttgagagaaagcagtaaggaagaatgctctaaattcatctactttatggtcttggaactgatcagcagccatgttaattaccgtaactcttaaacaaagggtattgctttgtttttctttctctttcatttctttcttctacttccccttacttccttctaatttcacttttcttctactctttttctgtttctgtcctattgctatcctttccttcccaatatttctcacccacatccatcctcaacacacatattattttacattatcggagttaggatgtttgacagctcccttacttggccccaacacacacttcttagtttctaatataagaagataaacctccctctccccagtgttttcaggtgactgtgttggcaagaacaaaagtacaaaattatgtttaatgttaaggttcttaattttatgttcatttctagctttttagactagtgagcacgaatgtaaatatatctatagttattcttgtcaccwcctctttttgttttatggtttctttgttgtttgtctgttttacgttttattttgttttgatcatactgtgcattacttttcagaagttcaactgtcatt

SEQ ID NO: 858440 - DNA, 621 bp, Homo sapiens
aaaaataaataccatgcaaacaataaacaaaagaatgccatagaggcaaatttttaactgacaagcttgacattagaacaaggaatgttattagcaatgaattgtgacattacataacaataaaaaggttaattcacaaataaaaatgtttaaactttataaatgaatagaactgaaactagaaatagaaaaatgtacaattattgttgaaaacgtgaacacttcactcttagtaactggtataccaaataaagagaacatcagtaagaatatagaagacctgaacaatgctctcaatcaattgacctaattaatatttataccatactcattctaaaatatcagagtatatattatttttatctatacagatcatatttaaaagatagatggctttctcaaccaaacaaaaccacaaaaatgtcaaaataattaaaattagagcaattgatgttctaactttaaaagaatttaaccagaattcaatagcagaaatctgaaaaaatcccctcagattyagaagctgaacaatttgtttttaaatggcagatttgtcaaaaagaaagacaccaggggaattgataaatacttatttgaatgagaataaaaacatattaaaca

SEQ ID NO: 858441 - DNA, 621 bp, Homo sapiens
aaaaataaataccatgcaaacaataaacaaaagaatgccatagaggcaaatttttaactgacaagcttgacattagaacaaggaatgttattagcaatgaattgtgacattacataacaataaaaaggttaattcacaaataaaaatgtttaaactttataaatgaatagaactgaaactagaaatagaaaaatgtacaattattgttgaaaacgtgaacacttcactcttagtaactggtataccaaataaagagaacatcagtaagaatatagaagacctgaacaatgctctcaatcaattgacctaattaatatttataccatactcattctaaaatatcagagtatatattatttttatctatacagatcatatttaaaagatagatggctttctcaaccaaacaaaaccacaaaaatgtcaaaataattaaaattagagcaattgatgttctaactttaaaagaatttaaccagaattcaatagcagaaatctgaaaaaatcccctcagatttagaagctgaacaatttgtttttaaatggcagatttgtcaaaaagaaagacaccaggggaattgataaatacktatttgaatgagaataaaaacatattaaaca

SEQ ID NO: 858442 - DNA, 623 bp, Homo sapiens
aaatgttttctatatttgcagacttttcctatgatggcaaaaggatgtcagaagtacagcaagcagcaaatttatttgaacatgtcttattcagtatataaataatactataacaatatgtgaacaagaaatatctctgaaagagacatgctgtggtgagagtattttgaaaccagaatttagaatttctttactatgtgaattttattgtttaaaattttatgtgtataaggatatcacattaaaattctcatttgtgaagagtaagtacttaaaaatcatattttacagcctgttgagcattttaatatttgaagggcttcagtgtgtttttcatttattcatgaaacaaagaatgatacatatgaagtgttaaaatagccgatacaataagctattaagaataacttgtgaatatttaaaaagatagaaatttcatagttatattgcaactaaagcctttgttacatttttactattttagaaatctaactgaatcaaaattggttttcaagaatttgacattttctttcacgtatccatctttgataatgatggcctaattaaccaggccycactgtccttagaaaataacagaaatagattgtctgaattacatggtc

SEQ ID NO: 858443 - DNA, 646 bp, Homo sapiens
ggttttctttctccccagtctttcttttgatgagggcatttcatgtttgtgctttaatttaccaggggaaagaatctgaataaacatttttgtctctcttcttaggttcaacctaaggaaaaagtgagcattatggaaaagtttacacctcatgggctgcaaatcatgtggccgtagcattagaatcactattttcactttgggggagcctctgaatctgtgcattttcacccctgattagttacctcttaaacaaaaagcaactacaggcttgtccgtttaatgagtatctatgccctgatgactcttctatttgttatttctagccccgacttctcccctctcattaaggaacggctatgacaaatttgcccccaaattggagtggcctactaccctagcagtttatggctcactcatgcaaagtccagttggcagcagaggtataggcaggatcctaccatatcctttccacgatcaggctgatggagactctgcctttttcacatgtggcttcaagtggttttcctaacctcatwatcaagccacagatagggaaaaaagcagtacacattggaacaggcccaaaggtaaacaatagactgtagatatgttagaggctgggtaccttaaaataatcaccttt

SEQ ID NO: 858444 - DNA, 479 bp, Homo sapiens
atcaatggaggtaatgtggcatcaacgctgacctgaatgctattatagagatatttgagtataatcacacttgtaaatgcctgtctggtattgtttagtatatgtaaaaaatattaatatacttaattttaggaatattactttatgatattcagcttaaaattataaaagtgtgcattgagtcacaatttatcctctactttgaaatttagcttctattgtggatgctagtgatttgtttattgcaaacagtgcatttcagtaacagtttcaacatgttccaaatgtgcagcatatacagtttttgcaatgtaattagttagaaattggagatgcttaattttaaaattgaacagttcatgaaaatctatttccattctctgtatggcttatgcagtttctcttcataaaatgttctatagctgcttgaagaaattaagtktagttaatcagaaagaacattatgttttgacacctaa

SEQ ID NO: 858445 - DNA, 557 bp, Homo sapiens
ttacccctggttcatagcgcttaccttgtycactcctttcaatcaccaacttatattttactgtctattacaataatcagtgcattatgtatatgccagtcttttttttttcgcttaaagaaacatttctggcaaaacacaagtcatggtttaatttacttttctcctctttctccacatgcagtagcacagctgaatatagctgaagaaaatcccacagtaattttaagtggtctgtatttaaaattatgttccagaacataacgtaaattctttctgctgcctagaactcatcctaccttttcttggttcattttcttgaccactgttttagataactacttcataaatttttatctattctcaaatttacaaaactcctctatcatcaaaaagctcagctgatgattcacttcctcttttactaattagttggaaacagaagaaaatcttaataaatcctgactactacacctgcaaacatacccagtggaacctgtatgttaccatgaatgaaatatctgagttttcatgtggagtctggatttcatccactc

SEQ ID NO: 858446 - DNA, 557 bp, Homo sapiens
ttacccctggttcatagcgcttaccttgttcactcctttcaatcaycaacttatattttactgtctattacaataatcagtgcattatgtatatgccagtcttttttttttcgcttaaagaaacatttctggcaaaacacaagtcatggtttaatttacttttctcctctttctccacatgcagtagcacagctgaatatagctgaagaaaatcccacagtaattttaagtggtctgtatttaaaattatgttccagaacataacgtaaattctttctgctgcctagaactcatcctaccttttcttggttcattttcttgaccactgttttagataactacttcataaatttttatctattctcaaatttacaaaactcctctatcatcaaaaagctcagctgatgattcacttcctcttttactaattagttggaaacagaagaaaatcttaataaatcctgactactacacctgcaaacatacccagtggaacctgtatgttaccatgaatgaaatatctgagttttcatgtggagtctggatttcatccactc

SEQ ID NO: 858447 - DNA, 567 bp, Homo sapiens
attggattctgtaatctccaaatttcaactgtggacctctctactgaactccagtcttctatgtccaatgacttaccagacagcttcacttggatattaaataaatctttcaaagttaaaatattcagttcaatactgtacttctttttccccttgatttgcttctccctcaatcatcccattctcattaagtggtgtctttttctgtttaggaaaatgcttgaaaacatctttggcttttatttatttttattctggctagaaatacattttttaactgttacttttggttcagacatacacgtacaggtttgttatataggtaaattgtacattgtggggtattgaagcacagattatagaaattcatatttttagcaaattttattagccctactttaaatatatccataattcaattacttttcaacaaccagctgttactgccttggccgaaaccatygttacttgcctgcgttatttcagtaacttttttttttttggatgggttacagaccagcgtttgctttatttgaacagagtttgaacacaacagtgagttcttaa

SEQ ID NO: 858448 - DNA, 620 bp, Homo sapiens
ttactcgatagagaaataatgccattaggaatgaggcaaacagaatacctatagaaggcatccacaatggggtgcatattcttttgtgtmtctgcattgatcttgcattctgcctatggtccctatttacctgtccatcatcaggagaaccacatgaccccactgtcttctgtgcgtattcttgcttctctcatatctttcttatgtcctcttagggcatctgcctggaattcttccctcaacaccacccttctttcactatttacagatcacaatccacactttggtttgtcaggaaacatacctaccccattcctccacttactcctagaaagatatagtttgcctacctggtgcttttcacatttatttgaattgtactgtaaaattagtatctatcttgtttgtttaactttaatgccaccaagggtagaaactattacagtttgctcagcactgcatcgcagtgcctggttgcttattgtaaaataaatgcgcgtgcacacacacacacacacacacacacacgctctgacacaaaataattgttgaatggttaagtgagatgatccatcaatctcccaaaaggccaaaggatttaatgactctaaaagtgttcc

SEQ ID NO: 858449 - DNA, 587 bp, Homo sapiens
ttacctgtccatcatcaggagaaccacatgaccccactgtcttctgtgcgtattcttgcttctctcatatctttcttatgtcctcttagggcatctgcctggaattcttccctcaacaccacccttctttcactatttacagatcacaatccacactttggtttgtcaggaaacatacctaccccattcctccacttactcctagaaagatatagtttgcctacctggtgcttttcacatttatttgaattgtactgtaaaattagtatctatcttgtttgtttaactttaatgccaccaagggtagaaactattacagtttgctcagcactgcatcgcagtgcctggttgcttattgtaaaataaatgcgcgtgcacacacacacacacacacacacacacgctctgacacaaaataattgttgaatggttaagtgagatgatccatcaatctcccaaaaggccaaaggatttaatgactctaaaagtgttccatgacacagtagaaagaatagaaagttttggaatactggccacctcaaatrtgctgtgaactctaattggattctaaatttgacaataaacgt

SEQ ID NO: 858450 - DNA, 633 bp, Homo sapiens
cttttttgtcttttttgcctttatagacaggtgataaagcgttatttctaaaattcagttatatataaatgatgtagaaatattagtgcaggaaactagattctatagagaattcatttctgttgccgygttaaagaaaaattcatgattgtttataatttttggaagaaccgtgttaagatttgtaaatcgtgctgactaaatatagctctaaaataccttaatttatactttgtccttaaaagcttttactagtttgtaatctagatctgctttctcctaattctggagtttgaatttctagtaaattacaaggcaagaacccatcccacacttcagtttaaggttctgttgttctgtttgtatatgcagatttagggaaagaaagtctcacattaactatcttcataatttgaggtacaactctattattgagtacacagcctttcattttccaagtggtagttttctttcagtccctaccttgggtgttcagaaactcttgtttggtaaaatgccagtaaattacagatgatttaatgtatatatcctctcatttaagaaaggcaagtcaaattacagatccaggctttgcctcctccaaatcttttccctctctcactttaatgtagt

SEQ ID NO: 858451 - DNA, 617 bp, Homo sapiens
agataggggtctggttttatgcttctgcatatggatatctatctagtttgcccagcatggtttattgaagaggctgtcctttccctaatatatgtttaaagaaaggaaatgcatcagagaaagactaagtgaaggtaaattaaaaacttttacttttcttattcttattcataagattattgaaaataatggaaacaatgtattgtattatattatgtgtatatactacgtataagataaatgaatggtaacaatgatataagggatgaaagacttagaaataacttatcataaagaactcttgctacccattaagaagtacagtgttatttgaaaattgacttcattcagttcattgtaaatgtatattgaaaattcttgaacaacaaataaacaagttaaagaaagataactgatatactaaggaaagaaaattaaatcatataaaatgctcaattgaaatcgccaaagacagaaaaatagtgaaagacaaaaactgaaataaagaataagggcaacaaataaaatagttacaaatatagtatatatattaatcyattgtatcagtaattacctgaaaattataattatctaaatagctcaattgaaaggtagag

SEQ ID NO: 858452 - DNA, 628 bp, Homo sapiens
ctaaatcttctctctcttctgacttctaaatcttttgtgaatgcctcccataaactgactttatctagaactacataagaaaggactctgagaaatgaagttttcagctttacccatgaaagtcagaygatatctcaggggagaggtagaggcaatgatgaattgacaacagacaatataagaaaacccacccatttatcagttgagggttcatacacatcccttttgccaatttaaaattctcgagtaacagcagtgataaaatcattcctgtctcttttacgggatgtgatcccttttctgtaataaaattatgatcattctctccttccaaaaaggaaatgtattgctctgtatatcgtaatacacatcttggagtgacattcactccttttctagtgacgtctcaaggcttttttgatacaatgtaacataaatactaaattatgtgatatcttattttggattctctctaaaagcagaggttaagacaaagatttgactgtaagtaatttgcttgggacatgctctaaggaaataagataaggcttctaggaaaatgagaccgaggagaagaaaaacaaaacgtgtgtcactgagctagaagctactgtggaaaatgggagtc

SEQ ID NO: 858453 - DNA, 585 bp, Homo sapiens
acactacatcatttctatcaccagcttcctcttccagtcaagatagagtaacagagaccatatttctgattctacttgaaacgaaccaagaaaaaaatggacagaatatgaagcaacagcaggcaatgaagggcagtgatccatgggagtgagatgaggtgagacctatgattgctacagtttactggctgcagaaaatttccaggatatgggacaggaaggagcagaacccaggcacaatcctgaacactctgtgaactaagtagatcaagctgtgaacctgggtaagtcaaggcagctaactagcattcacaaggagggatactagagaggagagatttctacagaaaacagactccagagatctgttgagtctcactcaattattcagttgagggcttcttagcacatgtgtgtagggaaactagctgaaattagggaattcggtgttgatataatggggataatcatcataagtctttaagggtatcactgatctctgaattcttctrtgggtgcagtaatgcttctgatttactcttccatctggagaatgaaatgtcaggcactgcttcacttatctct

SEQ ID NO: 858454 - DNA, 536 bp, Homo sapiens
tctctatttgtaatgttctytattattttttacttatttatttatttatctattgacacagggtctcactctgtcacacaggctggaagtgcagtggtgcgatctcagcccaccgcaacctctgcctcccggtctcaagcgaccctcccatctcagcctcctgagtagtgggatcataggtacacaccaccgtgctttgctatattttgtagagatgaggtttcaccatgttgcccaggctggtcttgaactcctggactcaagcaatctggtgccttgcctcccaaagtactgggattacaagtgtgagccaccaaatctagactgttttctgtttattttgaagaaatctgcattaactgcctttttaaatgatacattttgaatgttattgactaactctatagaagttgctcatatagtaaggactttaaagtaagtatcaaattatttggcaaaagaatatagtagcatgattaaagtggaaaacaatgtggtcccatatacattcaaaaaaatagtaaaaaagtgaattt

SEQ ID NO: 858455 - DNA, 566 bp, Homo sapiens
actaatccattccaccatcccaagctccctaagcctttggatcccttccttgacattaaacctagggagatcaggcatttccagytgactcacagtgggctatcttttaatccatatttcagctaaccaagcaaataaactgttagaaccttttttaattccctgagtgcagcactaagacagagtccctacttactgggcccaaatcaataaattcagtctgattcaactctatgttcttccacaattatcccatacttttaatatccattcccatgcctgttcctcagatttctgtttatataaattagagaactcaaacagttctttttgagtgtagtgcacctcccatgggtcacactctcaacctcgcctctaggggcccatagggactttagtctagttataggtctagaagcaaacagaagggttggggtggctgctgaggagaaccaacattatcttgcctggcaactgcctcaggagaggccatcattgttgcctcaagcagcgcagggtttatctcctcagacaaaagtggaaaggctgacggcagcatgagttgg

SEQ ID NO: 858456 - DNA, 623 bp, Homo sapiens
aaatgttatcaatatatttgaatattgtaagtagaaataaaaatcaattagtcatattttaacaaaccaattaaagtaagccttaaagaaaaaaaagcatgtgtttaaatttttaaaggcaagtttctgacaaaactccctatatagaaggttataactttttttttaaaagtcacaatgtaaaactacattgacagccaaaacacatatattttaacatgtaaataaatctattacccatttcaacagtgatataccaaagaaagaactcattagccatttttcatagactagtcaaacatgttaaaatgctatcattccgtatttgcaagttggcctgtagaaatatactgaagatttttttaaaagaagattgaatttaattcaaataactcattttaatttaaatgaaactaatataaatcaatcatcataaaacagattgaaatttcactgttaaccatgctcataattcaacttacatttaatttagaagaaataatagtcaaatttgtggttatttaaaamaatctagagtttaatatagcgtagaatgcataaaaatttttttctttcacgctcattatatgactaaacaaaatttatacagaacatttctttag

SEQ ID NO: 858457 - DNA, 541 bp, Homo sapiens
gcttcacagaggagggccctgggcctggyccagaaaaccatttttccctcttaggcttctggatctgtgatgggaggggctcccgtgaagctctctgacatgccctggagacactctccccattgtcttgctgattaacattcagctcttcattaattatgcaaatttctgtagccctcttgaatttttacccagaaaatgggtttttcttttctatggcatcatcaggttacaaattttccaaacttttatgctctacttccttttgaatgttttgctgcttagtaatttcttctaccagaaacccaaaatcatctctcttaagttcaaagttccacaggtctctaaagcaggggcaaaaatgccaccagtctctttgctaaagcatagaaagagtcacaattgttccagttcctgagaagttcctatttttttcctatttttgccattgtgaatagttctatgataaacatgggagtgcaaatatctattcaagattctgatttcaattcttttggataaatactcagaagtgggatac

SEQ ID NO: 858458 - DNA, 506 bp, Homo sapiens
attgatagtaaaattgaaggctttttctgaataaagtttgstttaaatttgcactgagttccagtaagctcatacactacctattatattagaaatttgaatttgtagctgaatatttcctaagttctttgattgagactgacacttgtgcttttacaaaagatgcaaaagaataaaggatttatcatatacaaacatcactgccttgttattggccatctttatacgggactgaaataacaaagctggatggaaaaaaatatgagtcatgatatcatatatggtttcttacacatatttcaattcaagaggcacaactaaatttcaacaaaaactccctgggtcttctggggtaattcccattaatcaagtagattttaagaagcaagaaccatttgactatagttttgattagaaaagtcagcgtcctaaggttgtagtcactaggaatgggaacataagcctggacaaaggcacgaacagagctgccttcttaatgacttttc

SEQ ID NO: 858459 - DNA, 524 bp, Homo sapiens
ttgacaatttattttttaataacaatatgtgaatatgtaattatctaaacccgaagttagcaattttattttataaatggccaggaagttaatacttggctttgtgaccatactctctcttgcatctatgcaactctgtctgccattttagcattaaagaatccatggacaataggtaaatgagtatgttgattttcagtaaaactttacttcaacaacatgcagatagcttgacttgatcatgggctatagttgcttactcttaatcaaacacatgattatataaaaagacaagttatattattcagtgagtttctgatactaatttttataatttttatcacattcttaaattggtgaaaaccctttgttgaaaccaaagactgttttctggtctgttttgaattcctctttgttgtctattctaatgttttcatactcgtttttatgattatgtaagtttccacattgggatgtrcttgtcctttgcatcttttaaaaattcttgaacatatgtttgagct

SEQ ID NO: 858460 - DNA, 524 bp, Homo sapiens
ttgacaatttattttttaataacaatatgtgaatatgtaattatctaaacccgaagttagcaattttattttataaatggccaggaagttaatacttggctttgtgaccatactctctcttgcatctatgcaactctgtctgccattttagcattaaagaatccatggacaataggtaaatgagtatgttgattttcagtaaaactttacttcaacaacatgcagatagcttgacttgatcatgggctatagttgcttactcttaatcaaacacatgattatataaaaagacaagttatattattcagtgagtttctgatactaatttttataatttttatcacattcttaaattggtgaaaaccctttgttgaaaccaaagactgttttctggtctgttttgaattcctctttgttgtctattctaatgttttcatactcgtttttatgattatgtaagtttccacattgggatgtgyttgtcctttgcatcttttaaaaattcttgaacatatgtttgagct

SEQ ID NO: 858461 - DNA, 405 bp, Homo sapiens
agaatttagtagcatattaacataagtagttttcaaattggtcaaaaacagttgggttgcttgttttagtttccccagaggcacacattcgaatatgggtttggctgcaaattgtytgataggtaatcttaagaagcactggtatgtaaaagggaaagttagacagggaaagaaaggatgacattgatgttgtctaatgatacggttaccactgatggggacttctaggagacagcatagaatgtgttttcaaattgtttctcttgtacatgtgaagttggaatatttatctgttaagttgtatcattggtttaagaccattctcgagcatacatactcttcacatgcatgtggacagagttcgcatgttttctgctgatctgagccttctggccaaggaacatc

SEQ ID NO: 858462 - DNA, 555 bp, Homo sapiens
gccaagcaaagacattaaccgagagtcattttagtcttgtaaagttacataragtcttttgaaattatgcaattctccaaaacttaagaaatatctgcctactttttaaaaagtcatctggactcatttttttctattccatttcactttgctttatttgcaatacccacatctcttcttattttctggatgtacttttatttgtgctatattctcttgctatctttgccccatacaacccttctctatcttacattaattcagaaaattagaatctatcaggcctaggcaggagagccatgccattagttttttctctaaactacttaatccaattgaaataatttcctcaggctcttattttaaattgaacttttactttgatttaagttgagagctttaaaaaaatggatatgccaaccacacaattgttttgtgctttttgcaaggagactgagaataaattggtctttgtcattcaaagtatatgtcaagtttacttgttaatgtttggaggtgagagtcggtgactcttacactaatacacctcactga

SEQ ID NO: 858463 - DNA, 555 bp, Homo sapiens
gccaagcaaagacattaaccgagagtcattttagtcttgtaaagttacatagagtcttttgaaattatgcaattctccaaaacttaaraaatatctgcctactttttaaaaagtcatctggactcatttttttctattccatttcactttgctttatttgcaatacccacatctcttcttattttctggatgtacttttatttgtgctatattctcttgctatctttgccccatacaacccttctctatcttacattaattcagaaaattagaatctatcaggcctaggcaggagagccatgccattagttttttctctaaactacttaatccaattgaaataatttcctcaggctcttattttaaattgaacttttactttgatttaagttgagagctttaaaaaaatggatatgccaaccacacaattgttttgtgctttttgcaaggagactgagaataaattggtctttgtcattcaaagtatatgtcaagtttacttgttaatgtttggaggtgagagtcggtgactcttacactaatacacctcactga

SEQ ID NO: 858464 - DNA, 552 bp, Homo sapiens
ccattgggatggtgccagctcatccatcaagtgctggggctgtaaaatatctcaagcactgatctttggttttacaatagtgatgttatcctcaggagcaattwggggagtgtcttgtaacctccaactgcatggcttctaaaccataatttctaatcttttggctaatttgttagtcctacaaaaggcagtgtagtccccaggcaagaagggggattgttttagaaaagggctataaactatgttcctcccaaagttaatttggccttcatccaggaatgaacaagaacagcttagtggttagaagcaagatttcagatttctttcaccacagtcataattttgcaatagtggtttcatttacatgaggcaaggagaatgggagagctctctgggtaagctttttaagggcactaatcccactcaagagggctccacctcatgaactaataatcttccaaatgtcccacttccaaataccatcaccttgggggctaggatttcgatatatgaattggggaagacacaaacattcataccatggcaccttat

SEQ ID NO: 858465 - DNA, 605 bp, Homo sapiens
cagttccatccatgttgttataattatcatgatttcattcttttgtgtgactgaataataatccattgtgtatatataccacattttctgtattcattcatttgttgwttgacacagtttgatttcatatcttggctatggcaaatagtgctgcaataaacatgggtgtgccaacatctctctccaatagatgtatttcctttattttgaataaatacccagtagtgagattgctggattatattgtagttctatttttagttttttaaggaacctccttactgctttccatagtgactatactaatttacatcccaccgatagtgtatgagtgttcctccttctccacctccttaccaccatttattttctgtctttttgtatttttgttatcccatttgtccattttggttttcattgcctgtgcttttgaggtcttattcaacaaattttgcccagactaatgtactcaaatattttccctatgttttcttctagtagtttcaggtcttacatttaagtctttaatacatttagatttgtttttgcatatggtaagagagagggtactaatttcattcttctgcatatggttatctagtttt

SEQ ID NO: 858466 - DNA, 471 bp, Homo sapiens
atgtaaatggataagaagttgcttcttatggatgaacaaagaaagtggtttctgaatatggaagctactcctgatgaagatgctgaaaacatagttaacatgaccacaaaacattatatcacasaaatagttgttaaaacagtgacaagattttagagcattgaatccaattttgaaaaggttctactgttggcaaaatgctaccaaatagcatggcatgcttcagaggaagagtcaatcgatacaataaactttattgttgtcctattttagaaatttttgatagtcacccaaacttcagcaaccgccaccctgatccatcagcaaccatcaatatggaggcaagactgtccactagcagaaaggttaaaactgctgaaggctcagatgtttgttaccatttattagcaatgaagtatttttaattgaggtatatacattgcttttttagacataattctactacatata

SEQ ID NO: 858467 - DNA, 581 bp, Homo sapiens
aactttgaacttgagagagattatttagagtrtctgggggaagaaatttctaagcagaaagcattcaagatgtgacctggctgttcctaacagtgtacagtcatatgaattcagaaaaagattttctgaaattggaacttatgtttaaaagggaagcagaccataaaagtttggaaaattttcagcctgaccatgtggtagaaaagaaaaaaacacattttgtagggagaaattcaagccagttgtggaaaattgcataagtaaagagtaaccaaatgttaatagccaagaaaatgggggaaatacctcaaaagaattttggagaccttcacagcaagccctcccaccaaaggcctggaggcgtaggagggaagaatggttttgcaggctgggcccagggcacttctttcctgtgcaacatcaggacactgttccctgtgtcccagccacgccagttctggcgatggctaaaagggacccagacatgacttaggctgctgttccaaagcatgcaagctgcaagccttggcagtttccgcatggtgttaagtctgtgtgggagcagagggcaggaactgagg

SEQ ID NO: 858468 - DNA, 581 bp, Homo sapiens
aactttgaacttgagagagattatttagagtatctgggggaagaaatttctaagcagaaagcattcaagatgtgacctggctgttcctaacagtgtacagtcatatgaattcagaaaaagattttctgaaattggaacttatgtttaaaagggaagcagaccataaaagtttggaaaattttcagcctgaccatgtggtagaaaagaaaaaaacacattttgtagggagaaattcaagccagttgtggaaaattgcataagtaaagagtaaccaaatgttaatagccaagaaaatgggggaaatacctcaaaagaattttggagaccttcacagcaagccctcccaccaaaggcctggaggcgtaggagggaagaatggttttgcaggctgggcccagggcacttctttcctgtgcaacatcaggacactgttccctgtgtcccagccacgccagttctggcgatggctaaaagrgacccagacatgacttaggctgctgttccaaagcatgcaagctgcaagccttggcagtttccgcatggtgttaagtctgtgtgggagcagagggcaggaactgagg

SEQ ID NO: 858469 - DNA, 558 bp, Homo sapiens
tacaacatttgacgaatgatagctgctaatgttattcaatgtaggattttctgttgctggaccttggctgaaggtcacatttgtaagtgaattggcgtaacatgaaagtaatagaagcaaaatattagtagtcatataaaatatttttaaccatagcagtggtggaataggaaactattcaaaggtgggtggggggaaagctagtttttatttatttatttatttatttttgaaacgtgggttgctgtgagaggataggctaaactattggggatgctttctgatatattagcttaattttaatactatgtgtagacacttggccctttgaattagatgtgaggtggcatgtatcttactctcatgataccagcggacaataggagttttcacaaaagtctaacatgtttccattctcaagagtgacacaagccagtctctgtctacatcactaattctacgatcctaagatcttttgcyatcaataagggagtcctggaaatcagtaacaagtgtggaggccatgtgagtacactggcacttctcttcctacaagtg

SEQ ID NO: 858470 - DNA, 616 bp, Homo sapiens
gtgctagagggagacgcttttacagagttccttttttttttgaaacaaagacatttctgagtgtctaaactacattcttccttaaaaacccaggagtagcttctgttgcaataactgttttagtcaaaaaatgaggtgaaaagttaagctgacttttaaccattgagctccttaaaacaatttttttttaaatcttattacagtatttcagctaggacaaaatgctgctaaacgaacaatgatcacacaaattatacgatttctgagcgctctaagggtaagcagaaattaacaccagctggttgttaatgctaactttaggcatttaaaaagaatttgcaagacagaatcccaaaccagtttcttacctattgatggttctcaggttgtacactgctctctaccatgctagagcaggaaaaagaaactcgtttttcctgttggaagtaagctctgcctccataaaggagttacctgccttccatcatcatggaagaaagaaaamcttaccttccttgttggaagcaagtaaaactccaaaaaaggaggagttgtacagcaaaataaactttagatctcgaccaaattttgggacatcagaacaagcactaatagg

SEQ ID NO: 858471 - DNA, 569 bp, Homo sapiens
atactactgggtatatatcccccaaattgaaatgtttcccaaaaaatatatttgcactcccatgtttatttaagcattattcacaataaccaagatatagaaacaacctaagggtgaatgaatgaatgaaaaaaatttttaagtgtgatgtgcgtgtgtatgtatatgtattcgactatttttaaaagaacaggaaattcagtcatttgcagcaacacagacaaatctagaaaacatgttaagtgaaataagccagacatagaaagacgaatactgtatgatctcactcatacgtgaaatcttaaaaagttgaacttatagaagcaaggaatagaatggtggttatcactggctgttggggaagggtgagaggagaaagaggagaagttgatcaatttgttcaaccttacagttagatagaaataaggtctgagattctattgcacagtagagtggctatagttaatrttctattatgtctttcaagatgcctggcagagaagatttttaatgtttttaccacaaaggaataataaatgtttgaggtgatgaagaatacgctaattacc

SEQ ID NO: 858472 - DNA, 604 bp, Homo sapiens
attctgtttcatatgtccctaaattatttttcaaatccaaaacatgtttgttactgagattacatgcttgaatagaattttttagaaagaaaaccttcatatgtcttcattatactatgaccaatagtatagtcaagaaaggtcataaaagtctccgagcctgaaattatttttccaattaactgtataaaatgttaaagttctgggtatagataactttttctcaataatggtagcaaagattataataacacagagtcgttgaatttagaactatggttcaagttctacccgtccaacttagtggcagtatgactttaggagtaaacaaaatcttatctaaaaacaagcaattaataaatatcactttaaatcaatattattatgattgttcaaataacagaatttaaacatactaattatatacttatatgtttaaattatttcagtttacaaggatacacatttaatacttctccaaattattatctagcataatccaaaagagcatgctttaaacrgtactcgcccaactcacaaaaatacaattattagtgatgctcacctagagtgaaactatttactcatttgcccacagctagca

SEQ ID NO: 858473 - DNA, 627 bp, Homo sapiens
gtgaatttaatgatacatgtattctattgtcactagtggttagaatggacaatttgcatatagaaatagtgtcatacagtacaaaaatttaaaaacaaaacaaatattcaaaacataactaagaatataaaatcaccttatcactccctggtcctgcatagctatttgttgacatttatattaaagccttgagctattttaatgtattctcaagtttaggaaattttatgtgaatttgtatcaaattgacaattttactaatctctgtgtatttactttttgtaaattaaatgaattttacagcacccttgattcatcagctgcacagatttagcaggtttatggtgaataattgcatatattttttaacactgagtttctatcaaaaagaaaacaatagaatttgcaaacaaatgcatgaacaatttgttagtctatataactctcccacatttggaatagtccttcctgtataagtggaagtaaaaagctagctttycattcataattacgattagaattaggcatgctttaattgtgttgatgctctcttataccagttaataaatctctctctcatatcaaattgatttaataaaaatatcctgtgctatgttttttctcctg

SEQ ID NO: 858474 - DNA, 595 bp, Homo sapiens
tattgttctgtttttaactctttgagaaatcaccatactgctttccataatggctgaactaatttacactcccatcaacagtgtataagtgttcctttttctctgcaatcttgtcaccatctttttttttttkactttttaataatagccattctgcctgatgcaatatagtatcatcgtggttttgatttgcatttctctaatgattagactttttaatatgcttgttggccacatttgtttttctgttttttgtttgtttgtttgttttttttttttttttggaaaagggtctgttcaagtcatttgcacactttttaatggggttgtttctttttcccctgtaaatgtgtttaagtttattatagatgctggatatagacctttatagatgcatagtttgcaaatattttcacccattctctaggttatctgtttactccattgatggtgttttttttttttttttcctgtgcagaagctctttaattagatcccatttgtccatttttgcttttgcttgattgcttttgatgtgtttctcatgaagtctttgcccattcctgtgttcagggtgtattgcctacgttatctt

SEQ ID NO: 858475 - DNA, 467 bp, Homo sapiens
caaatattttcacccattctctaggttatctgtttactccrttgatggtgttttttttttttttttcctgtgcagaagctctttaattagatcccatttgtccatttttgcttttgcttgattgcttttgatgtgtttctcatgaagtctttgcccattcctgtgttcagggtgtattgcctacgttatcttccagggttttttaaataagattttggttttacatttaaatatttaatccatcttgagttgatttttgtatatggtgtaaggaaagtgtccaacttcaatcttctgcaccatttattaaagagtaagtattttctccatttcttgtttttgtcagttttgttgaaggtcaggtggttgtaggtgtgcggccttatttctgggctctctattccattttgttcatctatgtgcctgtttttgtaccagtaccatgctattttggttactatagcctt

SEQ ID NO: 858476 - DNA, 606 bp, Homo sapiens
ttgtaaagaagtatgacaaactgaattgcttaaacaatagaaacttagcatttcacagttctggaggctcaatgtccaagatcaaggcattgtcaaaagggttggttccttttaagggggtcaaagaaagctcagtgtcaggtctatctcctgggcttactgatatccatcttcttccttgcctcttcacatcctcctccatccatgggtatttgggttcaaattttctctttctataagaacaccagtcatgctggactaggcacccaacctactctggtatgaactcatctcaaatcattacatctgcaatgaacttatttacaaataaattcactctgcaaagtactggagattagaacatcaacctgtgaatttgggggatacaatccaactcataaaaatcagaaataaaatattttttgggttgaccaaggagggtgatatggtttgtctctgtgtccccacacaaatctcatgttgaattgtgatcctgagtgttggaagagaggcctggtgggaggtgattgaatcttgggggtggtttctaatggtttagtgccaatcccctagtgctgyttcataatagagttctcatgagatcta

SEQ ID NO: 858477 - DNA, 375 bp, Homo sapiens
ggtacctagtgtctaaaataatacttgacatatgtccagtattgatttgcttcttgacagttaagttttttcattgggtttactgtgtatacaagctaaaaacttatttcaaaagatttaaaatattgaagtcattttaatgttaaataatagaagtagccaatatccattttttctttttttcagacgaagtctcactctgtcactcaggctggagtgcagtggtgtgatcacagctcactgcaacctccacctcctaggttcaagctattctcctgcctcagccgccagaatggmtgggatgagaggtgctactaggaatgcttgttccccagtgccgtaaagaaataacacttgaacatacatttaatttcc

SEQ ID NO: 858478 - DNA, 543 bp, Homo sapiens
ttttacatgacattttaaaattcgtggaaagcaagttctaataaattacaatgtgcataatattgtcttgatcatggtttgtgctcaaagtaagtggttatttaaggaattcaagtagaaaatgtatagctgtgtttaaggactgtgaaagattagaaagtttttaccctacgagaaatctaagtaggtatcttttcaaaattgtatgaattacagtagaagataaaagactcctgaatcagatacaaagaagagttttttattatcaacaatcagcatagctagagtactggcatttctgcaccagtttctgagacccagttttcacagggtaatgtgaagagggatagttaaacctgcataagcggtaagcttccttactgcagaaaaatcccgagtttatgtatgcccattatttttaactgttcagttagaatgtttattttttgctcttcaaaagtagatactctrtattttctaaggctcttatacaaacacttttaaaaacacagtttggaaaaaggtacaaatgtgtcctcattt

SEQ ID NO: 858479 - DNA, 639 bp, Homo sapiens
tcatttcaagtctctccagagggaaaattatacttaaattaagaacagctctcaggcttaagatcaaatccataggaggtttaaaagagtatttacgaatgcatcatagcaagccacctcataaaaacctgcagaccagaaaaaaacaaaccaaagatcctctaagtatcttatagatgtatcttgtaggttcactttcttaaaacagtaagtctcagaatcctaacagttactggttgcagggagttcgtacaatcttgaaggcatgtgtgggttttgcttttattaaatcgagtgaatgataaatggatatacataaaggtcagaaatattgtaaggcattgtttcagcttggacaaaaggaacagagacattaccacttgtaaagaggatattgacataaaattattaatataacgaatttagatgagagatgttaagaggtgttattgttagagtaggaagataggcagatgtgagcagggcagcagagctcccccaacccctctcccccaccataaatrtcaggcaaccatcaggtgatggtcaggcggttgttaaactgtctctctaaataataatgggtcacagccagcgccagggaatggcagtctcccagtagttagaaaatactggaag

SEQ ID NO: 858480 - DNA, 522 bp, Homo sapiens
tacattttgccttataactattactactattgatgttcacctagtggtgattctatttttccctcatctcttctacattgattagctgaaattattctgtaaaacaaacaaacaaagacaaaaaaaccttctttatacctatattttttctattctcatgctgctaataaagacatacccgagactgggtgatttataaagaaaagaggcttcattgactcacagttccacatggcttgggaggcctcacaatcatggaaaagcaagaaatgccttacatggtggcaggcaagagagagcttgtgtatgggagctcccatttataaaaccatcagatcttgtgagagttatttactgctacaagaacaatatgggggaaactggccccatgattcaattatctccacctggccccacccttgacacttggagattattacaatttaaggtgagatttgggtggggacactgccaaaccmtatcaatacccatttagttatttatgccagaaaataaagtctg

SEQ ID NO: 858481 - DNA, 540 bp, Homo sapiens
ggaaagaattcaggcagcacrtagttatctaaatgaaaggcactgaaatgtgaagccagcggagactcagctggaagtaggggcaaaagtacactcactgaataggacctctccatagcagacagccaaggcaccaatgaggaatatattttgtctgaggctatgaagcaacaataagccaagattctagattttccttcccaagttataacatgattattaattaaagtattattactttcatttaggcattgatgaatgtagtcttaaaaacttacttacttaattcaacctgcagtatgtgtcagaaactacaaatatttactttgagtttttgataattgtaaaagttcactattatcaatatcatttttgctggaaggaatttaggcccaaacagtttaagaaatttgcaaaacatcaaacagagaatcatttggcaaaaccaagcaacaaaaacacattttagctataacacctcatgtaatcagaaaagtgtggaggggtatgtatctgagaagtataaccagtgatccttgc

SEQ ID NO: 858482 - DNA, 672 bp, Homo sapiens
ccaggccaagtgcagtggctcatgcctgtaattactttgggaggcttaggcgggtggattatcagaggtggggagattgagatcagtctggccaacatgatgaaacctgtctctactaaatacacaaaaattatctgggtgtggtggtggatgcctataatcccagctacttgggaggctgaggcacgagaacttgaacccaggaggcagaggttgcagtgagccgagatcgcaccactgtactctaacctgggcaacacagcaagaccctgcctcaaaacaaacaaacaaacacacaaaacatatatatatatatatatatatatatatatattatatatataattgcatttataatttaaataattaaaatgcctctaatatataaggtaaagcattcactttcttatgacattatttaatgtcataagaaaaagtctttatatatctatgaagataattttgactgaattaatgacatgttttataaaaacaaaatttcaaacgtagtaaaaaaattgaagtctaattaaccttaaaacaagaaaaaaatwtgaatgaaactctagtcaagtaaaacaaaatagaagaaaaagcaaccgacccatcaactctttacctccaagccttcaattacagatacttttatagccaggttaatttaaatattta

SEQ ID NO: 858483 - DNA, 532 bp, Homo sapiens
ttaataactttaaattggggaggaccaataaaaagttagtaacagcattctatttgtacatataaattttaaccagaaacattctaaattgataaaattcctgaataaatagttgaattgaatcacatatttttcaaaaaaaaacacaatttgcttaatttaacctgttcttaacagtactggcataaatcttactctaatgaatgattgctttgtaataaaaacagaatattataatactaataatgtatttatgccttaatatgtatttgtttgttaagttctaaagttcttacctgtttttcaccttttccgttatttattacttaattccttcctctgttttttatttcctctcttcttttcttctttcttcccgtcttacttctccttccctccctctctccactcgctcctttcttcatttattcttyttctttgttgcttttatttgacaattcatgagtctcattctcttctcattcaataggcagaattttaatgtgtttgatagaatatttaattcatatat

SEQ ID NO: 858484 - DNA, 542 bp, Homo sapiens
gttaatgctgaaatgagttaagactttgggggactgttgggaaggaatgattggttttgaaatgtaagaccatgagatttgggaggggccggggtggaatgatatggtttggctgtgtcctgacccatatcccatcttaaattatcttgaattgtagctctcacaattcccacatgcaatgggagggacccagtgggagatagtggaatcatggcagtaatttcaaccttactgttctcagggtagtgaataaatctcatgagatctgatggttctgtaaggaatttccccttttacttagctctcattttctcttgtctgccaccatgtaagatgtgcctttcaccttctggcatgattgtgagcctccccgcctagtggaactgtgagtccaataaacctctttttctttataaattacccagtttcatgtrtgtctttatcagcaatgtaaatttgcaaaaggaacctcatagatttgatcttctcagtagaggtccatgggctttataattaaagacttagagaaatacttgcaaaac

SEQ ID NO: 858485 - DNA, 632 bp, Homo sapiens; identical to SEQ ID NO: 825716

SEQ ID NO: 858486 - DNA, 559 bp, Homo sapiens
atctcccatttaatccttgggaaatcacatcatttacagatatttatggctcttttcagctttaacattcaataatttaactaaaattagaagttaacaaaagtcactgagactagaatttcttaattttatttctttatgtatgaatatttactaatatgtaaattttcttgtaagttctgaatcctaccttctttttaaggcacacagatttgtcctttgtagaagaactgcgcacaaaataaggttatcacagaaacatataagccaatagtaattatgatataaaatgctatattataaagggcttggcatgatttaatttcttatttttgtatttttcaaagagtaatataaagcatttctctaagcaacagagcatacatgcattttacaactttgtttccttttatcaaatgaaaatggattcaatatcagatttgtggcataaaatctgataaatctatgaagtctcaatgaactaaaacggcaaatcatattattttacttcattcctaargaaaaaagactcctctatctttctcagtcttacatttta

SEQ ID NO: 858487 - DNA, 470 bp, Homo sapiens
taacatcagcttgtagtgctttgttgatcctttctcatatcatcatgatcgtcttatccatgaacttatttctttctgtcaaaaaattaattcagctttctcaatctcttgggaattttctttctttgcttcaagaacatctcatttgggttaatgttcctaaataaattaatttccaaacttataaaatatataatctactttcacagcgtctaatttctcatgacatggtcatttctctttcagttgcagtttagcttttatcccaaatcagtgccgacattgttttcccaggtatagaatgtgatctatgcgacaaaagaaagaccatttttggtrtttatttgcatttattctctctacagaactgccattgttagtgttttcctgtttttcacatttcattttatttttaacttttatagccacctagtaggcttatatgtttatggggttcatgagatattttg

SEQ ID NO: 858488 - DNA, 528 bp, Homo sapiens
gaggcggaggttgcagtgagccgagattgcaccattgcattccaacctggtcatcaagagcgaaactccatccaaaaaaaaaaaaaaaaaaattggattttatctstttttatctctagttaggtgatttgagaagaatttcagaaagaatggctgtactgtctattgcatggtgacaggaagcaggaataattttatgattaattatctttaccttatctaaaaagaagagatgacaaaagcaaagctaaacctgtcattgcaaatagcacccatttatactggctagaggaaaagagatatggggaattttttgttgtttgatgcttcataatttttctatattcagacaggactatgaggtagccttgtttctgtcttaatcaattagcaacaggatgatcttgtttgatattaatgttttgtaaacttatttgtgtttaacaagagaacatgaaggcctcaatgatattgttgagacagctcccagatgtttcggatcaatttgttctctcttagtaacaatag

SEQ ID NO: 858489 - DNA, 609 bp, Homo sapiens
tctatcttaggtacataccatagcttttgtatccattcacctattgataggatttggagttgcctctaacttggggttgtttttaagtaaacctgcaataaatattcatgtacatgtcatgtctatacatatgctttcattttcctattcttcagaaaatacctaaaactgggatggttgggttatatggcattagtatgcttaacttttgaaaaagattgaactcttttctaaattaatagcagcactaaacattttcaccaataatgttttgtttctttcttcctttgcaatatataactgttattttttcccgtcttagagcactagctatgattttcaatatgaaaaatagaaatgaggagaaacggtactctactcttgccaggtacctgatcttggcatggatattggggaaaacccacagtttcttaatattaggtatggaactagctgtaggacttttaaaaatgttcttattcaagttkagaaattaccactaatagtttgctggaagttttcaatcacaaatggatgtcagattttgtcagataattttagttcatcagttaatataattacataatttatgttattttttcatgtatt

SEQ ID NO: 858490 - DNA, 659 bp, Homo sapiens
actgccctttataaaaccattggatcccatgagacttatttactatcatgagaacagcaagagaaagttctgccctcatgattcatttacctcccactgggcccctcccatgacaggtggggattatggttgctacaattcaagatgagatttgggtgaggacacagacaaaccatattattttgcccttggcaccttcaaaatcttatgtcctcacatttcaaaaccaaccatgccttcccaacagtcctcccaaatcttaactcatttcagcatttcaaaagtccacagtctaaagtctcatctgagacaaggcaagtcccttccacctatgagcctgtaaaatcgaaagcaagttagttacttcctagttacaatgtgggtacaggcattgggtaaatgcagccattccaaatgggagaaattggccaaaacaaaggggctacaggccccatgaatgtctgaaatccagtgggccatcaaatcttaaagctccaaaatgatctcctttgactccatggctcataactaggtcacrctgatgtaagagatgggttcctatggtctttggcagctccacccctgttgctttacagagtacagcctccctcccagctgctttcttgagtgtttgaggcttttccaggtgcacaatgcaa

SEQ ID NO: 858491 - DNA, 616 bp, Homo sapiens
gaaaaaacaatgactcaattaaaataatagaataataaacattctctatttagattagcaaactcttcttgttcaaagtgtgtaaaatagagaacaacttctccaaacatagttttatttatttattcatttatttttgagacagagtctcactctgtcacccaggctggcatgcagtggcttgatcagggctcattgcagccttgacctcccaggctcaagtgagccttctgcctcagtcccccaagtagctggggcaacaggtatgcacaaccacgtcctgctaattgtttgtagttttagtagagaccaggttttgccatgttaccaaggctggtctttaactcctacactcaagggatccacccatcttagcatcccgaagtgctgagattgcaggcatgagccatcatgcccggatccctccagacatggttttaaccatgaatttttaagatattctctcataaaaagagatctatctttgtcatgcacataaacagaaaactgaaaaatcaaccctgtytcaaagggagaacagatttttaaaaagaaataaagtaagagtaaacagtatttatttattttaattagtttcagtggctgttgatggact

SEQ ID NO: 858492 - DNA, 649 bp, Homo sapiens
catggaaatcttccaaaagcattgttttattaacctgacctttgtaaagttgagaatgaatgtgagtttaggttctacctttaggcagatttttgaaacctaactgaagctgccagttaaacgcaaagcaatattttttaaagttaactgatctgcagggtttgaattgagttgtttctgaaccataaggtaaacaagtgatgtattttctttcattctctccttttgtaagtttaatttttgtcaaagtagtataaaaatgaattcaaatgtaattatagccttttggtagcctctaggactatagagtttttaaaaacaaaacagtccattgatttttttccacctgtcattcctgctttccagaggccacagagttcaagtcctctagctatattcttaaaaatctgcctttttatttctaaaaaaatcaagtttatgcttccatttctctcttgttgttttcaaattagccacttcttttgactccctacaatgaaagataagaattaagctttttaccaaaaacacacacacttacagggagtcacatccctccccacatatcacacacaaccttaaaatatcagtcacagctgaycccttattatataattattgcatataatttcctatgtacacttgcttg

SEQ ID NO: 858493 - DNA, 631 bp, Homo sapiens
ttttcattactgagccatataatattgctgccacagaactcctactagctagagataaattggagagccctgaaaaaaatgacatgagtaaaatgaaacggatgatgttggtgagatcactcctrcaaatcaagacagagtgtgttctctcctctttttggctcaccccagtgagggctgtcatctgacttgagttggttcactaggatcatgagtagaggtggttcctttctccgacatcagagactgaggccaaacatgagaaccacagcaggtatttcattaccagatagtcactctcaagtgggttgttatgcaattgatccaatgctaaccctctttaaaagggcacattttccctactttattgttagaaaaaagcacatcatgtattgacatgttgtactgatttttctttttttttttgtactgattcttcataaggcatttcatccatcccatagttaactatagatcatgagcccatttgacataaagtagggtcatgtatttcctccttcttctcccacattgttttaacggtcctgtcagcatagactaaaaagcaatggtactaaaaaatccttctcaatactctaaatcttgaaaagcaaacttcaatgtaacttct

SEQ ID NO: 858494 - DNA, 490 bp, Homo sapiens
tgtaagggcatacctatttttctcaagatacatcctaagcaccccttattacttgtagatcatcaactgtggtcagctgtgatcatgttccaggggaagtctaaccctaaaggaaatagtttatactccacaagaatcataagactttttctaatttatcttatcagaaatttgggaattatgtgtgaaagaaaatagaacttctggtccccaaatttaccatgccaaagggaaagttcagcttgggaaatgaattatgcaaaaactgctttcctttttttttcccaaatagttagttgtaatttcacaattctgtgtcatagcctcattttctctactctctgtttttacatgttactttatcttatgtaaaatgtagatttactgaacacaggacaatgtataattgactttcctcaactgtctcattttacacgtaaaatgtaragtcactgaagctaatcagagcctcacaggaatgtgagcatct

SEQ ID NO: 858495 - DNA, 490 bp, Homo sapiens
tgtaagggcatacctatttttctcaagatacatcctaagcaccccttattacttgtagatcatcaactgtggtcagctgtgatcatgttccaggggaagtctaaccctaaaggaaatagtttatactccacaagaatcataagactttttctaatttatcttatcagaaatttgggaattatgtgtgaaagaaaatagaacttctggtccccaaatttaccatgccaaagggaaagttcagcttgggaaatgaattatgcaaaaactgctttcctttttttttcccaaatagttagttgtaatttcacaattctgtgtcatagcctcattttctctactctctgtttttacatgttactttatcttatgtaaaatgtagatttactgaacacaggacaatgtataattgactttcctcaactgtctcattttacacgtaaaatgtaaagycactgaagctaatcagagcctcacaggaatgtgagcatct

SEQ ID NO: 858496 - DNA, 608 bp, Homo sapiens
ttgcttagttctactaactgaggaattacagagagttttgctcaacaacccaggattccacataacatcgtataagattaagggatccattcaacagcaaggagaagggagagggagtwttaggtaggtaggtaatcatggagtacttgatccagtcatatttcatatcacaatgtatccacttgtctgttggaacactgaaatgccccccacttttttttttttttttttttttgagatggagtttcactcttgttgcccaggctggaatgcaatggtgcaatcttggctcattgcaacctctgcctcctgggctcaagcaattcccctgcctcagcctcctgagtagcttggattataggcatgcaccaccatgccttgttaattttgtatttttagtaagggcggggtttcttcatgttggtcaggctggtcttgaactcctgagctcaggtgatctgcctgcctcggcctcccaaagtgctgggattacaggcatgagccaccgtgcctggcccctgaaatgccctcttaaaaatgaagctgaaatgccatcttaaggacaacttgtgatgatcaggcatcttccaggttaaactgtataccct

SEQ ID NO: 858497 - DNA, 314 bp, Homo sapiens
aaaaacaactcttttagatttagctgaaaacagcttataatgaatatacaattgaaataattattgttgtaaaagtaaatatgcttaaatatgtctttctgtttgggatatttttatcatgttaaagtaccacatcaacacactacttttttaaagaaagaaatagagaacttttagattgcaaaagtgtacgtagaaaataagtaagtagtgaaattttgaaatatttaccatcaacaaacactatcaaagctagargtgtgcagttgttttcaattctgaataaatttcataaaataaataatactaaacat

SEQ ID NO: 858498 - DNA, 390 bp, Homo sapiens
aaggtgatttattcaattacccatagtatgttattaacatagctatgacttctttgtatttgttagaaattttatattaagaaatatatacagtagttcccagtagaaatttatataaaatactctattttacatatgtaatgaaatctaagatttaaaagagattctttactctggggaaaataatggtggattaattaatttggtactcttttagggcctttctaaattaaaactccacattacaatttccaatgcagcccacaaacttaaatttatgaagaaatttaacaaatctactaagaaataaattcaaaatctgtaaaatatgcaattttaatgtyatttaaaacttttattgcaaatattcctgttattagcaaagtagaa

SEQ ID NO: 858499 - DNA, 603 bp, Homo sapiens
accaataacaggcaaacagcccaatcatgagtgaactcccattcacaattgctacaaagagaataaaatacctaggactccaacttacaagggatgtgaaggacctcttcaaggagaactacaagccactgctcaacgaaataaaagaggacacaaacaaatggaagaacattccatgctcatggataggaagaatcaatatcgtgaaaatggccatactgcccaaggtaatttatagattcagtgccatccccatcaagctaccaatgactttcttcacagaattggagaaaactactttaaaattcacatggaaacaaaaaaaagcccacattgccaagataatcctaagcaaaaagaacaaagctggaggtatcacgccacctgacttcaaactatactacaaagctacagtaaccaaaacagcatggtactggcaccaaaacagagatatagaccaatggaacagaacagaggcctcagaaaaaacaccacacatccacaaccatctgatctttgacaaacatgatgwaaacaagaaatcgggaaaggattccctatttaataaatggtgctggaaaaactggctagccatatgtagaa

SEQ ID NO: 858500 - DNA, 617 bp, Homo sapiens
ctatctcctattttctgatgcagatgtatattattaatatgagtgatatatcatctgattaatacaatttgcaacaatgagcacatgtttatrgtaacctagaccagattcttacttatcttagatcccttaattaagagttgaaagaaatgtgttatcaaggacctaatttttaggcatcgctaagaagaaacataaaagtatcagaaatatttgttagtcacttccctcctataatttgtttggcagtttttaatcttatttttgttgcttaagaatttcctaaaataaaattaaatatacatatatgttttccctgaataattctgtctgaaactcaataaaatctttcaatctgctattcaaatctattattcacccaaaaaccaatcagaaaacacatctggtacttttttgtactcattgcctcttcccatctgacttattttctttcttgatctttcaatactcacatattagatctataataccacttgttttccaattatttcctctacaccattgcctctttttgtatttttacttcaaattatttcttttgtttggttttcatctctttattcagatctcaacactggccatttccttagttcatc

SEQ ID NO: 858501 - DNA, 559 bp, Homo sapiens
gaataaatttttattttgctgagttggcaatctaatgcttaagaagaagcaaagaagtcaaggagcaggatattatctattccagctccaataaratatagtgtttaaatcttaatacaaagttcagttttaaacctatgaaaactaatatgattttgagatatacatagatcacatgagctaccgctacactgatacatctaaaattaaaatgtcattaattaaataagacactgagcaatacttccatatttttaactgtatgtgagaaacctatacaatagaagaacattcataaaattgaagcaattgattctcaatgtcattagaacagtttaaaagcagtttcatatatattaaaccaccagatatccataacactaaataattactaacatacccactaagtaaatgagaaagctgaaattcacaaaatataatagacctgcttcagttacaaatatattaaagaacagaagtgggactggaatttgagtcttttaacttcaattttaggtttcttttctcctatatacgtgtataaaaacaaacaaacaaa

SEQ ID NO: 858502 - DNA, 609 bp, Homo sapiens
ctatgcagatctattatggaaaacaattatccgtaattaaggcaagataattgtctcaagaattaagtatataaataaattttgagagaatctttaaataaagaaggaaaaatatgtgaatamttggaataagtaatttccaagacttaagatgtatttttagaaaaagttcaagttgagaaggaagtaaagctaattatttttttaatttaaagaatattgaacaaatgagcttcagagcagtaaagaaataatactgacagaggctacaagggagccagtctaattatgtaacttactgtagagacaaaatcaagatggagcaagctggtcaataattgttgttttatctaaaactctatgtaattgtaattaattgcattttaattaggaccttcaatgcaagaagagaaaccaacattgacttttcctggaatgtaaggtacgatttaactattcaggtaaagaaatgacagctgtagaactggatctcagaggccatctgaaaactcaaaaatactacgttctctttatctctagcttttctctcttaatctctctgtgtgagtgattctctttactggcatattttcaccacatggcaagaaa

SEQ ID NO: 858503 - DNA, 467 bp, Homo sapiens
tatggaaaagcctggatgtctagacagaagcctgctgcatgggcagagccctcatggggaacctctatgagggcactgtggaggggaaatgtggggttggatcccccacatagagtccccactggagcactgcctggtggtgcagtgagaagagacccatcatcctccagaccccagaattgtagacccactggcagtttgcaccctgcacctgggagagccacaggcattcaacaacagcccatgacagtaaacatgagggctgaaccctgaaaagccataaaggtggagcttcccaaggccttgggagctcacctctggcccctgtgtgtcctggatggagacatggagtcaaaggagattattttgaagctttayggattaataactgccctgctgggtttcagacttgcatggggcctgtatcccttttgatttggccaatttcttccttttggaacaagagt

SEQ ID NO: 858504 - DNA, 467 bp, Homo sapiens
tatggaaaagcctggatgtctagacagaagcctgctgcatgggcagagccctcatggggaacctctatgagggcactgtggaggggaaatgtggggttggatcccccacatagagtccccactggagcactgcctggtggtgcagtgagaagagacccatcatcctccagaccccagaattgtagacccactggcagtttgcaccctgcacctgggagagccacaggcattcaacaacagcccatgacagtaaacatgagggctgaaccctgaaaagccataaaggtggagcttcccaaggccttgggagctcacctctggcccctgtgtgtcctggatggagacatggagtcaaaggagattattttgaagctttatrgattaataactgccctgctgggtttcagacttgcatggggcctgtatcccttttgatttggccaatttcttccttttggaacaagagt

SEQ ID NO: 858505 - DNA, 516 bp, Homo sapiens
tgtttgagaatgacaaggagcccaggatgggagaagaaaaaaagagagagaatggtaagaaaggcgatcaggtagttggaaatagtggcggtaggggtgggsagggaagttgaacagcagtggtgcaaatgaagtagggcttttaagtgtgaaaagaaaacgtcagaaaaattaaatttgatggagtttaactgagttaaaaaagaagaaacgatttgtgaagcaggcagcctccagaatcacagcagattcacagagactcccggggtgcctagtggtcagaacaaatttacagacaaaaaaagtaaagtgacatacaggaatcagaagtgaggtacagaaacagctggattggttacaggttggcgtttgctttatttgagcacaacttgaacagtcagcagtctatgagtggttgaagaatggccactgggattggccaagactcagctattgttacaggcaaatactcctacgttaggttgtcaatcttgtctgcctattaagctaagttgt

SEQ ID NO: 858506 - DNA, 575 bp, Homo sapiens
atacctgagtgatgaaataatctgtacaacaaacccccatgaaacatgtttacctatgtaacaaatctacacmtcatgcccatatacccctaaacttaaaataagagttaaaaaaaaacaagtatttctgcctcttctattcttttgaagcatttgtgtagaatttgtgtggaattacgtagaattttaaggtgttaagcttgtggtaacctgttacacagcaataaaaaaactaatatattttgtatgctttcaatttattgtaattttgaaaattaagattcagtacattgtcaactttaatgtttcatgtgcattgaaaatcatgtgagtgtagtaatcgttgcatagattgttctataaatatcaattgtatgaagttggatgatagtgttgttcaagtcttctatattcttcctgatatttttatctatttgtcctattaatcattgataaaagagttttgaagttgccaactacctagtgataaatttttctcgttctgtatcagtctggtcaggctgccataacaaaataccatagactaagtgaattaaacaacagagacatatttt

SEQ ID NO: 858507 - DNA, 365 bp, Homo sapiens
tattgagacagatacagtttacaatgctgacatttgtcttgagaaagagaaagagaagaaaaaatttacttatgacatgttttatttttctaaaactttgaaaggttcaaaattatctttatgcaggtttcacayattaatttaaaatcttactgactttgtgaaacggtacaaaaatcaacaacaacagcaacaaaaataacttgaactcaataaatgccacttgaatcagcaaagacccacgtgtgtggttctgtcaaatccccttgctgcaatagctctgccaatttacttgacaaatgtgtagccctggactttcaccccttgtttaacagaacaatttgaagatgatactttagaagtct

SEQ ID NO: 858508 - DNA, 604 bp, Homo sapiens; identical to SEQ ID NO: 856038

SEQ ID NO: 858509 - DNA, 512 bp, Homo sapiens
aaaattgagccatgaagaaatccaatacctgaatagaccaaaaatgagaaacaagattgagccacaataaaaagcctcccagcaaagaaaagccctggacccagtggcttccctgttgaattctaccaaakttttaaagaaaaactaataccaatcctactcaaactattccaaaaaatagaggaggggagaatatttccaaactcattctattaggctggtacaaatgcaattgcgatttttgccattgaaagtaatggcaaaacccacaatggcaaaaaccacaattgcctttgcaccaacctaatatgagaccagtattacactgataccaaagccagacaaaagcacatcagaaaaagaaaactacaggctaatatcgcagatgaacatagatgcaaaactcctcaacaaaatatcagcaaaccaaattcaacaacacattaaaaaggtcattcatcatgaccaagtgggatttatccctggaataaaaggatggttcaacatatgca

SEQ ID NO: 858510 - DNA, 478 bp, Homo sapiens
tgaacatttgtgtacaaatggcctttaatatatatccagatagatgacctatccagatatggccttttatatatccagatagatagatagatataaaataagcatcctgttataaaactgccaacacaatgtggcatcaccacagcctagtatgacattccagggatgagcagcttgtgtgaggcagtgcctatccagttagccaccctgctgaggatgtacctcaattagaacttttgtgtgtgtgacattgccttctaaagacattctagcagtgtggtgttggtgtatggtgtgggaaacaccaaagacctttcctaccagaataatttgtaaccctccatgtgagcacacagtgtattcaccatttttgtattgctctaaakaaatacctgggactgagtaattcagaaaaaaaaaagaggtttaattggcttatggttctgcagactgtacagaaagcatagcaccagcacgt

SEQ ID NO: 858511 - DNA, 431 bp, Homo sapiens
ttatatatatacacacacacacacacacacacacacacacacacacacacwattaatatgagatgcccaaaaatccaattgtaaaaaggggcaaaggttgtaaactggtaattcataaaaacaaatgaagagatgcttattggtactatatgctcagtattaagcaaattaaatgagataggatcgtgcatattcaaccaacaaaatatctgaatgtctgaaaataataaatgttaatgagggagtggagaaaatgggaatgctcatactgctgatagagagtaaactggtacaactattgtggcagccaattaatatttagtaaagctgaagatgcatggtccactgtggtacaggccctggagatattatcaaatgtgtacacaaagaaacacgcacaaggatattttctgcgatactgtaatactcaa

SEQ ID NO: 858512 - DNA, 644 bp, Homo sapiens
cagatattgcaactatatcatggcagccagtgaacaaagttcacattccatgcttcttgtatttggacagagctcaaactacataactgagacctcagagctgagatataycaaagaccatagatttcagtccagattaacatgttctgctcaagcatcctcatgatttaaggattatttttatattacaaaagaccccatttttctttagcaaacataccataagtcatgtttaaagaaaggtacatagagctaggtggatgtttacaagagccctttgagttaaatccaaaattattagcctttctgctgtatgcttataaatgaagcatagcacaacataatagctagattgaccacaattaggtccctgaattaaaggcaagaaataagacattttgacagctctggaacattgcatttcatggggttcagtgcacagctaggtaacacaggtcttcctgtaattgcagtacaatgggaaaattcagtgcttaattgccttcagattttctcatgtgatggatataaaaatcaagtgccagcattgtctccctgccattaagtgaaacacaactaaaaacattttggagtttaactgtcctaaaccagaataagagtacatgttgggcttctttctcagg

SEQ ID NO: 858513 - DNA, 644 bp, Homo sapiens
cagatattgcaactatatcatggcagccagtgaacaaagttcacattccatgcttcttgtatttggacagagctcaaactacataactgagacctcagagctgagatataccaaagaccatagatttsagtccagattaacatgttctgctcaagcatcctcatgatttaaggattatttttatattacaaaagaccccatttttctttagcaaacataccataagtcatgtttaaagaaaggtacatagagctaggtggatgtttacaagagccctttgagttaaatccaaaattattagcctttctgctgtatgcttataaatgaagcatagcacaacataatagctagattgaccacaattaggtccctgaattaaaggcaagaaataagacattttgacagctctggaacattgcatttcatggggttcagtgcacagctaggtaacacaggtcttcctgtaattgcagtacaatgggaaaattcagtgcttaattgccttcagattttctcatgtgatggatataaaaatcaagtgccagcattgtctccctgccattaagtgaaacacaactaaaaacattttggagtttaactgtcctaaaccagaataagagtacatgttgggcttctttctcagg

SEQ ID NO: 858514 - DNA, 644 bp, Homo sapiens
cagatattgcaactatatcatggcagccagtgaacaaagttcacattccatgcttcttgtatttggacagagctcaaactacataactgagacctcagagctgagatataccaaagaccatagatttcagtccagattaacatgttctgctcaagcatcctcatgatttaaggattatttttatattacaaaagaccccatttttctttagcaaacataccataagtcatgtttaaagaaaggtacatagagctaggtggatgtttacaagagccctttgagttaaatccaaaattattagcctttctgctgtatgcttataaatgaagcatagcacaacataatagctagattgaccacaattaggtccctgaattaaaggcaagaaataagacattttgacagctctggaacattgcatttcatggggttcagtgcacagctaggtaacacaggtcttcctgtaattgcagtacaatgggaaaattcagtgcttaattgccttcagattttctcatgtgatggatataaaaatcaagtgccrgcattgtctccctgccattaagtgaaacacaactaaaaacattttggagtttaactgtcctaaaccagaataagagtacatgttgggcttctttctcagg

SEQ ID NO: 858515 - DNA, 630 bp, Homo sapiens
aatttctatatctttacattttgcttctggttttttattggctattcttacctaatggtttttcccagatgacttttayaataattgtattaattttcctaagtatctactacacttataaacacccctccctgcagaactccttcccaaagacagagagcctgcttttctctttcacactggtatgtttttatgtttccacctagggtctcatctgttgcatgcaagctcagaattcacttgacatgctgatagcatataatgttaaagaattcttctctcagtgtaaaaaatatttagctactgtggaaggtcaaactgctaaaaccgactggtgtaacatttgaatgctgccctttatataagctttatttttataaataagcatctgactagaaagtcagtaaaagagcatgatataatcagtctgaagcccagtgttttaaatataatacactaattttagacccaagtattttagttttgctttattgtctacagtttcttaagaagatgtaacttaaaagaaaaaaaaaatcttttaaatggctcaatcaatttattagaaataagcggcaaagagcatctgttcccacagagcaactgttaagttaatccccattaagtcgg

SEQ ID NO: 858516 - DNA, 504 bp, Homo sapiens
agaacctgtctctacaagaaaattttaaaaattagctaggtgcagtgacacatgcctgcagttccagctacttgggaagcttggtcaggaggattatttgaacccaggaggttgaggctgtagtgagccctgattgcacgactgtactcaagcctgggaaagagaataactgcctgtcttttaattaaaaaaaacaaaaaacaaaaaacaaaaacagtaagaattgcttttcatcataacttctttttttccagttagtcatctatgaatgtttttgtaagatattttgtcctaaaaggactgtcaccaacaagcaggtacaccaggatgccatggccccaggctggccttggcattactacttcaagctaaatttcaatttagagaagrtgcaggtcatttctgatgaccaacatctggatctccccttttcttctcctatcacaacaaacagcatatattcccactaattattattattattattctttgagatggaatctc

SEQ ID NO: 858517 - DNA, 522 bp, Homo sapiens
atatctccaccatatacttttggaggattgagaaaatgtgtcatcgcttggaattcctaatcttattttattcattcaggttgaggaataatgtaagatattgctccactgtggctttatgaaattttttacttaaaaaaatccaaagcatgtaagtatttatctcatggcttaaatgttcatcactgtaaggagaagtttaagattggaatgtatctctagccttgctctctctccccctgagatctggctttatactttacagcagtaggtttgcaaatcaaaatgccagcttgacctagctgccagaaagtcctgaatatgaatcccacaacagaatttattaattttcctttacaagttggtaatttcttattttctcttaagtaaygctaatttcgggtacacccttgccatgagggaggttctaggtctccagtgttattgtcatacactggcatgtatactgtcatctctactggtattatataatgttgttgctggtacaggctttccccagaa

SEQ ID NO: 858518 - DNA, 633 bp, Homo sapiens
agcctcccaaagtgctgggattactggtgtgaccgaccgygcctggccaatgtgtatgatttaatagccagcagcaacaggccactaacatgccatctgctaacaggggctctagctattaacatcaacagagctaaaaactcttatgtctgatcccttgcaaatggcgaagacctggctgagaattattatctcatgctttcagagaaaactttgcttgtcctgcactgaaaaatctggctgcaataatcacatggaagaaggtatgtttgttggcatggttcatgggctggcttatgacttctaagcagaagatacaaaataatataaaattcctgcaacatgcacaatgtagctgatattcatgttctctttaaatatcttaacactgacttacatatttaagggtgtggagtctttgagcttgggaagcatcttattactgaggtacaaatgctaaaagagggacatttcttctatctaccgcattttcaatgaaaagatgctgaaggtgaataaacagctctgcaaacccagttttgtttaacttggcaacagcagtaagtaagtatcactggacacagagacactggaatagattcagtctttagtcttattcatcacgtctgacct

SEQ ID NO: 858519 - DNA, 619 bp, Homo sapiens
tctgtgagtatctctcaacttcacttactttggtgcgatctaggcccttcatccaggcttcatctcttcaaaagagttcccagcatgttttcctgcttatgagttattccagtcacaaattcayccagccgtctcctatagaaacaggtgttcataaaaatcaaatgcagagagatgtcaaagatagaatacattaaaagaatataaacttacagcttattttcagaagatttaccttaatgggatgttaagctttgtttaggtatttaaataactggagtaaaattcaatgttatgcagacatttatcataagaatatcaataatcaaattaagtccctgaataataagagctacatgctcttattaagttaaattatggtcactcattcaatctgtttcccctcaccaacatgaaaatgggcttttcctgtttcatagaaaactgaacaatttatttcagtcattgatggagtaggtcagtgtttatcttcatgagttgatattaaatattctctaactataaaaattattagtgctactgtagcaaagaagcattccaagataaagagagggaaaatcccatagccaaattggagttaaagtagtaggatacagat

SEQ ID NO: 858520 - DNA, 628 bp, Homo sapiens
ctgtgtctcccaagcattctagcttaaactcttcttacttactatactttctaaagggtcctcttaggaatttgttgaatcatgtgttcacttctgagtgggttagtactataaaagaaaatttgttattattgtaaaatatttcagtcataatacaagacacaaaggctgttacaataacctctcatgtactcacagcccaatttaaagaaaattaatggaaaattcccatctcttagcccacttccatttgtgcagaggtaactattatcctctatttgatattttcattcttatatcgttcttgatacgttttctacacctgtgctgttatttttattactttaagtgtttgaataaatagtataacattcttttaaatttgcttttttcctttgctcaatatttgtgagaattatccaggtagatacaagaagcccatgtttagcgattccagtgccatatcgtgttcattttaaggttatatcacaatgtattaattgttctgtttataagacatttatgctattttgactatttcataaacatgctrcttaagaacatttttgtatatgtgttgttatgcatgtatctgagagtttcttaaaacatataattaggggtagaa

SEQ ID NO: 858521 - DNA, 628 bp, Homo sapiens
ctgtgtctcccaagcattctagcttaaactcttcttacttactatactttctaaagggtcctcttaggaatttgttgaatcatgtgttcacttctgagtgggttagtactataaaagaaaatttgttattattgtaaaatatttcagtcataatacaagacacaaaggctgttacaataacctctcatgtactcacagcccaatttaaagaaaattaatggaaaattcccatctcttagcccacttccatttgtgcagaggtaactattatcctctatttgatattttcattcttatatcgttcttgatacgttttctacacctgtgctgttatttttattactttaagtgtttgaataaatagtataacattcttttaaatttgcttttttcctttgctcaatatttgtgagaattatccaggtagatacaagaagcccatgtttagcgattccagtgccatatcgtgttcattttaaggttatatcacaatgtattaattgttctgtttataagacatttatgctattttgactatttcataaacatgctgcttawgaacatttttgtatatgtgttgttatgcatgtatctgagagtttcttaaaacatataattaggggtagaa

SEQ ID NO: 858522 - DNA, 551 bp, Homo sapiens
tactatatcttattcattctatctgattatatttttgtatgccttaagcatgctcacttcccgccactccccactatccttcccagtctctgttaaccatgattctacactctatcttcatgagttgaattgtattcatttttaactcccacaaataactgagaacatttatcagcagaattgattaagcagaagaaagaattagtgagcttaaagacaggctacttgaaaatacacagtcagaggagacaaaaaaaaaaaagaataaaaaagatgaagcatttctacaatagctagacaatatcttcaaaagggcaaatctaagagttatttctcttaaataaaaggtaaagagagatagagtagaaagtttactcaaagggttaatatcagagaatgtcccaaacctagagaatgatataaatattcaagtacgggaaggttatacaactygaagtagattgaacccaaataagactacctcaagatatttaatgatcatacccttgaaagtcaaggataaagaaaggatcctaaaagcggcaagagaa

SEQ ID NO: 858523 - DNA, 595 bp, Homo sapiens
atttttgttcccccttgaggatgagactttaacatttataagctgttgtcatctacctttggctgtaggtgttttcagtggtgaagactttgtgtgagttttcagttgtagaaaatctttgtgtgatgaattgctctgatgaggatttagtaatgatatgctggatgtgtgagcagattcactgtctcctgtggggctgaagtggcagaggtctcaggaagcttatctcatttcccagtggtgtgcacttttataaatgttttccccactgttttactcactgggttgaacagttcaggctttgggccattaggaggtgcccatgaggaaaaactggccaaggataaagcagatgggtaagttcaataccccagtggtgaccagaggtcccagctggggaatctctcagtgaaatgcactgaggtcttttcagaaggaagggagaaagccaccatacctccccttcaggaaattcatcccagttacactcttgaccccatgttccagctactcagattagacaarcacctctttatctgcttcatgtagacagggatggtgactctacgtcttgtgcaagccaagcctgaatcaa

SEQ ID NO: 858524 - DNA, 633 bp, Homo sapiens
ttcatccatattatgtcagtgcttartatgcgttgtttgactctaggccaatccaccactaccttcattaaagcattagagtcaaaaacctttgtctcactggttttcacctctaattaacttcatttctgaaagtgctttgaaataaattttccattctgagggaaagaagccaaaacaaaaaaatccaacaaaacccacgaagtttcccacatgtgaggatttgtttgctgcttttatctatcgcaacattctctctaacaatctcgttcacaattgtggactactcagggttctccacagaaacagaatcaatagggtgtgtatgtgtgtgtggaggcagagagagagagaaagcctgagataaatttatcttaaggattagttcacatatttgtggggcctggcaagtcccatatttgcacgataggacatcaggttggagactcaagggaaagccgatgttgcagttgagtccagaggcagtctacaggcagaaatccctcttcctcagggaggttaagtctttttcttaagaccctcaactaatcggatgaggcccacccatgtaatggaggataatctgctttacttaaagtctgatttaaatgttaatcgcatctaaaattacct

SEQ ID NO: 858525 - DNA, 601 bp, Homo sapiens
cttttttatggacatatattaatataagtttatatgaccagtcctatgcrtctataacctgaggaaagtggagaggaactggaaatgtgagcagtttgagcatctagcactacatcagggaacattattatcttccattcaagctaccctggaggatctgtcttctcccttcttggcgcaaagctgacagaaaacagaagaatgcatgaaaatattgggaggtgttggatatgttaattaccttgattatgttgatactatcatgggtatttgcatgtgtacaaactcatcaaatggtatacattatacctcaataaagctgttaaataaatagaaatgaataactagatacatgtataaaaatggtgacacttgctttctcagctgaggtcttgctacatcagggaagagccctgctgccactgactctcattgccatggcaacacatgccctctcagggcttctctttcctactgctttgattcccagtgggaaggagaccccacaggcattctcttacactaaactgtcagctaccctaatcgccagccttttctcctcaatgttttaggaagttgctgtagttctgccataatttcc

SEQ ID NO: 858526 - DNA, 512 bp, Homo sapiens
gagatagtgactaaaaaaaggctacagtggatgaaaaactttttaagaaatccttatttttaaaaactaggtgttaaggttgcatgataaaagcagtttaaattacctttgcttggcatggttttttgaataaagagagctgttaaaatatggcattgagatataaagggcatcacttgagcaaaaatgtgaagcacagaaatatagtttattattaattgggttttactattagtatcttgcatttttctggctcaaagacagcaagatactacatttcaaaaggtttaaacttagctcaaaatagctttaaattgtagcaagaggagctgtgtaattcaaattttctctttgtacttgtctcatctttaagactaatggaattgattggtgaattattattaaaacatccttcaagtttgaggcatttcccagcgagttattcagaatgctgattgttwtccttttaccagctttcatttgtactttatgggtcagtgactaaaatgtag

SEQ ID NO: 858527 - DNA, 574 bp, Homo sapiens
aagttctcctggataatatcctgaagcgtgttttccagcttgtttccattctcctcatctccttctggtactccaatcaattgtaggttcagtcttttcattgaagtcccttatttctgggaggctttattcattccttttcattctttttcttgtatgcataccttatttcagtaaggtggtcttcaaactctgatatcctctcttctgcttggttgattcagctattgatacttgggtatgtttcaggaagttcttgtgctgtgtttttcagctccatcaggtcatttatgttcctctgtaaactggctattctagttagcaattcctctaacctcttatcaaggttcttagcttctttgcattgggttagaacatgctcctttagctcatcacagttttttattacccatcttctgaagcctacttctgacagttcatccatctgttcttccattcaggcacccttgatggagagatgttgtgatcatttggagkagaagaggtcctctggccttttgagttctcagcatttttttctttgattctttcttatctttgtgagtttgtctag

SEQ ID NO: 858528 - DNA, 495 bp, Homo sapiens
gcatttctaaattttgcttcaacaagtcacggccagcacttcacctgaaacagcagagagcaccccacagtaaacaaaaatcacatctatacccacctgcttatgctgcagctggctgttacctgcaaatgtcatcttctgtcatgtaggttgaaccacacagcccaatataaaaccagctgacagaagtgcgtaggaccataacagcaaagccaaaaaatcccacccaacactttcccagatgagaagaaaccagcataagaattctgcctctgtgaaaaacctcaatgttgtgacaccatcaaaggttcactctagctccccagtaagtttctagccaaaatggaggcacagaggtgacagatagagagttcaaagcatggattgcagggaatcgcaacaagatccagggcaaggttgaaaatcaacacaaagaaacttctaaagcaatccaggaaataaaagaagagrtaaacacttaaaaaaaaatcaatc

SEQ ID NO: 858529 - DNA, 525 bp, Homo sapiens
tcattgtgatgaagtaggcttgattcctcagagctggttcaatatgtgcaaataaataaatgtgattcaccacacaaacagaattttaaaaaaatattatcatgtaaatagatgtaagaaaacttttgataaaatccaataccactttatgataaaaaccctcaacaaattaggcatcataggaacatacctcaaaatagtaagagcttgtataacattccacaaccaacatcatagtgaaagggcaaaagatggaagaattttatgtaagaattggaacaagtcaaagatacttgctctttccagtcatattcaacagagtactggaagtccttgccagatcgttcaggcaaaagatagaaaaaaaggtaccctgatagaaaaagtagaagtcaaaagatctctcttcactgatgacataattctatatctagaaaatcccaaatactccactaaaagacctctagaactgataaatgrcttcagtagggttttaggatccaaagtaaatgcagaaaaatcagt

SEQ ID NO: 858530 - DNA, 550 bp, Homo sapiens
atatatatttttacagttaagattgtatcttaacatcacctttctcaagctctaaaatattatagtcttcctcaaaactatttggtctctccatgttaaatacattcttctggtaaataaggtaagaactggaagtaagttcacataaagctgataaatatcagttggttacagtctcacccctggcaagtagggaaatggaaactgtagcttcttgatcaatgtaattatctcctacccatgatgttggggtcattgcaagttgcttatgtggtcagtggaagaaaacatacagtttcttttttcagactctccatacactattacatacctctctcatacacacctttcctagtcagggactaacaggtggaagagcagttatctgtgttacactcctagacctgggttcaagtaaatacattacaggtttttctcactttatttgacttaggaggtgttgctcttcctacrtctctgcttcttactcttttaaatcaagctggaaagaggaagtgacaatgcactgtcacttactggctgaatgatg

SEQ ID NO: 858531 - DNA, 564 bp, Homo sapiens
atatgtcaccatctatcatggaggcttgataaggtttggctgtgtccccacccaaaccacaccttgaattgtaataatcctcacatgtcaagggcagggccaggtagagataattgaatcatgggggtggtttcccccatactgttctcctggtagtgaataagtctcaccttgatctgatggttttataaatgggagttcccctgcacaagctctcttgcttgctgccatgtaagacatgtcttgcttccccttcaccgtccacaatgattgtgaggcctccccagccatgtggaacagggagtccattaagcctctttttctttataaattacccagtcttatgtatgtcttcatatgggagattttaaggacagcttgtggtaaatattctctcaggtaagaactttgcaatacttgtacattgtgagtaaygtgagaaaataagaaaggagaacattaaatatgaggtatacttactgcttggattatgtttcctgtttgtgttactacatttcaaccataacataattcaacatttagatttcacatcttatttgtttc

SEQ ID NO: 858532 - DNA, 628 bp, Homo sapiens
gatcctacaattatgtgcttccccacggtcgagatgtcagggattagactcataaaaggcaaatcttagccaattggatgaatatcaagaatagagtacaattcccaaattagagagtctataaaataccgtctatttaccacctttttttaccctccgtgatcttatagcctatttgcctctttttctagattgccttacttaattctctggcgggaatgaggcagatagataaaagaaaagcaattgatatgcatgaatttaatctcacaaacggagtattttgtttatcaaagcagaaaagatacccttagggataactttattcacaataccatgagtaaagtaaatttcaagacaacatttgagggtaaataaactattctaaaaggtctgtcaagaaccattatccttgaaaatgttagcaataaataacataggtttcaaggaagttctacaatagggtaaagcaaatatgttaaactaattttcattttggtaaagaaataatattttgagaaatatkaatgtaacttgggtttgaaaaatgctgtatcaaatgtgagatttttttaatctcatggacagtaaaatgctattctctgaaacagatgaaaatatgcttttt

SEQ ID NO: 858533 - DNA, 563 bp, Homo sapiens
acatatacccacatattacacatatatctatatacatagatatagacmtacaaatataaagactaaataaatttcttacactgtgttagatcatcttatcataaagccatagagtgtggggaagaaaacagtctacatgtctatgtatttggctggtggagatcctcttttgcaggtttcatttattcctgttcaataaaatcttgtctgtagtgtatgctgggattacattttttccctccctccctcccttgcttgcttcctctctccatccttccctctcctctttccttccttctttctctcccttctttcttttttcttcctccttccctcctttcttccttccctcccattttcttatctcctttttccttttcttccctttttcctttcctttccttttttctttccttcctctcctgtcttcccttcctttccttccctccttccttcctccctttcttccttcttccttccctctcccccacctttcttccttctctctgtctttctttcttcagaccctgatcactgagatataatcactgcgtatgtatttt

SEQ ID NO: 858534 - DNA, 579 bp, Homo sapiens
catctggtttgctcctgtgcctggatatgtcactcgaggaggctggagaacagcaaagatgggtgcctgctccttcctctgggatctctaaamtcaaggcgtatcaacctgaggccagtaggaacgctcccatgtagggtgtctgacaaaccctgttggagggtctcacccagttgggtggcatagggagtaggacccatttaacaaagcacttgagctgtccctttttggagggggtgtgctacgttggggagaaatccacttgtctgggctgcctggattcctcagaagtaccaggaggaaagactaaatctactggtccatggggactatggccaccccttcccctagaagctaaggtccaggcagatcagagttctgtccctgagaccctggctggagttgttggagttcctgcagggaggcgccaccaagtgagaaggtatgggtcaggatcaggcctgaagaggcactctggccacagtctgccacagccagtgtgttgggctgtggggaataccttttgggactaagccgtccagcctccctggctccagcatgggcaaagcacagcctgga

SEQ ID NO: 858535 - DNA, 493 bp, Homo sapiens
ctttcccccaccctaggagcttagtgtgttaggcagctggcagtcccagtgttggctaccaccccttccctaaggagttcaaatggcttagacagcaggcagccttagctgtggtgctggctgcccctacccccaggtacttggcaagcttaagcagattctagctgagtggatgttgagaatctgtgcatctctgtggttgggaccctaggccctggtggcaggggcttacaagtgggatcttccgatccgtgggttgcacagtccacagagaaagcatggtttcctaggctgggtagcacgctcactcaccgcctcctttgactgggggatggaggctcccctgcccagtgtggctctcaggtgggcggcctcaacacactgctcttcyttcctctctgtgggtcatgccagccacctagtcagttccgatgacagcgcctggatccccagttgacgatgcaggattcgcatgctgttatggttctttttg

SEQ ID NO: 858536 - DNA, 494 bp, Homo sapiens
attagagcttataatgggttaattacagttattttaaattccttmtctgataatttcaatatcagtgtcatatctgtgtctgtttctgatgtttgccttgtgtcttcagactgtggggtttttttcttgccttttatcatgcttttattttttgtttaaatctggacctcatgtattgggtaataggaactgagataaatagtcctttagtgaaatggtttatggtgatctggctaaaaattgagctttgtttattgtgtgccataggcgtaggtaccagaagcttcaaatttctttagtctgtttgattttgtcttccctgttgtctctgagatttgctaagaactcatccttagataaagttttgtcatgcagcaattttgtctgtaatccactattggtaacctggatccttgctggtattggggtaaggtgtgagggagggtaagttttccataatatcatgattaaatctcagtattttaactagtatc

SEQ ID NO: 858537 - DNA, 610 bp, Homo sapiens
aattctcccagtgaaagatatttcatgaaatcatgaagaattctttacactgttactttgtaagctctaattttaraaggatcctcttataaagaaccaatttctaccttccttttcattttaactgatggctggcagtgctattgtcagcaattatgcagccctttagtattagcttcttcattctaagtgacagctcaaacaacattaaaaaccatcatctctttccataactgccttgagctcaccaacactttcacacatttatcacagccacctgttcatgaaacacaacatttagtttttttccttcagtgtatagtgtgtttgtagttcttttagctaatctgaatatgctatttcccttgccctgattttatgccatcatgattatctcataaaagactttttctgtgccagttgtatcatggtcctacaatcaattaacagaatgtcaaaaaagtaacttcatttctttgtattcctaaatagtctcctgatataaaacaggaaattaaatgaccaagttatatttctttttctgctaaaatatataaagcaaagcagggagacaatgacttgactgaactgtctcaaactttgtgctctt

SEQ ID NO: 858538 - DNA, 610 bp, Homo sapiens
aattctcccagtgaaagatatttcatgaaatcatgaagaattctttacactgttactttgtaagctctaattttagaaggatcctcttataaaraaccaatttctaccttccttttcattttaactgatggctggcagtgctattgtcagcaattatgcagccctttagtattagcttcttcattctaagtgacagctcaaacaacattaaaaaccatcatctctttccataactgccttgagctcaccaacactttcacacatttatcacagccacctgttcatgaaacacaacatttagtttttttccttcagtgtatagtgtgtttgtagttcttttagctaatctgaatatgctatttcccttgccctgattttatgccatcatgattatctcataaaagactttttctgtgccagttgtatcatggtcctacaatcaattaacagaatgtcaaaaaagtaacttcatttctttgtattcctaaatagtctcctgatataaaacaggaaattaaatgaccaagttatatttctttttctgctaaaatatataaagcaaagcagggagacaatgacttgactgaactgtctcaaactttgtgctctt

SEQ ID NO: 858539 - DNA, 638 bp, Homo sapiens
aacatactgtaagaaggtgtttggaaaaataggagaaagggattgaagttgtttctgcaaaatgtgagcatattaagtaatcgttttatacagaaaatgatttacaagcaatgctagttgtgtaaagwttgcaaaatgtttccactttataactgtcaccaaacaaggggggaagtttcctttaagtaagaatttgaatagctttttgactttaaaattgagagttcagcaaaggtatgtttctttatgaaatcagcagacaattattgatcatcaactgtgacggagaacacaacatttgaagtttcttgctcttctacgatctagatgctttagttgactgcaaaagccaacataacagctgttttgtttttatttcattattcactgtgaccacttccagaagcattagcatggccaaagtaaaatcggaaaatcccactctgggaacgtgaagatggatgaaaagggatgacttgggtcatcccgtttttacgtttaagcacgtcaaaaatttattcctatgacgttctgcaaaatacctgcccagtaccctctgaactataaaggtcatcagaaacaacaaaaatcttagaaactgtcacagccaaggggatcctaaggagatatgacaacta

SEQ ID NO: 858540 - DNA, 571 bp, Homo sapiens
acatcctcaacaacacttgttattatctgtcttttttattatagttattctggtatttgtgaagtttcatctcattaygattgtgatttgcatttccctaatggctaataacagtcagcatactttcgtgtgcctgttggccatttgtatatcttccttggcgtaaagtctttcaaattacttgctcattttttaattatttgtcttttgattttttggttgtaacagttccgtatatattatgcataagtccttatcagatacacaatgtgaaaatattttagtcctgctatacttggttttcccctttataagtggtgtattttgtagatcaaaagcctttaattttaatgaagtccaatttaacaatatttttcttgtgttgcttgtgttttaagtgtcatattgtttgttaagtgtcataggttttttaatatgaatgagtgtgggattttctccaaagatttttctacaaccattgtcatgattatcctttttgatcctttattttattaatataaatattttattaattgattctccattgttgaagcatatttgtgtatctggg

SEQ ID NO: 858541 - DNA, 610 bp, Homo sapiens
ggtagatccactgacaacgtgcaccatgcacctggaaaaactgcagacactcaatgccagctcatgaaagcagccagaaggggagctgtaccctgtaaagacacaggggcagagctgcctaaggtcatgggcgcctacctcttgcatcagtgagacctcgatgtgagacatggagaaaaaaggatcattttggagctttaagatttgactgctctgctggattttggatttctatggggcctgtagccccttcattttgccaatttttcccatctggaatagctgtatttacacaatgcctgtatctccattgtatctaggaagtaactaacttgcttttgattttacaggctcataggcagaagggacttgccttgtcttagatgagactttggactgtggacttttgagttaatgctgaaatgagttaagattttggaggactgttgggaaagcatgattggttttgaaatgtgaggatgagatttgggaggggccaygggtggaatattatttgctgtgtccccactcaaatctcatccagaattttagctctcacaatccccatgtgttgtgggaggggcccagtgggaagtaattgaatcttaga

SEQ ID NO: 858542 - DNA, 629 bp, Homo sapiens
aactgtggttgtggctgggcacagtggctcacgcctgtaatcctagcrctttgggaggccaagttgggtggatcacctgaggtcaggagtttatgaccatcctggccaacatggcaaaaccccgtctctactaaaaatataaaaattagccaggcatggtagcgtgcacctgtagtttcccctattcaggaggctgaggcaggaggatcacttgatcctgggaggtggagggtgcagtgagctgagaccacatcactgcattccagcctgggcaacaaggtgagactccatctaagaaaaaaacaaaaaacaaaacaaaaaaaaaactgtgggtgatttattttttcactttccttttggataggacacactagaaatactgaggttggtaatgaaaagagaaactttttacagcattttttcttgggaagacacctcagagtatggaactctgaacaacacatacataaaaccatagacttgataaaattttcatcatgcttttcaccatttcacctgtcatccacctaacattgttctagaaggaatatgtaatgaatgattgaactttcctttgcatatttgtacacaccattgtttctaagaaataaagccacattgcagcaact

SEQ ID NO: 858543 - DNA, 531 bp, Homo sapiens
gaaatactaggattttgatatttgaattcaaacccatgattgagacaggaaagaaagaggagaagattcccatgataactcatcttagggcagaaacgcctctgtcaacaagtgcaaaatgtaggaattatctggaggtttactttctgatttacttgtttcagaaccggcctccttttcctggaaagattgtccatctgagcccactagttctgttaaaatacacacggaggggaaacaaggattagtcaacccgattagccaaatcaaccctgatggcaaatgaagcaatagacaacactgccaatggtcacaccaatattgtactatcccattggcaagaagacagatttccctcccagggttcatatgaaaacataaaaaccagagataattttttttttaaaaacttaattataacagttttactcttctcttttgctgatttttttttttttwaaaacctgttccaaggaggaaaaggatttcattggaatcacatagtgagacaatttaccttgtcgaataaaa

SEQ ID NO: 858544 - DNA, 441 bp, Homo sapiens
ctagaaaaatcaactttagtgtttcattctgcagtgrtggattatttaacctctttaagtctcattttcattgacaataaaacggaagtaaatggtagtaccaacttcccagaatcttggtttcataaagcccttaacagtgtgctaagcactcaggaaatgttatctcttgttattattacttgtcacactgactaatatcagaaaatcatgaaggagttgtgaattcaagatatctttcctctctcctcgtctttgcctcagttgaaaagcctcaacctagtttaaggatctagcctctaagactgatgaatcatgctgtagcaaaagtgaatagacgtgattggcattcactggtgctagccagagaattaggttccccatgataaaaatggaatggattgggctggcctcatctgattagagaaatctgcccttatt

SEQ ID NO: 858545 - DNA, 622 bp, Homo sapiens
tcactattgggctacgcatgccactttctaaatctattcagtcattcaatcacacactttttgatttccttttatcccaaacctgccatcattcttctcttctttctccctctgtaggccaacgttataccatgtttaatgtgtaaccttttcttgtgtgccttcctgaaaaatgtgtatggttttacgtgaaggtaaattaacaaacaagatagttatttttttcatataacataatttcaaatgtggcctgatgattccatcatgtcattaggaactcctcgtcaggatgtacgctgctgtctctagtcttggtttccattctcaaagtccaagagagcagcccaaaccctagtcttcacatttgctttccaaattgcatgaaggagaaacaggaaagaacagggtggtatgcatgtattttaaaattaagatacatagtattgttcctcacttttttccactaagcactacatatttaagatctaaccgtgattttatatatatataaaataaaawatatatatatatatatatatatatatatatatatatatatatatatatatatacacaagttattacctttaatttcttcacaatacttcatggtgtttatcca

SEQ ID NO: 858546 - DNA, 619 bp, Homo sapiens
aaatttatgtacaaaatgttttaaaaagacctcatgagaataaaaggactgtgttttcatagtccaacaacaaaaacctgattttacttcaaaaagtgaccccgattagtcatttaattttaccaaaaataggattttgtttgataagataattataacttgtttttcccctaatattccagacatttcataatgatcaaatgaaatgaccacatatgaaagcaatttctttaaaaacagcctgtaatttaattccctaacaatttagtgcatagaaatcatcaattattaaattaatggagaaaaacgtatatttttaaatatcgattttaaataactgactcagaagcacatctcactaaaatccagatctgtacatgtcactgtgttagagaaacattatctcacttttaaaagcccagcaaatattttcacaaccttaaaatactacttgaggaagttactttgggtttacagtcagctattatagttctataattgtcaagctatgaaacatcatcatcatggttaaaagtaaatggaagcaaaatgtacctcgttccttgtggatctgtgagttaaccagwacatgggacctgctttctgaatagtacctagg

SEQ ID NO: 858547 - DNA, 644 bp, Homo sapiens
ctgtaaaatggtgataatcatcacatccattttataagcttgttttgagtattaaatgagttaatgcatggaaataatgccttgttcccaataagtggccaatgcattttggctgtccactcttctggcttatctactcttaacttaagtactatgtaataataaagtcaatgcacttttttgcttctccacttttacatactattgtaaaaagagtacataagattattttgtatttccactggaggtagtgcagtgtctgagactcatggaagctctggagtcttatccagtcctttcctaactgcatgactttagggaagtcacctaacttctccaagtttcaactttctcatgtgtgtattagagatatttgtagtggatatctcataaagtattgctcaaataaggggtaagccccctgtaaagtgcttagcacagtgtctgtcaccttgtaagtactcagttgatgacggctgttttgattattcaaggaaactatgactagggaggtggcaggatactgggartggggtgaattagtctaataacattattcgctattctgcctgcagcatcatttttcttctagaataagatttcccactgactaaagaaagataatatataaatttttcctttct

SEQ ID NO: 858548 - DNA, 590 bp, Homo sapiens
gcccaccatgacccaaataccatactgagcccttcatatgtttattttagtttaatctgcttacaacctttcaaggtagtaattatgatgtactctttgcagaaaagaaaactgaatctcagaaatatccatcgggattttggagtctggctgactcaaaaactcatgctttaactcctaaaaacctcctcatgttggaggttctttgttttagctcataattgtcttctttatgaaaaattttgatagtccctgctggaaaagctggaatatctgtctgatctctcagccctctagaaggtccaggttgtcctgaacactctacttaatgcaagcacgtgagctcccactgtttcatgaaatggtgatataattcttaaagggcacctttgtcaactaggcacagagtcacacctaatggttgtttgtttgttcttattacacaatcccaaggggaggagatagatatrtgtgtgtgtgtgtgtgtgtgtgtgtgtgtgtgtgtctttcctggctgttgttaactactaggtacttgggttttgggtagacatctggatctagtttttttaatataaaaatattgttaa

SEQ ID NO: 858549 - DNA, 579 bp, Homo sapiens
acttgcaggctgacatatctatatctatatcaatatctatctatctatctatctatctatctatctatctatctatatatatatattttgagatggagtcttgctctgtygcccaggctggagggcagtggtgcaatcttggctcattgcaacctccgcctcccaggttcaagcaattctcctgcctcagctacctgagtagctgggattacaggcatgcaccaccatgactggctaatttttgtatttttagtagatatggagattcaccatattggccaggctggtctcaaactcctgacttcgtgatctgcctgcctcagcctcccaaagtgatgggattacaggcatgagccaccgtgcctggcccaggctgctattttttatctactctcaggattgagtgatcccttaccaaaagtcagttgtaggttttacctaacttgtctatgctaggttgatttacaagtgctctcagttctctctccattcaaagggggaaaaaaaagaatatagaaaaagtctgaaacgaaaatcacaaatacgcatcatgcgcgtcatttatgtgcattttttgtt

SEQ ID NO: 858550 - DNA, 591 bp, Homo sapiens
ctgtctacaatgtgccagaatggttttgaggcaataggggtacaggagtgaaaaaggtagacctagttgctgccttcatgaaaattrtagtacattggagaaaaaggacattaaaaatataatataatgacaggcagtgaaaagtgctgtgattacaaataaagcggaatgagggggttaagagtgatggagacagactcctattttagataggatggtccaggtaggtctctctggcaagatgacatttaaacagagatctgaatgtgatgagaaacagaagacattctagggagaggaaacggaataagggagggggagagaccaaggatagttcccataaccagtggttctgtgtggatagaagttgaagtcatgcaaaattacagaagtagagacaggaaagggatgtgggagaatatttgtagggcttgtaaactgcactgaagagtttagatttttcctaaaatccaaaaggcagtgtagaattgaagaagtctagggagagataagaccaagccagggcagttagctggttactctgacagtagtatgaagattaggaagagtaaaggaacatcgtgcattcat

SEQ ID NO: 858551 - DNA, 594 bp, Homo sapiens; identical to SEQ ID NO: 842884

SEQ ID NO: 858552 - DNA, 501 bp, Homo sapiens; identical to SEQ ID NO: 842873

SEQ ID NO: 858553 - DNA, 610 bp, Homo sapiens
gaggcacttgaccttcagacacttaaccttcacatgcctgcttgggtcttttccaagcatatcttcctttctttcctgttctaaarcctttttaaataaacttccactcctgctctgaaactcacctgggtctcttcttctgccttatactcctcagtcgaattctttcttctgaagaggcaggaattgaggtagctgcagatctttcctctggtaattccagtatggtgaagacagtatgggtgaaaaataaatttggaagttagcacccatgtgtaagattttcaataactctaagtgctgattatatgtatttagcaaagtaaaccttttatttttgttttaacttttttgttgttatctagactgaaaacaatgctcttctcaggacacattattaagacttctaagacgcttctctatttataagaagaatacataaatgtctactatgtgagtcactaattaacgaggaaaacaaaattacagctcaattgttcaacctattttcgattttttagtttccgcatatttctgtcttttcaaccattgccagagcttcacaagagtaatttgtgtgcatatctgaattttgtaatcaacttatttt

SEQ ID NO: 858554 - DNA, 607 bp, Homo sapiens
ccagtgtctattgtttccttccttgtgtccatatgtactcaataattagcttccacttttagccaagaaagtatggtatttggtttctctgttcctctgttattttgcttaggatgatggcctccagctccatacataatgttgcaaaggacatatccatttctttgttatggctgtgtagcattccacggtgtatatgtaccatattttctttatccagcctactgtggatgggcatttgggttgaatctatgtctttgctgttgtgaatagctccaatgaacatacacatgcatatatctttatgacggaataatttatattcctttggctatatgctcaataataagattgctaggtcaaatggtaattctgttttaaatttttttcactgccaagctgctttccacaacaggtgaactaatttacattccaaccagcagtgtataagtgttcctttttctctgcaacctcaccagcgtctgttattttttgacttttcagtaatagccattctgactagtatkagatggtgtctcattgtgtttttgatttgcatttctctggtaactagtgatgttgagcatttttccatatgcttgttggt

SEQ ID NO: 858555 - DNA, 312 bp, Homo sapiens
gataaattcctccactggtttgcatatgatccaaaaggatcccagagtacatgaatttatccccagttaccccaagcatagaacaaagattgtgattattctacacagaatttgagtatagaaagttgcatcatgtcattcatttggttattttttcactaattcatcaaatctttattaagaatctgctgtatcaggcaccgttwtaagaaatgcagattgagcagatgaacaaaatagacaaagtctctactttctgcaggttacaatgagacagaagggatagagagactgattttaaaaatgaatgaa

SEQ ID NO: 858556 - DNA, 583 bp, Homo sapiens
tccatggtgcacatgaaacacattatcttttgtcaactattgttagacatctgggttgattccatgtctttgctcttgtgaatagcacagcgatgaacagacaagtgcatgtttctttttsgtagaacaatttttttttctttgggtatatacccagtaatgggattgctgggtcaaatggtagttctgctttaagttctttgagaaatctccagatgctttccagagtgactggaataatttaatattctcatcaccagtgtataagcattctcttttctccacaacctcaccaacacgttttagtttttgacttttttaatagtaactattttgactggtcactaatgttatgcattaacatatatatttgttatatataacaaatatatgacaaatatatatgtaacacatatataatttatatatgtatttgttgtatataacaaatatataaaaatatatttgttggctgattttatagtcttttgagaagtgcctgctcatgccttttgcccatgtttaaaggggttatttggtttttgcttgttgatttgcttaggatccctatggattctggata

SEQ ID NO: 858557 - DNA, 583 bp, Homo sapiens
tccatggtgcacatgaaacacattatcttttgtcaactattgttagacatctgggttgattccatgtctttgctcttgtgaatagcacagcgatgaacagacaagtgcatgtttctttttcgtagaacaatttttttttctttgggtatatacccagtaatgggattgctgggtcaaatggtagttctgctttaagttctttgagaaatctccagatgctttccagagtgactggaataatttaatattctcatcaccagtgtataagcattctcttttctccacaacctcaccaacacgttttagtttttgacttttttaatagtaactattttgactggtcactaatgttatgcattaacatatatatttgttatatataacaaatatatgacaaatatatatgtaacacatatataatttatatatgtatttgttgtatataacaaatatataaaaatatatttgttggctgattttatagtcttttgagaagtgcctgctcatgccttttgcccatgtttwaaggggttatttggtttttgcttgttgatttgcttaggatccctatggattctggata

SEQ ID NO: 858558 - DNA, 554 bp, Homo sapiens
acaatatgttttcaattttcttaggtaaatacctatgcatgggattactggtttatatggtaaccacatgtttaacattataaaaaactgacaaactatattccacagtggctataccattttgcattccaatagcaatgtatgaaaatctcacttgtttcacagtctcaaccgcactgtatgtattatccttattattttgtctattctagttggcatgtaatggtgtcccattgtggtttcaatttgcatttctctaatgaataataatattgaacatttcctcatgtgctttttgcctcccatacttctcctttagaggtgtctgttcaaatcttttgaacattttctatgtgtgttatctcattataattatattcttactgtttttttacacagaagactaagattcaaatcctctatcaaagtatatgtttttacaatattttcttccagtctgtgrcttttaatttcattttcttattaaagtctttgaaaacagatgtttctagtttgatgaagactaatttagctaaaaatctcttggtatatcg

SEQ ID NO: 858559 - DNA, 538 bp, Homo sapiens
gacatggctcacattaagcaaaacaaacagagaactcatgtttgtaaaattgagaaaagattgcttatgagcttttttcgttttctttttctttttttttgagatggagttttgttcttgttgcgcaggctggagtgcaatggcgcgatctaagcttaccgcaacctctgcctactgggttcaagcgattctcctgccttagcctctcgtgtagctgggattacaggcgtgcaccaccacgccgggctaattttgtatttttagtagagatggggtttcaccacgttggccaggttggtttcaaatgcctgacctcaggtgatctgcccacctccgcctcccaaagtgcagggattacaggagtgagctactgtgcccagctgcctatgagcttttagtaaatatctttgaattcaccccattttgggtgcaaagttgcctgaatccctgcattcrccaactggcttccagactgatttatttctctgagtgtgtgtaagtagattataactgaacctatgggggaaaggatatagac

SEQ ID NO: 858560 - DNA, 579 bp, Homo sapiens
aaacaattgaacaagcaaaaagcaaatcaccccactaagagacacttcacacacacacacaatacaagcagccaacaaaaatatggaacacatttcaaataaaaatcatcagaaaattgcaaattaaaaccacaatgagatgcattcaaaccagtcagaatggctactattaaaaagtcaaaaagcatcacatgctggcgaggctgtctagaaaagaaaaaacgtatgcactgttgatgagaatgtaaattacttcagccactataaaaaaataacaacttaaagcatagctacaatttgacccagcaatcccattgcaggacatatattcaaaagaaagtaagtcatttgaccaaaaaacaaacaaataaacaaacaaaaccacacatacactcgtatgctcatcaaagcaccattcacattcgcaaagacatggaattaacctaggtgtcggaggcatttgaaccaaccctcatggctgctctscctacggaatagccattcttttattcctttactttcctaataaatttgctttcactctactctaaagacttactcggaattctttcttgtgtg

SEQ ID NO: 858561 - DNA, 634 bp, Homo sapiens
atgcaaaacagaggaattaaggtcctcttcttgtgacaccaaggcagagttagagccagcaactggaattgtgtataaatttaaattaaagcaccagcctgcaagctgagttagtggaaagggtaacagatagggtcagttgtaccccctcagtgtgaagatgatctcactgaagaatagaatcatgatgcttcaaatcatttacccactggttggcctccggaagaccgagggcaaatccttctgacaacctttaaaataatgcttcctgttactgccaaacagcaaatggcaacttcaaagcattatgtcatcaaagtctttgctgaccaaaactaaacataaaataaaatttaaatttaaccaaaagtatgaccagttccaaagatttctttcttaaaatttaaggttgttcatgaggaaagtcttaaaaattctgaagttgcaccctagtacattagatatagaagcttcaaaatggaaattggaaggcacacttgcaaagcagatttctaagagggaaggatgattggaaagggaagaaaaagaaacaggacayagcagtgcaaataccgttatcaaagataatgtcagaagcctcagaggcaagtcactaaaaaggaattgaagtctg

SEQ ID NO: 858562 - DNA, 634 bp, Homo sapiens
atgcaaaacagaggaattaaggtcctcttcttgtgacaccaaggcagagttagagccagcaactggaattgtgtataaatttaaattaaagcaccagcctgcaagctgagttagtggaaagggtaacagatagggtcagttgtaccccctcagtgtgaagatgatctcactgaagaatagaatcatgatgcttcaaatcatttacccactggttggcctccggaagaccgagggcaaatccttctgacaacctttaaaataatgcttcctgttactgccaaacagcaaatggcaacttcaaagcattatgtcatcaaagtctttgctgaccaaaactaaacataaaataaaatttaaatttaaccaaaagtatgaccagttccaaagatttctttcttaaaatttaaggttgttcatgaggaaagtcttaaaaattctgaagttgcaccctagtacattagatatagaagcttcaaaatggaaattggaaggcacacttgcaaagcagatttctaagagggaaggatgattggaaagggaagaaaaagaaacaggacacrgcagtgcaaataccgttatcaaagataatgtcagaagcctcagaggcaagtcactaaaaaggaattgaagtctg

SEQ ID NO: 858563 - DNA, 494 bp, Homo sapiens
tgccagataccctaaatcatctctctcaagttaaaagttctgcaagtctagggcaggggcaaaatgctgccagcctctttgctaaaacatagcaagagtcgcttttgctccatttcccaacaagttcctcatctccatctgagacctcctcaacctggatttcattgtccatatcattatcaacattttggtcaaagccattcaacaggtctctagggagttccaacgttcccacattttcctatcttcttctgagccctccaaactgttccaaccctgcctgttacccagttccaaagtcacttccacgttttcaggtatcttttctgcaggtccccactctactggttccaatttactctattagttcattttcacactkcccataaagacatacctgagactgggtaatttatacaggaaaggggtttaatggacttaccattccacgtggctggggaggcctcacaatcatggcggaaggtgaaatgcat

SEQ ID NO: 858564 - DNA, 494 bp, Homo sapiens
tgccagataccctaaatcatctctctcaagttaaaagttctgcaagtctagggcaggggcaaaatgctgccagcctctttgctaaaacatagcaagagtcgcttttgctccatttcccaacaagttcctcatctccatctgagacctcctcaacctggatttcattgtccatatcattatcaacattttggtcaaagccattcaacaggtctctagggagttccaacgttcccacattttcctatcttcttctgagccctccaaactgttccaaccctgcctgttacccagttccaaagtcacttccacgttttcaggtatcttttctgcaggtccccactctactggttccaatttactctattagttcattttcacactgcccawaaagacatacctgagactgggtaatttatacaggaaaggggtttaatggacttaccattccacgtggctggggaggcctcacaatcatggcggaaggtgaaatgcat

SEQ ID NO: 858565 - DNA, 505 bp, Homo sapiens; identical to SEQ ID NO: 856180

SEQ ID NO: 858566 - DNA, 599 bp, Homo sapiens
taccattcagctcataggtatataaccaagagaatgaaaacatacgttcactcaataagttgtatatgaatgtaagtagtagcattatttatattaatcagaaaaaatgaaaacaaaccaaatgtctgtcagctggtgaatgggtataaatgtggtatatccatacaacggaatattatgtaacaataaaaagagagaacgtactgatacaagaaaatgcaattttactcctacacaacttctggttaccaggtaaactgctgtgaaattcattgcctatcgacatttgatgtttttgagagccttaagaaaaccacttcttacattttaatgagtcattaaatgacttttcttctttcacacacaaaatctcccattttagtttttactgttttccagtatttgagcttatgtgcccaaagtgtttttttatctaaactcatagaaatataagctgtatttcaagaatgatcattgccaatgagccacaacagaggtaaaaatatactttctaaattatcaggaagactcctacagctgattytataaggaactccctaaaatacataccaatagcttaagagatttgtcagtaaaca

SEQ ID NO: 858567 - DNA, 508 bp, Homo sapiens
gatactgataaatgttcctattcctctttacaaacttcatcaatccattctaggctgttacttcacattgccactaagagggaaccacaaggatcaggaattacttttgtgaaaatctgaatataatttgggtacctccacaatcacccgcctgagtctccgtaattcttccaatatactgctgagagcagtggaacagaattgtcattgatcttggcacagaccatcctatttcccaagactcattctccctagggttttgttcttacggcattgaggctgctgcatcctttccagtttaaaggccattctcctcaatggaagaaaaagagatgaaatggggcttaagacttgagtaaaaccaactgccttggagtaattgattcccactgggggtctatttcctgctcgtttgtcttatccttccacaacaatatcttctcttgctctctttggcatcttttccaagccagaaattytctgggctttgcacctcctggtaaaagta

SEQ ID NO: 858568 - DNA, 622 bp, Homo sapiens; identical to SEQ ID NO: 856184

SEQ ID NO: 858569 - DNA, 612 bp, Homo sapiens
cagataggaatctagggtgggaataccaccgagttgatttcaaagggatcctggtcaagagagtgaagcaacctcagccaaagcaatttggatggtcccatgagatacagaaagtgagggaggatgtgagcagtccactagagggactgttataccagagcactgataagaggcccatgagtgcaggagtcagctccgaaagatccacaattcagggaaccctcttgccagattgtcagaggcatgcgtctctcccctactccccgttttaacaccggaagagtcagagcagcctagagctgagaccaatgcttaagggagaggtctgccctgcctctcttaccactgccagtttacaggtttacagaggaaaggtgaagcccaactctttcttgcacaagagttgttaaaagtaatatatttcagtacagtagaaagcataagaaacactttctgtggcagtcagctagacggtgcccaggttcttagaaaaaccttttccaaagaaatcacttctacttccttcacttctaatatgagattataggaaagraaaaaaaagtcatttctccttcctaacttggcctctccaacatatttaatgactggggc

SEQ ID NO: 858570 - DNA, 646 bp, Homo sapiens
gaaatggatttcactttatttaacctagtgttttctaaactttcttaatcatgaaaactgattttgtaaactgtctattgaaaacctgtgaaagagttagtgtgtcatggtgactaccgcgggaaataatcttaatgaaatgtgctcagttctactcctacagattccatctacttgtaataatcaagtgatcaaggtgtttacttaattggcatttccaaatatcagtgtcatggctggccagctctactctcatctggtattcttccctctctaattgtctgtcttccctcatctaaaactttccatcaaccataaaagtaccacacataatagaccatgaagaaggtaatcactaacgtgacagacgtcatccttggctcctgtacttcttactcaccaagcatggatcagatcagatccaattgagggtgtgtgtgtgtgtgtgtgtgtgtgtgtgtgtgagaaacagagagagagagaaaaaaaaacaatgagagagagagagagagagagagagaaaaacagayggagagagaactgggccatgagaagtataatggtatatatcctccccacctcaaatcccttttcacaggcctgctacaaatgagtcagagaaagaagcaaatatatcactccgtgt

SEQ ID NO: 858571 - DNA, 535 bp, Homo sapiens
catggccagaaggaagaaaacaggaacatgaagtcagtgctttcacagctatgaagccgccagggaaaatcccattcttagagtatcagagcctcctgcttgatgagggattctcccctgctgcccagtgactgctgcccaagccgacaggctgcaaagaacttcaagaagtactataggtcaaaagacactttactagatgtcatgagtagaatgcagtgctgtgtctcctcaatttggtttgaatgttgttgctgtttcataataccattttatagagcagtttaaggttcacagcaaaattacgcagaaagcacagagatttcccatatacctcctgccccacacgcacagcctcccgactaccaagatctttcaacagaatggtctgtttgttgcaatcaataaacatatattgacacatcattattacccaaagtccatagttyacattagggttcagtcttggagctgtagattccatggctttggatgaatgtataatgacatgtatctaccatcacagtctcataca

SEQ ID NO: 858572 - DNA, 639 bp, Homo sapiens
ccaatatacaacatatatttgaaaagaatataatgaacacccacgtgcccaccatgtagcataaaaaaattaaaattactcacatagtggaaactatctgtcaacctcttcctcgctgaaatacatccctctttccttccccctggaaagaaaactgccccaaatttgatttcccatgagcaatttttatatcagtttctaaaaatgtgaaagggaacatgctaacttaaagtttaccagaaagccatgcaatgaacatccctctgctgtgcttgaccttggtttccaaacagaagtttctttaaataaaactttaaatgacctcaggttaaatgatgcctcaggtggctggttaaagagaatgaaagaaatcacaaaagaagaaaacggtaaatctgaagtgacaagtgagaggctatatctgaaagggttgaagcattcatggatgaaattgatagattaatagagtattatcattttataaggttaaaagctgtgccaaaaactaaggatactcatccatactgcaagggwctttcctcaaagacacaggctacaaaaataaaaacccaacattcattaaagaagtcataatgactcaaatgccagccagggatgcagcctggaaacagtactcta

SEQ ID NO: 858573 - DNA, 533 bp, Homo sapiens
tctatcatcacagattaattttgtgtgtgccagaatttcatataaacgaaatcatgcagggtgtgctatttggggtctggcttcatctactcagcatcatgtttttgagatgcatgcatgtggcactattagtaatttactccattatattgcattgtatgaaatttttttccaatttctcccttccatctttattgattctcaagattttgcacagaaaactctttggggtctagaagagcagtaattgcatcacagtttccaagacttcaagtttcaaaagcaaatcattaaaaaaaaaaatacagctcctgatttgagttagatacagggacaaaaaagtagcacatacttgaaggttacatggtctacaaatggtggcaatattttccttgggagagtrgttctgttggtatgtattttttaaatactcaaaaggctcaacctcaagcagtaataaacacaagcaaaagtgatttaacccttaaataactcagaaaaacctctctgtacatacaagtgaaacaatatgt

SEQ ID NO: 858574 - DNA, 515 bp, Homo sapiens
ttgcttcggtagctagtataaatgggattgctttccttttcagattgttctctgttgacatatataaatgctactgatggccaggcatggtggctcatgcctgtaatgcaaaaactttgcaaggccagggtgggaagatttcatgagcttaggagttcaagaacagcctggacaacaaaatgagactttatcactatgaaaatttttttaaaaattagccagctgggactttagtcccagctacttgggaggctgaggtagaaggatcacttgagcctgggatgtctaggcttcagtgagccgtgatcctgctactgcactccagcctgggtgactgagcaagaccctgtctcaaacaaacaaataaacaacaaatgccactgatttttgtatattgattttgtattttgcaacttcaccaaatttgttcactagttctaacagttttttggtggaatctttaagtttttctaaatgtagaatcrtgtcatctgtaaacaagaataatttgactt

SEQ ID NO: 858575 - DNA, 588 bp, Homo sapiens; identical to SEQ ID NO: 856189

SEQ ID NO: 858576 - DNA, 588 bp, Homo sapiens; identical to SEQ ID NO: 856190

SEQ ID NO: 858577 - DNA, 401 bp, Homo sapiens; identical to SEQ ID NO: 856191

SEQ ID NO: 858578 - DNA, 573 bp, Homo sapiens
ctctgaactgaattgtgccccctccccatctttacccacaatatgatggtatttggagatggagcctttgggaggtgatgaggttcagttgaggtcatgagggtgggcctctcttgatgggattagcgtccttataagaagaaaccccaggagcttgcatgcactctctctcctgctccaacacacactgaggaaaggccacatcagcacacggcaagccaggaggagtgcccccaccagaacctgaccatgctggcaccctgatcgcagacttccagcctccagaactgtgacaaatacattcctgttgttgaagccacccagcctgttgttttgttatggtagcccaagcagatgaaaacatcagacccccgagtttggtcactgcggctgaaacagccgatctctgagaacttgttatgcattaagagcctattgagggggctcttagccttggaggatgcgaacaggcaggaaagactcaatgaaagmgcttatagagacttcaagtggcagaggacaaaggaatgacatagccgggaggggacagggatgctgggctgaagatgaggg

SEQ ID NO: 858579 - DNA, 552 bp, Homo sapiens
atatggaaaacaaatagcaggttgggtatggtggctcatgcctgcaatgctagtattttgggaggctgaggtgagaagattgcttgagctcaggaattcaagaccagactgggcaacataatgagaccccatctctataaaattatacaaagaaaaattagtggggtgtagtggtgtttgcctgtagtcctagctacttgggaggctaagatgggaagatctcttgagcccaggagttcgaggctgcagtgagctgtgatcacgtcactgcactttagcctgggctatagaatgagaccctgcttctaaaataataaaaaataaaaaaaaaaaagaaaagtaaattaagcaacaacaaaagaaaacaaatagcaaatggtaaatgtaaatccaaacttattaattacattaaatgtgaatggtctaaacattccaataaaaaacaagatatttggattggataaaaaaggcaaaatctaactataggcagyctgcaagagttacaccttaggttcaaagacacaaataggtggaaagtaaaaacatggaaaa

SEQ ID NO: 858580 - DNA, 631 bp, Homo sapiens
ctgtctagcaatctccaggtcatgcccatgcattctgtgattttcccccctgcaatctcactgtcaatctggcattttaaatatttatgcccacaaataactgcaattcattgtcttayacgtttactttagattgcttctctggacatctaaaactttccaaggtaattatcatgaagcactggattaaaacccaataccaggccaggtgcagtggctcacgcctgtaatgccaactctatgggaggtcgaggtgggcggatcatttgaggtcaggagttcgagaccagcctggccaacatggtgaaaccccgtgtctattgaaaatgcaaaaattagccgggcaaggtggcacgcgcctgtagtcccagctactcgggagactgaaggaggagagtggcttgaacctgggaggcagaggttgcagtgacccaagattgcatcactacactccagcctgggctacagagactccacctcaaaaaataaataaaaaaaaacataataccaaagatgctcagttaagacctatatgatttattaagtttcacaggaaaagttctacttaattctgtaattcatagatcccataatcagttaagtatttcacttgtgtttgcatctcttttgt

SEQ ID NO: 858581 - DNA, 615 bp, Homo sapiens
aggtccaaatatttcttcttacctagtccttagtggaattaagaaaatctgatcaccacactgctgactcccccagtccycaaatatctgattatagcctaattcctgacacaaaataaacctaaattcttggcctttaaaaaaaagtcacaacacaaatgaccaagttaatacagatgctatcagggttgtcctggtcccagatcagtgattcttagcagaataggttaagaaaacctttagatttccaatggattgaaagacaaatggctgggcatggtggctcatgcctgtaatcccagcactttgggaggccgaggcaggcggatcatgaggtcagagcatcgagaccatcctggccaacatggtgaaaccccgtctctactaaaaatacaaaaattagctgggtgtggtggcgtgtgcctgtaatcccagctactggggaggctgaggtgggagaatcacttgaaccagggaggcagaggttgcagtgagcagagatcatgccattgcactccagcctggcaacagagtgagactgtttcaaaaaaaaagaaaaaaagacaaatgaagtggtaaactgtccactttaattagttgcaaaggaaaacatgc

SEQ ID NO: 858582 - DNA, 422 bp, Homo sapiens
ttttgtcttataaatgatcagtgggtccagtgtttcatagttgtctgcagaaaaatctttgcattgggtagggatatttgactatatattctaatccgttacataatgatttaacctgttggtgttatgtactaaagcacaggctgtgggggctgacagcttgggactcctatctgctttctgctacttggtatctgtgtgatcttgggcacagtgttcaaaaactctaaacttcagcttctgtatctgcaaaatggtgacaaagatacctcatggtattcaatgagaatttggttaaaaaaaaaaaaaaatatatatatatatatatagagagagagagagagagagagagagagwgtgtgtgtgtgtgtgtgtgtgtacagcacgtagcctgaaaatacagtcattattgtgttagtcaa

SEQ ID NO: 858583 - DNA, 596 bp, Homo sapiens; identical to SEQ ID NO: 856233

SEQ ID NO: 858584 - DNA, 531 bp, Homo sapiens
gttctttgtcagatgtatggtttacaaatattttatcccattccatagatctctttactctgtcgattatttcctttgttgtgcagagcttttgaatttgatgtaattacatttgtctatttgtgmttttgttgcctgtgctttgggagtcatgtccaaaaaatcattgtccagaccaatgtaatgaagccttttctgtaggttgtcttctagtagatttatagttttggatcttgtttgtttgtttatttatttattttttgagatgaagtctcactctgtcacccaagctggagtgcagtggtgtgatctcagctcaccgtgacctccacctcctgggttcaagcgattcttgtgcctcagcctctcaagtagctgggactacaggtgtgcaccaccatgcccagcaaatttttgtatttttagtagagacggggtttcactatgttggccaggctggtctcaaactcctgaccctgtggtctgcccgcatcggcctcccaaagtgctgggattataggcgtgagccac

SEQ ID NO: 858585 - DNA, 531 bp, Homo sapiens
gttctttgtcagatgtatggtttacaaatattttatcccattccatagatctctttactctgtcgattatttcctttgttgtgcagagcttttgaatttgatgtaattacatttgtctatttgtgcttttgttgcctgtgctttgggagtcatgtccaaaaaatcattgtccagaccaatgtaatgaagccttttctgtaggttgtcttctagtagatttatagttttggatcttgtttgtttgtttatttatttattttttgagatgaagtctcactctgtcacccaagctggagtgcagtggtgtgatctcagctcaccgtgacctccacctcctgggttcaagcgattcttgtgcctcagcctctcaagtagctgggactacaggtgtgcaccaccatgcccagcaaatttttgtatttttagtagagacggggtttcactatgttggccaggctggtctcaaactcctgaccytgtggtctgcccgcatcggcctcccaaagtgctgggattataggcgtgagccac

SEQ ID NO: 858586 - DNA, 440 bp, Homo sapiens
cccgaattaagatgtccgggaatcaaggggtggaaaagggagtgatttctcttactagtcccttaataattcacaagcaaagtttttgctttttgtccccatkattttgggttctgcttgtctagaggtgtttgattctgacagaagacacaacagtggttctattaaactggaagctgagactgccacctggctcctttgtgtttctcgtgccatgaaccaacaagtggagaaagagcttactgcactgactggggtgctccatcctgactctcaagtggaaactgggtggtgacctcacatgagggcagatgagcggatgtctgaaccataggagatcctcttgggcacctcttagcactcccatgtcctgtgacaaaagttagcaggaaacgacaacaagccagctcagacaggattgccagtggcacagaactttc

SEQ ID NO: 858587 - DNA, 307 bp, Homo sapiens
atgtataaataaaatgcataggaaatcatgtggaaggatataccctaagatattaatagtggttacttatggagatacttggattgtagatacttttactgtcttcatttcagttttctgtagaatcttctaatttttctacggtaaaaatacatttcttgggtactttttttttttcttgagacggagtcttgctctattgctcagggtagagtgcggtgatgtaatcttggctcactgcaacctccgccttccgggttcaagtgattctcctgcctcagcstcctgagtagctcggattacaggt

SEQ ID NO: 858588 - DNA, 635 bp, Homo sapiens
ccttagagccacagtgccagtgagcggcacatccttgattcgctcttccccggcagctgaaactagactcccttcacagccagccctgtcctgtgactccctgggcagcctygcttggcgttctctgctgtgttagaggtcgttctgcagaaatgggtagctggaacaatgctgcactgtgataaaacccgcctccgacttgctctcccctcttcctcacataagaagggctattctactccagaaaggacataactgacatagcaccagctccgacgtcaaaagagcgaggctgccgcaggagaaaggaaaagagcttctatgcaagccctgggcattcttaagagacagaaaaaaatgttttcatttcctttttctttcttttttttgtggggtggggagggttgggagatagcttctgggctgatacagctctaatctttaaacaaagtactttgacgtggaaattgttttctcctccctgcaagctctcctgaacaatcttccttggcccagtcagcccgcctcctggctgaacacacacacacacgtacatactgagcagatgttccagtgctagtcccaaatggcaaggagaaaagaagactctagggcagcaaagaggatccaaaagt

SEQ ID NO: 858589 - DNA, 599 bp, Homo sapiens
tctgcctcctgtgaggaagggaagcaggctctatagaaaatgtgctctcaataatgtttgcccatcaaatgaaaacacgacaatccctgtgttcaggagaatgagaacaactcacagtgaagttgagattctgttcaaacaaagtacttccttccccacttggccagagcaaactatcattttggaacccatcacactctctaagaaagacaagatgtctcactcccagcaaagatttgagtacaggcttatgggggggggccctacagagtcagttaacctttccggacctgagtcctctcccctgtcaaactaagcacagggttgggctcaaacatttcagaatttccaataacagaaaccaaggctcagtctgcagatgctttaaagcacttagctttaagacgttcagagaatgagctcacattcaaaaaactacagaactgaaaagaaccatggatgttcctgtattcaaaatccctacatcaggttgatggtctttcctatgtgtcaccttggcaggctgtagtatccaacggtttaatccaacactgmcctaggtgttgctgcgaaggtgttttgtggatgtgattaacatc

SEQ ID NO: 858590 - DNA, 599 bp, Homo sapiens
gcttgagcaatgcggatcctgagagcacttccgggtaggtaattgccccggtcgaacgcctcaccacagcagcgcatggcaggcccccatgagttaaaggaaaaacttatgttggccccagccctaggactaccagatttgacaaacccctttacactctatgtgtcagaaagataaaaaatggcagttggagttttaacccagactgtgcggctctggccaaggccagtggcctatctctcaaaacaactagatggggtttccaaaggctggcccccatgtctaagggccctggcagcaatggccctgttagcacaagaagcagataaactaacccttgggcaaaacctgaatataaaggccttccatactgtggtaactttgatgaataccaaaggacatcattggctaacaaatgctagattaaccaagtaccaaagcttgctatgtgaaaatccccgcataaycactgacgtctgtaacaccctaaatcccgccaccctgctcccagtatcagagagcctggtcaagcataactgtgtagacatgttggactcagtttattctagcagacctgaccttcgggaccagccatgggc

SEQ ID NO: 858591 - DNA, 633 bp, Homo sapiens
tcaattttaaagctccaaaatgatctcctttgactctcggtctcacatccaggtcamattgatgcaagaggtgggttcccatggtcttgggcagatctacccctgtggctttgcaggatatagcctccctcccagctgcttttatgggctggcattgtttgtggcttttccacgtgcacggtgcaagctgttggtggatctactattctggggtctggagtatggcggccctcttctcacagcttcactaggcagtgccccagtagggactctgtgtggaagctctgacctgatatttcccttctgcactgccctagcagagattctccatgaatgccctgcccctgcagcaaacttctgcctgggcatccaggcatttccatgcatcctctgaaatctaggcggaggctctcaaacctcaattcttgacttctgtgtacctgcaggctcaataccacatggaagctgccaaggcttgggacttccaccctctgaagccacagcccatgctgttacattggcccctttcagccgcggctggagtggctgagacacagggcaccaagtccacagcatggggatcctgtgctgggcaacgaaaccactttttcttcctgggtctccgggtctgtg

SEQ ID NO: 858592 - DNA, 555 bp, Homo sapiens
ggacagatgtctttgttacgctcaaaagcataaaacgaaaagaaagagtgaagaggcaaccaggacctacaacatctgctacgtaagttggcctagggtgaatcctgatcaccacacccacttyctgcctggcttcacgagtgaccagaacatgcccactcacccttcccttacagcatcctctaaagtgagggatagcctcctaatattgcaatattgtgtgaacctggagttttgttatgattctgcccagagtagcattcaggattcaaactcagttgatataacaaagacatctgcagcagacagttacccctccagacatccaaaagtccccactcagagttcaaaagtctgttacctttggttagtatttggtttcagtgcattataaaaaccaacatgatggctttaacaaagcagaagggtttgttctctcatctaagagaccaaagcattggtccccagcaggtctggcacccatagtatcagcgacccaggttccttctcttttcatgctcttttatatgtggccccacagccaacttatgatcc

SEQ ID NO: 858593 - DNA, 468 bp, Homo sapiens
tttgtaagctttgttttacatttctcccatcccttctttgtgaatatttcagagccctctactcaagagggtaggggatgtggctactttgttccctgttttgttgccagcatggtgcctggcaaagaatagacactcaataaatatttggtaatgaatgaatgggtgagactctcatgagtgatgtcctttgttatggaaatcactaggccacatggtcttcttttggaagcaccaagtaggaattctatatttaggttcttggaattgaaataataacacaagtgacattgtacattaatcaattaatggaatatatgtagctgtggccccatgagggagttcttgttaattccattccacaagtggccagggtccactgcyagcctcatgatcccaggtcccgggtcccctctgctaatcttcacttttgggcaccacggtttctctctggttgggtaagtcatt

SEQ ID NO: 858594 - DNA, 590 bp, Homo sapiens
tggtagtgaaactttgaaccacaaaagacagggactactttaagccttcgcttttgcagattgatacgtgtatctcgtccttttgcagttacttgtcattatctgccyaagaatagtatttctaagaagttgtttctgtgtatcttctggggaagaatttgtccttcagttacatgtgattgcaacatgttgataaaagcaaaagaaaagcaataaaatcatttggttgaatatctcatttctttgaagccaaacagtttttgagtgataagaaagcaattcagtggaacttactgttcagcatcttacagaacaggattcatatgtacttgtgtattcacatgcgaattcatgcacacattatcacctaagagagtctgagtgtcctggtcctcaaagtatgtggttttcagaatttacactgtatacaaatctagaacgacatttgctgcctaaaggacaatgacgttagatctacacagcaagagttgaatagagctttgttcatcttctcacaaatttgggtggatctaaattgcttattttaggacaatttaaacttcctagtttaaaactttatggttatctgg

SEQ ID NO: 858595 - DNA, 541 bp, Homo sapiens; identical to SEQ ID NO: 856577

SEQ ID NO: 858596 - DNA, 680 bp, Homo sapiens
aaaacactttttagaagaataaaaagatggaaggatttgctctactggatatcaggttatcataaaaccacagccatttacatagtatatatatatatatatatrtgcataagtagataaatggatcaatcaaagagaagggagaaatctagaaacagactcatgcgtattttgacactcgatatttcacaaagttttcttcaacaaatagtgctgggactactggatatccatatggaaaaaaattaaacttgatccttatctcacaccatatgtaaaattcaatttcaggtgaattgcagatctaaatgtgaaaggtaaaataaaacttctagttgatagcgtagtataatatcttcctactctagtgtacataaagacttcttaaacagggctcaaaatatattaactattaaaaaaattacatttcactaaaattaagaatttttgttcattaaaagatgacagtaagagggtgaaaaggtaagcaactattcagaatacacacacacacacacacacacacacacacacacacacacacacaaaactcttacaagccagtaagaataagataacccagtagaaaaagggacaagacactgggatgggtacttcataaaacaggctatccagattaataaacctataaatcagaaatcagagaacttatagtttca

SEQ ID NO: 858597 - DNA, 572 bp, Homo sapiens
tgtgtttccataaaatagaagccaagttattaccttgactaaccttcyttttttgtcttttttttcactcccactccagatagataacatcaaattgcaaataaaacgaactcagatcccaggttgttcttacgtacgttttggcccaaggtgtaattgacttgttttgcttccccttgcaatcatttttactatgattacagtcccaggtaaggtaatttctgtccactttgggcatacctcagtagaggttggtgtagatgaaagcttaaaaatgaaattgcaagtgaaagcacagacttagcaaaacttctttattggagccctcaatcctcataaactggcatttttctgcttctgccccagaatcgagaattcctggttttgtctttgttttgacttgagtttttaaaagtttctctgtaacacctaccctggagtggttaagtgctttaattttgtcaggtgaagaaaccaagtgcagttatggtagccgggttgctgtggatataatccagtttgagaaaattctcattgtggtgatcagaagtgcagtgttgtggttgcatttc

SEQ ID NO: 858598 - DNA, 512 bp, Homo sapiens
agcttatttttgaagttggaagaattgctatataggaatcaccataaatcctaaaagactgggcctcaaataagagcytttttcttttatctcaaaataatttaatacaaatactaacaaacgcacctttcttccatggtgatgttttatgtgttaccatatcctagattagaaacccacttatgatagcatctatgagctcagacagaaaggcagggcctgtccttcctccacctgcctaccctggagtcactgccagaggctaaggtggagaaatcactgtggcagagctttcaggatggagtgcctgatgggatacaggggaggaacaactggagagaaaaggaaggaaaaggaaggaaaaagcgactcacaatttaagcacatcctgtgtgccagcaactgtgctaggtgtttatatatatcatcttaaatttcttatcttggctctgaggtaggtgttatttacattttacagatgaggaaataatctcatgtcataatctcaaaca

SEQ ID NO: 858599 - DNA, 644 bp, Homo sapiens
aatttcttatcttggctctgaggtaggtgttatttacattttacagatgaggaaataatctcatgtcataatctcaaayaataaagaattcaagactttgcccagggacactgattaattccttcccggatccagtctttgaatgcagagaccacagggctcacaagatccactcaaggggcttcgggtggggtttggtagaggcaaaggggctggaggaagggaggtgaaggtagtggtgggcctgcccatggcttcttctggaagctggtggcacagcccaactacagactaaagttgaaggacagacgggagggcccaggcccaagctccctggggtagctgaaggaccctaaatccctatataaatgcagtgttcaataagtgtagtaactgtagagattttttttaaaaaccatccagtctagaaaattctagatagtgaaaaagggcctttcctttctaaagatgtagaggttaaaaactgttataggtaaaatatgatctggagaaaataagagaactagacaagtaagggaataataattaagaaaaaagaaagaaggagctttttaagcacaaggattctcaaaaagactagagtgatttgcttctgcatatagctttcgttacttaccagtggt

SEQ ID NO: 858600 - DNA, 532 bp, Homo sapiens
gccacagggtcaaacaacaatcaggagaaggaagcctgcagaccaagggcctggctcccrgttcaggaaatcaaggcacagaaagggtaagtcatctagctagaagtggagcttcatcaaattttcagtgatctttttaagatataacgatgcctctggtcaggccaaaccccggcttcagacaatggttcccaacctcagctaacaattagaatcacctggggagctttccaggcgattcccagccccagagattggaatgggtttggagtggcctggaaatgggaatttttcaaagctccctagagactctgacgtgcagctaaggttgggagcactgctcaaaggtctctactcacataaagaatggaaggatgtcacttctacttctttcatgctgatccgaatattttgttattaaaagaaagtcatgatagcactacatctatcacaaatcttaggtgagttgtttttgttttttttaggtaagtttactcaagcgaaaagagtaaatttttctataattttctga

SEQ ID NO: 858601 - DNA, 603 bp, Homo sapiens
agctccattttctgtcctaaccactgtttgtactttgcactttccacctgcttctgatatgtgttctcttatcaccatggattccaaaccttacagagcagagctgggtaaaacaaacaaacaaacaaataaacaagccaactcccatcactctgaggaaggaccctgctggccctggggtcccctccatttgtccagggtgggaatgagagaaggatcctagctgactgcctgggttcaaatcctgctttgtgaccttggacaagtttctctacctctctgtgtcttggttttcttaaatggagacagtagtagtacctacacctgatagggttgttgctaggattaaatctgagttgatacaagtgctcagaaccatgagtagtacagagcacatgctccatatgtgttagttgctatcattatcactttcatcattaccattattattttgcaacataaccattttgctcatmatcacatttgtaaaagacagaactggaatctgcgatcttcttaaggcctcaggtgtattattttgagaaatgcatgtaattatgtatctcctttttagaatgagaattgggggcatgttccaaggtg

SEQ ID NO: 858602 - DNA, 642 bp, Homo sapiens
tctgatggatgcatctatgctggtgttttcattagcgaggagcaaaggcctgcttcttggtgargaaaacatcaacaatggtatttccccatctaaaaataaggcttttatctgggcagacaatagggtgaccaataatcccagcttgcccaggacttagggggagatggtgggattttcagttttaaaatcaggacagtcctgggcaaaccagggtgagttggtcacgcagtgattgtcattttgggtgggtggagaaaggagcccctgacaggcaagctggggagacatttggggatagttgaggccaggagaactgcggggcctgccaaggctctccttcaggaggagtggttttgctgtctctggctgcctgtgatgaggaatctcataggcctgtgaggacagggttttgctgtctttataggagctcactgtgatgaggaatctcataggcctgtgaggacagggtttcgctgtctctataggagctcactgtgataaggaatctcataggcctgtgaggacagggtttcgctgtctctataggagctcactgtgatgaggaatctcataggcctgtgaggacagggtttcattgtctctgtaggagctgcctgtaatgaggagtctcatagacct

SEQ ID NO: 858603 - DNA, 614 bp, Homo sapiens
ccccattaattgccaagcaatcaatacatccatttatttgatttcattgtataactgtattgaaaacagtccggggtctggacacctggtccctctggctggccaggtcttggtccttggactaccatctagtctgtgcctcagctgttttgctggctgagaagaagaaaaaagtgatgattttactgtgatatgtttgtgacttttatcacaatgcagtgctcagctcctctgtcaccaaagcctaccttttttctggctcttttttggatcctggagggctgacttaagcaaatccttagtaaaggaaagaacccagcagcctctcctcaaaccagtaggcagcttccatacagcctcacagacaggtggcccaggagtgactttatccacatttttctgctcagaaaaacaaaccaccaaatctaaaaaagagattgaccttgaggtttccaggaacaggacttaaaggggtgtggagaaggggtggggaaggggtaaggaagagatagggaggraggaagggaggaaatgggaggagagagactccatggcaacggcagaggagattgtggcacaggccacaggtgtgtaagccccatagaccttctggg

SEQ ID NO: 858604 - DNA, 667 bp, Homo sapiens
ttttgggcaggttgctccatgacgggcagctgtatcrtcttagaaccggactttccgggagagcctttgggtcactctgggcgtcagctggaaagggctgctcttggagcaagctcactggcccacaggaggagctgccttcttgaactgtcaccctgaagccaaccaaagtctgggcaacgccagctccagtgactgccgctccatctcctaggcaatttgcatcgctgtttctgtttgttaggccttgaccattcctttgttgtcatcctgcgcttccctggccataggccttttcccagccccaccacggcatgcccacctgtgcttggggaggggcggaggaaggagccccagccagccatgtccctgtttcgtgctccagtgaccactgctatgaggactttcccactggctcaggctcagttagtcgagctggtgtgccccgctcttagctgttccccaactctcctagagtgtgctaattctgacccagctctcccaggtggaggatgcttttcaaacatgtccttgggaacctctgcagacccattcccagcccattctccatgattccaggcctggccaggttgaaaacttctgtaaattaaaactcaaataaagagagtatagcttgggcataccttttgcacatgcatatatatgt

SEQ ID NO: 858605 - DNA, 422 bp, Homo sapiens
cctaaagctttcaactccatgccacaatatttagtatgctgtttttttttttttwaaaaaaaacctttaaaataagaggagacaattacttcagatttctagatgctgtttaaataggcaggaaaacaagatttgcagcttctttagtcttatatttttgccaaagtaaaaggaacaactaaaataagaggttctgaaggactgctctatgatgaaatattaaaggaattaaatatgtatagtctcaaaggagcatccaaaaaaaaacgagattgtggttcacaagtagataaaatgactccatgaagacttttctttttaaagagcaaggcagagaactaatcatttgcactaattgtgaatgataaggtaagaaataataaatgtatcctgaagttacgtcagctcagctttaataggtg

SEQ ID NO: 858606 - DNA, 398 bp, Homo sapiens; identical to SEQ ID NO: 856263

SEQ ID NO: 858607 - DNA, 566 bp, Homo sapiens
acccccaccactggcatggatcccactgcaragggcctctggggacatccaagcacaaccctgaatagacatctggccatagacaaatcctccttgtctccagagacttctacaggattccaactctagtttttaaaatgtgagtatatgagacacatgggtctgtaggctctggttttagaggtgaatccttcacattaatgattctgagattgattttctcctttgttggcccttcttgaccatttttaccttctcagtgaccacgtttcagtgctcactaggacctggaccgggggcagggtaaaccgaggtaagtagctctgtgttactgcctgctactatgcccacggatgtgtggtgatgagaagggtaaaacaaaaagccagaattcctttccaggatgaaataaatgcaagataagcacagggagctgctcaggtgcctgaggaaggtggccaactccaaatgtccacaaagtgtccatgtcaggtgacccaaaggtgcaaaaaacaggcagactgcttctgtgcccagtagcaagaatatcaagtacgtcaggtctt

SEQ ID NO: 858608 - DNA, 624 bp, Homo sapiens
caatagcccagcacatggataagagaagtgactacaataaagattaccatgatcccaacctctaaaacattctctctccgtgcctcctcagcaaggtatcctcctgctaaaggcagtgtctacacccgtagggggaatactattacagacactctagagaaccaggccaacagtgacttttcagttacattgacggctcaaagtttgaccacaaagcagcattagcagagtgggttctgtctattcaacaacagatgatcctgcctcccaattatcacagataagccattcagcaaatgcaccatcaacccaaacaatacttgcagggttctagcactctgtgcgatgagtattcaggcgaacggctaaagttcgtgtctggctaattttaaaatgtgctgactataaaattttcccagtattgccagtatagggaagagcacctctctaattaaaacagctcctctgttctctgtttcttctttcaatgacttaacattaccatcgccagctttgtcttaggtgtacaacagtctagagtacttgtaactgatgcccagtgaaagggcaaaactgagccgttcaaaygcttcacagcctgagcggttgtgtctgcgtgcatta

SEQ ID NO: 858609 - DNA, 603 bp, Homo sapiens
cactatggtttgaacgtgttccctccaaaattcaggtgttgaaagttaacagccagtaaaatgatatttggaggtgggggcctttaagaggtgattaagccataagaacccctttttcatgaatgagtttaaggccccggaggcttcacacagcagtgtttgtaacttgctcttctaccttccaccaagtgaggacacaacttccctccccaacagagagtgcagccctcaccagacaatccaacccaccagtgccttgatctcggacttcccagcctctagaactgtgaggaaataaattgccattcttcataaattgcccagtctcgggcactctgttttagcagtacaacatggactaagatagctgctattccatttttcaacattgctggagcccacatggagaattaactagagctcatggaggccgaaagcccaggagctgagtgagaagctccacaggtggtgtcttggcacagacttgagcggtacagttactgctaccatgacccccagcaagctsatccatagagataaccagcagccagctcattccatcttaaacccagatggatcctgaattatcttctattacttaaa

SEQ ID NO: 858610 - DNA, 600 bp, Homo sapiens
aatgtggccctagatccttggaagagtggggctacttctttcccaattgttgaatctttttatgcctatttttggttttaatacatgttatggaagcataatcgtccttccaaaaatacttggtaaccaacattggtttaatggtgtataaaatttattttggctttaacaaggcatctggatcacagattcctataaaggttgcaaagtcaggccccaagtgatacagtccatgggacactgcctttcccatccctatccattcctcctgctcctactcccagctgccttgtgtgaaaaggtcagttgtactggtttgcccaggataatgaaatgtcactgaatgagctgctataacactaactatttttactgcttttgcatgttcctttctacttttatctcatctttgaaagatgttttacgacatctttgcaagatgaatggaaaaggcaatggggcatgcactgaaatgtggactatgctaaagctttgcaactcaagaccaaattccacatagatacttcctaktcacttccatagtctgcttgctgctttccctgcctcctccaccctatcccaccccaaccaattcagatg

SEQ ID NO: 858611 - DNA, 600 bp, Homo sapiens
atgcatgtggggcttataacctaggtgacacgttgataggcacagcaaaccacgatggcacacatatacctatgtaacaaacctgcacgttctgcacatgtaccccagaacttaaagtaaaataagagaaggaaaatggtaaaaggaaaaaaaaaaaaaaaaagaggctgggcgtagtggctcatgcctgtaatcccagcactttggaaggccaaggcaggcagatcatgaggtgaggagttcaagaccagcctggccaatatggtgaaagcccgtctctactaaaaatacaaaaattagccaggcatggtggtgcatgcctgtaatcccagctgctcgggaggctgaggcagaagaatcacttgaacccaagaggcagaggttgcagtgagccaagaccgtgccattgcactccagcctgggcaacagagcgagactccacctctaaaaagaaaaaaagaaaaaaaagaaagtgaatgacactagcttacatgggtgctctctgagragccaaaaccacatttagcagaagcctgagaaatgcagcacctcagtcaactccaagaagcaccgcagcccagcaagatctgccaggagctc

SEQ ID NO: 858612 - DNA, 634 bp, Homo sapiens
atataaggtgtaaggaagggatccagtttcagttttctgcatatggctagccagttctcccaataccatttattgaatagggaatcctttccccatcgcttgtttttatcaggtttgtcaaagttcagatggttgtagatgtgtggcattatttctgaggcctttgttctgttccattggtctatctgtctgttttggtaccagtaccatgctgttttggttactgtaaccctgtaatatagtttgaagtcaggtagcataatgcctccagctttgttctttttgcttaggattgtcttggctatatgggctcttttttgattccatatgaaatttaaattagctccttcaggagctcttgtaaggcaggcctagtggtgacaaaatctcagcatttgcttgtctgtaaaggattttgtttttcctttgcttatgaagcttagtttggctggatatgaaattctgggttgaaaattcttttctttaagattgttgaatattggcccccactctcttctggcttgtagagtttctgtagagagattcactsttagtctgatgggcttccctttgtgggtaacccgacctttctctctggctgcccttaacattttttccttcatttcaaccttgg

SEQ ID NO: 858613 - DNA, 455 bp, Homo sapiens
aaggctttgagaaattttgagtcctcgagtgaatgggcggatctcatatcttcacttggcaaactcaacaaggtatgtagggtgtatcctatttggattgcatggaggtggggacgtaattgtctttttattattataagaaattacatgattatattatttgtattttataatctttatatcattacatattatacagtataatctttatattatttcaaggaaataccattatatatacaatgatgattacaataattagaaaatatagaaaagaaaaaaaccactcataattctgtcctccagtgttacccactgttaacctatcaatgtatgtacctccttccagctttttctgagcataaaaatatatrtagtgttcgtatagttgaagtctttttcttaacaatgttaatgtctagacaagataaaatttaaaatggtcaaattaggta

SEQ ID NO: 858614 - DNA, 384 bp, Homo sapiens
atgcagcaaagaaggctattattacaatcatctctgagggatgatagatcctctagctaatgtgtattcataggggtaatgtctctgattaatccatcagcaccattgtcacacagggaaacagataccctgaagaagaggactaggatgggtactgttgaaagagggtgggaaatctggcagggtatggctttctatggggcttcatgagcctgcatctcagaccctctttggcagatttgagtcaccaggagggacccaagggcaggaagtaggctacagccaagagatgggcaccaagaggaaacaggaaacacatgggacatccacttygtaattctgcacccagctcattcttcagctaagtactaagcttattcccat

SEQ ID NO: 858615 - DNA, 642 bp, Homo sapiens
ggcaaggtctctgcgtggtctcctctgggacctattccagagcagtgaaactaataatcctcaaattcactccctctcccccaggcgccattacrccatatttgaattatgttatcaaaaagacagacgtggattcagttctgatcccccaaactcttaaggaaacgtgccccttccctaatgggaaagtgtattcgatgacctgaaagttcacatgccttaaatctggccgccctactccccagtcctgggctgcaccctcgttctgtggagttctgagaaatgccgaagatgaggcaggtggcaaatgtggctccctgagagctaaacctgacatcaaaccaggagctcggctcagtgtttgtcagcaaaattagccttttcttgcagtgttatataaattttccatagaaatctggcatgtgtcaagaatatgtgtcaagaaggatgcctgttttcctaacttaggtgtaatcaccaggtgccctacttaaatttatgtgcaagggtgtaggcaccagagaaaactaccagctatcgctaagccaacaaaagccatcaattagggatgaaaagtgtgaagagttgggatggagttgccttccattaacacctctgatttggatccttaagatgacagaa

SEQ ID NO: 858616 - DNA, 563 bp, Homo sapiens
tcctgcagctaagttcccttattcctgcagccaacttccttttgttggatcctttctagctccaagaggycatggtgggcaagtgctaggctctggagctacactcccaggtgcaacttctagggccaccacagagtagctgcacaactctgaacaagttatctgatctttccatatctgtttccttatatataaaatgggattgtgatgataaaaatagtaacccaactcatagggtagttgtgaggatgacgttagttaatgtatataaagtgcttaaaaacagtgcctggcttttagtaagccctcagtaagtgctagctattgtggtcattattttgctggagcatattcttaagtaatcttttcagacagagtaccaggaaggtaaaacttttagtctttttatgcatgaactgccattattttgtcttctcgtttgattgacagattgctagacataaagatccatggttaaatcacttaccttcagaactttgaaggcattatcccactgttttctagcatccagtgttactgatgaagaatccaatgcaaatctg

SEQ ID NO: 858617 - DNA, 545 bp, Homo sapiens
attactaggaacagaattgcactaaaatattttgataactatgttttactataattcacttcctttataatcctgcatgttatgtgttatattacacatttaaaagtattgtgctgagaagaatacatcagcttcgccagattgccaaaggaatcccaggcaatccccatcccgccacccagaacaacaccgataacaaaaaactaaaccaaaagagttagaaacctctgccagtgggatgtgtaggcaagagaggacccttgttttgctgttgttttgaagatgagaggcatggaagcatgtttgcatgcctgaggaaatggttcagcgaggagggaaacatctgtaggggcagtagggatcctgtgtgcacatggagagaccagctctgaccagcatgcagagaactcactccagaacgggaggggaggcrggagcaggaggctgggggagatgtcagtgggcaataacgcatgttctgagtttgctccaagtttctcagggaaataagaagcaacatgatgtcttgagacaggagatggggg

SEQ ID NO: 858618 - DNA, 606 bp, Homo sapiens
ggggaggcaggagcaggaggctgggggagatgtcagtgggcaataacgcatgttctgagtttgctccaagtttctcagggaaataagaagcaacatgatgtcttgagacaggagatgggggaggaggtgcgggaggcttgagcacagaggaggagaccatggtcatccaggagaatgacagcaggcctggaccaagtcaaggggtcaagtgctggtcagtgccgggtgcaggtggggcaagtggtcctgcgggtaccatagactatcacgccggacagcctttcccagcaccatcaactgcactgcgagggtcccaagtggacaaagagctggactggacctggtggggattttcctaggggaaaatgatgaaggcagacagccaagggaaatatgcgtgcacacaaaggtgtgaacatcatggcgggccgtggcgtcaaagctgggatggagggacattgaggacaatagagaaggtctgttcatcstggagaagtcacctggatcagtggctctccaccctcctgctgtagccgcagcccttggagagctttaaaaagatccggatgccctggctacctccagagattctgattcgctgactgg

SEQ ID NO: 858619 - DNA, 543 bp, Homo sapiens
atgcccaaaagagtgaacgcagagactcaaacagtctttgtaccccagtgctcatagcggcattattcacagtagccaaaaggttgaaacaactcaatgtccatygatgggtgaatggataaatcaaatatgatgtatccatatcatgggacatgattcagccttaaaaaagtaatgaagtggccgggcctggtggctcacacctgtaatcccagcactttgggagcctgaggtgggtagatcacctgaggtcaggagttggagaccatcctggccaacctggtgaaaccctgtctctactaaaaatacaaaaatgatctgggcatggtggtgggcgcctgtaatcccagctacttaggaggctgaggcaggagaatcacttaaatctgggaggtggaggttgtagtgagccgagatcacaccattgcactccagcctgggtgacagagcaagtctccatctcaaaaaaaaaaaaaaaaatttctacttacaaaactgtagtaagaacaggacactcgggtactaaaaatacacacacggccc

SEQ ID NO: 858620 - DNA, 284 bp, Homo sapiens
aaagtggattaggccaggtgcagtggctcatgcctgtaatcacagcactttgggaggcggaggtgggtggaccacttgaagccaggagtttgagaccaacctggtcgacatggcaaaaccccattcctactaaaaatacaaaaaattagccatgcgtggtggtgtgcacttgtraccccagctactcgggaggctaaggcaggagaatcgcttggacccgggaggtggaggttgcagtgagccgagacttttccactgcactccagcctgggtgacagagtgag

SEQ ID NO: 858621 - DNA, 284 bp, Homo sapiens
aaagtggattaggccaggtgcagtggctcatgcctgtaatcacagcactttgggaggcggaggtgggtggaccacttgaagccaggagtttgagaccaacctggtcgacatggcaaaaccccattcctactaaaaatacaaaaaattagccatgcgtggtggtgtgcacttgtaaccccagctactcgggaggctaaggcaggagaatcgcttggacccgggaggtggakgttgcagtgagccgagacttttccactgcactccagcctgggtgacagagtgag

SEQ ID NO: 858622 - DNA, 641 bp, Homo sapiens
aagaaatgagacagataccgaccgtatgccactgacagaaaattctaaaacccaaagtcatgatatcaagtgaggcagataccgaccctgagctccacgtgacmgtgctgtgggcctagaaatgagggggatggggagtgtggctgccacatgacaggcaggatcgtatacctacagcctcctggacctgggcccagtagagcaagtgctgccacctgatattccaatgtcacattcagagacagccactggccacttcccagcagggctggtgggcacttgtgagaatgggaaactggacccatgtggaggtgtcctgcctggtatgctctgccgggctgtgactcacggagggacgggccctgcacccaggtgacatcagagcccagggtgccatcttttctcagctccttctagcccatgttgtggatgcaaggcatgggtgccaggtactttccccttccacccacccttggctgctgggccaccttgactgcccttggagttctgggccctcaagagccttctccatcacctgcttctcatgggcgctgctccgacacccaccccaggtgctctgtggaatgtgccagtcagggctccctcacggagggtgaacaccaaggcccacctcagcaagc

SEQ ID NO: 858623 - DNA, 553 bp, Homo sapiens
aattttgaggatccaccttctttaaacagcagagggagaaagtgtataaattgagtgacattcactggaattaggagatccrgagtggaaatttccagagaaattccaaaaatcctggtgagaagaaaggaatagccatagcaggccctgagaatacagagcttcctagccaagtcaaatccgtcccatccttctcccacctccactccccctcccctggcaccaagggggtcagcagagggagcagaaaccttcagccactccccttcctgcagaccagcagccccagccctgaccacagctggctggccttggaatgaagcttgaaggactgataaatacctgggactggacgtactagtttctgaattgagaacaagtttgtgatttaaagtgatcttggccgggcgcaaatggctcacgcctgtaatccctgccctttgggaggcttaggcgggcagatcacctgaggtcgggagattgagaccagcctggccaacatagcgaacccccgtctctactaaacatacaaaaattagccaggcatggcggc

SEQ ID NO: 858624 - DNA, 569 bp, Homo sapiens
ctaatatgcctggtgtctttgtgataatatggacatatggcgacagagggactgggagaatgccacgtgacaacaaaggcagaggctggcccaatgctgcaaaccaccgaagcaaggaagaagcgaggaagacttgaggaaggatcccccacaggtttcagagggagcacagccctcctgccactttaattttgaacttctaggctcaagaattgcgagacaaaattctgttgttttaaggcaccccgtttgtagtactttgctgcagaggccctgagagtccaattcagccctattagctttttcatccggggcaagtgaagatactctctactggatacagatagagatggtagaagataaagctgtgtttctcacgtcctgtgagttatgcatgcaaggtaccagttactcaactgtcctgtggactaaatctctttaagggactaagggagcttamcaggcccctggtaaggaggcctaggcccataggtggtaccaaagcaaaagggacctagcacagtggtgaaaaactccagcataccttctgggaacttgccctgcagata

SEQ ID NO: 858625 - DNA, 633 bp, Homo sapiens
acctgcctcacaaacatgaggaagcgcatccttctacaaagcgagaggcttgaggtgtgtgtatagccaggtcaaggtgaaagctactgaggttttgcggaatcaactctgyatcaaatcttctctctctatccttctcagagtctgatcaaactgggaggtaacagattctcaacaaatctcaaggagagggaggaaaatatctacctactatggaattatctgtaatttttctaacacacagagtatgttagctaaagctttaatgccccctatcctttctgtcacttacggtacgctttatcctttgatttttgatcaactgttagtcgcagaatgaatatgcctaaattatcactgaaatctagcaaattatgtcttagaatgttagttttaaaaataagtttgaaaatcatttttatgagtctttgtaagctcaaaaatatagctctcattattttgacttagtttgtttaaattgctaagaaaattatttcctcaaaaaacagacactgtactcttcaccaaatttagtatgttgaaaactgaaaataagaaattacatatgaaagagcaagccagagacaacataccaatatacagaaaaaatagaggaaaaaaatactaaatttt

SEQ ID NO: 858626 - DNA, 536 bp, Homo sapiens
caactttctctaagtgaatttttgtcctctcatcttggaacatgagtgatcaggcttcaccaactacactttccctgtccctttgctttcctaaaaaggatattctagaaccctttcaattcatttgtattcctttgccttatttttacatttcctacggttcttaatgaaatagcagactgtgaaccagcgcatagctgtctgggcccatgtccccaatccccaggtgagaaacagtcttcagaagcaacaatttcattgttgctccattggatactattcatccatcacctttcagcaaacaggattccttctccaccgactcttcagctgatatgggtgagccttgttgatcctaacaaaagggatgtgtgtgaagaggaagcacctgacgacaaacaagcaccatctccttccccagtgtgaggaggggtgggaagggcaycgtgtgggcagagggcaccctgtgctgagccccacactgtggcagctcagctgtggaaggggccttggagtcagtgcccacctgtggctgg

SEQ ID NO: 858627 - DNA, 598 bp, Homo sapiens; identical to SEQ ID NO: 857956

SEQ ID NO: 858628 - DNA, 531 bp, Homo sapiens
taggagtttgagaccagctggccaacatagtaaaccccatctctactaaaattaaaaaaaattagctggccgtggtggtggacacctgtaaccccagctacttgggaggctgaggcaggagaatcgcttgaacccaggaggcacaggttgcagtgagccaagattgcgccactgcactctagcccgggcgacagtgcgagactctgtctcaaaaaaaaaaaaacaaaaaacaaaaccgaagatggcaaattatcagtgagcaaaaactggattattaaatacataggagaaatggattgccatctagaaaaaatcaatcttggtccctacctcattccttataccaaaataagttccaggcagattaaagattttagcataaaaaatggacctataaaatatccaggaaaaaaacgggaaaaattttttgtaagwccagtaaacagcatgggaaaaaagaatgtttatattcatatacacatgcatgtaatgtgtatatcctatatgcatagcatatgtatgacaacaaat

SEQ ID NO: 858629 - DNA, 531 bp, Homo sapiens
taggagtttgagaccagctggccaacatagtaaaccccatctctactaaaattaaaaaaaattagctggccgtggtggtggacacctgtaaccccagctacttgggaggctgaggcaggagaatcgcttgaacccaggaggcacaggttgcagtgagccaagattgcgccactgcactctagcccgggcgacagtgcgagactctgtctcaaaaaaaaaaaaacaaaaaacaaaaccgaagatggcaaattatcagtgagcaaaaactggattattaaatacataggagaaatggattgccatctagaaaaaatcaatcttggtccctacctcattccttataccaaaataagttccaggcagattaaagattttagcataaaaaatggacctataaaatatccaggaaaaaaacgggaaaaattttttgtaagtycagtaaacagcatgggaaaaaagaatgtttatattcatatacacatgcatgtaatgtgtatatcctatatgcatagcatatgtatgacaacaaat

SEQ ID NO: 858630 - DNA, 597 bp, Homo sapiens
tgtgtgtacctttaatggcattcaaaaattccactaacatcccatgtgtgaatccattttttacatgttttcaaaatttattttattgatgacatgctgtatgtattttttctattatgaataatgcaatgaactttcttgtgccattttccctatggaacttctgcaaaagtttctctattatttttttacatgtggaactgctggatcaaagagcaaatgttttctttccagaggtattgtaccaaattacccttcaaatctccagaggtaagaagacctcatgctctatatttgcacttatgttgagattgttagtcttcttaatattttccatttgatggttatgaaatgacatttcatactgttttgattcatagtttcttatttagtagctatattgaacatctttttatgtttcttggccttgtattttttttctcttctgaatggtctgttgatatcttttgccttttatttttagttttcagacagggtctcgttctgtcattcaggctggagtgcagtggcgggatcacagctcactgtaaactttgtctcccrggttcaagcaatcctgcctcctcagcctcctga

SEQ ID NO: 858631 - DNA, 652 bp, Homo sapiens
agaagagggccttccccaccaggcatgccaggagaccgtcaggtgatggtcaggcagttgttaaactgtccgtctacaataataattggtcacagctggcaccagaaaaagtggtctcccaatagacagaaacaccgaagctggtgatcagcagcttcctgatgacatctcaggacttaggtgagtgggctcaagcatgtggactaaggcaaaatggcacagtttaactgtcatctaaccttcttctaggaacacttggctggtaagggaagaacgcctcaagtgagcatgcatacaactccagtaaacactgcacatgtggcccctctcaagtgctggcagaccatggcacatgcaaacagcccaccccaagagaagaatcagggtagaaggcacacaacacccgggaagtatgccaacgcataaaacccgaagtcaaaggtcaaacagtgcacttgatctcgcaagtcgcccacttggccctcttccaagtgtactttacttccttttgttcctgctctaaaactttttaatacactttcactcctgctctaaaacttgcctcggtttctcactctgccttatgcccctcrgtcgaattctttcttctgagaaggcaagaattgaggatcctgcagaccacacagacttg

SEQ ID NO: 858632 - DNA, 595 bp, Homo sapiens
tgaagatcaatgtagtaaaactgaggaaagaggaaaaacatgttttatagtcttktctttaacattttgcttattttgtgttatttgattcattaatattttaggcacagtaattcctgatttattagtatgtctgcttaaatgagtaaaacatggagtaataaaattttaggttcttagtttttgaaattcagagattgttacgcctgactacttactgtgcctccacagtaaccaacacagtagccccaatggctggaagcgaatttgactctttgcccatatgctataccctcagcttcttaatattgatgggtatcgcacaggtaccaactttgatttattgcaaatctgatttagagtgggtacagagagacttgaaagggctgtgtccatttatgactgaatttttgagagtttattcttcaggaagtacctctggtgccagacatttatatttttaacgatttggatgtattttgctttatgcacagggtgtggttgatatctacaatcgtttttgtgcatcaggaaataaggttattaaaatattattaaaataggtttccacaggcactttgctacatgtgacaaa

SEQ ID NO: 858633 - DNA, 660 bp, Homo sapiens
gtttaagaaaaagggagaaatttggtgtggctgcagtggaggatttcagagagagcacagcaacayacgaggatggggatgaaagctgggctcagatcaacaaggtccttgagtcttgctaacaaggttggattttcatttttagagatttcagagtaattgaaaatttctaagaaatttttaaaaatcttaaataacaccaatcacagaaaacttggtgatgaaaataaaaggctttattgggaatccaaatacccacattgggattcttattcaaccatttactggacgtaaacgtcaacctctctggaatttgttttatatttttctgtgggtaattaaatgaaatgttaggggaatagaaaagtaaatgagataatggatgtgaaagcactttgccaacaataacatactgcaaaaaaagaatgcatccacacactcgattttgcattgcaaactctgctaaaatggaataagaacaaaatctgttatcacaggggcagcctcctccttaagacacaaaagtccaatttataattttattttaagaaacttttggagatgcttctgtcagatgaatcataagccattgaagataagttgttcattttcagccttccattccaattgttttgaaaacatctgtgtcatcattctaca

SEQ ID NO: 858634 - DNA, 584 bp, Homo sapiens
ataatgcatatacacaatttttttttaagaatcctcaaccaatcttaagaaygtaaaggggtcctgagaccaaaagattaagaatcactgccgtcgaggttttaagcttggctaggacacagtctgtacttactgaagtaacccacagtatgacagtaataagacactttatgaagaacatattttcagtagctaagtgtcatagaaaaggaagcttgttagccatttcctcaagttgacaacagagagtccttaggaaaataattttttaaagccaatattgagccttccaagactgcacatggtgatatgttaaatttggaatttatgcaacttaaaaaactgagagtcgggggttggcatttttgtgcatcctaactgacgagtgctgccccagggctctctaacactgcacacagtctactaaagaagcaggctgcccatcatgacccccacccatcagctacacagcacacatctgcttctagatgaaccttcttgcaagtggcctgtcttatggcaaaatcaaggggcaggcctgtaaagcggaccaggaaatgagcagcaactgcataccaccaacc

SEQ ID NO: 858635 - DNA, 499 bp, Homo sapiens
ttcagaagctgaataatgagcaaatccttttttacaatgttttatatttttgaattttaaaatttgttcagcatccygagtcagacaagtaagaatgaaatcaaacgcaaatctggcaacagagatgttttgtgactcatgagtaagccattcaggtacagacaatacctgtcaggcaggttgggtgtgttgctagatcactttctccatgctcaaacacagatatgatgtctcgacacccacataaggtatttcatgctaaaatcaagaaatactgggagttccactgagaccttaactttcaggaaaaataaaatcagtgtactcattgaagagtagctataatcactctttggacacagaaacgttgcactcttttttgaaggttctttcttgaagcagacgtttctttccatttctttttttgtcagaaaatcatttcacaaactgctttgagatttaactaaatttcttatttttttttttttaaagttgagct

SEQ ID NO: 858636 - DNA, 408 bp, Homo sapiens
ccaaggaagaactaacttaggctgaattctattaagacaaggttatcacaatatttacaagattatttatcaggattatatcaattaaatattttgggggaaaaaattgccatacaaaaatcatattaaaattgagccaagcagtgaaacaactctgaaatggcctagaaataacatgtatttgatattcactttttctgaatacagatgtgatcttcatgccatcattgaccccaggtggtaaggatcattaatgtttctagaatcctacactgggcagctgatgcctgtaatcctagcattttgaggggccaaggagggagcatytcttgagcccaggagttagagagcagcctgggcaacacagcgagaccccatctctacaaaaatattttaaaacttagccgg

SEQ ID NO: 858637 - DNA, 549 bp, Homo sapiens
tacaggcgtgcgccaccacaccctgctaacttttatatttttagtaaagagtgggttttgccatgtcggccaggctggtctcaaactcctgacctcaagtgatccacccaccttggcctcccaaagtgctgggattactggtgagagtcaccatgcccagcctgtctgttcatttttaatctggggaaacccaaaagcagatttaggcatttgcacaggggcccatccaccaagagctcccctgtagcatgctctgcctgaaccatttattaggagactcctgatgtaattttttttttctggaccagagaagatccttccagtctgcagcctggaaggtaaatgtctagttgccatcttagggagctcaggggctctgcattctgctgtgtgtctgcttcctcaacgccctgttttctgtatagtcccacctgccattgtgcctgtggtcctccatgccagcaactgcagttacagcttctccaaagaataaatccccaagttcagccagggwaaattaggagcgggcatccagggatccaactgcct

SEQ ID NO: 858638 - DNA, 611 bp, Homo sapiens
ggaggcctttgttgatcctgctcaaccaatgcccccgctgccacatagaagaaacggtggasgtgtttagaaaatgataccaagtttacccctgaaacgcaattgcatatcctgtgcaggctgagtgaggcaaggtgaaactattgactggtatcacttgagatagagccaactgttcaaactgaaactgaaagacagcgtggtccctctgaggaaaaaagggcagaagtaaaagcacgaaattgtcacttgtgtagtggcaaacaaaaaagaaagagaaaataggtttcacttatttaaattataaaagtagttagtatgtgctgattcaaaaaacttaaaagatacagaagtgtataagatagaaacagaactgcgtctgcctccacctcctcccctgcccacaagccagccctccactttcagactccacagaagcaactgttttaatgcgtggtaaacatatttagaagaactttctctgctgtgcataaaagcatgctctaacatcatttggtttcacttcattttattttaaaaccacagtattcaatgacttgcttttctactcactagtatattatgggcaacttttcatagcaatgaataca

SEQ ID NO: 858639 - DNA, 573 bp, Homo sapiens
cttccaatggttctcctcccgcagtgtgccaaataaaatggaaatgcccttatccttgcttaacagaagtctacaacacagcctcaccagcatgcctccaactcacatcctgcagctttaacctcactccacrccagcccccagtctccttgccgttacttgaaagtgccaggagagctcctgccaaagggcctttgcacatgctgttccctctctctgcaatactcttccccgtgtgatcatacggctcatgctcccactcccttcgggtctcagcttgaatgtcacctcctccctatgaccttccctaacctttcgtgtaaaattctacctctcccttcctcagtctcttgcttctcctgctttgttctggagaataccaaccagcaccacctgatttgtaactattcccttgagcacattctatctcagccacgggaatggaagcttcatgcaggcggggacatcatctgttcagttcatgctgtagcccagcaattctgaatgattagattgaaattggatccaaaaatatcacaaatgagataacgtaacttgttgataagtgtgtga

SEQ ID NO: 858640 - DNA, 564 bp, Homo sapiens
tgctcaaagaggctaagtaactggcttttttttttttttaatggagtcttgttctgtcacccaggctggagtgcaagggcacratctggcctcactacaacctccacttccccggttcaaagggattctcccacctcagcctcccaagtagctgggactacaggtgcgcaccattatgcccagctaatttttatattttttgtagagccagaattttgccgtgttggccgggctggtctcgaacttctagcctcaagtgatccacccgccttggtctcgctaatgctgggattacaggtgtgattcaacatgcctggccccacatgctttttaaagcagcttggctgggatttgaatgcatgagtttctgacaacacaggtcaagaaacatctcccaccataccctctttaagaggccaccagcacttctgttagaagttgcagcagagaaaggatcctttaggcacatctcccagatccttgcgaagaggggcaaagggaacttggaggaggccaagctcctgggagaagaactgtatctaaatgcagatgtcctattgttgc

SEQ ID NO: 858641 - DNA, 355 bp, Homo sapiens
acggcaggacagtgggaggtggcctctgccagggctgaacacagtagaggtggccctgtgcgaggctyctctgcccacatcccaccccacctgcagcgtgacctcagcccagagccagcctcacctgggccataagaggagcaccgtgacagatgctacgctgagtcccagcctaacatactgcttgccttccttctataaagtgaaacattatccatacagccactgccctcagtttcgttttggcttaagatttgatgggctctgtccggatccacacgaccgcatggtatgtgtccttcacacactgcgtctgaggcgtgcgtgtttacagtgctggacgttttcatgatca

SEQ ID NO: 858642 - DNA, 355 bp, Homo sapiens
acggcaggacagtgggaggtggcctctgccagggctgaacacagtagaggtggccctgtgcgaggcttcyctgcccacatcccaccccacctgcagcgtgacctcagcccagagccagcctcacctgggccataagaggagcaccgtgacagatgctacgctgagtcccagcctaacatactgcttgccttccttctataaagtgaaacattatccatacagccactgccctcagtttcgttttggcttaagatttgatgggctctgtccggatccacacgaccgcatggtatgtgtccttcacacactgcgtctgaggcgtgcgtgtttacagtgctggacgttttcatgatca

SEQ ID NO: 858643 - DNA, 663 bp, Homo sapiens
ctgagcagaggaatgacaaagacctgaattacatttccaaaggattgctctggctctgttgttgagattagacaacagagggtaggttatgggggaagctgcgggccagcttgcagtccactgtaatgacccagatgagagaggatggtggctgggaccagggtggtagcaacggaggtaaaggcagagtcattagaatttctagtggacagactgcaggagaaaacagaaggtgtggagttaagtattctgccaaaataactggaagggcatccttaggagagatggggtttgacagaaaaaccaggagttcagattttttaaagaattcagttttgatatcctacacgtgagcagcaacctgttcatcaatgtaccctttatgagcctccatctccgccttactgtccctacttcctttcttgtgcttcctgggatcagttcccaaataaacgtctacctctgaatccttgtcttggggtctacttttgggggaatccaaactaagacacaaacagaactcgaagcacaggtaamggctaaccacttcacactaaaacctcccttccaagggcttgtcctggccctttagtgtgaagactaaaccaaggggagttttctacatccctggacctgaagcaaatggtattccacagaccgtat

SEQ ID NO: 858644 - DNA, 591 bp, Homo sapiens
tctcttttgatctagtaatacaatgaacaccattaacagatttccttatgagaaagcacacrtacatccttacattcctggtatgaacacagctggttttatttttcatgtgctgctagattctgtttgataatattttatttatgattcttaccccattatttatgcatggcctacatttttccctatctcgattctttttttttttttttttttgagatggagtctcactttgttgcccaggctggagtgtgcagtggtacaatctcagctcactgcaacctctgaatcccaggatcaagtgattctcctgcctcggcttcctgagtagctgtgattacaggcacctgccaccatgtctggctaatttttgtacttttagtagagacagggtttcatttaccatgttggccaggttggtctcgaactcctgacctctacccacctcagcctcccaaagtactgggattacatgtgtgagctactgttcccagactttctttctttttttttttttgagacagggtatctctctgtcacccaggctggaatacagtggcacaatcacagctcactgaagcctcgctctcc

SEQ ID NO: 858645 - DNA, 561 bp, Homo sapiens
aacaaagcaggggggctccctgcaggaggaggttcaccaggtgaagatggagccgcatgggcaaaggccattccagagacccaggtgtgttcaggaggtggaaacccattgcaggtaaggtragaggaccgggtggggtggtctaggaggagccgacagagggtacaagctgtgaaacagcttgaagcagggcagtgaggaaagggatctagaggaggaagacacgtggacagatggggctggctgggggctgccgcaggatcttatgcaagaggttctaacaccagagcttcaggctctgagctccgcggaatcaaaggtctcagaaagcaacctattaggatctggtggttgacagcctgcagcagggggtgaaagaggagcccagagcaccctccggtccctgtccctgccttggggcataggaggggaggaactcagtctggccacactggctcaggtgagggcgccccaggggaggccgagaggggctgttctcttgtctgctttgctatcagggactgcctcgagatgtctttggagaaagtgttcctggcttgc

SEQ ID NO: 858646 - DNA, 608 bp, Homo sapiens
ttgggagtgaaaaaggctagaagcattgtttcatatatctttattttgttataatttatcctattttttcgaaagagatcttccgcttctttttgttttctgaataatttggtcctaaagtcatgagrtgggctgagcaggatagggttctattctggcatggacagggcagtaccctgagtcagaggaggtgcaggagtttgagcagggtgagggtcgtgctcatggaggggaggcctggtgtagaggtgagagctgggggagattgggaggcatcctttggtgggggcagctgactcagattgtatgtaccccagcaggggcaggtgggtaccccacaggggggctgaacgctgcagctcatgtctattccttatgtctttcagggttcacccagggcccgaaagcttgtgtctggaccattgagaaagacaactggaccgttctatgtggatacgaacatgcaggaggaagtccatgcttcctagcacaggccctagaatcagagtaaacgaggtcagaagtcagctgccccactggctgtgtgccctagacaagccaggggctcctctgtgcctcagttacctcacctggaaaatgggaatcac

SEQ ID NO: 858647 - DNA, 550 bp, Homo sapiens
tctatgcttctggttctgtcagaccctcattccacccccaaggcagaggaccccagttcagtggttctgttcctccagaaggaaccattcgctgtatggactgagccttgcggacagagctgggctggaaaagggcagagacggaaatgcctggtgggattatcatgattgggtgtaaactgtctactctatgaaccaataggaaatcccaaaaaaagaaaacaaaagacactcttttttccttcctctccctgggtgggtcgctttggtgtttgtgagccaagtctgacccctgctgacaccgtctggaagtggacgtcctgtcaccaacgccatcccaacccatgccccacccacattctcttgttgacttcctcactgtgtgcttgaaaaaaaaaacaagcctgggccaggcatggtgactcakgcctgtaatcctggcactttgggaggccaaggcgggcagatcacgaggccaggagatcgacaccaccctggccaacatggtgaaaccccgtctctactacaatacaaaaacgtagccaggcgt

SEQ ID NO: 858648 - DNA, 583 bp, Homo sapiens
atttagattctcattagaagcgtgcaacctagatcccttgagtgctcagctcacaatagggttttcactcctatgagagtctaatgccgccactgatctgasaggagggagagctcaagccataaagctccctcgcttgccgctcacctcctgctgtgtggccccattcctaacgggccacggactggtctgcagcccaggggttggggacttgtcttacatgacagggtgagctaccctgagttaatctgagtgagcttcattctgtcgaccttcttccactccaccacagcgctacaccaacctgaacttcgcttcctgagacctaagattcagccccgtgctcagcagacatcagggatcaccgactctgtgccaggagctgttcttgatgctgggaacgcaggggtggacaaaacagagaaagccctgccctcaggtgtggtcagaagagacagggaaggatttggaagctaaagctcagatccagactgggcttgtttcaactcgttccgtgggcctgatgtagtctagagatgattcttggtgtgggctgtgggagctcctgcggtgtagtttggtg

SEQ ID NO: 858649 - DNA, 613 bp, Homo sapiens
tctaattgcctttgtaatttgttctttagcctatgggctatttaaatgtgtgttataatttccaaatacttgaaagatttttcacatatttttctcttattgattcctagtttaattatcttatggttaaaaaasaaatactacataattcaaaccactttacctttattatgatttgtttaatggcctgggatatggtctatcttggtaagcatgctacatgtacttggaaagaatgtgtatttatttgtcagtagttgggtggagtgtcagtaattgtgaactgggcaagcaggttgatagtggctagtactttgttcctgagtaaggaacatattcttactaacttcctgtctacttgttctatcaattactgagaagaatgtttaattgccaactctaattgctgatttgtctgttccttctttgagatctgtcagcttttcctttatgtatttttggagttctataattaggtacattcacatttagaattgttatatcctcataatacttttcttcctttatcattctgaaatgtccctccctatccctggtaatattccttgttctaaagtctactttgcctgatgttaacatagctatgccagct

SEQ ID NO: 858650 - DNA, 613 bp, Homo sapiens
tctaattgcctttgtaatttgttctttagcctatgggctatttaaatgtgtgttataatttccaaatacttgaaagatttttcacatatttttctcttattgattcctagtttaattatcttatggttaaaaaacaaatactacataattcaaaccactttacctttattatgatttgtttaatggcctgggatatggtctatcttggtaagcatgctacatgtacttggaaagaatgtgtatttatttgtcagtagttgggtggagtgtcagtaattgtgaactgggcaagcaggttgatagtggctagtactttgttcctgagtaaggaacatattcttactaacttcctgtctacttgttctatcaattactgagaagaatgtttaattgccaactctaattgctgatttgtctgttccttctttgagatctgtcagcttttcctttatgtatttttggagttctataattaggtacattcacatttagaattgttatatcctcataatacwtttcttcctttatcattctgaaatgtccctccctatccctggtaatattccttgttctaaagtctactttgcctgatgttaacatagctatgccagct

SEQ ID NO: 858651 - DNA, 581 bp, Homo sapiens
aagatcactagaacctggtaagcgatagctccccttcccctcccayttaaaatgagagttttcaaggagattgggtccagggtggctgtgagcactaaaattctggagcaaggtgaaaaatagaccccacttctccttccatgctaagccactgattcattaaagaaacacagggaaggagcctatactcaaaattagcatctccagtggaaacatggcttgagaattatgcgtccttacggaccagagaccaggcctccaagaattctcccaggaaacaaatgtccagcaggaccatggctgggctgtcacgtccagaagccaccaggccacagcaggggccccggcaggcaggccaccgtcggaagccggcaggccaccgtcggaagccaccagaccacagcaggggccccggcaggcaggccacggtccagaagccaccaggccacagcaggggccccggcagacaggccacggtccagaagccaccaggccacagcaggggccctggcaggcaggccacggtccggaagccaccaggccacaggaggggccccggcaggcaggccacggtcggaagc

SEQ ID NO: 858652 - DNA, 581 bp, Homo sapiens
aagatcactagaacctggtaagcgatagctccccttcccctcccatttaaaatgagagttttcaaggagattgggtccagggtggctgtgagcactaaaattctggagcaaggtgaaaaatagaccccacttctccttccatgctaagccactgattcattaaagaaacacagggaaggagcctatactcaaaattagcatctccagtggaaacatggcttgagaattatgcgtccttacggaccagagaccaggcctccaagaattctcccaggaaacaaatgtccagcaggaccatggctgggctgtcacgtccagaagccaccaggccacagcaggggccccggcaggcaggccaccgtcggaagccggcaggccaccgtcggaagccaccagaccacagcaggggccccggcaggcaggccacggtccagaagccaccaggccacagcaggggccccggcagrcaggccacggtccagaagccaccaggccacagcaggggccctggcaggcaggccacggtccggaagccaccaggccacaggaggggccccggcaggcaggccacggtcggaagc

SEQ ID NO: 858653 - DNA, 581 bp, Homo sapiens
aagatcactagaacctggtaagcgatagctccccttcccctcccatttaaaatgagagttttcaaggagattgggtccagggtggctgtgagcactaaaattctggagcaaggtgaaaaatagaccccacttctccttccatgctaagccactgattcattaaagaaacacagggaaggagcctatactcaaaattagcatctccagtggaaacatggcttgagaattatgcgtccttacggaccagagaccaggcctccaagaattctcccaggaaacaaatgtccagcaggaccatggctgggctgtcacgtccagaagccaccaggccacagcaggggccccggcaggcaggccaccgtcggaagccggcaggccaccgtcggaagccaccagaccacagcaggggccccggcaggcaggccacggtccagaagccaccaggccacagcaggggccccggcagacaggccacggtccagaagccaccaggccacagcaggggccctggcaggcaggccacggtccrgaagccaccaggccacaggaggggccccggcaggcaggccacggtcggaagc

SEQ ID NO: 858654 - DNA, 499 bp, Homo sapiens
attgcatcattgttttccctttgtaattaataagtgtcttgagcctggtgctgtggcacatgcctgtaatcccagcgctttgggaggcggaggtaggaggacggcttgagcccaagagttcaagaccagcctgggcaacagagtgagacccctgtctacaaaaaaatgcaaaaattagccaggtatggtggcatgtgcctatagttctagctactcaagagactgaagtgtgaggattgctttaacctgggaggttgaggctgcagtgagccagagtcttgccactgcattccagcctgggaatagagcaagaacccatctcaaaaaaataaaaaatgaaatgtatcttgtggcaggtactttgagattatgtacatttcctgtttctcatactttcacaaactagtgttagcatccatcratgattcctgtctgaaacggcttactgtggtggttgccgaatggtgatgtttgaaagctgtcgtcatcctctacacgt

SEQ ID NO: 858655 - DNA, 455 bp, Homo sapiens
acacagactccactgggaggatttctccctcataaacacacatgtcaaaatcaatgtatcactcgtcaccctgtgtcctcatcttcggcttggaaaacctggcctcagtccctcgggccaagagtctcctgactgcccaggtggcaggccctccgtcccttgcggttctaaactgctacctgggaaagaatcgttgctgcccacaacttccatcttggctacgcctcaaaacccttcaacaggaagcttcccagcagcagcacagtaacaaagcaaccatgggacagagcctagggtctcgcccagctcaggggcatcctgcagcggtgcagggcctcagtgaaatgcagagaggctaggagtacatggaacctytaaaactgaatggaggtggatgtgctaagcgtgggcggttttctggggagcgggtgcatcagatctaagagtctgagatc

SEQ ID NO: 858656 - DNA, 455 bp, Homo sapiens
acacagactccactgggaggatttctccctcataaacacacatgtcaaaatcaatgtatcactcgtcaccctgtgtcctcatcttcggcttggaaaacctggcctcagtccctcgggccaagagtctcctgactgcccaggtggcaggccctccgtcccttgcggttctaaactgctacctgggaaagaatcgttgctgcccacaacttccatcttggctacgcctcaaaacccttcaacaggaagcttcccagcagcagcacagtaacaaagcaaccatgggacagagcctagggtctcgcccagctcaggggcatcctgcagcggtgcagggcctcagtgaaatgcagagaggctaggagtacatggaacctctaaaactgaatggaggtggatgtgctaagcgtgggcggttttytggggagcgggtgcatcagatctaagagtctgagatc

SEQ ID NO: 858657 - DNA, 495 bp, Homo sapiens
gaaaccccacacaccacacacacatcacacaccacatatccaacacacacmccccacacaccacacatatcaaatatacaccacacccccacacacgctcccagaccagttggagccctgccctcgcaccccagatcccgcacatctgtccctctgttcccttggcctcccaccccttctccaccctcaggagccccatgcagcccacactgggtcctgcccagcccctgggccggaggggatggtccccctgcgccgtccccagcgctgcccaccctgcagaacgtcctcaggcggccgggctccacacctgcgacaggcccgaggccccggctgcaggccccactcggctgcagttcccgtcgaggcagccaatggccttgaggcctctcccaggtgggacggcccctgcgagggctggtgggcacaggggccagccctgccccatggccttgctcagctgtgggaggcgtgccttttctttctctgatctct

SEQ ID NO: 858658 - DNA, 645 bp, Homo sapiens
agccactgcgcccagctatgttaccattttcttgagcacgaaacttgataagatgcaatgygctttaggtgggtcgtggcaaacatgaaaaggcaagcttccgttttagaatccatggctcttcttgaagacttctctaaagtgcatgatccctaacaagcgcggctccgtcctgtgtctgctctccatcctctgtaccgccgccccttgccttatgtgccttacatgacgccttcttgttcttggttcgttgtgcgacaggatctatgtgttttcccccctctccgtctgctctttgatcagtacgccaagtgccggtgcttgccagacttcccagcccttaggaactgcatttcctgatgctgctgctttcactcctcctgctcgaaaatggagacgaataacacaactcgcaggataaaaacagaattgggagttttcagactgcaaacctttctgaagagaaagttctaatatttcacgggtgtgttgtttcttaactatcttctgtgcgcatgcgcagagcccaccttgcagagccgtgtctgtatggggccgcggtctcactaggcagtccgtgccccagtactggccttccaggtagagtggttttagatcagagttttgtaacccacgtcttggtca

SEQ ID NO: 858659 - DNA, 564 bp, Homo sapiens
gagtcctcggactctcactgcagttggtgtgctgagtatcacagtgtaggggcctgtccacttcggtggtagctttttgtgagggtcagkttggccgataaacacgtctgtgcctgcaagacagttatgatgttgagaggataaggaggtgtcggcagggagaggcatggcctcactcactgcttcacgagtgaaagaccgtgtctggattaaggaggggaggtaattcctgagtggctcagagtctgttaagggtggaggctctaagacaaaagttcggccatacatgatctcaaagggactataaaaaaaggctgcctttggtgttgccagagtctcatgagggcgaaagggagacttctcgtacacgactggcagatttctagagtgagcttggtgagttgggctttaaggacagagttgaccttttcaacttagcctgaagattgaggccggtagggtgtgtggagaacccattttattcccaaggatgtagaggcgccttgggtgatttggctgataaaggcaggcccgttatcggaccggatggatgttgggagtctg

SEQ ID NO: 858660 - DNA, 532 bp, Homo sapiens
cgaaaccaggcctgggcctgcctgacctaagcctggtagttaaaattcgacccctgacctaggaactgatgttatctatagattccagacattgtgtggaaggacattgtgaaacctcccgttctgttctktttcactctgaccaccggtgctcgcagcccccgtcacataccccctggcttgctcaatcgatcacgaccctctcacacggacccccttagagttgtgagcccttaaaagggacagaagttgagcactgaggagctcggattttaagacgctagcctgcccatgctcccagctgattacagccactcccttcactatcttggtgtctgaggggttttgtccacagctcatcctgctaaaacagctcactacaatctcaaactcctgagctccagtgattctcctgcctgtgaaaggaaaacaaatcttgcccctgcccccaccccaaatcactaagctaaagggaaaagtgaagctggaaactgcttagggccaacctgcctcccattctattcaaagtcac

SEQ ID NO: 858661 - DNA, 392 bp, Homo sapiens
ccgggtgtggcggtgcatgccagtagtcccagctactcrggagactgaagcaggagaattgcttgatcccgggaggcggaggttgtggtgggccgagatcgcactattgcacttcagcctgggcaacaagagtgaaactgtctcacacacacacaaaaagttataggtaggacaatttccaggtatggttgttttgcaatcagggcatctcagcgggtccaccaaataggaggtttgtctctgtgcctggatggtttcattactcattcatgagacaaagagcgggaaggtagagggtctgggtgtggctttgtcacaggtaaacactggtgccggatgggcacggtggctcaagcctataatcttagcactttggaaggtggaggcaggag

SEQ ID NO: 858662 - DNA, 404 bp, Homo sapiens; identical to SEQ ID NO: 857412

SEQ ID NO: 858663 - DNA, 594 bp, Homo sapiens
tgtaggtccaaggctacgcgccctggcagacttccatgagctgcgacyaccagccaccaagacggtgtgcccagccaaccctggtccccagctagctctgacccctgccctgccagcatcaccctgagattcttctgcaaattacagtcttctcagactgtctgtcgaccctggggtctcaatgctgggttctcaacaggcagaaccacagggctgcattgcgggttgtctttgaaaaatgacctgccaatagaaagttggggacgaaagccctccaacagtctgtccaagcgacccccaagagaaaccacagtggggtgctggagggtccccaacgaggcacccccccccctccgaccaccctgctgttacttccacccacatcgaagtcctagggtctcttctaatttcctacttggccgtgcctgaaatgccacttccaaaacccgcattcctatggttgcagaggccacaagggagggccctcgtggtattttttcaggacccaaaaccacgaagatgccaagaatcacaactttcacacaaaggacacactttctttgatggaatcttcagatcacacatcacaaaggc

SEQ ID NO: 858664 - DNA, 668 bp, Homo sapiens
agacatcctcaattcccaatttcacttattattaataacagctatcattattaaagaaattattcagctaaaccatgtgaaattgtcattttcattggtctaaagtggataaacactggcaatttcatgtggttcaacctaagcctatcaccagtgcctgtgctgggtactctatgtaggtcaacgaatttaattctcgtaattgctctgaagtgatgtcagcgacaccattcttcaggtggtcaaggagcttgccccaaacccacagctgacatgcaggttggcactccaccaccccatccctcgacctccacttctcaaccacatgcagggggctctgttcacctctttatttgcatttggtgtcttcacattttaagaaaaccaaagcaagtaagttggtgctggcaggatatgtttttaagaaaatgaagatgttacctccaattatcacgccttctttatttccctttattctgcatatcaataaatctggaattgacttaggacacttagtgactgtattactacagaaacagtcaaaatacttcaactggaagtacaaaatacttcagctaaaagtacaaaactkcagctcaaagtggcttaaacgtaatcacatttattatttcttaaaacgagaagtccagggctggatccaatgtctc

SEQ ID NO: 858665 - DNA, 583 bp, Homo sapiens; identical to SEQ ID NO: 857413

SEQ ID NO: 858666 - DNA, 584 bp, Homo sapiens; identical to SEQ ID NO: 857414

SEQ ID NO: 858667 - DNA, 577 bp, Homo sapiens; identical to SEQ ID NO: 857415

SEQ ID NO: 858668 - DNA, 573 bp, Homo sapiens
gagttggtgcacaccctatagccgattccagctstgtggtgccgtcctgctgttatgtgattatttacaggagagttcacttggttcacatcaggggtcactcatgatgggcccttctctgggtctgtcaaatgctaatctcatgtgcagaccatcacagtgtccttttccggccctaaagcccgctgtgcttctcatatccatttctttcccccttgaccatcacagtgtcacacaaagtcgttttctggccctaaagcccactgtgcttctcctatcctttcctttcccccttgtcctaaccttctgacaacacctgaccattttctttttttggagagagggtctgctctgactcctagactggagtgcagaggcatgatcttggctcactgaaacctctgcctcctggactcaagcaatcctcctgccttagcctttctcaaatagctaggtctacgctacaggggtgtgccaccacacatggttaatttttgggttttttttgttttgttttgttttgtttgagatggggccccactatattgtccaacctggtcttgaactcctggg

SEQ ID NO: 858669 - DNA, 562 bp, Homo sapiens
taggcatgcatccccatgcctggctaatttttgtatttttagtagagacgaggtttcaccatgttggccaggctggtctcaaaactcctgacctcaggtgattcaccccccttggcttcccaaagtgctgggattataggtgtgagccaccgtgcctgacaattaactttcttttcttcagtgccgtggcctttgtacagcaggcaggaagaacctgttgggcggtcccaccttggcctcccaaagtgctgggattacaggcatgagccatcacgcccaaccatgctgacttttacctcccattctttgatgccagagtttttcatttactgaaggcaaggggacaagaccaaataccttgtctccccacttagagaatgagaaagaaaaaaattatgaatatttcttatctgaggaaaatgaaccctttttttttttgagatggagtctcgctcttgtcaccaggctggagtgcagtggygcgatcttggctcactgcaagctcctcctcctgggttgacaccattcttctgcttcagcctcccaagtagctgagactaca

SEQ ID NO: 858670 - DNA, 625 bp, Homo sapiens
actttgggatctgggccaagtctccctgcctgtctgggccttggttccctcctctgtaagygtgtggaggacaaggtgacctctaagacctgtccagttctggggtcccacccctgaggactttgcagcctgggctggcagccctgaatgatacgggggacacctgcaggggccgcacccctgcatagactgcagttaattctgggttaagcaaagcctgtgtttcccacacgggcccagcttctgatgtctggaaagatgaggacccgcacttgcttccatcagcagcatgtcctgtgcacacgaaggttgcaccgtcctaaaaacaccactgcgatgacgatctgagcttttaagtgtctcctgctgtctgcagcacgttgagcagaacaccctccaaattccaccttatttggaataagggtctttgcaggtgtaattaattgagagtctgtgatcatcctggttttagggtgggccctaaatccaatgactggtgtccttatgagaagaggagaggccacagagggacacatggagaaggccatggacggcagaggcaggggtcaaggtgacacagccacagccgagggacgcctagagtcacccgaagcggggaggggca

SEQ ID NO: 858671 - DNA, 543 bp, Homo sapiens
ttcttcagtttttacttctattttccctttaagaggaatatctaagaagataatgtttaaatttcagtgtagaaaaccctgttttctgattttgttactaatttctagggaatattgtttgtattttaattattacttggtattggttgaaaatttctttgctgcttaatatatgggtgctgtttatgaatgtttccatgggatactgaaaaaagaaaggtgtgttctctcttaccaagtacagaattgcctctttctccttatgcactgcttctttaattttgttgtttatatgtctgacagccttgtgtgcttatttcttgcccgcgtgttctgtctcgggttggaagggacacgcacgtctcctgccttcacatgctgagatgggtttctgtagcatccccagaatttctgctgaatkaagtgtgtcgggttatttggtacgaacatatcgaatgactatatctgctctaagaattttagttttagcgttatattcctgatgtctcatttatttcatttggcctgatattttattgtcta

SEQ ID NO: 858672 - DNA, 560 bp, Homo sapiens
cagatcagcgtgggcagcagcactctggagggktcagtgcctcccgcctggggacagaggcctctgcttctcccgacccgtaggctgcagtgatccatgcagttcactgctctgtctgaaggtttgacttaggttttaagtgtttttactcagagcaagctgatacatgcgcattttagtaatcgtgataattgttccaacagatttcacgtctgaaactacatcttgtttagaaatcactttccatgtaggagttttccttctgggatgcatttcaagctggggcactcgctactggagacgtcatcggatttactgaggagggtgtgtttgcgtgtgtttggctacctacggatactacagatgaggcgctgtctaattttgtttcacaatgagctgaaatttatccccacaccaatcctctttttgccctacggagtttgtgccttggccccaccctaggtggctccggcaggttcctcagctgtgtgtacccaccacccccaccttgtctgcacgtgactgtgactgactttaggaggccacacaattcaggaagc

SEQ ID NO: 858673 - DNA, 578 bp, Homo sapiens
tttatttttatttttatttttatttttgatttttgacacggtctcgctcttgtcacccaggctagagtacaggagtgcaatcatggctcactgcagcctccaacccctgggctcaagtgatcctcccacatcagcctcctgagtagctgggactacaggcatgtgccaccgcaccctgttaattttattttttgtagaaacagggtcttggtatattgtccaagcttgtcttgaactcctggactcaagcaatcttcccaactcagcctcccaaagtgctgagataacaggcgggagccaccatgcaggcctaaagttggtttttaggagccatacgctgaggtttccgtggtggccaccgtaagtccatgtctcctctccacccagggccttcaccgccctgtgctactctgcagacggccacagcatcctggcgggaggcatgtccaagttcgtgtgcatctaccacgtccgtgagcagattctcatgaagaggttcgagatctcttgcaacctgtctytggacgccatggaggtgagccgccagcgcggggccggatggatgttgcttccaatgc

SEQ ID NO: 858674 - DNA, 554 bp, Homo sapiens
ggtgctggtaggccctgcccgatggcttcctgcccggggtcctgtgtacaaggctctgccttcactgtccccactggtgcctgcccttccccctcagcacagccctcggctcaggtcccactcacatgctggctcctgcaggacctcagaatgagagtgaggaagccctggtagcctctaagcaggggtgtggctgctgggttcacctgtccacgccccatcggggcagaagcccactgtcccctaaatgtttctgggggaaagtgtccttggcattttcacaagggagtagacggccatcctcgctgtgagccccagcctttgtgatggtggcagcaatgccagcatgtagacctcagtccatccccctccgcagcctccgcacctgccctgctccacagcttccacacccaccctgtctgcagctagctctgcaggaagagtccctggggcactgcagggctctctccccgtccttgttctagacagggctgaggcttgtctggtgttggggtcaaagagcargggtaggagacgagggccaggcggccagg

SEQ ID NO: 858675 - DNA, 420 bp, Homo sapiens
ggagtcaccagcatccctcagcctcgagcacgagccctcagccaccaccggaaggaagacagggttcccggaactctattcggaggctctgcgcaggcgcggcccccgcccaccggcgmactcactggatagggctgagacgggggcgggtcttggctccgcccagaaggctgcgcaggcgcagtcccgacgagcaacgcgtttgtagaggggtgggtgcgcacgctctgtccctgcgtgaccttccgaccccgctgtcctcaccgcaatggcggctgtgagggtcctggtggcctcgaggctcgctgcggcatctgcattcacgtccctgtcccccggcggtcggacgccttcccagcgcgcagcccttcacctctccgtgccgcgccccgcggccagggtcgcgctggtgagtggacg

SEQ ID NO: 858676 - DNA, 624 bp, Homo sapiens
acgcggacagcattctgcaaggatccgccgtggacatctgggatggtgactggctccatctgggggcgggagggtcggccgtgggtcaggggacctggacggtaagcgccccccacaggcccactggcctcagccgccaatggccctgagtggtcaatggactttctagcccgactgtgttccctacgtccttttttcttatgaatcacctttggagaaaaatgctgatgaattattttaaactgacagaacagactctgtggcaataagatatcaaattacaaacaggacctcaggccgcgccaggcaagggtcgagccgagccgcgtgccctacactgagaggacggactctgccctcacgccacagctgctgctttttctgcagcggctaaacacgcactggccccgcgatgaggatgagcaaggttcaaatgactgcagctcatccacctgcagatgccaactgaccacgttccacagccatgaccacagctctgactgggcaggagactgacttcaggaacctcctcctgataagggaccccgaccacagactggctccggcyggtttacagaggttgtgcgcttgagggcctgtgtcctgagaagacctctgaggttt

SEQ ID NO: 858677 - DNA, 444 bp, Homo sapiens; identical to SEQ ID NO: 857425

SEQ ID NO: 858678 - DNA, 583 bp, Homo sapiens; identical to SEQ ID NO: 857426

SEQ ID NO: 858679 - DNA, 583 bp, Homo sapiens
acagaggatccccagccctaaatccacaagaaaaacacacatagcctgataagaaatgggctaggaatgtgaacaggaaactttcagtgtggacggccatgcatttaggccatagtgggttcccagcagccrtcagtgcggagggcagggagctgagagcagatcaggctgagccggggtcacgcggggtcccccagccactgagggccctgggcagcaaccacgcagaccccgccccccaggctccacctcactttctgtggcatttctgtgcctgttctgaccacagccgtggcagcaccatgtccatcaggctgcggccggcctggctgtggggtgactgcagcatcccaggggcgggcattctcatcagcgttttggtctctgcagctggcctggaggagtttgtctcacagtctgaggactgactgctctgcacccacccagggtggcggagccccatgcgctgcctgatcttaccattgtccccgctgacggcctttcccacaggacatcacaggcagctcatgctccccgcgtggaccaagccttagagagatgagagtgtcgctgactgtgtgcc

SEQ ID NO: 858680 - DNA, 567 bp, Homo sapiens
tgggccacaggaagcatttctctaaaggtgagcagcttcctctgcaggtgacacggcctccacccaaacccagaggctctggctctcccactgcggcttgccgcrgccccacacttgcctgctcccacactgacacctccaacaccacaggggctgctgggtcacgtggcccagatggcagggctgctcagacagtcattttctgctcctggccgcctcgaagctggcagcctccatgtcagccaagccgtgggtcagagcagtgcccccaggaattaaatatgttgccttcagaacccaaaaaggcctgtcaggccctgtgcttcctcctttgaagtaggggatgcaagatgtagcaatttctcttttactttagaggatgtcctggtatgaacctgatcactggtgccctaaaaacttccatgaagttaggtccctgaatcctcggagttcacctcccacccacagatgcaaatgtgtctcataaggcctctagctcatgaccctcctgttcctcctcctgcccattatgtcgtcactgtaatggatcagtgtggtgtccggtgc

SEQ ID NO: 858681 - DNA, 485 bp, Homo sapiens
ctccccaacccggccaggaccccttggcctcactggaacgcacagacggcacccagcaggtaggcatgttctcaggggtggccagcaagggctctctcagggtacagctgggagaagcggccgagggcccagatggggaagatgttcctgtagctcgtgtaggagatggcacaggacttgttgaagaccccagcaatgttttcctaaaagaacacagagaaataaacacaaaggcttcaccagtcagctgagggctagtccctgaactggagccctggctgttggcttggctggcttgtgggtgagtcagcctggaaagggctaattaagcaagagcataggaaagcaagtagtccatcccgcrtcagtcatggcaccatcagcccagctcagactccccgccctgcagcaaaccctaagccagggtcaccagcccctcacaaccacatcagcttccaccaactcagcctcatcccaggggaggg

SEQ ID NO: 858682 - DNA, 485 bp, Homo sapiens
ctccccaacccggccaggaccccttggcctcactggaacgcacagacggcacccagcaggtaggcatgttctcaggggtggccagcaagggctctctcagggtacagctgggagaagcggccgagggcccagatggggaagatgttcctgtagctcgtgtaggagatggcacaggacttgttgaagaccccagcaatgttttcctaaaagaacacagagaaataaacacaaaggcttcaccagtcagctgagggctagtccctgaactggagccctggctgttggcttggctggcttgtgggtgagtcagcctggaaagggctaattaagcaagagcataggaaagcaagtagtccatcccgcatcagtcatggcaccatcagcccagctcagactccccgccctgcagcaraccctaagccagggtcaccagcccctcacaaccacatcagcttccaccaactcagcctcatcccaggggaggg

SEQ ID NO: 858683 - DNA, 572 bp, Homo sapiens; identical to SEQ ID NO: 858017

SEQ ID NO: 858684 - DNA, 615 bp, Homo sapiens
cgtgctgatgccacgaccgagggaacgggtctccctgtcggcgtgaactgaccyggccaggcgtccactgccactcggactgtctcccaggcacgtggcgcccacacgggcagaacacgccctccacacacgcggcttcgggcagaacacgaggcgccctccacacacgcggcttcggggcttgtcatgaaaaaagctgaatgctgggggtgcagctttcaccaacagaatcccgtttggaagggacgcggtgagacatgatccaccctaagttgtgatcctgggtgagccgccgtccacaccctgctgagggtcccttcacccactttattctccagaaaaccctgcccatcagggctgagtcccacgccttccctctccgtccaggcctggctttgacctctggggtcgtgtggggcacaggggacaccctatccaggcagaggccctacggctatctggaggaagtggtgggagctgggcttctgcctggaggatgcacccagaggggtcacagtccacacagagacacacgggtgccttccagatggctgagccagtccagcccagaagggcctgggggttgggggctgcacctggcctgtccccaccagc

SEQ ID NO: 858685 - DNA, 609 bp, Homo sapiens
tattggtggaaaacgtcgatgagggccaccatggccttctccagctcagacatcctaggggctcgcaaaggaaagttgccttctcatctatacctcatcmtaaaacatttcatatgttatcaatacagacctcaacccagacaagggggatggaatggccttggcactcttttcaagctcagagcagcaggcatggcctggaggggcattctgggaatttgcacttttatcataatccttccaccggcctcttagacagctgtgggcctgccttctctgtccgtgtgggccacggggatatattcccatgccctctgaattctggctgggttgggccaacagggaaactggcaaaaatacagaggcagagcagcaagggaattcagggattaatttcccctgaattaatccccacagggtccctctctgttcctgcaaggctccaagatgaggtggtagagtgcaggtgagcaaaccatcaactgcaagctgttaaaatcaatctgaaagtgagacagtgactaggagcaaaataagaagacaaaaaatcaatagcattcctatattctatcagtaaagaagtagaaaatacagtgcaaaatatcctat

SEQ ID NO: 858686 - DNA, 632 bp, Homo sapiens
cctagacacgtcacaaccccaggctctcagcaccgtccgtcgtctgctgggactgggcttagtcgtgtgtttctgtctgggagactgtactgaagrcagaattcctagagaatcacccacatgtcactcagaagtattcttctcaggcttcagaaatttgctttagccaatgttgttttaaaagatgggcgttttaccccgaattgaagtgacttcattttcggtgggttttgactgaatcaccatcaggagatgcacgtgtcatgcaccagcctctgaggtgcgggggtgtccccgtgtctgtcctgtttgcatccttagctctccggaaggaagtggaggatctgaccaaagaacagtcggagaccaggaagcaggctgagaaggaccgctcagccctgctctcccagatgaagattttggagtctgagttagaagaacagctgtctcagcatcgcgggtgtgccaagcaggcggaggccgtcactgccctggaacagcaggtggcatctctggacaagcatttgcgcaaccagcggcaattcatggatgtaagaattctgaataatacatttttttgcatcactaaaagttgccgttacagcatgaacttctttccagatcgttacgta

SEQ ID NO: 858687 - DNA, 613 bp, Homo sapiens
tccctagggcagcaccccagggctgtgagaggcgtgaagctattgggctgttggtggcttgctcttctcaaggaggtgacttgagtaagtggctactcactgtttctcttcccactggcatgatgggaaaaaaatcttaagaacaaatttttttttaaatttttgtgagtacatagtaggtgtatattaaaaaatctatttttaaatcttttattttaatgtagccgtgcttttgaagcaaaaaagaaaaccaaaaccaacctgtttatagtagagatgatattcaaaattgcagagcattcataacttcacagatgcccttgaaagaccttgtgtagaatcgtgtgtgtggtgcccacacaacacgtgctcagtgaatgaacacagcgtgggagaattagtgtgtgtggtgcccacgcggcgcgtgctcggtgaatgaacacagcgtgggagaatcgtgtgtgtgtggtgcccacgcggcgcatgctcggtgaatgaacacagcgtgggagaattgtgtgtgtggtgcccacgcagcgcgtgctcggtgaatgaacacagcktgggagaattgtgtgtgtgtggtgcccacgcggcgcgtgctcggtgaatg

SEQ ID NO: 858688 - DNA, 553 bp, Homo sapiens
tgaatttgatgatgcttttgcgtttcttggttaatcctggccatamctttgtacataatctttgtacagttttatagttactgaactctcctaaaactaacctatgtgagtaagtaatctgtttcctgttagggcctttgctggtataccttcttttaatttttttttaaagagtcagtgtctcattatgtcacccaagctggagtgcagtgttacgatcatagttcactacagcctcaaactgggctcaagtgatcctcctacctcgagctcccacatagctgggactataggtgtgtgacatcatgcccagctaattttgtgtgtgtttgtgtgtgtgttttgtagagacagggtcttcctgtgttgtccagggtaatctccaacacctggcctcaatagatcctcccaccttggtctctcaacactctgggattacaggcataagcacatctcttaacttcagttttcatgtctatgcatgcatgctttcttctcacagaaaataagaggcaaaattcccccctgacctaacatggaatctaaagaacat

SEQ ID NO: 858689 - DNA, 597 bp, Homo sapiens
tatagtaaattgttcaggccaggcaccatggatcacacctgtaaccctaacactttgcgaaactgaggcaggaagattgcttgaggccaggagttccagaccagtttgggtaatataacatgaccccatctctacaaaaaaataaaagtaaactagccagacatgtggcatgcacctgtaatcccagctacatgggtggctgggtggctgaggtgggaggataccttgagcccaagagtctgaggctgaagtgagttgtgatcacactatagcctgggcaacacagcaagaccctgtctaaaaaaaaaattcaaaggctcttgtgtctgccttaaattaaaataaatttattaaaggcaatgtccatttctcaaagtggttacagaatggaggtaggtgaaacaagataatttgagaacaatacctcaaaatctggcctacataggactaacaaacaatagttgctttcctcccttacttagtcctayatacactgagaagtactctgctgagtggaaaagttcctctcctgctcacaaaatataattcaattcatgtattagcatgacttcaccaatgggggaagatacaatcaaa

SEQ ID NO: 858690 - DNA, 607 bp, Homo sapiens
ttccaaaactccgggcaatttcttgcaaaacagcaaccccactggttgggtcaatagctccaaatacccaggagtcccggtgacctcccagaataacatacctgtctggaaaataatacgttcaaaaaacctacaactttgaatacattataaatatttgtaatttatgtttttaaaataaacatcctcttgcttgagtttcctctatagaagacaacactataaagtaaaatcttcttttagatttgtacagttttcctcaaaatttagtagtttcaaatcagccaaaaaaccccacttcaattgttgactacaatttatctttacttaccctttaatttttgtaaaaacaaaatgttttaaaaaattatgtgactcaccaggttccacagatcctctgatagttccaactacattgtaaatccttgtaattttattgatgttataaacatgcattctaaccttcctagaattttaaaaggaataaattacttagtacagcaaattatgttttttacagtgttttattataaaaaactatyttcataatagtgttttattatgaaaagctgtgcaatagcataatggattctcatatctctaccac

SEQ ID NO: 858691 - DNA, 462 bp, Homo sapiens
agttcagaaatactgatcctcatacctaaagtaatgctccttttaacaaatgacartttaggtttgctgaattaccgatagattgtatttttaaaaatacaatagatagattgaattatcgatagattgtatttttgaattacattttttaaaaaaatgagtttttgtgttatttaaaacataaaattggaagttttacatatgtgaaatgatttctacaatcaaaataattaacatacccattatctcaaaaaagcttcctctcgtctctttatattcccaccctcccaactcttccttcccacttcatccaatccctaggcaaccattcatcttggtttctgctgtcagcatgattattttgagatctgtccatgttggcatctttgtcaatagtttttctttcttttgctgagtagtattcccttgaatggctatagcacagtttattcctttacttgt

SEQ ID NO: 858692 - DNA, 669 bp, Homo sapiens
aagtaaaaggcatacaggttagaaagaaaaaagaaatgaaatgttccctttttgaagatgacattattgtctacatagaaaatttcaatgaatctacaagaaacaaaccaaamcaaacaaacaaaccaaactctttcccaccttccagccaagtccagtggctcacatttgtaatcccagaactctgggaggcctaggtgggaggatcgcttaactccaggagtttgaaaccagcctgggaaatatggcaagactctgtctcagaaaacccccccaaaaccaaaacaaacaaacaaacaaacaaaaccttcttagagttcagcaaggccacaggatgcaacatcaatacacaaacacaacagtatttctatatgctaacaacagagtatgtggaaattgaaattaaaacacaatataatttgcatttgctccaaagaaaatgaaagatgcaaatctaacaaagcatgtaaagcatctgcttaatgcaaattacaaaatgctgataaaagaaagatgatctacaattggaaacataccacgttcatgtaatagaagactggacatagcaaaaatgtcaagaattcccaaatagctctataggattaatgtaattcctatcaaagctccaccaatagttttttagacaaatatgtgtttattatatatttt

SEQ ID NO: 858693 - DNA, 519 bp, Homo sapiens
taatgatacattataagaaaaggttgaattgcttggtataccgtagactgaggtatgcagctgtgattgccctccattttcaaaataaatccagcataaggactattgttaaaaaaaaaaaaaaaaaggaaaagtttgtgaagctgtcatggcagctatgcctgcaaatgtgaaaactttgttcttttgcaaattacctttttttcttgtattgaaaatgtagcttttatgtgggtgtaggattgttataagaaaggcatatctatagactctaattaatgtgatttgagaaaaagcaaagtcattctatgataatttaaagcaaaaggaaggtaaaggtggagaatagtatgcctgcaaaagatggtttgatacatttagaaagaagtttaacttaaagtgtcgagataagaggaggagcagcttctgctcaccaagaggcagtagacaagtcttcagatgacrttaagaaaattactgaggagaaagcatatctgcctgaaaaggttttttaatgca

SEQ ID NO: 858694 - DNA, 512 bp, Homo sapiens
acaaagggtatttatgagtaaggaagagatgtaagcactgagatttaaggcaggaagggataggcgaattctactgttttgtgcaaatgcacttgggtttatgataaggactgcccttatctatgaagctgytaacccccaagccttgaatggaaaagataaacaccagctttcagtcttttgtttgtacaacaagaaggcctggacaacagaaacctatgttctagattgattccacccatactttgttcctgcagtcatgaaataccttgccaggaagggattgccttttaaaattcttttggtattggaagacacctctggctacccagaaaccctgagatcaagtagtctacttacccccaaacacatctctctaatttgccccctagatcaaggggtcataataagaattttaaggctcactgcactctatggaaaggactgtcaatactacggaagagaaccctgacagaacttcatgaaattctgaaaaaaattacattattgaa

SEQ ID NO: 858695 - DNA, 533 bp, Homo sapiens
tcttgaccacctccccaatgtttcctcactatgtagagaaacctctggtccgagttggtgtgtttcttrattttgaaagtggaagtgtgagttttttgaatgtcaccaagaattccctcatatggaattacccagctggctccttaaattttcctgtcaggtctttcttttacactggccacagatgacaaggattaagaaacctgactgttcgggaactccatatacaggggagccagcccttcactgttgatacaaagaaatcatacttttcaggcttttttctactttagtgtcacttcattttattgctattaagtagaagatatgtaaaatgcaaaacatttttgtacattttcttacaattaaaataatctcttatggcccattacctaaaatatgtattgtgattttcaagtgtttgtgaatttattggatggaattctggaaatatgtgggtgtgtgattcccacttaattatcccatgcaggaacaaaatttgcacatcatggacagacaggattttgtacaat

SEQ ID NO: 858696 - DNA, 657 bp, Homo sapiens
ataagtttaactttttaagaaaatgcctaagataagtgaaaagtggttgcatcattttgcatttctacctcaaaataaggaaatcagtattccaaagagatatgtgcactctgatatttaccacagcaatattcacaatagccaagataccaaatcaacctgatgatcaacttccatcaacaaatattatggtgtatatacaggatggattattactcagcataaaaaagaaagaaatcctatcatttgtagcaaaatgaatggaactaaatgtcattatattaagtgaaataagccaggcacagaaagacacatattgcatgatctaactcatatgtgggagctaaaaaaaaattgatctcatggagacagagaatagaatgatggttaccagaaactagaagggtagtgaggagggcagacaatactgaggggttggttcaatgggtacaaaaatacagttagatagaaggaataagatctagtattacatagcacaatagggcaactatagttaacaataatttattgtatatttcaaaataactagagtggatttgaaatgttccaaactcaaagaaatgataaatgtttgaggtgatagatatcctaactacwctgatttgatcattacttattgtatgcttgtatcaagat

SEQ ID NO: 858697 - DNA, 514 bp, Homo sapiens
cttattaaaaatcagatttatccctaaaatacttgtggatttaattggttgtgagattttatttctgaagtttttctgtgataatttaaaggatgaaatactggagctgttgtagaagaaaaacttctgattttaatacattcttagcccaagagggctgtacaaaagggaaacacatgtggactaaaaaagatgctgtaagtaactcttccaaaaatagcacactgggtttatattcatctgagtcattttttaaagatttgaaattattctgtctttagattttaaaaaaaagttttcttttttgcaccatagagctttgatgtgactacgaaataaaatgaatctgagtcaagctgccagtgtactgccttttgagcaaaatagccattgtctgttttgatgcaagcatgtgaggttttgtgaaatacttaagcctgacaaaattgaagaatttttgtcttctttaattaatamaattagctccatggcctcttcctactttttgtttttt

SEQ ID NO: 858698 - DNA, 605 bp, Homo sapiens; identical to SEQ ID NO: 819310

SEQ ID NO: 858699 - DNA, 612 bp, Homo sapiens
tataaacctggagacccatataagaacacccactgtaacactattgtgattgtgaaaaattgaagacctcaagaacgagaagacaagacacagactgggagaaagtatttgcaaaagacatrttagtaaggactgttattcaaaatatacaaataactcctaaaactcaataagaaagcaaacagcccaattgaaaaatggacaaaacaacctgaacagatacctcaccaaagaaggcatacagtggtaaataagtacatgagaagagatgctcaacattatgtcattagagaattacaaattaaaacaacgagataccactacacatctattagaatggcaaaaattcaagacgctttcaacaccaaatgctggcaatgagctctcattcattgatggtgggagtacaaaacggtacagccaccttggaagataatttagcggtttcttacaaaactaatcatactccttggtatttacccaaatgagttaaaaatgtgtctaccccaaaacctgcacgtggatatttgtagcagctttgtccataagtgccaaaacttgtaagccaccaagatttctctcagtaggtgaatgggtaaataaactgctaca

SEQ ID NO: 858700 - DNA, 583 bp, Homo sapiens
acactctgtatctagctgctctggtgaggacgtggagaacctttatgtctagctcaaggtttgtaaacacaccaatcagcaccctgtgtttagctcaaggtttgtgagtgcaccaatcgacactctagctgctctggtgaggacgtggagaacctttatgtctagctcaaggattgtaaatacaccaatcggcactctgtatctagctcaaggtttgtaaacacaccaatcagcaccctgtgtttagctcaaggtttgtgagtgcaccaatcgacactctgtatctagctgctctggtggggccttggagaacctgtgtgtggaaactctgtatctaactaatctgatggggacgtggagaacctttgtatctagctcagggattataaacgcaccaatcagcaccctgacaaaacaggccactcggctctaccaatcagcaggatgtgggtggggccagataaaagaataaaagcaggctgcccaagccagcattagcaacccgcccgggtcctcttccatgctgtggaagcrttgttctttcgctctttgcaataaatcttgctactgctcactctttggg

SEQ ID NO: 858701 - DNA, 610 bp, Homo sapiens; identical to SEQ ID NO: 817063

SEQ ID NO: 858702 - DNA, 529 bp, Homo sapiens
attagcataatattatgccctacctcataggcaataatggagcttaaagaaaggatactgtgtgacaaatgctttttatacactatggcacctcatgaaggtttgttacatggtagctcttaggatttttctttgtttctcttactctactaggccatctcagacacttctagactctcacggcatcaagaagagacaaacatttgtttggccatcttttcacattgccagtgtctgtgtccttggtacccactaggtagtcacttacaggcaggttcatcctttctattctttgcatggtaaaatgagtgatagagttcttgagttggatgtatgaatctaacgctgatggaatgaatgactttcagtttcaaatacatagtaggagctcaataaatatttttgtatawaaatcagtaaatagaaagtggtatatttgcctcttattccataccttaatataattttacattatgtctttttatctcacaagcttagcacatagtaggactttaattaatgtagatgg

SEQ ID NO: 858703 - DNA, 636 bp, Homo sapiens
aagtagaattatgcataagtgtgatgcatttgttgtctatttttctccactaaagaagattggcaacattcatgtcacacataaaatggtttaagagtctctaatgatatacaaggtargatttcctaaggttgaaaaaaaatacttccaggcttttaaaacaatgcataaatactgttggttttagatttcttattgtattggtccatgtcagttctcccctctttatgtggctttgagtgcatctcacttcctccaccaccttttgcaacataataatagttaaaggatttcatacaatccctggcatctgtaaaaaacatttctttctttctttctctcatcagctctaaaagctcaaacatttgcccactttcacacatctcccccagggatgctgcaagaaacaggaggatgagatgattttgtcttttgtttcctaagtgtggcaaaaccctttctggcaaagaaaatgggtggaaagataaatgaaatgccaggaaaccttgctgcttagctcagctcatctgttgagagagacagagacaacatatacattcacatgctctgggcctttgctgaggtttacataaacctttatacagctattccattgcttagtgaaggctattagtg

SEQ ID NO: 858704 - DNA, 500 bp, Homo sapiens
cctcacctttgatgtgttaaaatctaggaaggccatgagggtttcacgtgggaaggcaaatggcctggctagaaggaagggccactgytcagattctaccactgagaggcgtgggccctggtgagggttggactcgccctcctctgtgtctcagcttcatattgctacaataggaactcccgtggcctctccctatacaggttctataggtaacatggacaggtatgattacctgtttaatgaaaccttcacaagaaacagaaaaaaaatgagttaaatatatcatagagataattcaattactgccattttctatctttctttgtttctcattgttctctttattgcttgttgtggaattaatttttttctggcatttgtttttacaaagtaaggactaggatagatcatgtactagaaactgaatattgaaacttgaaagatacatgagtttctcgaagtccaaaacatatggagccagaaaatttgttccattaagg

SEQ ID NO: 858705 - DNA, 623 bp, Homo sapiens
aaaaatgtgaaaagttaaagaaaaagatgatgaagatttgaagaaaataggactgtaacccttaatactcactctgaaaatatgcagaaagtcaattaatyattcaaatactttagctatttgtagtgtgtattctatttacatattcaggaaattaagtaaaatatatctattgttttcctactctgtactttatgaaatatgcaaggtttttcacaagacaaggagataccctggcttttgtttccattgagtcaatagacatttgattacctgttactgcttctgggttttgatttacaaaagtctcgcctacttccttgttcagataattgtgatgatgtgactttaaacaacgtgatgcttgggaaattctttattactgaagaaaggtcacattcttaaaaacgggatttgttgcagttcttattaatagaattctccaagaatacttggctgctctctagctaagaaaatgcaggtttctgtatatacatagttttctctctttttttaattaaaaaaaatagaattgaaaaaaaaacatttatagggaaacagccttatatgaacactttaattattgaacattgaaaggtaaagtttaaagtattacatctatt

SEQ ID NO: 858706 - DNA, 459 bp, Homo sapiens
gtttcattgaggacatcttcagagttaacagaatcaaagtgatcaatgtttatgtggtactttatctattatatttgggaatkttgtttcttgaaggttttttgttaagatatttgtaaccgtgtggagacgaaataaaattgtacaatttgatattgtagttggtgtctggaaatgcgtcattttactcagtgaagtcattttattggctcttacagtgaaaaagggacatgcatatgcaaaatcaattctcttcagctttgaatattttctgatatgctttcaaaagttacatgcaacttttgtaattaaataacaggagtagaaatgtggaggttatattttccattcttccaactcgtaaaagctaccatttagtgcagtttcatcatgtaatttggggccatgataggaggcagtggcataaagcctgaaaatcttcctgccaatggtttctct

SEQ ID NO: 858707 - DNA, 602 bp, Homo sapiens
aaatgacccatttatcctatgagtagaaaccatgttctaactaatttctagaataatgaagatgagcttgtgtgggtacatccacttcttttagttaatagtaaaaatttgtagtaggttatttttagcrgctgtggtagcataactgtctgggacttgggttgcagatgcctgtgcctagggtcagggctaagcctttgaaaccttacaaaattactggagaagtgtgttagtcagagttctctaaagggacgggactaagaggttagatatttgaaacagcgtttattaaggagtattgactcacacaatcacaaggcaaagtcccacaataggctgtctgcaagctgaggagcaaggaagccaatccgagtcccaaatccatagggaagccaacagtatagccttcagtctgtggccaaaggcccaagagcccctggcaaaccactggtgtgagtccaagagtccaaaagctgaaaaacttggagtccaatatttcagggcagaaagcatccagcactggagaaagatggaggccagaagactgagcaagtctggtcgttccccattcctctatctgattttattctagctgcaatggc

SEQ ID NO: 858708 - DNA, 632 bp, Homo sapiens
cagctggaagtgggtccagtgaagtgcggagagtgtgggctggctgctgttaagacgcctccacctccacctccccgtggtgctcccaccatctgcctcttgcgctctctgctacctggttcccagttttgctctccattccaaatccccgcaggactccccatgcagatgagctactgaatgccctaactttctgctttcctgacttcattgtttccagtgaccatcccatctggacccaatgtcaccagtgcagccacgtcgtggaccctgttgccacactggagatcaactgatgactaccctgctgatccttccagtggtctggctcctgactccctcaccccattccgattgttccatggcttcactaaggcctccagatagtcgcgtgcttgcttccttttctcccaaaccaggccatccttgttgttgcccccttttctatctcaatggtccattatttgaggcgctgtcctgccttgagcttctggccctgcctctctrcactcctgtggcagtgcccgcagtgcccagttaaactacaataatctgcttagtacttggctgttgccctgtgattacaaggccaccacctatcgggcagacaggaagacagatcatagaattct

SEQ ID NO: 858709 - DNA, 395 bp, Homo sapiens
agagcgagactcgtctcaaaaaaaaaaaaaaaaaaaagaatgaaggttagtgtttaaaatgtattgcatggcaagggatagtttcacttgaagtcaygcaccatgaaataagatgaaatatttgtatatactgtcctacttcctacgctctaaattgttttactctgtgaatttgcattgagtcagtcatatgccacactacatcattttagtattcgagatggcattcaggttccctctcattcatcattaaatgtggtcagggccgggcgcggtggctcatgtctgtaatcccagcactttgggaggctgaggtgggtggataacctgacgtcaggagttcaagaccagcctggctaaatggtgaaaccccatctctactaaaaatacaaaaa

SEQ ID NO: 858710 - DNA, 645 bp, Homo sapiens
tctgatccaaggtggtgctgcttccagyatcctggatccataaatttactgttcacacaactaagctcaccctgaatcagtgataaattctggaatgcgcattggctgcagccacagccacagaatgtcttcaacaaggacagaagagacagattaaggattatttttagagaaatgagaataaacgacctaggaagaactcaggttctggcactgcccccgtaggttcatatccatgttgtaccacttactagcttgggccatagataaattaacccgtctagtcctcaatttcctcatctttaaaatgggaatgacaataattcccacaacataaagctactgcaagttagataatacatgaaagtcctataggacagagcactgggcatataaaaatgtgctcagcaaacacacagtgtatatgtttccgtgagtgtgcacttagtgacaacagaaattataaacaagcatcctaattttatccaaccctttaggatcatagaaagtcacttggttatttttgtttcagatttttatcttagaaaatgatgtgcctactttaagaatggggcaattaattcaataacgtttacatggtagcaattaacaattctacggagaggcatattaacaatttaaaat

SEQ ID NO: 858711 - DNA, 645 bp, Homo sapiens
tctgatccaaggtggtgctgcttccagtatcctggatccatawatttactgttcacacaactaagctcaccctgaatcagtgataaattctggaatgcgcattggctgcagccacagccacagaatgtcttcaacaaggacagaagagacagattaaggattatttttagagaaatgagaataaacgacctaggaagaactcaggttctggcactgcccccgtaggttcatatccatgttgtaccacttactagcttgggccatagataaattaacccgtctagtcctcaatttcctcatctttaaaatgggaatgacaataattcccacaacataaagctactgcaagttagataatacatgaaagtcctataggacagagcactgggcatataaaaatgtgctcagcaaacacacagtgtatatgtttccgtgagtgtgcacttagtgacaacagaaattataaacaagcatcctaattttatccaaccctttaggatcatagaaagtcacttggttatttttgtttcagatttttatcttagaaaatgatgtgcctactttaagaatggggcaattaattcaataacgtttacatggtagcaattaacaattctacggagaggcatattaacaatttaaaat

SEQ ID NO: 858712 - DNA, 490 bp, Homo sapiens; identical to SEQ ID NO: 815920

SEQ ID NO: 858713 - DNA, 490 bp, Homo sapiens; identical to SEQ ID NO: 815921

SEQ ID NO: 858714 - DNA, 643 bp, Homo sapiens
ccatgatttaagtgacagcattaggtatctagtgagggctctctccctggctgctgagggccaccttctctttgtgtcctctcatgccctcttatctgtgcatgcagagggagacmgagggccctggtctttcctctctgccacttcttataagcacaacagttctaactattagagtcccacttttatgaccatatttgacctcaattatctccttatagttcctatcttcaaaaccagtcacatttgggtttattcaacataagaattttgtacattaattttaggagcatataactcagtccataactatcagcaatgggtttacttcaccatgcacttatatttttggtttacaaatatgtatttttattaaattaactctttctaattagagaatcatcaaaccaggacaatttttcctgtttataacatgatttatcactctgtgtagctaaacctttccaaataaactttgtagcaagtccgtctaaaccatatcacatctacttagccaatatattagccaagaccactgataattaaaacatgtcctatggaatctagaacataaggtaatactggtgtccaggaaataataattttaaaaatgtatttttaaaaattgacctataaaatttga

SEQ ID NO: 858715 - DNA, 634 bp, Homo sapiens
agtattaaaaaatcagactacaaaatgcagacagaaaagggtcattaaagttgttaaatgttcttgcattttctagttaaatagtaaaagttccattataagtttgattttaataagatttagtaagattttaatttaaacaagataaatgctaaaaatctctaagacagaaataataacaaaagcatgtataattaataagctattacaggttaaaatggtataaaatatgtatttgattaattcaagaggaagaaaaaaagaaacaaaaattttgtggcataaatagaaaataaatagtaaaatgtagtttttgactccccacgtcagcaatcgtattaaatatataatttaaactctaattaaatcacaaagattgtcatacaatattgaaacaaaacataaagcaaagaactaactatatgcaacatagaagaaatatctcaaatacaaagttaaagaaaagttatatatgcaaggatgagacctccacttgcagatagaatgtagaaagttgtagcaagtgatggatttgtcaaaaataattaagaagacagacaaaatgctgaaatattytgtatgataacatcagaaatttgtggaaacaaatactacagagactaaaacttactct

SEQ ID NO: 858716 - DNA, 614 bp, Homo sapiens
caccataaaatgcccttgttggcagtgctttcatgtctagttacmtcatgagatcctggacaactttgatttgataagcaaatcaaagttttcttctgcttggtgacttttcaccccttttccatcaactgtgcccagagaggcagagacacaggtcgtaacccattccaattgtgagtgaggggcctttcacaaggagtctgtgggcttagcaacccacagaatagcagagacttctcttcagtgtagttagtccatcaacttctgatgagaaggtaggtcattgacaggctaagacttatgaactaggggcacagggaattctggaatattctagggagagagttggccttcagtacacaaggattcatgcactcatggaactatgtctttgtagaagaaagcaagcaattttaggataacatgatggaaacttaaactcttagggctggtaaagattctaggcatttgaggcattaaagaggagttacagaaagcagcttaaacttggtcacaaaggcccatgccctccactcttcttttctccacatctctttttctttttttccatcctctggaactttttaaatttatcttttcactgtagttctgag

SEQ ID NO: 858717 - DNA, 614 bp, Homo sapiens
caccataaaatgcccttgttggcagtgctttcatgtctagttacctcatgagatcctggacaactttgatttgataagcaaatcaaagttttcttctgcttggtgacttttcaccccttttccatcmactgtgcccagagaggcagagacacaggtcgtaacccattccaattgtgagtgaggggcctttcacaaggagtctgtgggcttagcaacccacagaatagcagagacttctcttcagtgtagttagtccatcaacttctgatgagaaggtaggtcattgacaggctaagacttatgaactaggggcacagggaattctggaatattctagggagagagttggccttcagtacacaaggattcatgcactcatggaactatgtctttgtagaagaaagcaagcaattttaggataacatgatggaaacttaaactcttagggctggtaaagattctaggcatttgaggcattaaagaggagttacagaaagcagcttaaacttggtcacaaaggcccatgccctccactcttcttttctccacatctctttttctttttttccatcctctggaactttttaaatttatcttttcactgtagttctgag

SEQ ID NO: 858718 - DNA, 710 bp, Homo sapiens
acagaggcactgaagagggtagaaaggaaagtcttgaatctctgatgccacccctctcccatcctctagtagtggctacttagtgcagagagagaamctgtgtgcttgtgggaagaggagtgcagaggctggggctttgcattagaactcagtgctgccagcacagggcagaactcagctggtgcctatggagggagcatttaaaccagccttagccagagggacattgcccataccagtggctggaatttgagttttggtaagccttgccaccatgggctaaatggccctggggtcctaaataaacttaaaaggctgtctaggccacaaaggctgcaaatcccaggcaagtcctagtgctgcgctgggcttggagccagggtactgtgggggcacacaacctagtgagacactagtcacgggtgctaagggagtactcccccaatcccaggcagcacagcttgcagcaatgaaagtgactccttccttctgcttgaatagaggagagggaagagtaaagatgactttgttttgcaccttggatacgagctcagctgcaggatagggcactgggcagagtcgggaggcccctattccaggcactagctcctggatgacatttctagacacacctgggccagaagggaatccgctgccttgaaggggaggacccagtcctggcaggatccatcacctgctgactaaagagc

SEQ ID NO: 858719 - DNA, 557 bp, Homo sapiens
gtgactttgtaatatcatactttatgcttattgcctgggtaaaattggcttggtgagtcaaatagacttagacctctgcttccatgattcaggacctggtatcgcccctttctrtccttccccacatcatctgctgataaacccttccatgtatccaccctaatctgaactctgttaccttgcttcattgcaatattagattcatccttggaaaatgggtttctttgaaacttgctgaaaggtatcatgtacagcttctatacatttaggtgttttttgtttttttttgagatagggtctcactccatcaccgaagctggagggtaatggtgagactatggctcactgcagccttgacctcctgggctcaagcgatccccacctgagtagctgggactacaggcatgtcccatcacacctggctaattttttgtattttttggtgagatggagttttgccatgttgctcaggctggtcttgaactcttgagctcaagcaatccattcacctcgaccttccaaatgctgggattacaggtgtgagccaccaagcgttg

SEQ ID NO: 858720 - DNA, 508 bp, Homo sapiens
ggacgcgacgtggaagtggaagacagcgatattgatgatctaggctctgmgtaggcctaggctaatgtgtgtgtttgcgtcttagtttttaacaaaagagtttaaaaagaaaaaaatttgaattgaaaaaagcttatagaataaagacatagagaaaaatatttttgtacagttgtacaataggtttgtaatttaaactagtcttataaaagagttgaaatgttttttaagtttccttttttttttttttttgagacagagtttcgctcttgtcgcccaggctggagtgcagtggcgcaatctcggctcaccgcaacctctgcctcccaggttcaagcaattctcctgcctcagcctcccaagtagctgagattacagtaaaaattaaaaagtaaaaatgttacagtaatggactggcatactggctcacacctgtaatcccaacactttgagagactgaggtgggagaattgcttgaggcttgaagttggagaccagcctgggcaac

SEQ ID NO: 858721 - DNA, 588 bp, Homo sapiens
gtttccttatgatgcattcaagtcatactcttttttttttttgaratgggtcttgctgtcactcaagccatagtgcagtggtgctaccatagctcactgcagcctcaaacttctgggctcaagtgattctcctgcctcagcctccccagtagctgggaatataggcatgcaccgcaatatccagctaatttttttaaaaattatttttagggatgggggtcttgtgatattgcccaggctggtctcaaacttctggcctcaagcaatctacctgcctcagcctcccaaagtgctgggattacaagcgtaagccaccacaccaactggtcatacatttttgacaggaatactatatatgtggtagtgtgttctttttgtggatcacaccagttggcaaaagcttatcccgttattgataaggttaagttggctcacttggttaggacagtgtctgccggacttacccattttatgtctctttttctctttctacttagtaagtgatttgtgatgtgccaccacacccggcttttttgtatttttagtagagacagggtttcaccatgttgaccaggctggtctagatct

SEQ ID NO: 858722 - DNA, 588 bp, Homo sapiens
gtttccttatgatgcattcaagtcatactcttttttttttttgaawtgggtcttgctgtcactcaagccatagtgcagtggtgctaccatagctcactgcagcctcaaacttctgggctcaagtgattctcctgcctcagcctccccagtagctgggaatataggcatgcaccgcaatatccagctaatttttttaaaaattatttttagggatgggggtcttgtgatattgcccaggctggtctcaaacttctggcctcaagcaatctacctgcctcagcctcccaaagtgctgggattacaagcgtaagccaccacaccaactggtcatacatttttgacaggaatactatatatgtggtagtgtgttctttttgtggatcacaccagttggcaaaagcttatcccgttattgataaggttaagttggctcacttggttaggacagtgtctgccggacttacccattttatgtctctttttctctttctacttagtaagtgatttgtgatgtgccaccacacccggcttttttgtatttttagtagagacagggtttcaccatgttgaccaggctggtctagatct

SEQ ID NO: 858723 - DNA, 503 bp, Homo sapiens
tctaaggagagctgggccctggtacagggaggggcagaggtctgtctttggaaggctttaggaagaagggagaggtggactggaagactcagatctagggctcgggggaaagcaytgggccatgaggtagatttgggacaagtcctatatctgccgtttgctagctgtgtgacctcaggcaagttacttaaactctctagtcttagtttcccatcagcaaaatgggctttattgttccccggctcatggaatcattgtgggacacaatgagatcagggacatgagagtaacactggccaagagctcagatggggagtcaaagtcctgatcaaagtctggctctatcacttattagagctgtgtggccttgccctttgatactcagcttctctgagccccagtttcctaatccacaaaatgggaataagtgtactcagccacaggtatccttgaagagaggcttaaataggatttttttgcatgttaatagtgctttgcaaaat

SEQ ID NO: 858724 - DNA, 503 bp, Homo sapiens
tctaaggagagctgggccctggtacagggaggggcagaggtctgtctttggaaggctttaggaagaagggagaggtggactggaagactcagatctagggctcgggggaaagcattgggccatgaggtagattkgggacaagtcctatatctgccgtttgctagctgtgtgacctcaggcaagttacttaaactctctagtcttagtttcccatcagcaaaatgggctttattgttccccggctcatggaatcattgtgggacacaatgagatcagggacatgagagtaacactggccaagagctcagatggggagtcaaagtcctgatcaaagtctggctctatcacttattagagctgtgtggccttgccctttgatactcagcttctctgagccccagtttcctaatccacaaaatgggaataagtgtactcagccacaggtatccttgaagagaggcttaaataggatttttttgcatgttaatagtgctttgcaaaat

SEQ ID NO: 858725 - DNA, 524 bp, Homo sapiens
ttataagaacctttgtgattatgtcagacccaagagaataattcacaatgatcttcccagctcaagatccttcccttagtaacatctgcaaagttgcttttgccatgtaagttaacatattcataggtcctaggaatgaagatgtagacatattttggtgaacattatttcgaagactaatatatttgtatggagattttacactgaggagctgacttggagtggttacaaaaagctaaatatgctagaggtgggttccaaatttaggttggtcttgtaaaacccatgctctttgtaccagctggttctggacgtggaaacagaaactctgagttagcttcccagttttcctacccaacagctcagggctactgagagagtggccgtgaagtgactttaaatgatacttcacaggtacaagccatccctttcccatctgtgggtgkccagatggggaaaccagggctctgagagtagaagagcttgccgaagtacacacagtaagtaaatggtagaactaagaa

SEQ ID NO: 858726 - DNA, 662 bp, Homo sapiens
accagtgccatgctgttttggttactgtagccttgtagtatagtttgaagtcagatagcatgatgcctccagctttgttcttttcacttaggattgtcttggctatatggggtcttgattccatatgaaatttaaaattttttttctaattctgtgaagaatgtcaatggtagtttgatgggaatagcattgaatctataaattactttgggaagtatggctgttttcataatatcgattcttcctatccatgaggatggaatgtttttccatttatttgtgtcctctcttactttcttcagcagtggtttgtagttctccttgaagagatccttcacatcccttgttagctgtattcctaggtatttcactctctttgtagcaattgtgaatgggagttcattcatgatttggctttcttcttgcccattgttggtgtaaaggaatgcttgtgggttttgcacattaattttgtatcctgagtctttgctgaagtagcttatcagttcaggaagtttttgggctgagatgatggggttttctaaatataaaatcatgtcrtctgctaatagagacaacttgacttcctgtattcctatttgaataccctttctttttcttgcctgattgccctggacagaacttccaatattattttgaat

SEQ ID NO: 858727 - DNA, 682 bp, Homo sapiens
aagagagggggatccccctggtttagataaagtcttccctgctccacctgtgtccatcttctagattcagtacactgttttcatgtgtctgtcatagcattgaacacactgtttggttggttggttaggtggttggttggtaagcttctccagtaatgtaaattgtagaaggtaaaaatgttttcttaacttccatatgccatcattagcgcaaggcatgacacacagttttgatatcattgcaaaataaacagaatcacacagatctatttatattcatgcaatgagatgtatatttgaaggcacttgattctcttcagattacacccattcatccctccttatacctttatagtgaccatgagagcttcttcccctcccaagcttccagagtcacaacatttaatatttttatctctatttggtactatttagtaacatatgtttttcatttatcaaactatgtaatcagatagaaaaatatgttcattgttgaattgaaataaattgatactgacatcatatggtgtaacagattcagtaggtagttgagctagaaaattcagtaacartttgtttatactagcaagagggagtctttctgggtgacagaactgttctgtatcctgattgagataatagttacatgaatcaatccttgtattaaaattgatagaattat

SEQ ID NO: 858728 - DNA, 628 bp, Homo sapiens
tggaagtgggtccagtgaagtgcggagagtgtgggctggctgctgttaagacgcctccacctccacctccccgtggtgctcccaccatctgcctcttgcgctctctgctacctggttcccagttttgctctccattccaaatccccgcaggactccccatgcagatgagctactgaatgccctaactttctgctttcctgacttcattgtttccagtgaccatcccatctggacccaatgtcaccagtgcagccacgtcgtggaccctgttgccacactggagatcaactgatgactaccctgctgatccttccagtggtctggctcctgactccctcaccccattccgattgttccatggcttcactaaggcctccagatagtcgcgtgcttgcttccttttctcccaaaccaggccatccttgttgttgcccccttttctatctcaatggtccattatttgaggcgctgtcctgccttgagcttctggccctgcctctctrcactcctgtggcagtgcccgcagtgcccagttaaactacaataatctgcttagtacttggctgttgccctgtgattacaaggccaccacctatcgggcagacaggaagacagatcatagaattct

SEQ ID NO: 858729 - DNA, 650 bp, Homo sapiens
aaaagcaggcacataatcagatggcaggttcaacttcagtctaacaagaattacatgaaatatgaatgactgacagctccaaataaaagtttaattgtgtcagactaaaataaaaatattcaactaatttctgatctctaataagagagatgtctaaagaaaaatgtagaattacagcaagattaaaacccaaatgaggatatagaaaatgatacacattcaaatattaatcagagaggtctggcatggcaatatcaatgacagacaaaagtgaccttaagacaaaaagcaatactgcatacaaacaggatgactccctagtgataaaatttcatgtccatgaagataaaacaagtccacatttacatagcctcaaaatacatcaagcaaactttgataaacttgctaaaggacaggtaaaatactaaggtctactggtagaaatatgcaaatctgcaattatgatagaaatattaacacatctctttcagtgaccaatacaaccagccaaaaaaatcaattggaaatagaaaactagaataacacaataaataaaattgacatagaacttaaacagaatactgcacccagtaccgcaaaatacattcattacaaacacayagggcatttaccaaaactgaccattgata

SEQ ID NO: 858730 - DNA, 475 bp, Homo sapiens
ttactccatgtcagcaggcactgttctagtgaaggaccatgatttaaaawgtaaaccctggaagcaaaaatagctggtttcaaatactagttctgctagtatatgaagcatctgtttcatcaactataaaataggagtaaccgtatacagcattgtcagaattctgagataataggcttagataccagacttaggtccatgcctggcacagggcgaatgctcagttaatattttctgttacaatcatctcatttaatccccacaataacccaatgggtagagaggatcaatagtgataaatgggaatgataatattcccagtttacagatgcagaaactgagatgcgaaacaataagaaacttgtctaagcccctccatttctcagtattggagatgggattcagacctaggagggctggtttgaggatctacagtcttagctaccatggtagacagttcttaatcttaaacagt

SEQ ID NO: 858731 - DNA, 475 bp, Homo sapiens
ttactccatgtcagcaggcactgttctagtgaaggaccatgatttaaaatgtaaaccctggaagcaaaaatagctggtttcaaatactagttctgctagyatatgaagcatctgtttcatcaactataaaataggagtaaccgtatacagcattgtcagaattctgagataataggcttagataccagacttaggtccatgcctggcacagggcgaatgctcagttaatattttctgttacaatcatctcatttaatccccacaataacccaatgggtagagaggatcaatagtgataaatgggaatgataatattcccagtttacagatgcagaaactgagatgcgaaacaataagaaacttgtctaagcccctccatttctcagtattggagatgggattcagacctaggagggctggtttgaggatctacagtcttagctaccatggtagacagttcttaatcttaaacagt

SEQ ID NO: 858732 - DNA, 599 bp, Homo sapiens
tctcaggactgatagccctggaaaacccaaccatttaaagtctctagaaaatatcctaagggtatatagcaactgaaagatttactcaaaaactaaagttcaataaaacagcaagagtctgtggaacttgagctatgacatgtgtgctcactctctcactcactctctctctttctccctttctttttcccctagtcctacattctcagtccagacagacaatagaggcctcagtctgaatggatgtggtcaaaaaatgtgactccttcttccctaagttcccagacaagggacataatatttcactgggaaagacagactaccagcatttctcatttccccaaactccaaaatgcagaggataaactcctgggaattgtgggtaaactatcaggagctcactttctccagctagttctcattcatggagcagagattcaccccaggcacagcagactgagaatacrggggtcttgattacctttagttttaaggcagaggttccacactggaggaggcaaactgagaagaggaagagttaaccattatcactcagtgccctgctctagtatctgggtatcactctaagagaagtgggt

SEQ ID NO: 858733 - DNA, 668 bp, Homo sapiens
gcattctttcatgaaagctgagggtaaaagaaaggtgcagtcaaggaattgagaaatatcacattggccaacatattgaaccaacttgaagaaattaactaagtttttrgggctttttattatctcttagcaatgaaacagagtgggctagactgaatccaaagcgttcctgtacctcatgtgtaaaggcagtgtagactaatggtttggagtcaaattacctggattcaaatcccatctctggcaactaggtagagctacttaagcagtagcttagtgtctctgtgcctcaatgtgttagtaaaatgggaacgattttaataatgatacttatccaatggtcttgtttcaactaggtacagcaatccctattaatcattcggaaatgtggctggcacacagtaaatgtcatctttgatcatttcctctattagcttcctgcttattgggggttgacagttttgcttttgctcccatcttgaataaaataatgaagttcaataataactaggcagagggcaaggaaaaaaaacacctactgaaagattggctcataactgaggatagaaatggtcttagcaaccctctagtccaattctctcattatagaaatgggaaaactgaagcccagggaggaaatatttttcctgaggttatataacaaattc

SEQ ID NO: 858734 - DNA, 594 bp, Homo sapiens
gaggagtgagcctttcaggagaccacagaactttttgttttataaaaagcttcaaatcaggctgccatagtggccttggtatttttgtatctatcttttcagcttctatttagagtgcagagttggcgtgggaatgttttcctttatttcaagctttaagtagttgttgggtaacagctgtttttaaagataatctttgaggcactgagatgctgctgtaaaaacaaatttcttgaatacaaaaaagtcttccttattttatgtgctggattttatttttctgcatgcttttgttcatgctgtcacttctagaattctctttctatcctaactcttgctcctctgctattgtcaaaatcatccccattctcttgctgacatttgtctcgtgcagcattccccattccctcatcgatgacattctatgggcctcgtatgagtgctctgccttgagtgttggttagttctaaataaggcattcgtaccttgattgcagcttctggagactataaggtcttgttctattcataactatttcctgcttgtcattaagtagaaaactactgtrtatctttctctttgtcaaattaatat

SEQ ID NO: 858735 - DNA, 474 bp, Homo sapiens
aaatgaggaaatggctcgatgacctaaaattggcatttctttgaccctgcaaatgtctgtgtccttgattcccccattccctgatttccacgccacccagccccactccagtaacacagcagtcatgaaaaaagaccctagagtcgctcccctaaaaaaatgagtagctggcaaaggatctggctaaggtgaaagttgtatcaatggatagaattataccattctatgaatgagtttttaatatatgtattcgattattcgacagaaccttgttaaatgggttcattatacagggttgtttcattcacagaaacaattgggtgcttttactaaggggttaaggtagtagaaattggagtttcgagtgcaagctgagaagggagaaraggaggaagagcaagttttggaggtttgaggacattgggtaacagaatgccatctttaaagcagccttctggaagattctttctgcat

SEQ ID NO: 858736 - DNA, 526 bp, Homo sapiens
cagaaaaaaagtgaatctggcatcaagcacttatttttagctaataataaacagggtataygttcaccaatcaggtgagaagctatgcctaaaacctagataaaatgacacttctgaattatgaatcaagatacaacttttttgcctcaagtaaaaactgacttcccaaatctcaaccttattataaaggaaactcattaaacactggatttctaaagaagagtggtaattagttgtgatgaaataagaaggtgttggcaaaccaaatccagctcacagcctgccagttatgaatgattttgacattttttaagggttgttttaagaaaaaaaaggaatatatgacagaggccatctgcggcccacaaagcctaaaatatttactacttggtcttttgcagaaaagtgtagtgtcctttgttccacaggaaataaaagtcccattaacacccactttgctttctgcagtctcctgaatccacccaacgtctaccccacagcccttgcgccctgcccagtgaggtgc

SEQ ID NO: 858737 - DNA, 484 bp, Homo sapiens
tactttgctttttgttttttgttttttgtgtttttttttgagacgaagtttcactcttcttgcccaggctggagtgcaatggcacaatcctggctcactgcaacctccacttcccaggttcaagcaattcttctgcctcagcctcccgagtagctgggattacaggcatgcaccactacaccaggctaattttgtatttttagtagaggtgggggtttctccatgttggtcaggctggtctagaactcccgacctctggtgatctgcccacctcagcctcccaaaatgctgggagccaccacgcctggctggatcgaccactttttatctatgcatcagctcatcaacacttgagttgcttccccctttggcatttatgaagactgctgctatgaacatttgtgttcaaggatctgtttggacatctgttctcaattcctatmcctgggaagtcagttgctgggtgatacagtagttctatgtt

SEQ ID NO: 858738 - DNA, 609 bp, Homo sapiens
gtatttcttggtttgtttaggaaaggacaccaaggttcagaaacaagtgagaattaggacttgaaagacaaatgggcggggggaacttcttagtttgtcttttgaatttttattactttttcagagatgaggtctcactgtgttgccccggctggtctcgaactcctgggctcaagcaatcctcccgtcttggcctcccaaagcactgggattacaggcgtgagccaccctgcccagcctagaaagcatttttgactgaaccaaaaatgcaaatcctcaccaaaatctctcagtgaagtcactaagctcccattagagtggagtgtggagaggccaagggcactcacctagtgccaagatcccacagagaaacatgaggccagggcatgggcacctcctcccaacaggaccccgtgactgggcctttgaaccattagatgcagccctggagccgcggtcagagcgtggctgtccccgagaagggaagcagcagccggcacggcctgttctcccatcttmacatcgctccctccatacaaaccactgcttcccaccgcctcctgtgacaatgcctggcgaggtggtcatgcccccttcagccctcctgaa

SEQ ID NO: 858739 - DNA, 609 bp, Homo sapiens
gtatttcttggtttgtttaggaaaggacaccaaggttcagaaacaagtgagaattaggacttgaaagacaaatgggcggggggaacttcttagtttgtcttttgaatttttattactttttcagagatgaggtctcactgtgttgccccggctggtctcgaactcctgggctcaagcaatcctcccgtcttggcctcccaaagcactgggattacaggcgtgagccaccctgcccagcctagaaagcatttttgactgaaccaaaaatgcaaatcctcaccaaaatctctcagtgaagtcactaagctcccattagagtggagtgtggagaggccaagggcactcacctagtgccaagatcccacagagaaacatgaggccagggcatgggcacctcctcccaacaggaccccgtgactgggcctttgaaccattagatgcagccctggagccgcggtcagagcgtggctgtccccgagaagggaagcagcagccggcacggcctgttctcccatcttaacatcrctccctccatacaaaccactgcttcccaccgcctcctgtgacaatgcctggcgaggtggtcatgcccccttcagccctcctgaa

SEQ ID NO: 858740 - DNA, 602 bp, Homo sapiens
aaggatagagtaatatttttcactctctttgtcaaacttcttctttccatcctaaaggagagcaataacaacaaaaaatatttaactcagagcacccagaaaacccygactttcaccattcccatcaaagtcccatgtaattatttaataaagacagtgagtcccaactatgtgtaaaaccttaatttagtaaaaataggaagatgtaagtgaaacaagccatttcagtatgtactctgctctcaaaaaagctttccatcttgcggtgagaaatccatgtataaacaaacagggcaagtcacatctcctttggagtaaatggaactgtagtatgggtaggggccaggctggctacagtagagtcccaccaagagctctataattgactcttaacaatagattctgatccagtgggtctgagatgtgaccaagagaaaaatgtcttttttaggctttttgttgattcagatgagtcaatatataatgtctaaagaacccactcacatggaatcttttcacagaatcatattatttcttagccacaaaagacacctgaaatatcaaacaactcattcttgacatggaggagaagatttttaaat

SEQ ID NO: 858741 - DNA, 618 bp, Homo sapiens
ctatccttccaccaggcccccacactccctgaaaggccctggtgtgtgatgtaccctgccctgtgtccaagtgttctcattgttcagttcccacctatgagtgagaacatgcggtgtttggttttctgtccttgtgatagtttgctcagaatgatggtttccagcttcatccatgttcctgcaaaggacatgaactcatccttttttatggctgcatagtattccatggtgtatgtgtgccacattttcttaatccagtctatcattgatggacatttgggttggttccaagtcttttctattgtgaatagtgccacaataaatatacatgtgcatgtgtctttatagtagcatgatttataatcctttgggtatatacccagtaatgggatggctgggtcaaatggtatttctagttctagatccttgaggaatcgtcacactgtcttccacaatggttgaactaatgcttcccaccaacagtgtaaaagctttcctatttctccacatcctgtccaggatctgttgtttcctgactttaaatgattgccattctaactggtatgaggtgatayctcattgtgcttttgatttgcatttctctgatgactagtgatg

SEQ ID NO: 858742 - DNA, 543 bp, Homo sapiens
atatattaacttgaaagagtgtgtgtgtgtgtgtgtgtgtgtattaaaatatagtatttagtgtacaatgaatagggcagacagaaattcaggagaaagctcattaattagagaatagaaagagataacatactaatgtttttgagtagcaggaacttcacgtattttatcttattctactttctaagtaactctgcgagggaggtattattattctcatttagaaaagttgaaacacaggtagttaatgatcacctaggaatttaaattcatacctgtgtgattctaaaacactttttcatcctacttcagcaaatgtcaagacttaagggtgcccttaaggatggttgaatgtaagtactatttaatattttcagatcgtatttagcatcacttaggaagtttaatatataaaaggaaaattgggatttcctttcatcatccattcattcaacaagtatttattgaattcctactttaggccaggcacagagtarataggattcacctcttcaccagacatagtccttgcgttaggcactt

SEQ ID NO: 858743 - DNA, 575 bp, Homo sapiens
aattctcccagagcactctgcttggatattcatttatagcctttacactgaattttgtgagttatttgttacagtcagtaagactaatctgcttgattatgaactatttgaggacactcttcccactattttaaaatttatcttggaaacctcagttcctggcatacaatgcaaacccagtaaatattaaacttgtgattttaaaaaatacaaatccaggccaatcaatcctctgcttaaacccttccttggcttcctattgcatttgggataaaatataaactctttaacatggcttaaaagttctacatgagaaggcttctggcttctatgtagcaagtagaaattggagagtcacgcccacacttacaagaataaaaaactatgtaatctacagaaccataaacgctcttgaactcatcaaagaactgaactcatcaaagtcacagggcagccaactatcctgaaatctaygaaaagacaggagaaaaaaccatggagagatgagatgggagctcttgcttaacacacaagctagtgagaaaattttggttaagttgaaaatgttaacaaat

SEQ ID NO: 858744 - DNA, 575 bp, Homo sapiens
aattctcccagagcactctgcttggatattcatttatagcctttacactgaattttgtgagttatttgttacagtcagtaagactaatctgcttgattatgaactatttgaggacactcttcccactattttaaaatttatcttggaaacctcagttcctggcatacaatgcaaacccagtaaatattaaacttgtgattttaaaaaatacaaatccaggccaatcaatcctctgcttaaacccttccttggcttcctattgcatttgggataaaatataaactctttaacatggcttaaaagttctacatgagaaggcttctggcttctatgtagcaagtagaaattggagagtcacgcccacacttacaagaataaaaaactatgtaatctacagaaccataaacgctcttgaactcatcaaagaactgaactcatcaaagtcacagggcagccaactatcctgaaatctatgaamagacaggagaaaaaaccatggagagatgagatgggagctcttgcttaacacacaagctagtgagaaaattttggttaagttgaaaatgttaacaaat

SEQ ID NO: 858745 - DNA, 575 bp, Homo sapiens
aattctcccagagcactctgcttggatattcatttatagcctttacactgaattttgtgagttatttgttacagtcagtaagactaatctgcttgattatgaactatttgaggacactcttcccactattttaaaatttatcttggaaacctcagttcctggcatacaatgcaaacccagtaaatattaaacttgtgattttaaaaaatacaaatccaggccaatcaatcctctgcttaaacccttccttggcttcctattgcatttgggataaaatataaactctttaacatggcttaaaagttctacatgagaaggcttctggcttctatgtagcaagtagaaattggagagtcacgcccacacttacaagaataaaaaactatgtaatctacagaaccataaacgctcttgaactcatcaaagaactgaactcatcaaagtcacagggcagccaactatcctgaaatctatgaaaagacaggagaaaaaaccatggagagatgagatgggagctcttgcttawcacacaagctagtgagaaaattttggttaagttgaaaatgttaacaaat

SEQ ID NO: 858746 - DNA, 610 bp, Homo sapiens
agttactaatagaactagactcagatatgattcagaaatccaaackatcagacagggtaacaaaagtaaatatgactaatatgataaaaaactgtagtgtaaaatgtagacaacaagcatgaacagataggtaatatcaaccaataaatagaaattgaaagaataaatgaaatggaaatgctaaaaatggtaaactcggtaacatatatgaagaaagcctttgatggtctcatcagttgcctggaaaaactacgaaaagaatcagtgaacttgaagacaaatcactagaaattacccaagtgaaatacaaatggaaaaaatatttttaaaaaatagagtgttcaggagctgtggtacaataacagtctatgtaactggaatcctagaaggaaaggaaaaaaagaaaaagcaatatttgaagatatattgataattttcaaaaattaataaaagataccaaaccacaaatccaagaagttcagagaacaccaagcaagatacattaaacacacacatacacacacatacacatacatgcatgcacacacacacacacacagctctagacatatcatattaaaatttctaaaaacaaagaaaaaggattggc

SEQ ID NO: 858747 - DNA, 554 bp, Homo sapiens
gggcacgatggctcatgcctgtaattccagcactttaggaggccaaggcaggcggatcgcttgagcccaggagttcaagaccagcctgggcaacatagcaaactccatctctacaaaaaatacaaaaatttgctgggcatggtggcagatgcctgtagtcccagctactcaggagactgaggtgggaggctcacctgagtacaggaggttgcagtgagccgagattgcaccactgcactccagcctgagtgacagggtgaaactttgtcgtaaaaacaaacaaacaaacaaacaaacaaacaaatacacttttatcagttgctggtgtgagtgcaaaatgtacggccactttgaaaaatcgttgccaagtacatacatttaccacatggtccagaaatttcattcctaggtatttacccaagtgaaatgaacayttatgttcacacacaaatcttaatttgaatgtttatagtggttttactcataattactacaaaccagaaataatccaaatgtccttcacctgctgcatgaataaataaactgaggtacat

SEQ ID NO: 858748 - DNA, 579 bp, Homo sapiens
tcttctgactggaatgtgccctcactgagccggcaccttgggatgtgttggagcagcatggaaggaagagagtggcactaaggggcagggatggaactatgccattagctcaagagggagctgcaggctcggctatgggcaggctcggctacagcagacagagtgcccatcaacccctctcagagggcgtcagcgtgggcaccaccaggagaggctggaggctaggtcatggattggctgactccaagatgcccagcacctcttgctcccatgtctaaggggtactgtatggacacatgaagctttgtccttgtcctgggcccagaaggtaccagttgatgctgcctctgccacctcttagctgtgtgcccttgggcctgactctttaactaagactcagatgccttatctgtaaaatgcaaggtttaagcgccttcctcccaaccctaatgcttgatgttctaacttatccaaaatcctatttcgggggtggggggtggtcctaaggttgaaaataataaaatcaaggtgcaaagaagtgaaagcaagtctctcaagsacacttggccttttgggggc

SEQ ID NO: 858749 - DNA, 463 bp, Homo sapiens
ctccaggatcctggtgggcaggatggttaggaacacaggtttttgagtcagacagacctaatttcacatccagcctctgctacctactggctgtgattttgcccattccttaacctcccaaagctctggtttccttaactgtagagtggggtaataaatatacttacttctaaagcattaggagagttaaacaagataaagcaagaaaagtgatctgcatagtgggcattcatgacagtaattaataatcacaggaatgacaataaacatttattgaggactgtgccaggaactggattaggtgctgagaatacagagatgagaaagatgtcgtctcattgtagagaagactgtcataaaagcaggtgctaaggcagaggtatgcayggggaatatgaagcacagctctacattacaattcttcctcataatgcaccaaaatgtctttccctgactctctacc

SEQ ID NO: 858750 - DNA, 624 bp, Homo sapiens
cctgtatgcatctaggggaggtcatgagcagctgtagcatatgtgatgttagtgaaccatccctgtaattgaaatccgaaatcccagcaaatgcactgaaagggccataggaatggaccaccctgattggccagcctggtctaactggctttggcctgcaatgacgggttttatttacataactgaagattccagggataaatcctgatttcaggcatagcttgatctaggactcagttcctgcaggatccatgtctgagctccacatcctccttctcaggtttttcagagaacctccagtgcagttcccagtgctccctgtggtgacagtgattctgtgcctcctgtcctcacaccactgagcccgggaatgagagtatgtaggtgtcaggattcccagagcaggcctgaggctatgaacagacaagctgagatgtgggcccacccctgcgtgagtgaccgtggctcagggcccctccctgttgtaggggagaggatatgctaactggcctctggaccttaagggggggtcagtcccacccaaaccccaactgagaaaggagaaggggtggtttaaaataccaacataaagcaaaacrcacagaaatttgagatactgatgtc

SEQ ID NO: 858751 - DNA, 389 bp, Homo sapiens
gcattttcctaatgatgagtgacattgagcatctttccatgtgctgttggctatttgcatattttcttcrgagaaatgtctatcaagtccttgcacatttgttaattggggtttttgttgctgctgagttctttggatagttttggtttttctctattattatgttcttaatttcattgagttatgcttcatctttattatttcttttcttctgcttgcattgggtttcattaccgcttcttttcctagtttcttaaagtgaaaatttagataagttatccaagacttttttcttttctaatataagcacttaatgttataaatttcctctgtgcacgacttcagctacatcacacaatttttttttttttttttgagacagagtttca

SEQ ID NO: 858752 - DNA, 590 bp, Homo sapiens
aactgaggttaatcagaagtcaacatagtggattatcatccaacatggagttgccttggccttcccaaaatgtaaaataattcctagaacataccaggcactatgatctatgttytggtaggtttttatgtttaatcaaaaagaaaaggctttgcctcacaaactctgaacaatagataatcattacagcagataaaaggaatatatcaattaaatcattgtaaattatcttttaatcaattccccaataaaatatgctattcttaacagtcctccatgacatgttttctctagttcctcatgatacactgagtttatttactccgttgatggccaatatttagttagccctacataaagaataactaaggaattgaggatgtttcattaattttattatgcaagtatacaaggtaattgtagaaggtatagaaaaacctgataaataaatatgagagtaacctgtgattctgtcacttaactttagttaaatttgtgtattgttttcagctttttggcttgtttgtattggatattcacaggattgaaatctgacctatgctcagaaagttaattttgatgctttggat

SEQ ID NO: 858753 - DNA, 590 bp, Homo sapiens
aactgaggttaatcagaagtcaacatagtggattatcatccaacatggagttgccttggccttcccaaaatgtaaaataattcctagaacataccaggcactatgatctatgttttrgtaggtttttatgtttaatcaaaaagaaaaggctttgcctcacaaactctgaacaatagataatcattacagcagataaaaggaatatatcaattaaatcattgtaaattatcttttaatcaattccccaataaaatatgctattcttaacagtcctccatgacatgttttctctagttcctcatgatacactgagtttatttactccgttgatggccaatatttagttagccctacataaagaataactaaggaattgaggatgtttcattaattttattatgcaagtatacaaggtaattgtagaaggtatagaaaaacctgataaataaatatgagagtaacctgtgattctgtcacttaactttagttaaatttgtgtattgttttcagctttttggcttgtttgtattggatattcacaggattgaaatctgacctatgctcagaaagttaattttgatgctttggat

SEQ ID NO: 858754 - DNA, 598 bp, Homo sapiens
gttttatttcagtgtggtcagaaaaaatacataaagtgatttcaatctacttaaatttgttaagaccrcttttgatggcctaacatgatttatactggaaaacgttctatatgtgcttgagaaaaatgtgtgttatgctgttgttgagtggagtgttctgtatatctgttagatccaattggactataatgttattgaagtcctttgtttccttatgatcttctgtctagttgatctatcccttatgaaaagtgaaatatttaaatatcctactgttaactgcgttactatttcttccttcaattctgctagtgtttgctttatatatttgggtgctctactgttcgatgcatatatatttagacttgttttgagttcctggagaactgatccttttatcattatataatgtccttctttgtctcttgtgagtttttgacttaaagtttattttgtctaagtagggctaacctcctttttcctttggttgctatttgcatggagtatctttttccatcctttcactttcagcctaagtcttcatatctacagtgagtgccttataaacagcatttattgtttgaagtttttataatta

SEQ ID NO: 858755 - DNA, 539 bp, Homo sapiens
cttcctcttgggcttaatttccttcttgtggaagcatatctcttatacagttatttcattaaggatttgtaagttgttgmcacttccagtttttatatttctgaaaacgtttttatttggcactttggttttgaattcagtttgaagttggttgcctgttgaaatctcttccaacagttatttccatgctacgttgaagaagttagtcctttgtcttctgatatatattgttgcttgtaaaaatatatatcatcgatctaattatcatttctttaggaaatttctttctggtagcaattggaatttatctcttttctattacattctgaagcttcactgggaaatagctatgatggattcatttttatttgtctttcttcagattcattgtgcttaaatatcagaatttatgttttttactgattttggcatcaatctttattatttctcttcatctgcttacattgtggttcatttatcttcttattctagtgtcttaaaatggaagttataatcattaatttgagagctttttggtg

SEQ ID NO: 858756 - DNA, 574 bp, Homo sapiens
tctacactgtagagtgttgtacagatctcaggtgcccttgcctgtctttttgcccatcacttttccagacagccacctctttawgggctatctcagttttttaacctgccataacagcacagaagcctaagtgccatcaaccatccttgggggcaaaacatgatgctcaccagaacagactacagtctggtttctgagatgctgcattcttatcgcccttattgtctagtcaagtaaacttttagaggctttttgattgaatactttcttcaaatggaatttttcatggaaatctattatgtaaaacagataggaggtacttgttaagcaacataaagtagatagaacccagtgtggaacacccagatttcccttgtacagctgcaaccttgcacgtggtacctgaaacatttccataggctcgcaggactttacggcatgtggcttagatgcgttggcctactccagagacttggggttgagcattttttcctctttttatctttaaattctcaggcactcttcctgatgtcccagacttctcttcaggccaagatctaatgtggatccctaa

SEQ ID NO: 858757 - DNA, 622 bp, Homo sapiens
cctccatctcttgcttctcatctcagctacctgcagtcctaagtgtattccctatcacaatcactttgtgacttgctcaggttctggtcaacagaaactgcctgaagtttagtgtgtgtaactgtatcttagcttttcctttcccaacgaattagaaaaggtttcccctagtaatggcagttaattatttcttttatgaaatcatgattagaaataattgagtagtgtatggtcagtgtataactatagattgacaaattgattacagtgtttgtccttataactaaagttgcctctaatgttgggtagaaagaaatacccgaaatctgcttttctttctttctttcttgagtaggaagtggatagagtgatgtgtaaggaagtgaaggtgaaaatatttggatataattgaaagtaaaaaggaaatcccatgaccactgagtactatagtatttttggctttattctctagaaaacaaggaatctccaagtgcttttawagggggcagacattatctgacttgagacttaagaagataaattggaccacagtgagcaggaaagattacacaggagagataacagagcaatcaggagtccactgccacaatttccagggtaa

SEQ ID NO: 858758 - DNA, 655 bp, Homo sapiens
atgcttgatgagcttccattgttcaactccgaggatcttaccattgtctgtgagccatccaatattatctccctctatctccatctctcagcattcttccattcttgttgtgaagatagtgggcaactggggagtttagaggggattattgttacggccaggaccctcttaggttcttgagactgatctacctgctttgcagccctactggtcctattgttcccttggctaatgagggacccatctctctggtggcccttacagtgaatgactgccatttggtgaggaatctgtactgcttccaagagaagcaagattagatattgatgcttgattggggagtttttggctgttaatactcccctctccttccatatggctgtgtgggtgtgcagcatgaaaaactcatactttgaatcagtatataagtttaaccttttgctttctcccaattttaaggctctaattaaggcagttggtgctgctttctatgctgaggtatgagaagaaagggctttggcctttataacctcatttagactcactrttgcataccctgctttcctagtcccttctcccataaaactagtaccataaatatagtattctgcctctggattattaaggggcttatcctgtaagttgggtctactgg

SEQ ID NO: 858759 - DNA, 508 bp, Homo sapiens
aataaaatattcatcagtgaatttcctcattgtggttgtagtttgaataactctgattactaatgtaattgagcatctttggccattttgttatagttyatgtgaaatgcatgtttaattatcttgcctacttttcttttggttgatttttccttattgatgtgtagaagtatattatatattcagatatgagccctttgtggctagagcatttcaaataatcctttttccattttgtgatttgcctttttgttcccttaatgatgtcttctgatacacacataaaaattatctcttgatttagtccaatatatcaatctttcttttttgtcttatttaaaaagtctttccctgtaccaaaatcttggagatttttctccagtattatcttccaagagatttatttttttatttctcattaaaatataataatcaatctgaattgatttttaagtatggggaaaagtaaatgacatgacaattttttcatgtggatatctcctaatta

SEQ ID NO: 858760 - DNA, 646 bp, Homo sapiens
agccagggtaataaagaatatggagaggacagatgaagctaaatcaacctaaaggaaggtccaaataaaaatggcagaattcttgcttrtgtcctgtatggctgtgctgcctcatcgtcatctttatgccatggagccctaggctattttccctgaattcagggaggctcccagcttggcaagactgaaagagtaaatgtatctccatttgaaatgatggtcactagataggcaaactcttttgggaatacaggttgtctctaaggtacacagttgctagaaatataaacttttttaaaccagtataacaatcaaatgagcatattcattctaaagaattgcacatacatatattagcataaaaaagaaaatactcttttaaacagaagaataattgaggcagatgtaggcaaataaaaatacttagttaaaaaaatgtataatttgctatttgttgaaaaacaaaagtaaatcctaaccacagaattcttaaatttgatatgctcatgaaggggattaagcacagtttatgttatagatgtttctgtatcatgggatataaagggatataaaaggatatatattcaactctgggtgccttatttgagaaatgaaaattgctggttgtgactgcccttagaccttg

SEQ ID NO: 858761 - DNA, 558 bp, Homo sapiens
tatcactaagccagggtaataaagaatatggagaggacagatgaagctaaatcaacctaaaggaaggtccaaataaaaatggcagaattcttgcttgtgtcctgtatggctgtgctgcctcatcgtcatctttatgccatggagccctaggctattttccctgaattcagggaggctcccagcttggcaagactgaaagagtaaatgtatctccatttgaaatgatggtcactagataggcaaactcttttgggaatacaggttgtctctaaggtacacagttgctagaaatataaacttttttaaaccagtataacaatcaaatgagcatattcattctaaagaattgcacatacatatattagcataaaaaagaaaatactcttttaaacagaagaataattgaggcagatgtaggcaaataaaaatrcttagttaaaaaaatgtataatttgctatttgttgaaaaacaaaagtaaatcctaaccacagaattcttaaatttgatatgctcatgaaggggattaagcacagtttatgttatagatgtttctgtat

SEQ ID NO: 858762 - DNA, 629 bp, Homo sapiens
ctttgtcttttgtatcttcttgattgtcttgtcaaaaaacattggttcttttttgtgagagtatattcctttagatctctattttgttccatkggggtgtgtgtgtgtgtgtgtgtgtgtgtgtgtgtgtgtgtgtgtgttgtttttgtttttgtttttgttttttgctctgtcgcccaggctggagtgcagtggagggatctccgctcactgcaacctccaactcctgggttcaagcgattcttctgcctcagcctctcgagtagctgggataacaggcgcacgcagccatgcacagataattttttgtattttgtgtgtttttagtaaagacggagtttcaccatgttagccaagatggtctcaatctcctgacctcgtgatctgcccacctcagcctccaaagcgctgggattagaggcgtgatccaccgcgtccagccagtctgtgtgtgtttttataccagtgccattctgtataatcactatacctatattgtgtaatttgaaacaaggaagtgtgatgcctccaactttgtttttctttctcaaaattatgttggctattcaagacattttgtggtttcatgtccattttagaatttttttttctatttttgtgaaaaccat

SEQ ID NO: 858763 - DNA, 629 bp, Homo sapiens
ctttgtcttttgtatcttcttgattgtcttgtcaaaaaacattggttcttttttgtgagagtatattcctttagatctctattttgttccatgggggkgtgtgtgtgtgtgtgtgtgtgtgtgtgtgtgtgtgtgtgtgttgtttttgtttttgtttttgttttttgctctgtcgcccaggctggagtgcagtggagggatctccgctcactgcaacctccaactcctgggttcaagcgattcttctgcctcagcctctcgagtagctgggataacaggcgcacgcagccatgcacagataattttttgtattttgtgtgtttttagtaaagacggagtttcaccatgttagccaagatggtctcaatctcctgacctcgtgatctgcccacctcagcctccaaagcgctgggattagaggcgtgatccaccgcgtccagccagtctgtgtgtgtttttataccagtgccattctgtataatcactatacctatattgtgtaatttgaaacaaggaagtgtgatgcctccaactttgtttttctttctcaaaattatgttggctattcaagacattttgtggtttcatgtccattttagaatttttttttctatttttgtgaaaaccat

SEQ ID NO: 858764 - DNA, 615 bp, Homo sapiens
tttataacaactcaataagctattttatccccattttacagatggagaaattgaagttctgaaagattaggtgacctattcttccagaataastagtaaagctagaattggatgccatgtctgtctggctctaaaacctatgttctgtccatggggccacatcaggataaccattggaaaggcatcccagcctaccacatctctgcttccaggggtatattgggggccacctgcccaatccttgcaccctacttggcagtgaggaagccatggggacctctcattcactgggatctctggactgggcctcagggcagtgacaggcctttcctactatttcagctcacatctgcttacaaattaagtgggaacaaggcctctgcagctgagaagtatgcctgcggggctctgtgctgaactgacttgccagaagactagctagttaaagacctatcacttccacaggagctgatcacaaggcagagaggaagtaactcagcttcccagaaaaagtcttccttggggctatgtgaagaaaggaaactgctccctggttcattcttttctctactacgaaaccccagcaagaggttattctcagtgctcagatgtggc

SEQ ID NO: 858765 - DNA, 632 bp, Homo sapiens
aaaaggcagctattttacacggacatttaaacacaaccaaagtcaaacatttgtcaccttgtaaacactggaaaacaaagttggcagaaagaaagaaagaaaaaagaatgtraaagaaagaaaaagaagtctgaatactgcaaattgagatctacccccagaagctgcaatttggcattcgtcctataaaataagagtctacgtgggaattgaattcagctagaaagggtgacacactttgcatactgaacaaatacaaagtgaacagaaattataacttatttatgaggttttacagagttcaaacttgactgaaagtataaaaataaactgtggactttgttcattcgattagtcttagtgcctgaaagtatttctctgaaactggtctgtgccaatcgggtaacaccaagtgtggtcttcctgaacctagatttcgtttctgagcttcctagattcttaatttggggtccttttgtttgattttttaacggtttcagggaacggagtgtcctagtttggctgtgggtttaacctttttgtctcattttcttacaagtgagtgtgcaacaaagggaccctttctataaacctacaaaaaggagattcccatgttttatctgtttagtttt

SEQ ID NO: 858766 - DNA, 568 bp, Homo sapiens
aagtcacctctgcttataatcattcataaaacactagggatcctctaacactgamatctggagtatccaatttctttatcccttagaagataaaatgtgtggcaaattttgtcccattgcacaggtatagtctttaagttataagagttgcccaaagctgatgacgtcaagctcctcacagctccatcatagatccactaacctgctttgtcgccttgcttgataatggtttatttttctaccattattctgcaggagaagagagaggcaaggatgttttccttggtttttccagtaataacagcaaacaacatcatttgctgcatgctcacgaaattctattctgttctgttcagtgtcactattttctctatttttctgacaaggaaatcaagcctcagtgattgattaagtaacttgtgcaggatcatgaagctagtgtctgtctaactctaagcccttgctcttaaacctctataaagggcctctccactgcaactttaaaccccgtaatccctgggtgtggatgtcattcccttctatggaagaaacacgatctcctcacagg

SEQ ID NO: 858767 - DNA, 610 bp, Homo sapiens
cagtaagacggatgcagcaggaggccattttcctaaagaaaataatagaaaaacaaatactgttatgttctcacttgtaagtgcgacctaaacattgggtacacactgacaygaagacgggaaaaatagacactggaaaatacaagaaggaggaggaagggagggggtcaagggctgaaaaattacctattgggtactgtcttcacttcttggttatgttagtccatttttgcaccactataaatacccgaggctaggcaagttataaacaaaaaaagaggtttaattgtgtcacagttctgcaggctgtacaagaagcatggcaccagcatctgattgtagtgaggactcaggagctcacaatcacggcagaaggtaaagggaaagtagtcaatgtcacatagcataagtaggagtaggagatgtgggggaagagtcacacacttttaaacaatagatattgtgaaaattcactctttaactatcatgaggacagaacccagccattcatgatggatcaaccctgcagtatcttctgcaaggccccacctccaacatggggaatcatattcaccatcagatttggaggagacagacacccaaattatat

SEQ ID NO: 858768 - DNA, 625 bp, Homo sapiens
tgttaattgtttgctttactatgcagaagtttttagtttgatgcaatctcatttgtctatttttgctgttgctacttttgctatgtttctggggtcacatctaaagacatcmttgcaaagaccaatgtcgtggatggttttccctgtgttttattctattagttttacagtttcaggtcttacatttaagttttaatcaactttaagttatttttgtatatggtatgagataaggtccaatttctttattctgtgtgtggatatccaattttcccaagaacatttattgaagaaacactcctttccccattgtgtattcctggcatctttgtcaaaaatcaattgatcataaatgtgtggatttatttctgggctctctattctgtttcactggtctatgtgtctatttttattccagtaccatgttgttttgattactatatctttgtaagtcattttgaagtcaggtagtgtgatgcctccactttcgttctctctactccagattgctttgtctatatggcatcttttgtgattccatatgaactttagaacttttttccatgtatctgaaaaatgccattgaaaatttgaggagcattgcattgaatctgtagattgattt

SEQ ID NO: 858769 - DNA, 625 bp, Homo sapiens
tgttaattgtttgctttactatgcagaagtttttagtttgatgcaatctcatttgtctatttttgctgttgctacttttgctatgtttctggggtcacatctaaagacatccttgcaaagaccaatgtcgtggatggttttccctgtgttttattctattagttttacagtttcaggtcttacatttaagttttaatcaactttaagttatttttgtatatggtatgagataaggtccaatttctttattctgtgtgtggatatccaattttcccaagaacatttattgaagaaacactcctttccccattgtgtattcctggcatctttgtcaaaaatcaattgatcataaatgtgtggatttatttctgggctctctattctgtttcactggtctatgtgtctatttttattccagtaccatgttgttttgattactatatctttgtaagtcattttgaagtcaggtagtgtgatgcctccactttcgttctctctactccagattgctttgtctatatggcatcttttgtgattccatatgaactttagaacttttttccatgtatctgaaaaatgccattgaaaatttgaggagcawtgcattgaatctgtagattgattt

SEQ ID NO: 858770 - DNA, 625 bp, Homo sapiens
tcctgtatgctgtttctgaagtatagaatccatcaattcaaatgcacatttaacagtaaagaggctactacaaagaaagcaatgagattccagataaattttgtgtagggcccaagttagcttaaatacagcagctctcaaacacctgcaaattaagctcttatttatagtcatctcattacctttcacacctcatgccttcatggtgatgcagtgttccatactgatgacaccactcccagaatgggtgcggaacctctctcctgttcagggcacattcatctataaatgtggactaaggaaaagaataaagttatttggacttgaagacaaatttaacttgatcatagcccctttgtgcatcttacaagatttcacattattgttgctagattttaatgcagtattctaaccagttaatatctgacattggatattcctccatgtcacattttaaaggtcaatcattttcattttcctgtaaatacatttcattcatttttgtattctcaaagagtaaacagagagacagaaatggattttaaaattkacctaaacttacattctaatgaaatcttttcttctttgaagatgacaaaaaggattaaaatttaaatggagtaga

SEQ ID NO: 858771 - DNA, 634 bp, Homo sapiens
tgacaatgacaacaaccaaaagctatcaaaagtgaaaaacagaataagaaagaatttggcagatsgaatacatccacccatcttctcatctcataggaaatttctatcagaaagtatttaaagttgacagcattccatgtatattttgaaaaggaaaaaaattaaccactagaaccaacaagaataatacaacctaaaaaattctagaatgacaacaaaaagacacataagtatcctttttgaacatttttcttagcctggaattaactgataaagttaaaaaatgcatgattaaccacttgaagagataaaaacatattataaagttatcaagggaatatatacctttacataactccacaaaacataaaaaaatttacactgtgtagccattaaattttttaaagcattaaatgataacctaaagttgataactacactatggttatgtaagaaaatattccttttcttaggaaatacataagaaagtatttagggataaacaaccataataaatataatacatgtaacctacatttaaatgcttttgtatgtgtgataatatacatgtacatgggagtagtggcaaaggaaatggaaaatattaacaggaatctgagcaaaaagtatatgc

SEQ ID NO: 858772 - DNA, 508 bp, Homo sapiens
gaatttctgatttcctcctctataggaggaataataattctaacaacttcacagaatggttctgaagtttactcaataagatatrtgtaagccaggtgtggtggcacacatctgtaatcccagagactcagaagcagaggtaggaggattgttcaaggccaggagttcaagacctgtctctaatcctagcactttgggaggccagagtgggaggatcacttgtggtcaggagtttaagaccagcctggacaacatagtgaaacctccttctctaccaaaaaaaaaaaaaaaaaaatttagctaggtatggtggtgtgcacctgtaattctagcgactcaggaggctgaggtgagagaattgcttgagcccaggagtttgaggaggcagtgagccatgattgcgccagtgcactccagcctgggtgacagagcaagactccaacttctaaagaaaaaaaaaagaccgggagcggtggctcacgtctgtaatcccagcactttgggaggc

SEQ ID NO: 858773 - DNA, 679 bp, Homo sapiens
ttgggtataaactaatgcaatctctttgaaagataaagtggcactatacattgacattttaaatgtgcaaaccctttaatgcagtatttccagttctcgaaatttatcttacatctcttcttacacattatgcaaacatgtatgtatgtacaaagatgtttacccttgtattatttataatagcaaaaaagttggtaacctaaattaccatcagttgagaacttattaaataagtaaattagtatttaacaacacaatggaatactttgcagccaattttttttaagagacagagtctcgctctgtcgcccaggctggagtgcagtggtgtgatctcagctcactacaacctccgcctcctgggttcaagcaattctcctgcctcagcctcccgagtaggtgggactacaggcacacgctgccacacccggctaatttttttttttttttgtattttagtagagatggggtttcactgtgttgcccagactggtctcaaactcctgagctcaggcaatccgcctgccttggcctcccaaagtgccagrattacagacgtgagccaccacgcccagccctttgcagccattttttaaaagaagtagatttgtacatgctgaaatggaacattctccaagacataccattaaatttataaagcaaggtgcaaggggacaaa

SEQ ID NO: 858774 - DNA, 612 bp, Homo sapiens
aatacttcctcattcctcatcactcatcatttgcctggtgaaatgctttgtcccgaacctgccctatattactttatacatgttgtaccttcttcctgctatgttattcttcctcttgcccctgtttccaccccatccacctagcaaatttctgcttttattatctcagtgaagctttcacccagctacagtcaggcattccctcagggtgctctatctctagtctgctatgaatctattaatagttgtaatataacttttctcacctgtgttttacacacatatacacaacacagatgtgcacatatatgagtatctgtaggctgggagtttaactactacgacagttttttttggtttccccaggggtttggcacacatagccttattaaatgtgtaaatgaatgagtatagaaaaaatttgaacttgtaaacataaatagattttccccagtctcggcaacatagtgagacctcatctctacagaaaattaaaaaattagctgggtgaggtggcacatgcctatagacccaktgacttgggaggctgaggcaggaggattacttgagcctgggaggacaaggtgccgtgagccgtgatcacaccactgc

SEQ ID NO: 858775 - DNA, 600 bp, Homo sapiens
ttctttttccatcttgctctgtgtcttctattcatggctctattccttaaaacttttaccagaggctgaaaggagtaaggaggtgaaacttgcacttgttcatgttggtccttgtaggcatgtctggtgatggatttggtggagaagagattttgaattaagcattgaaaaagaagatttctattacccagcaatggcaatagttcatgctattcctaccttggggtcccacagataagtggggtctggtagtggttagaattcagtagtagatgaaatcaccttccacgggtattcaaggttatcagactgaagggtgctgctgatatctattgtaatacttttttttcccccaagtaaatgctaaggctagctccatgctgatttatactggcctctaaattatgtatggaaggaagccatttctccactttcagggatatggatttgatatgcaagctacatactcactcccagatgtaacgatttctgacttccccttgttctgcagtccaatggcacgcatatcatgtataaaaacacactctggatcgaaagygccaacaacactggcaacatcatcaccagggaccgcacgat

SEQ ID NO: 858776 - DNA, 529 bp, Homo sapiens
gcacagcaccatgagtaaattaatatgaascatccatcatgtgaatacaaatctgtccaatattaaatgagtttgagagttatggaatattacaaattgcttataacattttactaaacttaatattaagttgtgtagtagaaattggagagtattttaaatgaataacaataaacaaacactatgtatcaaaaatattaggattgggcttaagtagttcctagaaaaaaatgtatagccttaaatacctatgttagaaaaaagaaataattactttcatgagctaagcctacattttgagaggttagaaaaaaatagcacaattggctcaaagaaaatatataataaaaacaacaacagaaattagtaaaatagaaagcataaataccattaggaaagattaacaaaattgaagactgattttttgaaaggctaataaaattgacaaacctctgccaagactgattaaggtaaaaatagagaaggccaaaataattaataacaagaatgaaaaaagggcttcatgaaa

SEQ ID NO: 858777 - DNA, 543 bp, Homo sapiens
tagtgactcaaggctctaaatgggcatcagccacatcatcaagtggacttttgttatgatggaatgtgtaattggagagacagtctgtgataaggaaactatacataggagctgaataaacttgaaaagacaattgtagtattataaaatatatccaccaaaatgatctttggggaacttgaatcaaaagtttatttgttctgaaaattaccgtgtttcaatcaaatagatcctactttaggaagtagtctgctctcttttcaggaaagcaaattcttaagagttttgatgaaaggaaaactgagacctgtaacagccaaatactcatttacaaggtcttgcagaaattgtgtgcaattatcaaattatgcaatctgtatcaattttccttttaactcgctagaattaaaaagatcctgtgttgttgcctggcccacttgattaagagttaccattcattacaataaaaataggwtatcacattttttcactgcaagaacactacatgcattaatttaaatggaaaaatgattcaaattacat

SEQ ID NO: 858778 - DNA, 565 bp, Homo sapiens
aaactgttaccagttttggggtgtaatcacttatgctgtgctgaaatgtgtcacttaaccacactgtatcaygaattacaaccttgtgtcatttaagaggttattcatatgacaaattaacacatttgtcacagatcccaaaatttaaagtctgaattggaatttggttttaaaatgcttttttgatagaatatttgattccaaaaagcagaaattgaatcaaactcaatttagatagtattttaaaatatataaaaattagttttaaactagtgtggcaagttttatcctgtgacaactacattcaaacagaagagattatgagactaaaccaaatagtaatcaaactaaactatgacttctagaatcttttataaaataaagtttcatgttagtgcctaaattttgaatgctgaagtctgtgttgatcaataagttttagaaaaataaaaatggactggaatgaatgaagatagttatgctaaggataaaataatctaataatataattttactcaccttgtcaccaaagggcatatgtccctagacataatcctgagaaaat

SEQ ID NO: 858779 - DNA, 574 bp, Homo sapiens
ttgactatccacaatttatactgtacaaggagctgtaataatgtcctgggctgtgagattcaagtggatatttttcttttggtttcccatcccaaaatactccagtcatcatccccagtggtaagttattcttcattctgtggcttattctcaaaatgtgggttttctttacattcttatgctgcccctctccattgcctcagaaccatatcctatcagtagatttttccattctgaaagctgcctacattacaagtcttatccagtgggtattaatgtggaaataatgaagatgtcacatttttagaaatgtttcatagcctctcaccttcatgtttctttaaaagtgttaagaagttatattttaatgcagtgaccttaactgataagaattattccctctaagactaccaaaatacaattttttttagcatttcattttctacaacttgaaaaaattatatttctaccaaaagttgcatttcaacaacaacaacaaaaatactcaatacctactccaattatacaaaytcacttttggttaaaaaacataactgctggaattatcatcttg

SEQ ID NO: 858780 - DNA, 475 bp, Homo sapiens
atgcaaggtacaaagaggggtggaacttcatcagaactgaaaagaggagaattaattaagtctacacatatgactgtatgctgtcattctccatcttcatgcacagaggtttgcctgcctcatgtctatctccttcccattgcccagacatgaaatttaaggtttcatccctggggaaattaaactgtcttctacaaaagcaatccacagtctgaaatttggttatttctcagaatatttacatttatcttgcttccaataattctagaacaaatctgacaatagacacatcttataaatgtacccagatgtcctactatctttttctcaccttattgttagaaatataaaacaaactatgggcaaacaaatatatgagkaagttttcaactggaagtacacactgagatactttagctagatgaagaaaaactaaaatgtaacaaagagcattctcatcaaatttcatgtaatc

SEQ ID NO: 858781 - DNA, 475 bp, Homo sapiens
atgcaaggtacaaagaggggtggaacttcatcagaactgaaaagaggagaattaattaagtctacacatatgactgtatgctgtcattctccatcttcatgcacagaggtttgcctgcctcatgtctatctccttcccattgcccagacatgaaatttaaggtttcatccctggggaaattaaactgtcttctacaaaagcaatccacagtctgaaatttggttatttctcagaatatttacatttatcttgcttccaataattctagaacaaatctgacaatagacacatcttataaatgtacccagatgtcctactatctttttctcaccttattgttagaaatataaaacaaactatgggcaaacaaatatatgagtaagttttcaactggaagtacacactgagatactttagctagatgaagaaraactaaaatgtaacaaagagcattctcatcaaatttcatgtaatc

SEQ ID NO: 858782 - DNA, 540 bp, Homo sapiens
gacaggctttgtagtggcaagtgagttaatgtacttcagttgtacagctgcatgtggtggcaggctttaagtcaaaatccgccacttattttagtccgcatgtgrcacacccattattttatttacttccatcaatgcgtctttcccacactgcacacttgtctcagtcacagttttggtaagcccacaagctaagcctagccaaaatgagtaaaaatcaaatgtcatcggagagcttctttgaaaagggttaaagacccaatgatgagacagcagaagaccctaagattgccaacaaaaagaaagctgcatttaaagagaataccaagagtcctacttaaattacaggttcattgcaacagatagttcacattctccaagaccactctgtacaatgtgtggtgaccagttatccaaggaagtcatgaaaccaacaaaactgctttgccacatagtgaccaagcaccctgcattaaaagacacaacttcagcgttatttaaaagaaaacaaaaacataatgaacagaagcaattgttgaa

SEQ ID NO: 858783 - DNA, 540 bp, Homo sapiens
gacaggctttgtagtggcaagtgagttaatgtacttcagttgtacagctgcatgtggtggcaggctttaagtcaaaatccgccacttattttagtccgcatgtgacacacccattattttatttacttccatcaatgcgtctttcccacactgcacacttgtctcagtcacagttttggtaagcccacaagctaagcctagccaaaatgagtaaaaatcaaatgtcatcggagagcttctttgaaaagggttaaagacccaatgatgagacagcagaagaccctaagattgccaacaaaaagaaagctgcatttaaagagaataccaagagtcctacttaaattacaggttcattgcaacagatagttcacattctccaagaccactctgtacaatgtgtggtgaccagttatccaaggaagycatgaaaccaacaaaactgctttgccacatagtgaccaagcaccctgcattaaaagacacaacttcagcgttatttaaaagaaaacaaaaacataatgaacagaagcaattgttgaa

SEQ ID NO: 858784 - DNA, 591 bp, Homo sapiens
ctcaagatctgacctcacctcccttgattgattctaaaccaattatgaggttcaagtctcagcatgtcctcactggggaaattctgtttctgtctggggaaaaaataaagattattagcagaacctgagaatggatcttgtgggtgctatatgcattcaaaaccagcatctctagcagattcactgagagccattattttcttgaagtttcaaggaaacctcccagtagtttaatagtagtttattattagtgcttacgtacttcaggtgtccttgcttaattcaatcctgagtcacaagcaagttccccaacatcaaaaatatcttactgatgcctatattttgtccccaccacccctgtatcccagcctggtaactgcctttatatctaggttttgctattaatagtaattctgttactatcaagttgagttcagaaataggaaaatagaactagtcatactttctcacgccraacacatagtttattatattcacacacagttttctccttttgccccacaaaacaatgttacgttcaaagttcaatgaggcattcctcataaaatttagatagctggcatgacaatt

SEQ ID NO: 858785 - DNA, 552 bp, Homo sapiens
agattgcagaaattaggacatagacatcttgtggggagggtatattatctggctactatacatggcttctagtttttaacagactatgaactcactgtatgaaagctagggtcttgcagatactatatttctacagtgttagcatagtggatcaataaacagttgttaaataagtgtaggtggctaatatcacctagtagaaatcaaggtcttctgtgcattcactttaagaatattaacatgagttatactcaagtagttgtaatggcatgcaaattataaaatataataggaaaaatgttttggtctagacaaagaacactatgggttgtttataattccttgatttagttttcaaataattaaataaaaataagcctcaaattgtctgcaaattgttatgaaaggaaatgtttaggagaataaatagactcgtcaatattttcttaggaaaaatatacagggctttagtaatttgaaaagcatgtttcttraatacaataatgagttaaatgttagtcagagatttcagaagattttaccaagaagccc

SEQ ID NO: 858786 - DNA, 639 bp, Homo sapiens
tttcctctcttagctttctcattaaaatcaatgaacaatgccagcctcatggggttgttgaatgattaaatkagttaatatacctaaagtacatagaacactgcctgcacatagtaaaagaattataagtgtgaggtagttggtaaaattatgtagttggatatactaccgaacaatatctaatctctttttagggaaataaagtttgtgcatatatataatcccgaaacatgatttccagacaatggaattgataatttattctttctgtgttgattttttcacaatgaacattgataacacttattttattttattttaagttccaggatacatgtgcaggatgtgcaggtttgttacataggtaaacgtgtcccatggtggtttgctgcacctatcaacctgataacatttttaatttaagaaaaaggttaataccagcttagacagtttattttggctcttatattatttagaattaggcttggtttcatgggcagaaaaattaaatagtattcagaacatgtttacgggcttctgtattcgacagtttattttgattgcaaaggtttgaatctcagaaccttcttttccctttacttaaaaaatggtaaaattcataaaacatggctatgaatg

SEQ ID NO: 858787 - DNA, 639 bp, Homo sapiens
tttcctctcttagctttctcattaaaatcaatgaacaatgccagcctcatggggttgttgaatgattaaattagttamtatacctaaagtacatagaacactgcctgcacatagtaaaagaattataagtgtgaggtagttggtaaaattatgtagttggatatactaccgaacaatatctaatctctttttagggaaataaagtttgtgcatatatataatcccgaaacatgatttccagacaatggaattgataatttattctttctgtgttgattttttcacaatgaacattgataacacttattttattttattttaagttccaggatacatgtgcaggatgtgcaggtttgttacataggtaaacgtgtcccatggtggtttgctgcacctatcaacctgataacatttttaatttaagaaaaaggttaataccagcttagacagtttattttggctcttatattatttagaattaggcttggtttcatgggcagaaaaattaaatagtattcagaacatgtttacgggcttctgtattcgacagtttattttgattgcaaaggtttgaatctcagaaccttcttttccctttacttaaaaaatggtaaaattcataaaacatggctatgaatg

SEQ ID NO: 858788 - DNA, 575 bp, Homo sapiens
catgcccagctggactcgctctgaccatctgggccactgggagaagagggaggggctccgtcactatcctgcaccgrcaccgcgcaggctttgaaagtttcgaaatccagtgggcgctgcaccctgtccttatggaagcccttcatagacaacgctgtgtcatggtcaaccagatgtccttgaagccaggtagggtctaaggagctacctccccttggctcctggatatacaagcccatcagaggagaatgaaagtcctttgtggtatatggcaactcggccatagtggctgtctcctgtgtcctccttgctggagatccagggaatgagcaccaccgctgagtccaggtcaagggcctttcattggagaagaggtccagaaggcaccacaagccaaggcggcgagaaagtgcaggaacttggcaaggtctggagaagttttggcaggactgcagggagcctgtgcctgcagtgagagatcgtgctttgagggagcacagtcaaggctgaacggggagggggtaggcaagaaggcgagactctcttggagtggacatgtgggcagccgtatgagg

SEQ ID NO: 858789 - DNA, 594 bp, Homo sapiens
tgtacatgctaattcctttaaacctcaccatagtcctatgagactatactattatcagccctcatttacagatggggaaaccaaggcacacagagattaggttacatggcttggaagaatcagagccagaatttaagcatgagcaatctgacttcagaggcctggcactaatcactattctctaaaagaaggatgtaggcccagtatgctgggaactcagaggcaggagaaattaattcccactgggcagactaagggaggcttcctggaggaggtcttttcatctgggcctaaaaaaatcaggagtttgtcaggcaaagttgagcatggggaaagaacagaaggggtcctagtgtatgtgtgtgtgtgtacgtgcgtgcgtgtgtgtgtgtgtgtgtgcatatgtgtgtgcatgcatgtgtgtgtgcatgcgcgcacacacacttgtaaaagagagctctcawctcatcactgcagcctctcccatctcatcactgcagcctctcccatctcttctcttccatcttatttgggtgacaaatgagataacatatacaagcattgaacattcaacaaatatttgctgagcacccc

SEQ ID NO: 858790 - DNA, 594 bp, Homo sapiens
tgtacatgctaattcctttaaacctcaccatagtcctatgagactatactattatcagccctcatttacagatggggaaaccaaggcacacagagattaggttacatggcttggaagaatcagagccagaatttaagcatgagcaatctgacttcagaggcctggcactaatcactattctctaaaagaaggatgtaggcccagtatgctgggaactcagaggcaggagaaattaattcccactgggcagactaagggaggcttcctggaggaggtcttttcatctgggcctaaaaaaatcaggagtttgtcaggcaaagttgagcatggggaaagaacagaaggggtcctagtgtatgtgtgtgtgtgtacgtgcgtgcgtgtgtgtgtgtgtgtgtgcatatgtgtgtgcatgcatgtgtgtgtgcatgcgcgcacacacacttgtaaaagagagctctcaactcatcactgcagcctctcccatctcwtcactgcagcctctcccatctcttctcttccatcttatttgggtgacaaatgagataacatatacaagcattgaacattcaacaaatatttgctgagcacccc

SEQ ID NO: 858791 - DNA, 564 bp, Homo sapiens
gggacaatgagtgaggcaagaggggctcaggcagcccagctgacggattaactgtgagtgtgtggggtgggagcggccagagagcggaggtgggaagcgaggcttgaggaagaggggcagccggcagcaggggctgatgtctctgagaagagaagcccatccgtgaaaggccgaaacttcaaatattcaacttgcatacctggggatccttgtgttcttttgctagcatttgttttaagtatgcagggcccactcccacattctctgaaccctgcctgtcctggacgccaggagctttggtctccatcactgggagagatgagtcaccccatctctgtctccgtagccactgacccacggacttttatcattttcccccaagaattctgtgaaagtgtcccaatcatttttctgcctccagtctcatctttctcaaatgttccctcaacaacgagacctcttctgaaacacaaaccaccacactgcrtccccagagccgagatggcaccactgcactccagcctgggccacagagcaagactctgtctcaaaaaaaaaaaaaaa

SEQ ID NO: 858792 - DNA, 587 bp, Homo sapiens
gacccacctgtcagaggggcctcagccttaaacgaaggtgtaaactggcctcggggagagtcctggggccagtagtaatgtctagcccccgttgcctgaggttgagacaaacgtgctttcctccttttcaaaacaaagtcgcaactctagcaagcatgaaattaaacgttactaaattaaaatcagagacatctctgtaccctcacatcctaccatttgcctcagccgacaacgtgctattcacactcacgtgtccataccaaacaacactgtttggatccatgctttcaccagctaccactctgagtctcagctcctctttacagcaaaacttctcaaaacagacttccatacacaccaatccaatctcctcctgccatttcctcgccaacaaaacactgattgggttttcaccactgaggtggctctgtccctgcagctgtgacctcccggtgcacccgcaatgccagtcctcagtctccatctctcttagactcccgggtgtctgatggccccgtgctctctccttggtgggacgtttcctaacacctcactttggacacrtctatcctcccggctctcgggct

SEQ ID NO: 858793 - DNA, 499 bp, Homo sapiens
tgctacaggtgatgtctcctttacagcaagaagttttaaataatccagactcagtctcttgaagccagcagtccattacaagtagagttaactgataaggcggaattgattacaaaaaggtaattcaattgcaagactcctgacaacactataatctaatactgcttaggaaggaaatcactctttctctttggcattttcattaacagcaccaccttactgcagtttaaaaagtaccatcaggaaaaatagcctctttcactgtccctcctagatagattaatctgacctgtctgtaaataatggaatttctattcaagccccagcttgtgattcattttgtttgaccagtaatggcatgcgagatgacaaatattcatggattgcgggttttttccatgaargtggctaacaagtaaggggacaatgttgaaacccaagacatcattcagagaaacccaagcctcacagggctgctctcctgggagaagcagtgtta

SEQ ID NO: 858794 - DNA, 581 bp, Homo sapiens
ttcattacagtgagttactttatttgaaaacaacacatgcacacatacatatatacaattccatgtttcctctgtattcacgtactttgaaaagttcaattttatccatttacagaagaggtgtcctcccagagtaagtttggatattagttatttaaggtaagcctatgtcaggtggaaatatgattgatgttaggaccctataaataccttcttttgctttatatgaaactatgaaattggttctaattatattaccaaattgaatcatattgaaaaaaagtaataaaatcattgcattagtcacaatcagccacatttgctggtattcaggcctggtatttgacatatatgttattccaaagccttacaaaaacccaaatagaagttattaccatccctgttttacagacaaaagttcaggggcagaagatccaaatcttacctttagaaacacagaaktgaaatacaaacctttaaaaaaaaaaacaaaccacaacgctaggactgcctctaccacactatgccttcatggaactgttatgagagcttttagaacattattgccaagtacagactaa

SEQ ID NO: 858795 - DNA, 606 bp, Homo sapiens
gaggagggatagaaagcaggaagcctagattgtttctaacttggtcaaatggttgggtggcgatgctaatggcctttatatggaatacaaggggggaagcaagtttaagagaaataaatactgttttyagttttggaacatgttcaatttgagttgcctgtcagatgtccaagtagatgtaacccctgggaaggtggatatatagaacttttactgataatctaatcatataattgatagcttataatccttggccttatttttgccacaatagtctccctctttgcaatttttccatagagtataatcttcaacttttcttcatgttattagagagtaataatcatgtttatataattaattacttttgctcacatattgagtaaaccggaagtcaaagattacactcagagctggataaaattaagagttttcatttattttggaaaacgattttagcttataaaaataaaacaatcactgtgaaaagacatggaagaatcttaaatatatactactaagtgaaagaagccaatctgaaatggctacatatggtatgattacaactgcatgacatcctggatgagacaaaactagatacagtac

SEQ ID NO: 858796 - DNA, 606 bp, Homo sapiens
gaggagggatagaaagcaggaagcctagattgtttctaacttggtcaaatggttgggtggcgatgctaatggcctttatatggaatacaaggggggaagcaagtttaagagaaataaatactgtttttagttttggaacatgttcaatttgagttgcctgtcagatgtccaagtagatgtaacccctgggaaggtggatatatagaacttttactgataatctaatcatataattgatagcttataatccttggccttatttttgccacaatagtctccctctttgcaatttttccatagagtataatcttcaacttttcttcatgttattagagagtaataatcatgtttatataattaattacttttgctcacatattgagtaaaccggaagtcaaagattacactcagagctggataaaattaagagttttcatttattttggaaaacgattttagcttataaaaataaaacaatcacygtgaaaagacatggaagaatcttaaatatatactactaagtgaaagaagccaatctgaaatggctacatatggtatgattacaactgcatgacatcctggatgagacaaaactagatacagtac

SEQ ID NO: 858797 - DNA, 606 bp, Homo sapiens
gaggagggatagaaagcaggaagcctagattgtttctaacttggtcaaatggttgggtggcgatgctaatggcctttatatggaatacaaggggggaagcaagtttaagagaaataaatactgtttttagttttggaacatgttcaatttgagttgcctgtcagatgtccaagtagatgtaacccctgggaaggtggatatatagaacttttactgataatctaatcatataattgatagcttataatccttggccttatttttgccacaatagtctccctctttgcaatttttccatagagtataatcttcaacttttcttcatgttattagagagtaataatcatgtttatataattaattacttttgctcacatattgagtaaaccggaagtcaaagattacactcagagctggataaaattaagagttttcatttattttggaaaacgattttagcttataaaaataaaacaatcactgtgaaaagacatggaagaatcktaaatatatactactaagtgaaagaagccaatctgaaatggctacatatggtatgattacaactgcatgacatcctggatgagacaaaactagatacagtac

SEQ ID NO: 858798 - DNA, 478 bp, Homo sapiens
tgatatctatgatattatatgagtattatgagatcacaaggatgaataaatatattcactgttcatgtagttcatagacaatccaggaaaagaatatacatctaatccaatacggtaagtgcaatcattgaatcagagagtccagagaggggaatggttaattctctctgattttgaagattaggtaatggtaaaaaatgagagtcagggaatatttcacagaaggtaaggttcgaactgggaaattttccaggtggcaataggataaaaaaacatccaagtagaaggaatatcatgtacaaggctgcagagtttagtagcagcatgggctgttattcagtgccagggaagcttaggaagcaagaatggcacagcaagatgtamggctgaaggcataggctggagccacatcacaagggcctgttcaccaagccaaggaattcagactttaactttcgatgctatagatatcaatcta

SEQ ID NO: 858799 - DNA, 603 bp, Homo sapiens
tattttgcatccttcaagccaatcaacttgacactcaatattaatgatcacaccttcatgattggattaatacattcatggattagtggattaatgatttaatgaagtaatgaattatcatgggagagaaaccagtggctttataagaagaggaagaaaggcgtaagctagcacttaatgccctcagccctctaggtatgtgataccctgcactacctctggactcttcagagagttcccacaagcaagaaggccctcaccaaggtctgctgcccctcaaccctgggcttctaagcctccataactataagaaataaatttctttttttaaaataaattacccaggttcaggtattctgttacgagcaacagaaaactgattagacgctgaccatttgttgaattgaaggaaattagattaagaaatttatttaaaaacccattattttttcaacattaagatgttatgagtcagtaatgtgtatatgtctcygcactagaaggtgcgagcattcgtagaatataaaggtgccagttgagattggcttatgatcagaatgtgaaaggaaaacaattaggtattaataatgcagtctatatctg

SEQ ID NO: 858800 - DNA, 499 bp, Homo sapiens
gtttacagcatggtttactaagtatactaagcccgctrttgaaacctactgctcaggaacaaaaggtttcttgcaaaagattactgctcattgacaatgcactcggtcacccaagagctctgatggagacttacaaggagattaatgtgtgtgtgtgtgtgttttcctgataagaagacatccattctgaaggccatggatcaaggagtaattccaattttcaagtattatttaagaaatatattttgtgaatctgtaggtgccgtagagcatgatttctctgatggatctggacaaagttgttgttagctggttgttatgtagacttgatgctgtagttgcttaatactgtctgtgggctctttgcttaagtgtgtttttgtggcagtagatgttcttttgattccatgtttagcactcccttaatgacctcttgtaaggctgctctagtggtaacaaattttattcatgtttgcttgcctgagtaggcttttatttc

SEQ ID NO: 858801 - DNA, 548 bp, Homo sapiens
aaaaaaaaaaaagaacttggctacattcaatttccaaatgaaaaccagcaccaggcagttccaatatggccraataggaacagctccagtctatagctcccagcgtcagtgacacagaagacgggtgatttctgcatttccaactgaggtaccgggttcatctcactggggcttgtcagaagcccacggtgccctttcctagccaagggcagctgtgacagatggtacctggaaaatcgggacacacccaccctaataatgcacttttccaaaggtcttagcaaacagcacaccaggagattatatcctgtgcctggctcagagggtcccatgcccacagagcctcactcactgctagcacagcagtctgagattgaactgcaaggtggcggcgaggctgggggaggggcgtctgccattgctgaggcttcagtaggtaaacaaagctgccaggaagcgcaaactgggtggagcccaccacagctcaaggaggcctgcctgactctgtagactccacatctgggggctgggcatagctgaacaaaagg

SEQ ID NO: 858802 - DNA, 641 bp, Homo sapiens
catcttctcatttacttcccattgtctcctctgtggactttgcctatttgaaatcctacctatcttttcaggtttactgcaaagcccatctttttggatgctactcaagggtgcttttcatgatccttccagagaaaaggaatttttctttttttaccaaccatttttgctttacttttatttatcattcaccctatttatatcatacttatataatatatttatgtgtttatgtataatctctctccagctaaattataaatttttagaaatcagaaaatatgcaatattttttccttgaggtcatagtagcaactaggatgatgcctcaaatatttatgtgctcaataaatattgggtgaatcaataaaatactgtcagcaaattcaacactaacagcactctaataacatattttatgattctaatattctagttcacagaacaaatattttaagatttggagtatttcaatgtatgacaaggataaaaatttatgaagtgatatttaattccactctgtgattatttcgtttatttcgttggttattttakttgtctatcactagactggaatctccataaaagcaaatacatactttgttcaacattttattctcaagtatgtattgagtatgtgt

SEQ ID NO: 858803 - DNA, 614 bp, Homo sapiens
cctgcagaattaaccacacctctaattctatctagtggtcaaaacctagaaggtggaactaagacagaaaagtgctaccagcaaaactcaagggatcttgaggacttctgcttctgtccttgacaaaataaatggcatcaaactagaaatacatacaaattggaataaaaatgaaactacaatctctacagctttttatctaaaggcactttctagactgtggcatagaggggtaacccaagcagaacatgaaaatctcactgagcaaaggaaacggaatttgaactttgtgaaggctgaaacaaaagtacagatgggaagttacacagagaaagggtgccagaaatctacttaaaggacccctggagtctttaaagaaagaccaagctgaacatgctgaggatgagagtccacaaggtcaggcaaagaaaaattaccatggagaaaacaattaccaaagagctgtaagcagaacaatccccagagctcacaaagggctggaagacattctagttcctcccaaccagaataaagaaacctcgctgaacatccatgacaatcagcagagaacccacaarggtcatgccttagtagaaaggctaaaccagtcctag

SEQ ID NO: 858804 - DNA, 648 bp, Homo sapiens
cttgattataaagagtgcgtygttgtgttatttgctttatttttctcttcgttgtgaaagtcctgactctgccagattttcagatgtttaatggatttgcatgtgatttaaatggtcctctgacatcccttttatcaatttcgggaagtccatcttttgtgagaattgcaatttcaattagttttgggtttgcattgcactggctagtatttatataatcaacattcactgaaagactgaccaaagggattaccataatgggcagagatagctgctgatattgaagagagagagagctatttgggcaagtactaattttatggaagtccgttcatcagtaaatatttcttattatgatgacttttgcaactcagtgggtggggataattggatagttgggtagtaaagaccccatctgctgaatgtttgctatagaaggccacgtctttcagtatatttcctgctctctttccaggctcatgctttcagcaaatacctgttgagtcctgcctgactcctatgttgagtcatagggtactgagtaaaaattatttatgcagtatcttgaaatacctagctgaatgggtttttttagtcattgttttttgttttgtattcccagtctggtcaatcagaatgactcacagg

SEQ ID NO: 858805 - DNA, 648 bp, Homo sapiens
cttgattataaagagtgcgttrttgtgttatttgctttatttttctcttcgttgtgaaagtcctgactctgccagattttcagatgtttaatggatttgcatgtgatttaaatggtcctctgacatcccttttatcaatttcgggaagtccatcttttgtgagaattgcaatttcaattagttttgggtttgcattgcactggctagtatttatataatcaacattcactgaaagactgaccaaagggattaccataatgggcagagatagctgctgatattgaagagagagagagctatttgggcaagtactaattttatggaagtccgttcatcagtaaatatttcttattatgatgacttttgcaactcagtgggtggggataattggatagttgggtagtaaagaccccatctgctgaatgtttgctatagaaggccacgtctttcagtatatttcctgctctctttccaggctcatgctttcagcaaatacctgttgagtcctgcctgactcctatgttgagtcatagggtactgagtaaaaattatttatgcagtatcttgaaatacctagctgaatgggtttttttagtcattgttttttgttttgtattcccagtctggtcaatcagaatgactcacagg

SEQ ID NO: 858806 - DNA, 649 bp, Homo sapiens
cttgattataaagagtgcgttgttgtgttatttgctttatttttctcttcrttgtgaaagtcctgactctgccagattttcagatgtttaatggatttgcatgtgatttaaatggtcctctgacatcccttttatcaatttcgggaagtccatcttttgtgagaattgcaatttcaattagttttgggtttgcattgcactggctagtatttatataatcaacattcactgaaagactgaccaaagggattaccataatgggcagagatagctgctgatattgaagagagagagagctatttgggcaagtactaattttatggaagtccgttcatcagtaaatatttcttattatgatgacttttgcaactcagtgggtggggataattggatagttgggtagtaaagaccccatctgctgaatgtttgctatagaaggccacgtctttcagtatatttcctgctctctttccaggctcatgctttcagcaaatacctgttgagtcctgcctgactcctatgttgagtcatagggtactgagtaaaaattatttatgcagtatcttgaaatacctagctgaatgggtttttttagtcattgttttttgttttgtattcccagtctggtcaatcagaatgactcacaggg

SEQ ID NO: 858807 - DNA, 453 bp, Homo sapiens
gtcacatagaggactcacctctcatgaagttgagactaaggttttactaaggaaacaggtcagcatttcatacttttgaaaaattattatagatcaccatgtaaagtgtttggcacaggtgaagatgaattatatcttcaaataaaaattccttttcagctcaacatttattaaatttctagtattacaagactatggaagacattgtggttacataataaataaaacaaggtctcagtgtacctgaaaatcttttggggaatcatcttccttagaagaaatggtctatgcaatattccaagaaaagataagggtctgtatacaaaggatgtcacayaaaattgtatatgtattcacctttttctggagatattgagacatggatgggcagcagataatgggaaatgaaggcttgtaactcaggagaagaagataaatgaataatcacttaac

SEQ ID NO: 858808 - DNA, 634 bp, Homo sapiens
ggtagtacaatgacatgtatccatctttactgtgtcatatgcaatacrgtcagccctctgtatccgcaggttcttcatccaccaattcaaccaagcacagattggaaataagaacttgtgttctctaagtcccctgcgctccacctattcattccttcctcccccgagcccctggcaaccacacgtcatcttactgtctccatagttttgcctttcctggagttacagagttgcaatcacacagtgtgcagtcttttcagattgtcttctttcacctggtaagatacatttacagttctactgcatctttcacggcttgacagctcattgctatttttttttttttttgagacgaagtttcactctggttgcccaggctgtagtacaatggcacaattttggctcactgcaacctccacctcacgggttcaagtgattctcctgcctcagcctcctgagtagctgggattacaggcatgtgccatcacactcagctaattttgttttttcagtagagatggggtttctccatgttggtcgggctggtctcgaacccccgacctcaggtgatccgcctgcctcggcctcccaaagcgctgggattacaggtgtgagccattgagccaacagttca

SEQ ID NO: 858809 - DNA, 634 bp, Homo sapiens
ggtagtacaatgacatgtatccatctttactgtgtcatatgcaatacggtcagccctctgtatccgcaggttcttcatccaccaattcaaccaagcacagattggaaataagaayttgtgttctctaagtcccctgcgctccacctattcattccttcctcccccgagcccctggcaaccacacgtcatcttactgtctccatagttttgcctttcctggagttacagagttgcaatcacacagtgtgcagtcttttcagattgtcttctttcacctggtaagatacatttacagttctactgcatctttcacggcttgacagctcattgctatttttttttttttttgagacgaagtttcactctggttgcccaggctgtagtacaatggcacaattttggctcactgcaacctccacctcacgggttcaagtgattctcctgcctcagcctcctgagtagctgggattacaggcatgtgccatcacactcagctaattttgttttttcagtagagatggggtttctccatgttggtcgggctggtctcgaacccccgacctcaggtgatccgcctgcctcggcctcccaaagcgctgggattacaggtgtgagccattgagccaacagttca

SEQ ID NO: 858810 - DNA, 658 bp, Homo sapiens
acagtggaaagacgtaaggacacggggggaaggtagctgtctgcaaggcaaggagagaggcctcaggagggagcagccctgtgacaccttgatctcggactccagcctccagaaccgagagaagatggaccgctgttgaagccacccatcagtggtgctgtggtggcagcctgagctgagacagtggcagacgacacgctgggagcttctgacaggaaggagcgagcaggccagagccttgggaaaccaaccgcaagggatgcaatccaaccccaggagctcccaaactcaaagccactctggacaaaggctgatgtctggaactagcgggacgggatgggcctggcagggatggggaagacagcaagcagactttgtccgcaaacagcggacacccagggccacagccttgcaggactgggacgggtagcgctcacaggtgtgagcaaggtggctcagggctggtgggaacagcaagcagtggcaccgaggacgcaggttcttcctagctcttcactctgccaggctcaggggtggcttcagctgtagccagcctgcaagatgcctggagcagttctagctgccgcatcccaacaggatgatgtccaaaatagcaycagcaccttttctttggaatgacgtaacctttcccagaagc

SEQ ID NO: 858811 - DNA, 633 bp, Homo sapiens
aacaccaaatcttttttggatatgtgctttacaaatattttctcctatgctgtagtttgtatttccatcttcttaatatgatttttccagtgcartgttttcaattttgattaaatccagtttatcagttttttctttttatgaaatcaatgatccattttaagttaaattttatatcataagatttaggttgagattttattttatttctatttttgcttattggtgtttattgctccagcattatttgttgaaaagattatttctctttcagtgacttttatacccttgtcaaaagccaattgggcatgtcttttctgttccactgatctatgtgtccattttgccttggaccccacatagttttaattactgtagctctgtaagtgttgaaatcaggtggaatgatttctctcacttcattcttaaattgttttaagtgttctagttcttttgtattttcatatacacttcagaataaaattgtttggtttattttatcattattttatagtttttgatatacagtatttatttagaataagtatttttgagcaattgtaaaaggtattatatttttaatttgggtgtccacatgttgattgataatatgtagaaacacaactgattatg

SEQ ID NO: 858812 - DNA, 512 bp, Homo sapiens
ccagcagaagattctcaaagtaagaaacggctttagctcaagaaacaattccaaggtgctgccaataaagcatggcctaaggataaatatttgattaagtctcagaaaaatttgaggccatgcctgatacactcttttgactgggaaaaatagcttgtaagattctcaatgatattgccccacagacctcagattctaatcccaaggtagaagggggcctatttcaaaaatgtatgggtgtgccttctgtctcataaagtacattaagatcttaatatacaggaagctgacaaagttttcaaaagaattatataagcttagactgggagggacagaggccatcaaagaaaagggacatttgggtctccaactccctagagacagaaagaagatgaggaagctactcaactgtaaacattggtcattttttatggaaaagtraaaatgagtcagaggatggagccagaagcccagagaacagcgaaaagaactgaagagaactattcccggag

SEQ ID NO: 858813 - DNA, 528 bp, Homo sapiens
tactagttttcaaaaagtcttgttatactggtaataattkttaaagagatacctccccaaactgtttgtgttctcattataataaactaaaaagaaaagttaaactctttgtctggttatgtcaatctggagagttgatttataccttgaagaagattagttttgactcagcattttgtaactactaaattttcatttaacagtacatctttcctgagctacaatttccaactggtataattattgtacagaattttgagtagctgtattgcaccttggtcgcttatcatataactaataagttataattatagcaacaaaacactttgaaaagcaaaattagtttagtggcaatcaaattcaaaaatccattcaaagaaagctaagtaataactgtaattgagtcatatgtaaaatgaaaaagcttcaaaacataatgttttaaaacatcttgtagaaaagtgacacagcatctttgattttcttgttatgttgctctttagctataaagataaaaaaattggagca

SEQ ID NO: 858814 - DNA, 560 bp, Homo sapiens
gtgatgagactatcaccaaggggtgagaccatcgcctaccgctgagtggcgagactgtcacctatcgccaagcagtgagtaccatcggacccctttcgcttgctattctgtcctatttttccttagaattcagtggctaaatacctggcacctgtcagtcaattaaaggggactagccgccagactaaagacactggtgtcaggctttctgggaaagggctctctaacaactcccgactctttggagttgggagcgttggtttgcctagaaccagcttccacttttcctgtacttctgggctgagccgagggtcgacggagaggaaagccatgcaactccggggtcccgacaacaagatggttgaccctgtggtcatgagcagaactctcaaaggcatgtcacccaagcgagactcacccatctatcctatctatcctgacctttgccccctaggtcctaatgcctgccargcaaacttcctctcacctctcttctccaaggttagtcccacttctaaaaatcactacctgtctctggtgcttttctagtttctcctata

SEQ ID NO: 858815 - DNA, 628 bp, Homo sapiens
cacaggctgtagtgagcctagattgcaccactgcactccaacctgggcgacaaagygagactccatctcaaaaaaaaaaaaaaggctatatgcaaatgaagtaaataacaaataacattgtagaggggtgtatcattaactgagaaaatgagtgaaatcgctggtaaatacaaagacagttcatagaagagagtgaagaagacaatgagggaaattttacaggagcgagaaagaagcctgggggtcaggagtgactgggttttgagaacttacgaagaagttcttttggcagaaacacgatcaatgaactataagcactattcagcaaaataactgaacggggaggactgttcaattatagagaactttgaatttaggctgaggaatttaagtgtgttatgtgggcagtggatgttgaagtggcagtagtgggaaagaacagaggtcttttgtccactcagaaggcagccttcgcatggtacaaagataactcttgagttttctttgaggtcttgaccttcagttatgaaagaattcacctttaagtatcagaaaacaaccaacagtggctttaaacacataggcaagtgttgttacttgtttacttttgtttacttttcatgtaaca

SEQ ID NO: 858816 - DNA, 651 bp, Homo sapiens
agctgccatgtctcctcacttgtattattctaactgttcttgctgcctctcctggattctggcagtgtattctgaatacagcaaccagagtaaaacttctaaattaggccagtcatgttatttagcttcttagaggcctctggtttatatctttgatctctcacaagaatctcactaaactccattaggatagagaacttgatgtgattggtcactactatatctccagttcttgggagagagaatgcttgatgtgtaggaactatttcttcatatttttgaattaattatattctggaagcatgatgtctcaaagatagaaatttgagcaccctctgtcactcttcagaaggtgattggaagtgtggaaggagaccctagatcagtgactcagtgaagcaaagaatgtcaacttcatccttctagagaaatgtccaaaatgtatgctaactggagacattaagagacatatgacaccaacatgctgagtgatttatcagagcattggcaaggtacagaatttaccccatatgattcaaatgaagatggttctacgaaaggaatgcatrtggtatgtgatcaggattaaaggagcagaagcagcaggaaaccattaatacccactagggctgaaggaacaaggagagaaaa

SEQ ID NO: 858817 - DNA, 606 bp, Homo sapiens
ggagaaataagttcaagaaacactacctactgtatttcaggtgtatagactattagagagtatggagtattgaacaaatgtttaactcagtgtttcctaaattataatcctttttatgggtctcaatgagtcccataaactagcacttcagagaacacactttggaaaatgctgtgtaactattcccaaaagttacgacgtaaagaaccactgctgtccaaaagattcacaaaatgctgactattgttcgtaaagttatcatgaacaaaactgaaaatactatcctccccttacataaaacgtggaactcatggaatattctatagcagtctataaatattttagaaccctaagaaaaatacaaagagactaaagaaggtctgaggcatgctgattaaatttaacaggaagaaaagagactagtgcattaaaaccttaagtattagacaaaagggcatctctggtcagagttggaaacaagtmacttctggacaaatggaaatagaatttaattatgtgggctgtatatgtagggagttaatctaaaaagtaatatgagcagaaaacatagattccaaagaaagtgattaagatacaagattccta

SEQ ID NO: 858818 - DNA, 592 bp, Homo sapiens
gcacatgccaccaaatcagctatttttcttttttttattttgtagaaacagtcttgctatgttgcccagacttgtcttgaactcttggcttcaaatgaccctcccaccttgacctcccaaagcattgggattaaaggcatgggccattgtgcccagctgcatgcactttttattctttcatttacttaccaaatatctgtaaagcttatgctatgtggtctggccctgtggtaggaatggggaactcatgaagaataagacctggattttacagacatacaaaactggaaggcaatgtgggctgcacaatggtaaaggtatttgctgaggtaaagaaatatacagaggatttaaacatttagcaggggctctctgacggatgcactgagggcaatgaaggcagacccatgcctgtaatccttgtcagtcctaataagcatgatttgctgtcccctacaaggtagaagggctctgacttaattaacttgtaaccaagtgactggttggtgccattgaaggatggtaccatattragggtttagattcaatccttaatgctgccaagtcagacctccagcagccgcagcagcag

SEQ ID NO: 858819 - DNA, 380 bp, Homo sapiens
tggctgagctgggtcttctgtctcagggtatttcacaaggctgcagtcagccagggctgtggtcacctcaaggcctgtttggggraaaatccacttccaagcttaccaatgaagttgttgtcaggattcagctcttcatgtgttgttggaatgatgacctcaggtccgtacagaagtctgtcctcaattcctcgccactgagactctccatagggcagctcaaaacaaggcagcggcttcatcagagaaagcaagcaagaagagtgagagtgagaatgagcaagagagagagagatccccagcaagtccaaggtcatggcctttaataacctaatcttagagagcaacgctccatcatgtttgccatattctgtttgtta

SEQ ID NO: 858820 - DNA, 566 bp, Homo sapiens
gtgtcagatattgtgttaaacaagcactttaaatagctataatatctcttttaatcctcaaaacaaccttaggaggttagaactgttatcctctttctacagatagcaaacttcaggraagatagatcaagtaaccttcccaagatcacactgctagtaagtggcagggtcaggatgtaaatccatgtcccttgaattcctaagcctgagctccttccactttactcccccgacttgcctcctcatcaaaatgtgaaccactgtacttccaaacctgtctggaaagccccaccagaaatcactgtcatcatgcccattctatctctagagaatgttagattggaaggagccttgggttatcaactacaataccccaaaaatagaagtttgcaggtaacacagcagagcctctcactctatattaatgtcttctctctccgtggcaaatgttcttattactacatctgtctgagatctcctgtcttaggaattaatggttccccacaaaagtttgctgttattattgttgttttaatcacaagatttatattcttgcctgtctgaaa

SEQ ID NO: 858821 - DNA, 596 bp, Homo sapiens
aaccttaatgacacagcccaaagatgaaaagcaaatttgtaattttaagtgrttcctaaaatttggtttcttgacctcaacatatgcaaagaatgtggttatgattcctgatatgtgcactgttttcaaattaatattgtacttgctattaagatttgaactgattcagaataaatggaaaataggcagctataagtgataaaaatccaattactctgtcagttaagaagagtcagtaagtcttttacatgctctggcaaagtgttcaggacttgtgaatcaaggtttccacaaattgtgtaatctctagacaagtcgcttaatcattctgcttttcttttttctttcataaaactggtggctatttatggaatctaacacatacctctatgtaaggattccatgagataaaaccagtaaagcacataaagtaataattatacattttaagcaatcagttattaactacttaaagtttattatagtctcctttttcactgtgttgctttttggcatactttatcacttcatataacatctttcttatatcttgaatagatttccagtgatgaatgcattttattccttagctgctg

SEQ ID NO: 858822 - DNA, 596 bp, Homo sapiens
aaccttaatgacacagcccaaagatgaaaagcaaatttgtaattttaagtggttcctaaaatttggtttcttgacctcaacatatgcaaagaatgtggttatgattcctgatatgtgcactgttttcaaattaatattgtacttgctattaagatttgaactgattcagaataaatggaaaataggcagctataagtgataaaaatccaattactctgtcagttaagaagagtcagtaagtcttttacatgctctggcaaagtgttcaggacttgtgaatcaaggtttccacaaattgtgtaatctctagacaagtcgcttaatcattctgcttttcttttttctttcataaaactggtggctatttatggaatctaacacatacctctatgtaaggattccatgagataaaaccagtaaagcacataaagtaataattatacattttaagcaatcagttattaactacttaaagtttattatagtctcctttttcactgtgttgctttttggcatactttatcacttcatataacatcyttcttatatcttgaatagatttccagtgatgaatgcattttattccttagctgctg

SEQ ID NO: 858823 - DNA, 623 bp, Homo sapiens
tgtggttacttgtgaagcaaaaaatcaatgaatttggcatagttaatccatcttttacttgctttttcattagtcagcattagaaaaattacttctggttgctaaagccctcattcagaattgggatcttgatcaaattgatcccaccaggagcagcatcacagctatcagtcattggtatttctgcaacaatgtgcccgttggaaatacgttacaagcaggatttaaaagattatgctccagagtaggactgctataccctagagacatagaatagctgccatttcaaattaagaaagattgtaggaaatgaaaaatgaaaacgaagacagtgcaattcctataaaaggtttgttacggacagtttgatcacttaattacatttttgtgtgaaacctaagtaccatttttgtaaatcatgtaaagacaaacttcaggattaacttttgtttccacaaggaaatttaataaaggtttgtagaagcatccataacctgggaattacacttaaatttttaaaaagtttcagaaattatatttgaatgttggaagatattttmtaaaaatgcctaagaattatcaaagcatcaaatcctccacttatttcaatataactacacaat

SEQ ID NO: 858824 - DNA, 210 bp, Homo sapiens
ttattgcatgaatttattcgctaagttgcttgttggaaattaactggatttacagctaggtgctttgctttaaatattttacattttgaaatagttgacttatgcatgaatctaagcaaacttaaaatactccaggaatttmattttctggcggcttctggaattatagatgatttctgacttgtggagctcagttactaaagataccct

SEQ ID NO: 858825 - DNA, 622 bp, Homo sapiens
aatagagaataaaacagttccctgcccttgtggagttcacattctacagtaaggagggacagacaataaccaaaaagatacaaaatcatgccaggaaggaataagcgctaagaagaagctgrgttggagtttggctattttagatagagtagtctgggaagagatcatttgaggaggtgaaatttgaactgagacctagggagaagttccaaaggaacatccaaggtgatagtgtgggaagacggagaagcaacagcagagggtctaagaaaaatcatttaagagcagtccctacagaaagacagcagggatttggtaggagaagagaatgtttcagggtccaggaacagcatgaaagccaggaggcataaacatccccactgaagtcattgataaaatgctgccaagctatggctgcaatcagccagggcacatctgcatccaagcctgggatggtggaatcttctgggaatgtggtttggtccattaacaggacacagttactgtcaaaagtctctgggagtcagccttagggggtcgggagtcacattaggcaagagctgctttcagcctggactagggaaagccactcctgcagcctcttaggaggtggctgcttgct

SEQ ID NO: 858826 - DNA, 575 bp, Homo sapiens
gagctggttgttgtaatgtgtctggcacctccttcctctctctcttgctctcccttgccatgtgacacatctgcttccctttcccacccgccatgaataaaagcttcctgagacctcaccagaagcagatgctagtgccgtgtttgtacagcctgcagaaaccatgagccaaataaacctggactaatacgggggtggaggctcagtatgtccagggtggggatgcaccctatttttcttcagggtgatgtctgcctgaggaattccaaagcttaggggtggcttggctttctctagtttcccaaggtggggtaggaggtggtggtgtaaatgctgacgagctttgccccagtctcagaaggccagggctttgcctaccgggtatcagcccaggttgtccagcttccaggccaggaggcactgtccaacattggtggccccaatggctgaatgctcacaactatcagatgcttctagtccctttctgagggtggagaactcttgcttcctgcagcactaactccattttggakgccagtagtggcctggatggtcatctcattgatcaatatgct

SEQ ID NO: 858827 - DNA, 587 bp, Homo sapiens
tctttatcagattcctcattattcccagtgtcacctgcacccttctgcactatgcagagaaggtagtgtgattcgagtggagtgtccatgtgatgtgtttcattgtattcttttcttctcttctgttctgtttctttcccttctctttcctttcccacctcattctgtttttcacttttttcttcttcatttctttctttctccctccctcctttccttccttcctaccttcttttctctccctccttctctccctttcttcctttcttccttctctttttcccacctgcctgccataacgatcatgtcttgcctgaaaggacaatgattaatagcatttccttacatttgtatagtttttttaagtactgtcctctatccatttcaacgatttcctttgtcgtctcacttgatccttcataccagcccccatgaaatgaagcagagcagccatttctaaaattattgaaaaggaggtcrcgcaatgagttagtaacaaagccaggacaatgagccatgccactcatttgtttattcattcattcatttattcatattgagttctgcactgtaaaattcattacagg

SEQ ID NO: 858828 - DNA, 614 bp, Homo sapiens
taacacaatccctctttatcagattcctcattattcccagtgtcacctgcacccttctgcactatgcagagaaggtagtgtgattcgagtggagtgtccatgtgatgtgtttcattgtattcttttcttctcttctgttctgtttctttcccttctctttcctttcccacctcattctgtttttcacttttttcttcttcatttctttctttctccctccctcctttccttccttcctaccttcttttctctccctccttctctccctttcttcctttcttccttctctttttcccacctgcctgccataacgatcatgtcttgcctgaaaggacaatgattaatagcatttccttacatttgtatagtttttttaagtactgtcctctatccatttcaacgatttcctttgtcgtctcacttgatccttcataccagcccccatgaaatgaagcagagcagccatttctaaaattattgaaaaggaggtcacgcaatgagttagtaacaaagccaggacaatgagccatgccactcatttgtttattcattcattcatttattcatattgagttmtgcactgtaaaattcattacaggttcttacagggagtc

SEQ ID NO: 858829 - DNA, 379 bp, Homo sapiens
tatccaaagaaaaggaaattgatatgtcaaagaggtgtcaacaccttgatgttcactgcatcactattcacaatggccaagatatggaatcaacccaagtgtccaacaacaaatgaacagataaagcaaatgyagtatatgtgcccaatggaatactattcagccataaaaaaagaataaaatcctgtcatttgcggcaacatggatgagagcctggagaacaatatgttaagttaaataagccaggaacagaaagttaaacaccacatgttctcattcttgtgtggaaactaaagaagttgctctcacagaagcagagtagaacagaggttactagaggctaagaaggctagggggaaggaggacagagatttattaa

SEQ ID NO: 858830 - DNA, 584 bp, Homo sapiens
ggccgtgtggtacttgcaaccgcggtgccagcctgaccctcgcggcgccacgggggaggggaagacacgccggcagcgggggagggggcttcccggcccgctgcccccgaggaggacccggacctraattagcaaatgtttgtggttgggaagtagcgggctttaggtaatgtagtagcttttccgcttttcctggaagaatgaatgaatgagatgtcatttactcatccataatcaatacgttgcccatttaagcatttaccaggaattgggatgatttgcattgtcattgcttctcttatctggtcagccttgctagatgaggttcccttactccccagatttgtgaccttgtcctcattctcaaagccactgagctaaccaacccgtctaccaaactcacttggcatttttttggtcaagtgggcaataggcaaagtagtctttctgaactgtttctggagggcagagaatgtcactttgatcatatcttatgtttaatacattgctttataatcgtgtcaagaacgctgagagttaggaggtcttgtcatttcacagatgaaatagtgaaggccctaaga

SEQ ID NO: 858831 - DNA, 675 bp, Homo sapiens
atggagcgtgccagggaggcggggaaagggaaaggcagagctgcctagcttcttgctggaaaaggctatggagtccaaggagctgaaacctgcagtccacagccagcttcttaggaagcagggagttttcccaaaggagtggtgcgcagcctggagtgtgagcctgtagacaccttgggaactggggacaattgctgggagatttgggaatcctatgtgatgaaatgagggcagatttggaacacaaggtgcccagaatgtgtgtttttactctgacttcattttctgattctcattctattttttggttacagccctttgaaaatgaacctgcccttgtggacataaataaataggtttttatttgcagtagcctgatttgatggcctttagttattaccacatcattaggacatgctgtaactaatgcttcacaaaggtacccaccatgggtgcctctagcacctgcccttgcctttgttatgtagtgactcatatctgtgtctgccttcctttctggactgagtgttgtctagttccattcttaatactgacacagtgcctggctgtggtgcaaagaagatgctcatggaataggctgcagtratccagagttgtaagacagaatgttatgggagcagataggagaagaaaaaataaatgaatgaatggatg

SEQ ID NO: 858832 - DNA, 587 bp, Homo sapiens
ttttttttttaagtgagcaaaaaaattttttttatatttttttagtgagcaaaaatatcaaaactctcatgcacttctgggtattggctacaatcacttgggaaaatkggcagtacttactaaatcagaacagatacatatcctataacccaaaaactccaccccaagaccaaattagtaccaaaagacatgcataagaatgttcaccgaagcaccatttgtaacagccccaaactagaaagtaaccgaatgtccagcaagagcagagtgaataaatagattatgtatactcacaaacggcaatactatgcagcaatgaaatgaataaactccgactctatggagcaacgtggataaatctcacaaacacaatgttgagtaaaaggagcagacaaaaaagagtatatgctctgtgactccatatacattaaattataaaatgggccaaccaaatctatagtattctaagtctggatagcagttaactttgcaagaagtaaggggaaagatagagactgggaggggggatcacattctatttcatgttctatttaaagttctggttacattggtatgttaattttatg

SEQ ID NO: 858833 - DNA, 622 bp, Homo sapiens
ttaccaaagactagcaccatgcccccaccacagattgctctacaactgttccaggtgggaactagtcatcagaactctgtaaagctgcccaggtgattctaaggtacagcaggcttgagaaatgctgcatagaatacagccttactgaatgttagtctcctccattttcaaagcagcataaagggatcttatattgagtaatttatgtacgaggtgagtgacctaatttgtttgagccatgggactgcagatatggtaatcaaggtttctttcccacccctgccctcgtttttggcaaactggggcatttgggtcagaaaagtggccttcttactcagcctgtcctcttctgattccaacacagctgccttctgagtgctgggaaatgcctggcccttgcctggagatgtcatgatagtcctttgacctacttttgtttcttttctgttcacttctgggctgtgccccattaaccattcatgcacaaccctccaccaagctggcaaggcctcagcattcttcaagtggaagagagaatgcttsatttctgtccacatcctataaaatgcttatcagatgataatagctttccagggttagtgacagagacttagcatgaccc

SEQ ID NO: 858834 - DNA, 563 bp, Homo sapiens
tcaggaaatgatgccaagataactgaatatccacaygcgaaagaatgaagtttgctccagacctcacacaaaatacaaggattaactcaaagtggatcatagatccatgtgtaaatctaaaaatataaaactcttaagagaaaacaggaataaattctcattactttagattaagctatggtttcttagatgtgacaccaaaagcacaagtgacaaaagaaaaaatgtagatacattggactctttcaaaatgaaaaagttttgttcttcaaagaacattatcaagagagtaaaaagataactcacagaatgggaaaaaaattgcaaatcatatatcagacaattgtatccagaatatataaagaactcttataactcaacaataaacaacataaaacccaaattaaaaaataggcaaaggacttgaataaatatttctccaaagaagacaagaaaaaattgccataagaacatgtaaagatggtgaatattggccaggcacggtggctcacgcctgtaatcccagcatactttgggaggcagaggtgggcagatcacgaggt

SEQ ID NO: 858835 - DNA, 623 bp, Homo sapiens
gactacattttatttcttgtttgatagctgatagacatttggactgcctccacttcccggctctaacactgctgtgaacattaacatacgggtctttgttctcatgtctctcgggcggggcatatggtaattccatgttcaattttttcaggaacgcttagactgttctctagagtggctgcaccctgttccaatcccacccacagtgcatgcaggttccagttcctctgcaacctctcagtccttgctatggtctgtctttttgattcctgttatcctggtgggtgtgaagttgcgtcttgtctcttggctgagattctattccattatggagggggatgatggcgctcttttgtaataaactcgtcaaccagaaccaccagactcctctctttaaaacattagatctgatttttttctttttgttttcactgaaggtacgccctgcccccaccaattatttatgtatatgacacagttttacaaagtatyggaagacactagttggtttatagtgcttctgtggttggcttgattactttacagaactacctcaaggaccttaaagggacaaagtgtacacaaaactgtatataaaatatactaagacattaattaaacaa

SEQ ID NO: 858836 - DNA, 563 bp, Homo sapiens
ttgggtaaatgcatctgttccaaatgggagaaattggccaaaacaaaggagctacaggcaccatgcaagtccgaaatccaatagggcagtcattaaaccttaaagttccaaaatgatctattttgactccatgtctcacatcaggtcatgctgatgcaagaggtgagttcccatggtcttcagcagctccacccctgttgctttgcagggtacagcccccctcctggctgctttcacaagctggtggtgtgtctgaggcttttccaggtgcatggtgcaagctatcggtaccattctggggtctggaggacagtgacccttttctcacagctccactagggagtgctccagtagggactctgtgtgggggctcccactgcacattttccttccatactgtcctagcagaggttctccatgagggttctgcccctgcagcagaggacaggtggatgttcacctctgcttggacatccaggcatttccatacatcctcygaaatctaggcggaggttcccaaacctcaattcttgacctttgtacacctgcaggtccaacacgac

SEQ ID NO: 858837 - DNA, 632 bp, Homo sapiens
accctgcccctgtgccaacacagctgtgggtgtgaatgtgtgtatggaccctagcagcctgcccccttctctgccccacccccttctctgggcccaccagccctgtgtctcagctgacaagcatgcaccctgctgtgctgctgctgctgctgctcgcccatgcaaacaagcatggatcctgctgccaccacatgatgctttatctggcaccacccatcagagtgttgtgaccagcattctgggaacactttggctcttctgacacagcaggtttccatcctgaggggggtcaaagaacaaagctggggtcatgatatcagtcttccagagttaaaacatgcagcctaggggtgctgagctgagcgttggcccccacaaaatctaccagaaatgaaacgagtcaactcagcctaccttacgtcacaatcatacccccacggacatcaaagataaaagcaaaaacatacagctatccaaaggacagcaacttcgaagattgaagaaacatcagcccacacagatgagaaagaaccattgcaagaactstggcaactcaggaagccagagtgtcttctcacctccaaacgaccacactagttcccccacaatggttcttaaccaggctgaaatga

SEQ ID NO: 858838 - DNA, 647 bp, Homo sapiens
caaaacactgctcagtgaaattcaggatgacacaaatggaaaaacattcatgctgatggataggaaaaatcaatattgttaaaatagccagactgcctaaagtaatttatagattcagtgttattcctatcaaactaccaatgacattctccacagaattagataaaaactatttaaaaattcatatggaacaaaaaaagagcccaaatagtcaaggcaatcctaagcaaaaagaacaaagctggaggcatcacatttcctgacttcaaactatattacaaggctacagtagccaaaacagcatggtacttgcataaaaacagacacatagaccaatggaacagaatacagtgcccagaaataatgccacacacacctacaaccatctgatcttcaacaaagagacaaaaacatgcaatggggaaaggacttcctattcaataaatgatgcagggataactggctagccatatgcagatgattgaagctggaccaattccttacaccacatataaaaatcaactcaagatgtattgaagactgaaatgtaaaacctaaaactataaaawccctggaagatagcctaataaataccattctgaacataggactggcaaagatttcatgatgaagacaccaaaaataat

SEQ ID NO: 858839 - DNA, 495 bp, Homo sapiens
aattctcgtccttcgtacatacccaagagaaatgaaacctatatgtacaaatgaaaacacgtacacatatgkttataacagtattattcagtattaatagccaataggtagaaacatctcaaatgtccatcaacgaataaatggataatcaaaatgtagactatgataaaatggaatgtaatttttccataaaaaagaaagtactgatacatggtacaatatggatgaaccttgaaaccaggcaaagtgaaaggagccgattacagaagatcacacattatataatcatattatattacttaattatatacattaatatgaaagtccagtatataattacattcatatgaaagtccagaatagagatagaaagtagattagagttgcttagggctggagaaaggatgggaatgtaggggctgataacttaaaagtacaagatttcttcatgtggtgatgaaaatgttctaaaactaggagtagtcatggttgcac

SEQ ID NO: 858840 - DNA, 510 bp, Homo sapiens
catgacaaaggtaatttggcaccctggataggatcctgcaataaacaaaggacattagctaaaaactaaaaaayctgaataaattatgagcttcagttaataacaaagtatgaatattggtttatttattgtgagaaatgccctatttcaatctacagtgagtaataagggaaagtgagtgtggggtataagaacactctgtacgaggcaggctgggcgaggtggctcaggcctgtaaccccagcaccttgggaggccgaggtaagcggatcacctgaggttaggagttcaagaccagcctggccaacatggtgaaaccctgtctctactaaaaatacaaaaattagctaggttgggtggcacatgcctgtaatcccagctacttgggatgctgaggcaggagaatcacttgaacccaggaggtggaggttgtagtgagccaagatcgtgccattgcacaccagactgggcgacagagcaagactccatctcagaaaaaaaaaagaacac

SEQ ID NO: 858841 - DNA, 595 bp, Homo sapiens
caggtatccgagaagttgtctattttatctgcccacagagtctttgtaggcttcttagctccgtcaattctgccatacttggcctttttttttgagactcttgttctgggctgcttgaaccggtagatttcaaccctggctgtatattagaattgcttggggaactttggaaaataccaatatagctggtgttgagatgatctatggtaccattatccagagtcatagccaggaaccttacctgctgacctggttaccagctatccacaagcagtggtagagaaaatggctacttcccaataaaatgtttctaatgtcgcctctgtaacccttcttctccttccccactgtcaaaaaccttgtgcaatttcatagaggttttcagaagcaaatgcataggctaaaactcttcaagggtacttttgtcttccatttttctacatactcagtgaaattctttgctaatcaccttctggaatgsggaccagggaaaaagggagaatataagaagagaaaaatagttgacatcagaaaatagaaaaatagttaacatcacaaaatattatttaatcacacatggttgaagatgttttaa

SEQ ID NO: 858842 - DNA, 623 bp, Homo sapiens
attttaatggaaactagaattgctctttccttatcctgattaagttaagcatgcagtcagccgacaagtattatagaattgcctctgaggaatgtttaaggaccagtataaaatacggtctgaaaggctaactatatactgtaatttttaactgctatggagtgagacaacaaagtggttagagtgctccgggttactcctggaagaattcaagaagtatgttgatttaatgaatagacattatttaagtagtacggtaaaatgaaaggaataggtatttttgcccagaacgaagaatatgaataaaattaatggagatgaaggcataagcagatgaaaaaaaaagtattctggctaggcaagtatatagaactcatctggggtgaataataaagcagactagacagactgggtaagacaaaaatgtgaacgagcatgagagtaggcagagaattttaatgttaaggaagttgaaaataggtttttagatattttttttaagaaatccatgttagtgatatattataaattatcccacagtgagctgcttaaagcaatacttaygtgtcatctcagcattttcgtgggtggggaatctgcgaggggcttagctggatggttct

SEQ ID NO: 858843 - DNA, 583 bp, Homo sapiens
tgtaaggaaggggtccagtttcagttttctgcatatggctagccagttttcccaacactgtttattaaatagggattcttttccccattgcttgtttgtgtcaggtttgtcaaagatcagwtggttgtaaatgtgtggtgctgtttctgaggcctctgttctgttccattggtctatatgtctgttctggtaccagaaccatgctgttttgattattgtgggctaatatatttcaaagagttatcagagccaaggacaaaaatctacatcatctgcttagctacagtctatcttggtaaataggttaggtagcaattcaaataaaaatcaaaataaacaactgctttacaaaaataatcaaaggaaagtgaattcagatgacttaatcaaaagttcttacctaagcatggaaaagtttaaggactgattttcatggaaggataaacttgccaatgaaaataataaaagaatattaaattaaaatttcttctgccatgtacattgaggatcttctgttcatattattttttctttaggcaacattaatattcttgaatatatttaacatatcaataaatatttt

SEQ ID NO: 858844 - DNA, 647 bp, Homo sapiens
tagtgtctcgtctctagatcccagagtatggggggttagggtaagaggggatataaggggagtcattccagattaatccaagaagggggcaactccaaatttctgccttgggtccaggccagggagacaattaacagccagctttggtttgcttgagtgtttacataaaaaggggattgtttatgttcttcaaaagtcccatggaactgactctgcctgccattgccaaggaggcctgtcatcctagagcaagcatattcctccctaaggaagcgagtcctggctgccgctcctccccagccccacgcaggctgatgcttcatccaaaatgaaagtgccctgggacacacatggagaacacccaaaccttcgggatcctcccccgctcttcctattgcagctctccccagggacaaagggacattgctcagattggattctgccatagcctggctcagaatctgtctcacgccccctcagtggagagagaggagtggcctggatctcgaagattcctgtggaaagcaygcccttctccatcctccgcctcctcacgcccgctgtttctgacctaattcccctccttgtgacctacttcccgtggcatggaacaagaagatagaagataggcatcacatggtggggga

SEQ ID NO: 858845 - DNA, 628 bp, Homo sapiens
atacatacataatatatcatcacatttacatcccagcactggtctctacctccagactsctgtagcaaactcccgtcttgacttttctcacagatgtcttcttaaacatgccctgagcagtaacttttatcatatcccacttaaccagctccctcttcaagttcttctcagtgccagtagctcaagtcagaaatccaggcatttccctcagttctaccctctccctcactcttcatctccagtctatcagcaagtattatcagttcttccaagatatagctcaaatacatccatttcttcccctctccacctccactactgtggtcctaagccaccagaatctcttgcctggacaaccacaagagcttttagaggctcctacctccattcttacccctcttcagtcattctctaagaagccaccaggagcatcttttaaaaactcaaactatggtgactctaacgtgatctcaggccactcctctagctcccagtgcttcagacaaatggcctttctggggacggcttgcacaccatgctctttcatgccatagggctttggcagatgttctttcctgtgccttcctgggcctgggtcccgctcaccaagtctcagatgcttcctctt

SEQ ID NO: 858846 - DNA, 637 bp, Homo sapiens
ggcagaagtaaaatgcagaattggatcttaaacatgaagttccttgggagccttttgagtaatacaagatcaaattagaaaccccacaatgaagtaacatgctgataccaagagcaagctattctagctacacatacacacacacacacgtattcctcagactacatttctagattgcaaagaaaagctacatccccatgagctgaggcccacagtgcagacgagatggaactcattccatgttggcctgtaggtttatacctggtgtgaccatgagcctagtgctgggaccctactcagaccatcaaccagggctctaggcctgcgtcttccagggagaactagcagcacccccagccttgctgtctcccaattctatgcatcaggtcattacccaggctgctttctggtccccacatgtagctcagagccctgagatcacacggatctgcccagccctgggaggaggcagtctgcccactggagacattccattccattccatacacttcaatatgttcattatagacgtgagctccaagagggtytggaacccccagactgttgttcttactgcacatggtaagtggagaaaacaaaatatccactgaaaagacaatggctgagacaagaccat

SEQ ID NO: 858847 - DNA, 498 bp, Homo sapiens
cgacgacggcgacgcctcgctcgtcagatgggagttacctgtgaccgtcttgggtgcgcttgcgcaacgctcctcttcagccctaaccggctcagctgacgtgcccagaagacgaagatggccgccacgctcactgcgtgtcacgcagtttttcaccccggcccggacggctgggcgtcgaggaaaggcgagctagtgtccatcctcagcgcaggcgcggtgggaggcctagcgcgcgcgcctccgcgggtggtcgcctggcagggaagtggcggcgccccctagcggcggccgcttgtcgttcctggggtcatcgctttgagctgaaaaccacccaggcccccagcggttgtggtttaccttggaaatttgtcgcaactggttgccatgtaggttttggctgcttctgtctgcgatgtataatccaagtgcctttggtyttccatatgagccaatgtaaagaaggagggtggggccgggcgcggtggttcacgcctg

SEQ ID NO: 858848 - DNA, 568 bp, Homo sapiens
tggaactcatttaaccttaattactcttaaagaccctgtctcaaaatatagtcacattgggggttagggttttaacatgaatttgagggggaaacaattcaatccatgtcattgggtttctttaaaaattacatcatccaggtagtgtttgaatctagttagaactcaataattatctcttattattcgaattgcggtggttgttgttagaattgcagagcaccatctaaccactgcttgacacctaccatgacaggagctactgagtagggaatagggaaggaagagacactgctgacatgcaatagcagacccaacagccgggccccaggaagtgccccaggaaggtgccatattgggcaggaaagaagaggtaaggaccttacaaagaagagcaggtcaccaatgctaaaagaaaacagtctttatttatttattacacaawcatactaacagctgccaattatttatttaacacttactatgtgctgaacactttattctctctaccaactctttcccaacaacctcaacagatggagaaactgagattcagaaaaacaaaatg

SEQ ID NO: 858849 - DNA, 711 bp, Homo sapiens
gaaatctccctggtatcattttcttttctattctatttaggcaagctccacagtgctaactatttcagttcccaagaggcaaggaaacttgatgagctctttcttggggtctgtgtggcatctgggtaccctcttgctcccactctctaatgaactatggggaaattcttcatgtagcttggtgtacaggtcagcatccagatgtcttcttaccccaaactacagggtctacagggttgttcagcccttccttccattcagcaagtagttacagatctcccatggtgtgcccagcattgttgccaggcaatggagggtagcaaaggaggggggtgtgaaattatgttctctgcacaaaaagcagtattgtctatccactcactaggttcagagctttagtggctttagttgcactacaactggacaactaggggttaagtgttttgagctttgcttataaaaagacagacccaaatcagataaggtaactaatttagaagcaattacaatgcattttatcctattcttttgccaaagagcaccttatctaagctggctttcctttttacttttccttttaagtctcaaaaatatctcattcagggtcaggaaaaagaagmcgcacagaccaagcattttgaaaaggggatgatgaatgcattggatgcttacactgtgttgaagagggaatttggatccaacacccaccag

SEQ ID NO: 858850 - DNA, 711 bp, Homo sapiens
gaaatctccctggtatcattttcttttctattctatttaggcaagctccacagtgctaactatttcagttcccaagaggcaaggaaacttgatgagctctttcttggggtctgtgtggcatctgggtaccctcttgctcccactctctaatgaactatggggaaattcttcatgtagcttggtgtacaggtcagcatccagatgtcttcttaccccaaactacagggtctacagggttgttcagcccttccttccattcagcaagtagttacagatctcccatggtgtgcccagcattgttgccaggcaatggagggtagcaaaggaggggggtgtgaaattatgttctctgcacaaaaagcagtattgtctatccactcactaggttcagagctttagtggctttagttgcactacaactggacaactaggggttaagtgttttgagctttgcttataaaaagacagacccaaatcagataaggtaactaatttagaagcaattacaatgcattttatcctattcttttgccaaagagcaccttatctaagctggctttcctttttacttttccttttaagtctcaaaaatatctcattcagggtcaggaaaaagaagamgcacagaccaagcattttgaaaaggggatgatgaatgcattggatgcttacactgtgttgaagagggaatttggatccaacacccaccag

SEQ ID NO: 858851 - DNA, 535 bp, Homo sapiens
gaaaagccagatcatctatctgatgaatgacctaaagtcccttctttcatatattccctttttaacatggtgacacttttctggcttagagaataaatgaaaaaaaaaaaaacscaaaagaaaataaacaaaacccaggaattcagcaatggaagagatcttggtgattatagggtctggtaacttttttcttttctttaacttttcaaaaattgtaaaatataacatacatacagaaaagtatataaaacagatacacaataatgtgaataattataaagccaacacctatgtttcacactgaggttaagaaatagaatgctgccagcattttagaagcttcctgtgtttccttcaggatgacagctttctcccttgaccctggagggaatcaccatcctcaattcaatacaatacaattcaatacaatcatctctttgatcttctatgtaatttgactatcaaattggcatctctaacattttctttatgtaaataggatcaaattacatacgttgttttttcatcaatatat

SEQ ID NO: 858852 - DNA, 615 bp, Homo sapiens
tacctccctcaacacatgggaattatggggattacagttcaagatgagacttggatggggacacagagccaaaccatattgggatgctatataaaaaytcaaaacccagacaagactgggaagaatcctggcagactggggcaattaaatggagaggcaaataactttctggctcttaataggagctgagggcatcagttattagttgtcctacaatcattaatgttcaccatgatggccccagctttcaagaagcaattctaatatgcataaaatattcattgctagcatttcttgaatgtccactgcctatcaaatgctgtatatgcacaccccatttaattcacatagcaaccctatgaggtggttactattgttcttattttatacataagaaagttgaggctcagaaagattactacttgcccaaagacggaaagtcagtagataaagaaacagggattcgaacatagcaggctgactccagaacttacatttccagcactttcagaaatatttccataaagactcgatgaagtaaaacaaaacaaaaatttttgattagtcacttagctttaggcatctggaaaattcacatcaatagaataaagcatt

SEQ ID NO: 858853 - DNA, 735 bp, Homo sapiens
atccactttcccttgctctggatttgcagactctggctattacatacaaacgggatcataggacacatagctgtttgtgcctgagcttcttccactctgcattatgtgatcaaggwtcatccgcattgtggcttgtgtcagtgccgcactcttttttatggctagatgacacaccattgtgtggagagatggcattttgtttattcagctgctgatgggcctttgtgttttttccccctcatggcaattgtgaatgatgatactatgaacattggcttacaaatgtttgtttgaacatctattttcaattcttttcagtatatacctaaaagtagaattgctgggcagtatggcaattctgtttttaactttgaggaactgccaaaccattttccacagcacctgcaccatttaacatttctaccagcagcatatgaggattctaatttctccacatcctcaccaatacttgttattttctggttgtttattattgttatgaccatcctagtgggtatgatgtgataactcatgattgaatgattgattgattgattgattttagatagtcttgctctgttgtccaggctggagtgcagtggtatgatctcagctcactgcaacctccacctcccaggttcaagcgattctcatgcctcagcctcccaagtagcttggattacaggtgtgtgccaccacacccggctatttttttgtatttttagtagatgtgga

SEQ ID NO: 858854 - DNA, 612 bp, Homo sapiens
cctagaggctcatctgtaaatgaggtcctatactttttctaatctactgaaacgtggccatccatcgacctccaggaatataaaacagaggcagggaaatcaagccaatccatttatayaagttttaagtgcatacaaaaaaaaaaaaaggaaatttaggctatcatctaaaatgaccttgatgggtccaataccaagaaaaataggatagcacatagtaggtgttcatttttttaactttttctttgcaaataatttcaaacttacagaagagtctcgagaaaaacaattgctcaaaaaacacccccacacccattacccagatttcttacgattcacattgtatcccatttgctttctcacttgctattactgtgtatataatttttctgaaccatttgagaatatgttgcacacgtcatggccctttccccctaaactgcatttcctcagagcagagacagtcttgcatgacgataaaacaatcttgttttgtaattcttccaattttgtaattgttccactgaagttctttatagaattttggcctccagggcaggatactaccctggatctggtcctgcatccattttcgtgtctccttagtcatct

SEQ ID NO: 858855 - DNA, 627 bp, Homo sapiens
cgtggaatgcctacagtgtgggtattctggataaagggatgattcacatgctgggatgtgagggcaaagcaggaaggtgccagatttaatcctgctactcagaatgctgcacaatttaaaacttatgaattatttatttctaggattttttacctaataattttggaccgtggttgacagttggtaaatgaaatcatggaaaatgaaactgtggataaggaggcctatgttagttccatcctgtcttagatttctgtagatgtgtgacaaccaccacaaacaagatacagactgttctatcaccacaaacgtctccctgttgctacctccttatagttgtacccactgcctttcccataccacccctaacccctcataaccagcaacgtttcccatccatataattttgtcatttaaaaaatgttatatgaatgggaccatacaaaatgaccttttagattggcttttttcgcttaacataatgcctctgacatccatcccagtttttaaatgtatcgatagtcagtgccttttcattacyaagtattattgcatggtatggatgtacaagagtatcacagtttatttagctattcccctattgagggacattttggttgtttccag

SEQ ID NO: 858856 - DNA, 533 bp, Homo sapiens
gtgtgaattttatctaattatttttctgtatcagttaatgtgataatgtaatttttcttccagactttcatatgatggaatacatttattgattttcaaatattcaaatagccttgcatctctggaattaagcccacttgtttatggaatataattctttttatatattgctgaattatatttttaatgttttgttaataatttgtgtatctgtacttatgagagatattggtgtatggttttctttttatgtactgtaatagtctggttttgatgttaggttaatagtgacttcatagaataaattgggaccttcttttctattttttctatttttctgaaaaagattttgtgaaattaatgttagacttctttaaaggtttggtagaattctccagtgagaccatatgggtctrgagatttctttttgagattttaagctatcaattaagtttctttaatagttataggactattcaaattacccatttcatatggggtgtgttgtcacagtttatactcttccagagaat

SEQ ID NO: 858857 - DNA, 672 bp, Homo sapiens
tccctttgtttagatagataggaaaggctagtgaatatccacagttatcacaaaatttaaattgaatctatatttactttttacctgtcttcataaaacagaggggtttctttccccatgtgtacatacsaagtaggacaaagagattttctgtaatatcgaaaggtttgttttaataattgcaaggactgtgacataaaaccttcagaccgcaggtgttaaatttgagacattacatttgttagactatttcagaagattgtgttttgttcaattaatgtaaagtgtctttgtcttaggaggctgatttgtctcaacaacgttgtgataatcacttactataatctcacatctggggtcataagtaaccaaacaattgtaaacattgaacacattcttattgctaggaagatatgtaaaaatgttcctctttgccaaaaattattttgcaaataaaataggtaaatgactttaactgattagacattaaacacaatataaaatctcattctttcacaataccacttctgggagctggcaagatgtgggattgaaaagtagcaaatctctgacttaatgaaaatttcctgacattccacccatgaagttccttgtcatctccctgacctcatattggggtgtcccaggatccagtgtgagggttccttttct

SEQ ID NO: 858858 - DNA, 672 bp, Homo sapiens
aaaactgctactgttattgtaattgtgagaatcaatggctcacagctctaacctctgacatcctcttttcccccattgctatggtttacctgctgtgcacactggaatctttgcattttccttcattaatgtgtgatgttctcccttccaaggaagacataatttttcctttgcattctattttgattttattttttacttttctattctctctttctgtggtcggcacaatattggtccccagagatgtccatgtcccaatcccaggaagctgtgagtggttctgttacaggtggggggaagccaggttgccaatcaactgagcttcactaaggaggtttcccaggatggcctggatgctccaaagtaatcaagggggccctgcaatggggggagaaaggcaggagagccagtgtcagggagatgctgtgtgagaggccggccggtcctgctggcgttggaggtggaggagggaccaggagccaaggagtgtgggcggccacggaagctggaaaactccaggacggattctcccccagggcaccggaaggaagccacgctgcagacaccctgctttcagcagakgagagctctttgaacctctgatctagaactgtaagataataaatgtgtgttgtcataaaccactaaatttgtggtatgtttttacac

SEQ ID NO: 858859 - DNA, 492 bp, Homo sapiens
aacaaatcgtaaacaaatgacaagacaatgtgtgacactaaaaataatgttctgtttgttcatttttgtctagaaaaactattcaggaagaaaaataactttaattttgtgacaagcactttttaaaagrtgtgattctagtttgtaattgccaagaaacatacatattcctcctctagagatctatttcatggggaaatgtagcaaactcataattgccacttaaacaccacggccacctcctatgtgcaaccacctctgcgtgctgctgcctttcaaggcctggatcgctcatttctatcagaagctgttactcttttttatcaaagctatggagctgaatacaaaaacagtttgtttaaattatgatatcaaaacttttagctaattcaacagtgaagacaactttcaccaaagcaatgcttatctcttgacttcttaaaatcatttaaaaatatattcagaaatcatttaaatgcaaattttaaaaga

SEQ ID NO: 858860 - DNA, 621 bp, Homo sapiens
ttacattttttttcctaacatcatctttcaaagaacaaaagtttttagttttgactccaatttatcaaggtyttcttttatgatttgtactttcttttgtactgcatggaaacctttgcttattttattagtttgttctcatgctgctaataaagacatacccgacactgggtaatttataaaggaaaaagatttagttgacttacagttcagcatggctggggaggcctcaggaaacttacaatcatggcagagggggaagcaaacacatctttcttgtttttttttttcttagacagagtattgctctgttgcccaggctggagtgcagtggtgtgatctcggctcactgcaagctctgcgtcccacgttcacgccattctcctgcctcagcctccagagtagctgggactgcagtcacccaccaccttgcccggctaatttttttgtatttttagtagatacggggtttcactgtgttagccgggatggtctcgatctcctgacctcatgatccacccatctcagcctcccaaagtgctgggattacaggtgtgagccaccatacccagccaaacacatccttcttgacatggtggtagcaaggagaggtgcagaaca

SEQ ID NO: 858861 - DNA, 584 bp, Homo sapiens
aatcatatcattggcaaagacagatagtttgaccttcttttcccatttggatgccttttatttctttctcttgcctaattgttctggctaggacttccagtactatgttgaatagtagtrgttagagtgggcattcttgtcttgttccagttctcaaggggactgcttccagcttttgccccttctgtatgatattgggtatgggcatgtgatcaatggctctatttagtttgatggctctattcaatttcctaacttggtggtattttgcccaggttttcattttcttcctgacagcaaaaagaacaaagtcagatgaatcacattgcccaacttcagactaaaccctcacaccttcaatgcctaatatgttcatgttttttatcgttaagggatgttggatgttatcgaaagctttttctgtgtctcttgagatgctcacatgatttttgtttttaattcagtttatgtcatgaatcacattcatggatgtgcagtctttcatcccagaaataaagcctaattgatcgtggtgaattaagtttttgatatgctattcgataggtttgctaggatcttgctga

SEQ ID NO: 858862 - DNA, 485 bp, Homo sapiens
cggagcttgcacaggggtatgaatcattcaagttccatccagcgagagaggagagtcttcagtaattacataggctttctttagagactccagaagatcacaccttagaaaaggggataattggccaggcgcggtggctcacgcctgtaatcccaacactttggtgggcggatcatgaggtcgagatcaagaccatcctggccaacatagtgaaaccccgtctctactaaaaatacaaaaattagccaggcatggtggtacacgcctgtagtcccagctactcaagtggctgaggcaggagaatgcttgaacctgggaggcggaggttgcagttagacaaaatcgcgccattggactccagcctgggcaacaagagtgaaactccatctcaaaaaaaaaaatggtcgggggrcgggggggaataatttagaactacaatggccttagagccactttagatcctctaaaaaagagcttaaaaacaa

SEQ ID NO: 858863 - DNA, 485 bp, Homo sapiens
cggagcttgcacaggggtatgaatcattcaagttccatccagcgagagaggagagtcttcagtaattacataggctttctttagagactccagaagatcacaccttagaaaaggggataattggccaggcgcggtggctcacgcctgtaatcccaacactttggtgggcggatcatgaggtcgagatcaagaccatcctggccaacatagtgaaaccccgtctctactaaaaatacaaaaattagccaggcatggtggtacacgcctgtagtcccagctactcaagtggctgaggcaggagaatgcttgaacctgggaggcggaggttgcagttagacaaaatcgcgccattggactccagcctgggcaacaagagtgaaactccatctcaaaaaaaaaaatggtcggggggsgggggggaataatttagaactacaatggccttagagccactttagatcctctaaaaaagagcttaaaaacaa

SEQ ID NO: 858864 - DNA, 601 bp, Homo sapiens
gcacctccccaactccaatccagttcccacagccagggccccaccatccagggtggtgcgtatcctgctctgggctcagcagccgcagccacagccacaggtgacyatgctaatgagaagcacagtccccgcctctgcctcgttcctaaccagctggtggcccaggcaggtgagttcgcctctctgatcccagcccatagtcacggcagcaggtgcaacttctacccatggcaacggacaaagcggaaacaggaaaagcatcctggggtgtcactgggggatggaatgagtagggactttgtctctggtatatttctgtaatgtgtgaatacttaaggggccatgtatgacttttgtaatgggatgaaaacaattaaggtaattttttggtgttcattttaaaggaatccttacaagattgctgtgaagatgaatgagccaaggcttatgacacacctagcacagtgccaggcacagtgaacccctcataaatgccagctgcaattattgctgggcttgttcttctcttctgcaaactgagtactctaagactgcagcctgcctgttcaaggacaagggcaggacacatgacgatgcagtg

SEQ ID NO: 858865 - DNA, 604 bp, Homo sapiens
gtatcattattattttagatcagacattttctatttattttttaaaaagctaactgtaaaacagcctcagacaggtccttcaggaggtatcccagcagaagacactgttaacacaggagatgacagctccgtgtgttactgccttcccagtgacataatgcggaggtggaagatagtgatattgatgatcctgaccctgtataggcctagactaatatgtgtgtttttgtttccgtttttaaccaaaaaaaaaaaaaaaaaagtttaagtaaaaataaatttttttaaaaaagaaaaaagcatatagaattagaatataaaaaaagaaaatatttttgtgcaacaatatcttcatgttttaaactaagcgttattacaaaaaagtcaataagtttttaaaaattaaaaaaattacaaagtaaaaaagttccagtaagctaaagattaatttacacactgtaaatttgtgtcctgtatgattttttatgttttatactgtattttactatgttcagtatgcttagatacacagatacacaattgtgtcacatctgcctgctgyattcagtacagtaacatgctgcacaagtttgtagcctaggag

SEQ ID NO: 858866 - DNA, 334 bp, Homo sapiens
agacataggatttgaatcaactaagttaaatatgctcaagaattaaagaaaaccatgtctaaataagtaacaaaaaaatacaaaaaaaagatgtctccaaatagaaaacatcattgaagatggaaatgtttaaaaggagccaaatagaaattctagagttgaaatgttcagaagtgaaaatttattggatggtcaaaacagaagagttgggcaggcagaaaawaagcagtaaatttgaagacagtgttgagattatccagtttagtgaataaaataagtaaggaggagcagagttttgaggacatgtgagactctatcaagggtatcaacatat

SEQ ID NO: 858867 - DNA, 347 bp, Homo sapiens
acaaactatacctgacaagccagatgttggcttatgagacataggatttgaatcaactaagttaaatatgctcaagaattaaagaaaaccatgtctaaataagtaacaaaaaaatacaaaaaaaagatgtctccaaatagaaaacatcattgaagatggaaatgtttaaaaggagccaaatagaaattctagagttgaaatgttcagaagtgaaaatttattggatggtcaaaacagaagagttgggcaggcagaaaaaaagcagtaaatttgaagacagtrttgagattatccagtttagtgaataaaataagtaaggaggagcagagttttgaggacatgtgaga

SEQ ID NO: 858868 - DNA, 547 bp, Homo sapiens
tcataaataaattgaataaataaataagagataataactgttggcaagaatgtggaaaaattggaacyattgtacactgttagtgaaaatgtaaatagtatagcccctatggaaagcagtaggactaccatatgattcaccaatcctacttctaggatctcagtttttcaaagaaacaattgaaatcaggattgggaagagatatttgcactcccatgttcattgcaacattattcataattgccaagatgtagaagcaacttaaatgtccattgacatatggataagtaaaatgtggtacgtactcatgatggaatattagtcagccatggaaagaaaaatgtcatatccaacatgtttgaaacttgaggacattatgctaagttaaatatgccaggacagaaggacaaacaccgccaattccccttatatgagatatctaaaataatcaaatttatagaagcagaaagtagaatcatagtttcctggggcagagggcagagggaaataggaagttcccatttaatgggcataaagtgtcagttac

SEQ ID NO: 858869 - DNA, 551 bp, Homo sapiens
ccttagttcaggggccttttggagctaggtcaggtctagcttaggggagaattgctgctgcccatgtgcattcctggatccctagaggaacctgtgctggggcamaaggaccagagaggatgagccaggtatcttggggacagtcaaaaagacatcagtttccagctctgccacttaggagctatgtgttctggggccaattacttaacctccgtgtggctcagcctcttcatcagtacccacaggtacctagtacctgcttctcaggcttgtgaatgacataggaatgaaaagcacccagcacttatacctggaaaacaataggcactcaattcacaatagctgtcttattattattgtcactattaatgccattaagtcattgtaaggcctgtgctcacagggacagctcatgcagtagaaagggcatggattctgtagtcaggacctcccaacaccccccgtcttctgtaaaagcttgacccaccatcatgtctgggaaggccaccttctggatctgagcccggtgtattcctctgtaaaatggggac

SEQ ID NO: 858870 - DNA, 590 bp, Homo sapiens
cgttgtcctcagctggagcccaggcctggtccgtgaggctgtagagggatcctctgggaggccttttccacctctggctcctgctttggcttctttgcccgcagggacctagggacagagagctaaggaaaagccctgggcccagacctgcttccccagggaggagcactgatggggccagaggcagtgactgaccagttttccaggtcttcgatagtctctggcaagggctgattcagggtctcaggcaggaagagggcagcactgcccccgaggagggcggtgatcccgtagatgatattggggatgaagggctgtacctcacccgtgattttcaccagcggggacaccatgcttcccacgcgggtccacaggttacttacgcccatacctgtttgcctgcgagggttcagagtagggattggtagcctgtgtgtggggttcataaaggatggctcccytgggtagaggacaggacaatgccacagtcccacctgacctgtgtcctctggctgggcctggccccaggtccagcacctacctgatgactgtggggtataattcacttgtgtagaggaagaggcagctga

SEQ ID NO: 858871 - DNA, 597 bp, Homo sapiens
tttaaaaaaaagcaccagaaaccttttattcaaacaatatattgggttcataagatcaatgtataaagcagacaatagaggtgctctggctaaagtggggactgtgggtgtggggggatgcttcagctaaagtgggagagtaagtgaccagaagagccctgcctccgtcacgctacctctccctccgtcaccctacctctccctccgtcacccttcctctcccatcccacacgcttcatccttccctttgggattctctgccccaggcagtccctccccaagtcaaatccaccttattgggggatctatcactttttacatgctgtgatcctaaattcaatatgttcaaattaactttttttttttaaagacactataaatttgggaaatcttacatgctagatgcatttttaatttgggatatggaaatagattttctttctctttttctccttccctctctccccactcccacccttcctcctcccaccttctctcttttcatcttttstctgaactcttccaggggctcctttaagctgacctgggttcagtctcccctgttctctgctgggtcctggcatggacctgtgtttt

SEQ ID NO: 858872 - DNA, 614 bp, Homo sapiens
acccccaacatcttgctatggtttgaatgtcccctccaaaactcaggttgaaattkaattgccattgtgatggtaatggctgggtgcagtggctcacccagatgggacaggctaggtgcagtggctcacatctgtaattccagtactttgggaggccaaggcaggtgggtcgcttgagcccaggagttcaagaccaacctgggcaatatggtgaaccctatgtgtacaaaaaaatacaaaaaaaaatagctagatgtagtggcacacacctgtggtcccagccacttgggaggctgaggtgggaacctcacttgagcctggcaggcagaggttgcagtgagattgggccactgcactccagcctgagtgacagtgattaggccatgagggttctgcccttatgaatggattaatggcattttcacaagagtgggttcctgataaaaagcaaggtaagcccctcttgtccactcttgctctcatgtgagctccttttaatttttgccttctgccatgagatgactcagcaagaagaccctcacaaaatgccaacacctcaaccttggacaaaaacttccagaactgtcagaaataaatttcttttctctataagt

SEQ ID NO: 858873 - DNA, 621 bp, Homo sapiens
ctcaaaaattttagctgctataaaatagctcatgattttggaaggcagctgtgytcaccactaccacaaatgcaaacatctaatgattttggttgcatcctagcttattaagcattttctgattgatggatatttcagtattttccaatattttgctgcaatagatacttctgtcgttcctggtacatatgtctctgctgcagatcttgagaagtggaattacaatctataagtgaggattttgcttattttcttaattcacttttaaagataggcagttccatcaaggcaaaggtgaagaatgttgacttttgttcattgttgcaatgggcaattctaacagggaaagctagaaagctgtttggaaggggtgtgtgtgtgtgtgtgtttgtgtgtgtgtgtgtgaaggagagagagcgctttctaatgaatggtttgcatggttctttgcaccgtgcattttcatttaggacttcatctgccctcagtgcggccctgtgagataggtatggtgagtaccttattttatagctgaggacactgaggctgaaggtgatgtgctgaggttgaggttgggccatcggatatcagctccccttaattgctgcccacctgtgtccc

SEQ ID NO: 858874 - DNA, 576 bp, Homo sapiens
ggtgcctctaggcccaggaaactgggagatgacaaataggttgaaaagcatttgcacaggaaggataaacaccaacttcatgatattagggatctggaaaaggagtggaggatgagactaaggargggtatacagggattctcagttatattagttttttaatttaaattaaatggtgggtttgcagttatgtaagttactctttgtactttaagtagctgttataagaagaaacactaggaggtgggatttaaggtatgagggtcaggaccaagaacacttagcaatggagagaaaagagggggaatctcggctttgcaaccccttggaaagatgctggaagggtccacacagccctgttacctgggctcatgatcttttagtgaaggtgggagcaagctctctccctgcaagtggatactgcaacggaatggagatgagagcttcagcaccacggccagcaccagctggtttggtgtttggtcattgaatactgtctaactggccggttgctcctaagatgaactaggaatgaagtttcatctgatacttccactccagacatatgtgcttttg

SEQ ID NO: 858875 - DNA, 554 bp, Homo sapiens
aaatggctaaatcaagccaattaacattttcattacctcacatatttagtatttcttatgaagagtatatttaaaatctcccatcttarcaattttcaggtatgcaacacattgttattaattttagtcattccatttattgctgcataacgatgaccacactttgtttattcactcacttgtaggagatttgaatgttttctatttctagtaattatgaatagagctgctataaatttttatattcaggtttttgggtgaacatattttcattcatcttgggcaactactcaaaactgggattattaggtagtgtggtaagtgtaacatcatgggaaaatgtccaactcttttccaaagtggctgtctcatttttcatttccaacagtaatgaatgaaagttcctatcctaggagtttgattttcatgcctgtcaaaagtaaaatgtgtgtttctggcatgatactctcttgtcatgtgctagttctggtaaatttcctaagtcatttattatttatttttgaaaaaaatagtccttacatgttctgtcatca

SEQ ID NO: 858876 - DNA, 554 bp, Homo sapiens
aaatggctaaatcaagccaattaacattttcattacctcacatatttagtatttcttatgaagagtatatttaaaatctcccatcttagcaattttcaggtatgcaacacattgttattaattttagtcattccatttattgctgcataacgatgaccacactttgtttattcactcacttgtaggagatttgaatgttttctatttctagtaattatgaatagagctgctataaatttttatattcaggtttttgggtgaacatattttcattcatcttgggcaactactcaaaactgggattattaggtagtgtggtaagtgtaacatcatgggaaaatgtccaactcttttccaaagtggctgtctcatttttcatttccaacagtaatgaatgaaagttcctatcctaggagtttgattttcatgcctgtcaaaagtaaaatgtgtgtttctggcatgatactctcttgtcatgtgctagttctggtaaatttcmtaagtcatttattatttatttttgaaaaaaatagtccttacatgttctgtcatca

SEQ ID NO: 858877 - DNA, 500 bp, Homo sapiens
tttgtgcacatttctttccctctaaatccagtcctactgatgcactaggtgcaacatttatttggtccctccttcatctatctgtgaggaagttcctgcacccagtatacccaggggtaacataataggttargaaatcatcaattctaaatcagaagcctactatctccaactaagccattgtctcctagagagacatgacatgggcactgcattattgagcttttcattgtcaatgcacccctggaagcctggaattctacagtacacaacctgtgcagccatgaaaccaaggctgaggcttggattaccccctgggctagaaataggctttgaatcaagccatcgcatgtattaaatgcctcctaaatgatcgttctttgtagatgttgctcatttttgcacattctatgtgacatgaatttttcttcaagaggattattaggcctcccctattattcatggaacaatgtctactgggacatcaagggttcataagg

SEQ ID NO: 858878 - DNA, 598 bp, Homo sapiens
gtccctgaacaagctacttaacccctctaagtcttgtttttgtctctacctaccttacatgattgttggagaattagaaataatatacgcaaagtgcctggtacccactaaaccctcagtaagttgaagctattgttaaatgggtgggaacaatttcagcaaggaagggaaggaataagagaaaatgagcaaaatgggtgttgggatgaaggtgggagtcagtggaaatgtcatggccagtgcaggattatggcagcctaaggggaatatataatctagaaatggcatatgtgctgccccctttctctcctgcattcatatcagatactaccaatcaatcatgtattctttactgctgcaccaagatatggcctcacaacactcatcactttgttctaagcagccacggtcaattgaagggtattggcatgaagatgaaacccatttgtcacttctgtactaacagtttcttggaggatgagggatgatgtgtccctaagagtacacataatttcacaatttgtgccatgtayccagttaaaataaattggtggaaggaacaggggtgacttatctatgcagtgtgcagcacaatcga

SEQ ID NO: 858879 - DNA, 636 bp, Homo sapiens
taatatagatgttaagaaagaatgtggccttaggtctagactgcttgtgttcaaatcgctctcataaaattattttttattgataaatgtacatatttttggtgtacatgtgataatttgatacattcatttgtatcaaatttgataatgtataaagatcaaatcaaggtaattggggtagccatcccttaaatatttcttttatactaggaacatttgaattatttttttctagttatttttaaatacacaatagattatggttaactataatcaccctactgatctgtcaaacactagatcttatttcttctactcaattgtatatttatacccattaatcaacttctgttcttgctctctccgtgctacccttctggcctttggtaatcgccaatcaatctactctctatcttcatgagaccagcgtattttagctcccacatatgaatgaaaacatataatatttgtctttctatgcttgacttactttacttaacataatgacctccaattccatccatcttgtggcastgacagtatttcattcatttttgtgtgaattatatttcgttgtgaatatacattacattttctttatccattcatcactgatgtgcacttaggttgattcca

SEQ ID NO: 858880 - DNA, 744 bp, Homo sapiens
atgtgccaccatgcccagctttattggagtgttttgatcacaggagtgacatgatctgacccatgtttaaagggatcattttgagctgggcatggtggcycatgcttgtagtcccagtagtttgggaggccaagggcgggtgcattgcttgaggccaggagtttgagaccagcctggccaacatggtgaaacccgtctctactaaaaatacaaaaaattgctgggcgtagtggcacacacctgtaatcccagctacttgggaggctgaggcaccagaatcgcttgaacccaggaggtggaggtttcagtgagccaagattgcgccactgcactccagcctgtgcaacagagcaagaccctgtctcaaaacaaaaataaaaggatcattttgctgttgtatttataatagactgcagttgagggtgcggtagtggcatgcgtaagaaatagggagagtagttgggaacctgatgcaataattcaggctactatttcggttggccagtatacaggcagcaaaggtagtgagaagtaatcaggttctgtatatattttgaaggagccagtaaaatttgttgatggattagatgtggggagtaatggaaaggggagtcaaggatggctccaaggcttatgggcctgaacaatgtggagagaacttccattaaccgagacggggagataatataaggtaaatgtgtgtgaggaggctaaggagctcaacttttgacatatgttagaaat

SEQ ID NO: 858881 - DNA, 590 bp, Homo sapiens
caaaatctagtggacttcaaaaaaaacaaagaaccttaacgttaatagacacagatgtagactgtatcttaattcatggaaatccagagatataccctggtaattgggcagctatagattattacaggggtgaacaatctgagtaaaacaaactcctctcctccttggtgttgagtggagtccccccggttagtatactgttttaatctcacctattccagaaaatatctttggtatggacatccttttaggatgaactttgatacaaaactaggcccattctgccagttgcatggaaagccaatcactgattagtgagttttgcaatacagaaaagatttattcacagggccacccagtcaggagatgacataatagctctcaaatctgcctttctgtagatagggcttggaatatttatgggataaaaaagcagaatggtctaaggtgtgggaaaaggtgattagcaatggaggtaaatgaggtaattggtgatctgygcaaacatattcggagttcatagatcttcataggacacatattcagaaaatggcagtattagcaggatctgagggagaagtttttggccc

SEQ ID NO: 858882 - DNA, 594 bp, Homo sapiens
gctattcgtaagaaattacttgaaaaatattttgacaaataccttgatatatgcagacccctctaaatcactaggaatttggacatcaagaggacagtaatcttcaggtatctttttatccagatcgagatctgtattctttattacttcaaatgtaccatgatgaggaaagagagatcctaatgttgtattaaaaataggaaaatataaaacagttaacatattattccgacacacattattaaatatataatacttcacatccacatcactgaatcacaaagtaagtccccactaaaaaacatatgttttgggggaaaagggtgaggaatggtgaacaaaggaaagaaagataaaggtggggggtggttatttaccttaaaaaaaaaaaacacttcttagtctaatgacatcaacataataagaattccacagaaaatccaaattgttttattccaatggagtattgataaaaatgggtgtactcacagggcrggcatggtggctcatgcctgtaatcccagcactttgggaggacgaggcggatggatcacctgaggtcaggagttcaagaccagccaagaccaacatgga

SEQ ID NO: 858883 - DNA, 622 bp, Homo sapiens
gggggcaaaactcacaagtcctgagggacagctgactggactggagaaacagaatcaagaggagagcaccccagctggggcaaacagtccaagaaaagagacttccaccagatgcatcagagaataaacacacagcctcagactcaagtggacacacatttattgaacacttaatgcatactgaacactggcaaatctaagatggagagcgctgttcctccaaagaacagagatccctcagccccaatggctcgcagacttgattccttggggaacttggacagagagaaattggttccaggagaatttagacgggaagcacctttacaaagtgggaagagaggagaggaggctgagtagaggccatacagagagacaagcagagactcattaacatccaccacaaatctgctgtgttggagaaggaaagaacatggaacagggaaaaatgacatgggagctaattagtcccagagaggggcaatgccttacccagggtctggcaggacgggtgctaggcccccagacccaggtgaaatgttttttcttgttttgaggcactttcaactcactttatcataamagccctgagaggaataggaagaacaggaatttaaagcct

SEQ ID NO: 858884 - DNA, 637 bp, Homo sapiens
aagcttcataagtgaaagagaagtaagatcctttttagacaagcaaatgctaagggaattagcattataaccagccttataagaggtctttaagggagtcctaaacatggaaatgagtgactgttacgggccaccacaaaaacacacacacttaagtaatagaccattgacactataaagcaactacacaatcaagcctagataacaaccatctaacaatatgatgacaggatcaaatcagcatacatcaatattaaccttgaatgtaaatgggctaaatgccccacttaaaaagtgctgagtagcaagtcagataaagaagcaaggcctaactctatgctgtcttcaagagacccatctcacatgcaatgacacccataaggccaaagtaaagggatggagaaaaatctatcaagcaaatggaaaacaaaccaaaaaaaaagattttatattaaaatatagcaggggttgctattcttattttcaacaaaactgtctttaaaccaacaatgatcaaaaaggacaaagaagggcattacataatgataaagcattcaatttgacaaaaggacttaactatcctaaatatrtattcccaacactggaacacccagatttgtaagacaagttcttatag

SEQ ID NO: 858885 - DNA, 709 bp, Homo sapiens
ttttgtataaggtgagagatgaggatccagttttattctcctgcatgtggtttgccaattatcctagcaccatttgttatatagggtgtcctttccccactttatgttttttgtttgctttgtcaaagatcagttgactgtaagtatttgggtttatttctgggttctctattctgtttcattgctctatgtgcctatttttataccagtaccatgctgttttggtgactatggccttatagtatagtttgaaatcaggtaatgtgatgcctccagattggttatttttgcttagccttgctttggctacgtggggtcttttttggtttcatgtgaattttaggggttttttttcttttttagttctgtgaagaattcaattcatgggaattgaattgtatttgtagattgcttttggcagtatggtcatcttcacaatattgattctacacatccacgggtgtgggatgtgtttccatttttttatgttgtctatgatttctttcagcagtgttttgtagttttcgttgtagttttcacctccttggttaggtattttcttaagtattttatttatttatttatttwttttttgcagctgttgcaaaagaggttgagttcttgatttgattctcagcttggttgctgttggtgtataggagaactacttatttgtgtacattaattttgtatctggaaacattgctga

SEQ ID NO: 858886 - DNA, 516 bp, Homo sapiens
ctcaagggatcctcctgccttggcctcccaaagtgctgggattacaagcgtgagtgagccatcacacccaatctacagcagtaatttaatgaaggaatgaaacagcctcaccaatagagggacaaagtgataggagccttctcctggcctgcaaaagcagtacccaatacccgctttggggtaatcctgcccaaagggtttcatcaacatttaatcatgaggaagcaaccagataaatctaggatgtgggacattctaagagaccattggcttggactcttcaaacatatcaatgttaatttcttaaaaggcaggagatgtatagattaaaggagactaaagagacaattacatgcaatgtgtgggtgagccttgattgaatttaggccccccccaaaaaacagctcttcgaattcttggggaacattggagaagtttgaatataaactgcataayagatgatattattgaatgaaggttagttatcctgggcagggtaacggtcatgtagttatg

SEQ ID NO: 858887 - DNA, 455 bp, Homo sapiens
gatcaacacggagaaaccccgtctctactaaaaatacgaaattagccacgcatggtggcgcatgcctggaatcccarctacttgggaggctgaggcaggagaattgcttgaacccgcgaggcagaggttgcagtgtgctgagatcgcgccactgcactctagcctgggcaacaagaaactctgtttcaaaagaaaaacaaacaaacaaacaaacaaaaaactgaggtgggaggatctcctaagcctggagaggtccaagctgcagtgaactgttacagcaccactgcactccagcctgggtgacagggtgagagaccttgtctcaaaaaaaaataaaaataaaaaccagtgcatcacattatgtctataaatattccataatttttttcttttcttttttgagatgtggtcttgctctgcctcaaaaataaaaaaaagagaaaaacatacttaat

SEQ ID NO: 858888 - DNA, 651 bp, Homo sapiens
tgctttgatttaaggcagtttcccaagataaattaggagggaagatagtcaaaaaaaggaaaacaaaaacgagtacaaaaatgaagscaggaatagttgttatccaaaactgtaaagtctgtcagaatactaacctttatttaacaacctctaggttctgttctaatggtaactatagaaccttcgcttgtttctcaaaatgtgatgttctggtagttcatttgtcatcctgataagattgaagttaagaaatagactcatttttgctttgttgtaactttcctcttataatctttttttttttccctaattgaatggtagctaataaacaatctgtattgtttggcctgtatttctttttcatcagtctgtcttccctaatatgacagggcagttaggaattttttctttttcttttttctttttgtagacataggatcttgctctgttgcccaggatgctcttgaactcctggcctcactcgatgctcctgcctcggccacccaaagtgttgggattacaggcatgagccaccatgcttggccagattttttctttgattgcttttctagaatctgttttcacttttgtgtttgtttctattttccttctatatgtgcaggatatattcagaaaaagtagaaattttat

SEQ ID NO: 858889 - DNA, 627 bp, Homo sapiens
gaacagaaaacataaggagaaaaaagggagacttctttttttcttttcttttcttttttttttttttttgagatcgagttttgctcttgttgtccaggctggagtgaaatggcgtgatctcggctcactgcaacctctgcctcctgggttcaagcaattctcctgcctcagcctcccaagtagcagggattacaggcatgtgccaccacgcccagctaattttgtatttttagtagagatggggtttctccatgttggtcaggctggtctcaaactcctgacctcaggtgatctgcctgcctcggcctcccaaagcgctgggattacaggcatgagccaccacacccagccaaaagggagacttttctccatgtggttacatggggctccttttcctggttctctggtgagaaagagggactgtctcttgggagcttttgttctccatgctggttgcgtagttcctccaatgcaagctgcccttgggtcaaatccagaagataaaagaggagaggaaaaagaggaaactcattatcatattgttcattctttcagttttgacttstcttctcaacttgcctattggtttttttgtttgtttgttttgttttgtttgagacagggtct

SEQ ID NO: 858890 - DNA, 599 bp, Homo sapiens
cctacagagaggagccaccaactctagggcctcctctctggtgagagctacagatggygagacaacccactgcagagaggagctactctctctgctgagaactgaacaattgttgggacgacctgcctgcagagaggagctaccctctctgctaggagctgaacactcatcaggacaccctgtctatggaaaggagctgcccactgcaggtcttctttgagctgttctaatgctcattgaagctccttttcatcttgctcacctttcacttgtctgcatacctcattcttcctggttgcaggacaagaacttgggactcgctgaaaggcaagactaaaagagctgtaacacaaacagggctgaaacatgccccttgctcaccacattgtgggtggagagaagaagagcggcagccctttggggaggccagacctggaaactccctgagccagggctgtgactccctctttgaggccctgcagtttctgatgtctccaagcttccggacaccaccgcattccccaatgccagctggggaagcagcttgtagtgcacctggtgcagccagcatgtctgactgtgcagtggctggatcccat

SEQ ID NO: 858891 - DNA, 557 bp, Homo sapiens
tcttggagtccccgattccaggccttggctcttggayggcatctctgaacctaccctgggtcagagaggaggaagcccactgccctgaaggaagtcccatgcctggcagcattcacaacaagctaactgaagagccactgggccttaagtgatcatcagtggtaccatgatagtactctccataggcctgtggtggtggtggacaaggggagagagtcctttgcctaaggaaggggagggaacagtggaaaggactttgtttgtgattttggtgcctgcttagccacagtagagtacccagtagagttctaaagatcccgattccaggcactgactcctggacaacatctctggatttgcccggggccacttgccaccctgaaggcaaggacataagaccagctggcttcaccacctgctgactgtagagccctagggccttgaatgaacaaagatggtaggcaggtagtggttacagtgggccttgggcaagacccagtactgtgctggctcaggtctgacacagcacagtctcagagatgatggccacaggggtg

SEQ ID NO: 858892 - DNA, 629 bp, Homo sapiens
taattcctttaaccaaagaattaccaaaggtaattctcaatctttgactgcctcgacacgtatgttaagagtctctagactctctgcactgagaaacttgtctttctcagtttctcagttcaagaaagcatgcttaagacttactagtaaattacatgtaactgataagtatgtgtgtgtgtgtgtgcatacatatatatatgactgatcaaaattcacgggattgcaacatctcaactcagatctgggggctctaagcaaagaacagaatatttgcttgatagaattaaattatataatgttttatttcagtagttattttgcagcatagtcaatggtatgcatctttatgtcctctataggtaattgaggtgaaagccaaaagaagaactggaccacttaactttgtgacttgtatgagagagaccctggaaaaacattatggaaataagcctataggaatgggaggtactttcataattcagaagggaaaagtgaagtctcacattatggtaagagcccatgtgtgcatacatgcatgaaggagtttgtgtgtgtgcacwtacttaagatcttaggatttttttttttttttaaacggatccttgctctgttgcccatgctggagt

SEQ ID NO: 858893 - DNA, 565 bp, Homo sapiens
gcatttttatgaaatgaaagctcctttggtttgtctaccagtttttgtctccagagacccagtaagtctgtgtctgttttttatattatactacaatgataatgcttgatttttaggataatctttaagaactaggcacttttgtgtttgttgttgttgttgttttgagacagagtttcactcttgttgcccaggctagagtgcaatggcaggatctcagcttactgcaacctccgcctcctgggttcaagcgattctcctgcctcagcctcccgggtagctgggattataggcatctgccaccatgcctggctaatttttgtatatttagtagacggggtttcaccacgttggtcaggctggtctcaaaccactgacctcaggtgatccacccacctctgcctcccaaagtgttgggattacaagcatgagccaccaygcccggccatgtgttgttgttatttaagaatgagggtagcctctagaattattttggaagataagggagctcttcaccatcctatgagttaggcagagcagattttacctttgagaaaatgaaggc

SEQ ID NO: 858894 - DNA, 613 bp, Homo sapiens
gctcctgctgatctcatttggtcttattggcttggtgttgccaagttgtttgtttgtttgtttgaagctagaaatctcattgtttttaaaaatccttacttttaaatattggcaatgaatttacttcttaaaaatgagtgggttgtggactaatggtaaatgaaagaagccaggcagaaaataatacctaaatgtgtgattccatgtttatatgaaggttttaaaaaaacaggcaaaactaatctgtgatcttggggttaaagtaggggctgtttttaggggtgtattgactgggaagggacatgaaggaaccttagtcctggtaatgttccacatgatctgaaaggtggtacattgacatatgtgaaattcagtaagctatacacttaggtttttgtgcaccttgttctttgtgaattataactcaattggaattttttttaatataagttagacaaaactacaatctgcctattttcaacctcttaaagatattcttaaattttattccktgactaagccagagaaatatgtacttgcatcacacttttgtcctcttagagaactgttcgtattatactgagttttggcattaaactatcagcccacatgg

SEQ ID NO: 858895 - DNA, 642 bp, Homo sapiens; identical to SEQ ID NO: 857747

SEQ ID NO: 858896 - DNA, 697 bp, Homo sapiens
cttactcatcatctaaagagattagaggttccctgcagccatagctaattaactcagtctccagttgtttgcaaatctggtttgtaaagttccaatacaccacatgtatttttgtttaccttcctactctatgtattccctttcaacccatgtccaattttatatcaattttagtataaaatcataataaaattatttcagattgaatttgactttattccctctagaaaatagagacatctttgccgaagccctaaagatacaggaatctgaggagaaagtaaagtatctccaaaaggtaggccaatatttcagaaggtcatctgatcatcattaaatttctaaataatcttgattttttaaacacatgtatatttaaaaatctgctacttctagtgcatcagcttgagcaaattaaggaaacctttattagaattttaattgaaaatttaaaaattctattcaacattggctattatcaatctcagcaaaagtccaagaatgtataggaacaacagaaccagagagaaatagaaagaggtagagtcacacactttccatccagtaaggtccccaacyatatacagtgttctaagaacagaaatagcataagaggccaggtgcagtagtacacacctacaatcccaatgctttgggagacctaggcaggaggatcccttgaggccaggaattcaag

SEQ ID NO: 858897 - DNA, 628 bp, Homo sapiens
attagcataatgggaaaagaataatagcatgtcagctgttaaactttgaggcaatagtggttgcttgtttgctattcagtgagtgtccttgagtagtttattttatcaatactatacagtattaggaaataactttttccttctagttagtggtatagctagttttttgtctcttaagtaaaattctagaaaagccaattgtatccttaaatgtttttgtattctatttaagaaacagtttctttcttgttgctttcaggacaaaagaaagaaaaataaataaagaagtagtctcttattataatataaaaaataagagtatagtgaacaaaaaagtatacatataattcctccactaatgggaataacccattcttaacattatggcactagtctttttatttaaatgcattttttccatagatgaaagcacatggtacatatatataaattatgttcttttttctacttaatattataacctaggcgttttgtttattatatataactttataaaaacatttttgttagctgcatggtgttctaccttgtggatgaatatcgttttacctaacaattcccttattaatgartattatgtaattttcagtttttgtttatagtaaat

SEQ ID NO: 858898 - DNA, 628 bp, Homo sapiens
attagcataatgggaaaagaataatagcatgtcagctgttaaactttgaggcaatagtggttgcttgtttgctattcagtgagtgtccttgagtagtttattttatcaatactatacagtattaggaaataactttttccttctagttagtggtatagctagttttttgtctcttaagtaaaattctagaaaagccaattgtatccttaaatgtttttgtattctatttaagaaacagtttctttcttgttgctttcaggacaaaagaaagaaaaataaataaagaagtagtctcttattataatataaaaaataagagtatagtgaacaaaaaagtatacatataattcctccactaatgggaataacccattcttaacattatggcactagtctttttatttaaatgcattttttccatagatgaaagcacatggtacatatatataaattatgttcttttttctacttaatattataacctaggcgttttgtttattatatataactttataaaaacatttttgttagctgcatggtgttctaccttgtggatgaatatcgttttacctaacaattcccttattaatgagtattatgyaattttcagtttttgtttatagtaaat

SEQ ID NO: 858899 - DNA, 658 bp, Homo sapiens
gtacatatatataaattatgttcttttttctacttaatattataacctaggcgttttgtttattatatataactttataaaaacatttttgttagctgcatggtgttctaccttgtggatgaatatcgttttacctaacaattcccttattaatgagtattatgtaattttcagtttttgtttatagtaaataatacgcagtgaatatttttgtgcctgtaactgagtgtgcattttacattttttttagggaggagaaattgctggtaaagtcctaaaaggaaatttcctaagtaacaaggtattatttttacattaaagagtagtgtatttttattaccaaatctgtcgtgtttattattgagaaatttaaaagtataaataggaggccaggctagatggctgacacctgtaatcccagcacagtgggaggccaatgcagatgggttgcttgaggccaggagttggagaccagcctggtcaatatagcaagacccagtctcattaaaaagaaaaaaaaaaaaaaacttayaaataaatgaaaagaattccccataaaatcacaaccccaaagataaccataactagttattttcagaccttttctataatagataacttgagttttcctcaacaccatatacctctcatattgctt

SEQ ID NO: 858900 - DNA, 593 bp, Homo sapiens
atgtccgtgaaacttgatgtgatcttcctaaggaatattgaggatattcaattatacacttatccttttatctggcagctgttacccaaagttacccaaaataatggataataatggattgtatcatactcttcattgaggggggtttctttaaatgtatttaggtttgaggtggtccaataatatttctaatagcgagtatataatattaatcgttctacttgcctagcagtcaaagttttactttctagaatattttcattacggtaataattaaaacaccaccaaacataatgaaaagagctatcacagaacctatgtactttactccctagaaaagaagcttttattcttaggcgataaatttaattttatacattatgtttagtaatcggatttcccctgggaagcttgcagagttctacaattaattcaaatcaggaaacaacctgtggacagcaagttagaaatagagaaaggtgagaagtaaaacttacagtagagctttaggacataacagcaaaggatagagcagccataaagaaagaagaaaaacmttacatttgacccttgaacaaggcagaggttagggg

SEQ ID NO: 858901 - DNA, 595 bp, Homo sapiens
caattaattcaaatcaggaaacaacctgtggacagcaagttagaaatagagaaaggtgagaagtaaaacttacagtagagctttaggacataacagcaaaggatagagcagccataaagaaagaagaaaaaccttacatttgacccttgaacaaggcagaggttaggggaactgacccccctcgggggtcagttgaaagtataactttttgactctccccccattttttttttttttttgacagagtctcgctctgtcgcccagactggagcgcagtggcacgatcttggctcattgcaacctctgcctcccaggttcaagcgattctcctgcctcagtctcccaggtcaacctgggattacaggcacccaccaccatgcctagctaatttttatgtttttagtagagacagcgtttcaccatgttggccaggctggtctgaaactcctgacctcaaatgatcagcctgcctcggccttccaaagtgttgggattacaggmatgagccacagcgcccagcctgactcccccaaaatttaactaatagcctactgttcactggaagccttaccaataacagaaacagtccattaac

SEQ ID NO: 858902 - DNA, 614 bp, Homo sapiens
acacacacacacacacacacacacatgcccaggcaggccagcctggtacagctgtgcaggttacaccctgtgccagggcccctcctggatgatgcccatcttcccacagcctgccaagctgcatgyccagagcaaggggcatctttttctctgttgcagatactgcaagtgcagagcacctgccagccttcccctcctggtgatgcccatctctctcaaagtcttgactctggcttcctcgactcccagtcccacacctcacacttgtgtttccagctgtaggatgctccctggctcctgttccatgacttctccctctcatcagctgccctcagttcagggccctcagccctagggtgtgccacccccatcatggctctgaccgcccagtacctgccctgcttatctgcggtgccctccatgggcaggcagggccagtgcagtgcagcagttggacaggtgaaactcttgccctggtctccacgtccctgggcctggcctggacagacaggctgggccaccccctgggagcaggaggggcatgtgttctgcatccaggctggctctgtccaggagatgcctccgagccaggcccaccactagcacccatccgg

SEQ ID NO: 858903 - DNA, 654 bp, Homo sapiens
tggaaagacgtaaggacacggggggaaggtagctgtctgcaaggcaaggagagaggcctcaggagggagcagccctgtgacaccttgatctcggactccagcctccagaaccgagagaagatggaccgctgttgaagccacccatcagtggtgctgtggtggcagcctgagctgagacagtggcagacgacacgctgggagcttctgacaggaaggaaggagcaggccagagccttgggaaaccaaccgcaagggatgcaatccaaccccaggagctcccaaactcaaagccactctggacaaaggctgatgtctggaactagcgggacgggatgggcctggcagggatggggaagacagcaagcagactttgtccgcaaacagcggacacccagggccacagccttgcaggactgggacgggtagcgctcacaggtgtgagcaaggtggctcagggctggtgggaacagcaagcagtggcaccgaggacgcaggttcttcctagctcttcactctgccaggctcaggggtggcttcagctgtagccagcctgcaagatgcctggagcagttctagctgccgcatcccaacaggatgatgtccaaaatagcaycagcaccttttctttggaatgacgtaacctttcccagaagc

SEQ ID NO: 858904 - DNA, 577 bp, Homo sapiens
cagtgtcgttgatttgattgaacagagattttgttttgcttttctacttactcattggctcttagttgtgttctgagtaattgaaataatcagatacaaaatcaagktcacttttattgcttttaatatgtcagtttatattttgggtttttcaaagagatttcaaatctattactttatgtcttatagggtaaagctaaaattagtttttgttctttgttcttagtcatctgtactcatttcctattcaaaattatgtgggcttaattttatccttattccgtgatttaatctgtttcaaatcttggcttttattttataatttatttttattatgcactcacagggaacagttttcccatatagttgaggctgtctcctcattgttgacttacacttttaaaaaatctttggcatcattttctttgatggcctcattgagttgatgatcttatgtactggatactttatgcaattttgatgtaattttaaatgactagaacagatattaaatgagcaaaaaatgtctgttttaggttaaaatacattatttctagttttgctaagatagaaaagt

SEQ ID NO: 858905 - DNA, 546 bp, Homo sapiens
ttcccattaagtttcctactctttagtgttctgtcacttctgagtacattgagagagcctctgactggtcctaaggtctttcaracccctctttggaatagaacataagtagggaacaagaagcagctaatctttgaaggcaaatttggattctacaaattagaaagatattctgtactaaaagaaagactagcttcagagtgtaagtagtataatttaaagtatgatttttaaagaaaaatcaggaatcagcttataagaaaaaacttcacaaaattaattttgtggatttggttgaggtgggaaattgtactgctggcgtggatgtctgggaagcacataccaggttggcagctgcagcttagcttcgagatcatcccgtgctgtgatagcacctgagtgaagatgtggcaggtggagaaggcactttggaactcctgagtgacagccagaagccagagtgttactttggcaagtgtgctaccaggtgctgagtcttgggcctgagcattcctcacgataacaggtagatcataactgtttatt

SEQ ID NO: 858906 - DNA, 484 bp, Homo sapiens
gaatccagaggagactgcgggaaaagacccgtcatcactgggagtcttgagcttctttgaatgttggaagcagccccagtggcagtatcagggctacaagaactttgccaatggccgagggctctgataaacccaccctgtcacagggagaaataaagactagcagagcagcatttttgttcttgtgaatgcctgcattcaaatttgcaggggtctattttttttttattggtcgatttttcacttgaagatcttctagagatcagcacactgctgcatgccatattggttgtactatgtagattatgggagaatgaatggttctgctctcaagaagcctacatcctggttcataaataaatgctaaattgtactgtacacactattcatgttacagaagtttgaaggaattggaaagcaataaaaacygaactagtccaagaaggctttatggaaaaaataagtcttgagctgggcttagaac

SEQ ID NO: 858907 - DNA, 590 bp, Homo sapiens
ttttagtagagacgaggttttgccttgttggccaggctggtcttgaactcctgacctcacrtaatccactttgggatcatttcagcctccaaagtgctgggattaaggagtgagccaccgcacctggccggaaccaatttatatggattcatgttagtgatttggggtcttgtctccttgatgttagctgttccttgctgacatgatcgttccctccctgtaatttgcaggagagacttacgctgtggattgtgaacctggatgacaacatgctaacattatatattaaattaaaaaatgttcaggcagtaattaaaagctgtaggatactcagataatctaggttgaagacctgaaaggctacacagtgtggagagagcaggtggggcctctgaaatcaggtagacctggatttaaatcccagctctgccatttactggttgtgaccttcagcgagaatctcaatttatctttgatttgttatccatcaaacatgatctactttgaagagttgttttcagtgattcaagataatgagtataaaagtgcttgacacatagaaggcactcaatattctgaaatgatttagc

SEQ ID NO: 858908 - DNA, 332 bp, Homo sapiens
ataggtgaaagggtttccaaggcaggagggccatggccaagatacgaagaaggaatcattgaagtgacaatggaattctctggctctcatcacagacacaagagaayagcctttacacatgactcttatttatttgatctaaacttccaaagagattatctatgctcacattgtgtggcctttggataaagaaagtctgaattggcattcacagaggaattcctctctgctcagatctgactgtgatctaggcctccctctcccttccaatgagaaaacttctgagactgtggggtggagtcgtgaggggcgtccagctggggtcaggatca

SEQ ID NO: 858909 - DNA, 454 bp, Homo sapiens
ttaccaagaaggttataatgcttcccatcagaggagagctagaaagataataggtgcagccttgccagaggagagttgggaaggtataggtgcaggctcacccagagacggaggcccttttagtgttctgttctgtaaaacttcttgtacggtagatggcacatagtgaacgctccataaataacacgattcttattgttactcatcttcaaattctgttatcccaggctgttgaattgtcttggtttcctttgcaagagtcagtgctgactttgtcctgttctgattgctcatgtaattcatggtatcttagtctgtttgggmtgctataacaaaataccataaactgaatggcttataaacaacagaaatttatttctcacagtttctaaaggccgggaggttcaagatcaaggtaccagcagaactggtgtctggcaagggcccttttcct

SEQ ID NO: 858910 - DNA, 506 bp, Homo sapiens
acagaggcaaatgggctgataccaagtcgaaagctccaagagragaagaaacgtgcctgtcttgtacactgctgtgtccccagtaacagtcacaaaacaaattcccatgaggactttcagatgaatgaataaagggatgaaggaaagcaagctgggatcaagtggggcgatacacacacacttctgtggattcaaagtctgtacctcaaaggcacaggatcccctgcttgcagcccagggcctctccaaccccgccaagcccagctccgaggctgagttccaccacagctctgcacgccaccccacttccatcctccgtttctcctttaaatgatcattacctcctcctccttgcacccacgccaatctcttcccatttcctcttcctcccctttccatctctcccaaggaactccctcatctataaaagttccaggatattcttctgggatgtaaatttcaaagaaagccaagcaagaaaaataaaaacgtggtagaagacctcg

SEQ ID NO: 858911 - DNA, 592 bp, Homo sapiens; identical to SEQ ID NO: 835451

SEQ ID NO: 858912 - DNA, 319 bp, Homo sapiens
ctggagcatggagtttgtcacagcaggggaaggggacatggagaattacacactggctataaaagcttcctcccagaagcgatatgtgtcacaggctcacatttcattgtccaaatcaagtcacatagttacatctaactccaagtgaacaggaaagtgcaaacctaccattttcctgaaagacagaagaattaaactgtttgtaaaccgttctactaactaccacagtaatttttttttaagaaaactacagaatgatcacaggaactgtgtactgacamaccaatagaacagaagagagaacctaggactaaaacat

SEQ ID NO: 858913 - DNA, 481 bp, Homo sapiens
tatatttatagatatgtatatatatatattaaaagaaccagtkgacattatagaacttaaaaatataataatacagactataacattgaggatttaaaaaatataagaacaggatttttaaaaaactccccggatgagctcaacaataaatagagtggagataacagaagataaaatcagtagatgtgaggacagataagtaaatttcacccacccaatctaaatgacacagagagaatagactgaaaataaaaatgaacagaacctcaggaatctgggagccaataacaaaaggtctaatattcacatcatcagaactgcagaacaggaggaggaggagagtgaagctgaaaaggcattcaaagaaataatactaaaaactcttcaaatgtggtcaaagacgtaaacctacagattcaggaatccaagcaagcccaaaacaggacaaacacaaagaaatccatgtcaagaaacatcataa

SEQ ID NO: 858914 - DNA, 481 bp, Homo sapiens
tatatttatagatatgtatatatatatattaaaagaaccagtggacattatagaacttaaaaatataataatacagactataacattgaggatttaaaaaatataagaacaggatttttaaaaaactccccggatgagctcaacaataaatagagtggagataacagaagataaaatcagtagatgtgaggacagataagtaaatttcacccacccaatctaaatgacacagagagaatagactgaaaataaaaatgaacagaacctcaggaatctgggagccaataacaaaaggtctaatattcacatcatcagaactgcagaacaggaggaggaggagagtgaagctgaaaaggcattcaaagaaataatactaaaaactcttcaaatgtggtcaaagacgyaaacctacagattcaggaatccaagcaagcccaaaacaggacaaacacaaagaaatccatgtcaagaaacatcataa

SEQ ID NO: 858915 - DNA, 598 bp, Homo sapiens
tagtattgtccctacacacacacacacacgtatccagtacagatacaaccccataggtatagacagcatgtactgaggcagatacatatatgggaataaatgccatctggccacttgcctggggccaaagccattgcttccagttcactttcctcctcatgctccattcaatcaagaagtactacagattgggcccttgctgcattcctggcatagatctagatccacacagtacaggcccaaggcaggacagcaagacccaaagcaggaagaaaattgtggggagaggaagcaggagaacagtctgggtaccctggcgacatttgcctgagaagggaggaggctggtaaggggagagaaggtgataggggattctgggagctatagcagagccaggaggccccctccccccgactgccctgctgctcaaaggcccagggtatgcagggcagcctgtgcccagcctttgagccaggtgagtcagcctgacttctgaatattcaccactgcagcagttccaccattcccyacagcccactctgcacacagcagccagaatggtctttcaaaatctgatcttatcactccctgctcaata

SEQ ID NO: 858916 - DNA, 618 bp, Homo sapiens
gggaaccctgactggccgaccaaaccctgaggcagaagtaccttagtctcgactgagagagcaggaagccgtaggcttggtgggcacatggaggcaccagatgtcatcagcacctccccaccctggtctacctctgctcaggaactagacagcacagagccgtcaaagaagggcatcacgggttctgacctggagaggagggggccccaagaaggcagagcctgacccccagccctactcctcatgagaccagagggtctgcttgggttccagccctacccagatacttctcaggcagagagcctctgcgtgtccttggaaagtcttttaacctctttcaccctcagttttctccttaagtctcaaactggatgatccatgtgtgatgccccatccctgagattcccaagtacagtgagggacccccattctcattccctctccctcctctccccatgttggagccccagatgaagctgtatcacactttgtggtgacaaatgatgggcagtgcagtgtgaagcctcagctttcccatgcatccttcctgctgttgatttgcagcttggagtcrattggctgccaagtcaagtaatcagaaggtaatagcctagtatc

SEQ ID NO: 858917 - DNA, 625 bp, Homo sapiens
tccctctaatgttgtatattaagaaagtatctggttagacatttacttaggggaacacaaacatkaatgttgataagaacaatatgaaaacaatagaaagaggaggatcagggataggtatagggaggaagaaataacaaatgctaatgtttttatgctcaatgataatatatgagtctcaaataaaagtgcactgaaaatgaaggtttgtcatatatgttcactgccctatactgaaacctagaacagtgtttggtactggtactcagcatgtcatatttttaaagggaacaattttttcctttatgtccccctacacacaccagtacataggtcagatacacatatacatacaagactaagaattaactgtgtccattgtgtattatagttatagaactgaaccaaaaatatgacttttgacctctaacaaattaaacaaagcttataatcattaaaataaactctcaaaacagttgactttttctctaaaacatattatggccctctcagaaggaaggaaggaaggaaggagaatggaggaagggagggagggaaaagaaagaaaaaaaaatcccaagatggcccactagactcaagacaaatggaacagctcctactgagg

SEQ ID NO: 858918 - DNA, 625 bp, Homo sapiens
tccctctaatgttgtatattaagaaagtatctggttagacatttacttaggggaacacaaacatgaatgttgataagaacaatatgaaaacaatagaaagaggaggatcagggataggtatagggargaagaaataacaaatgctaatgtttttatgctcaatgataatatatgagtctcaaataaaagtgcactgaaaatgaaggtttgtcatatatgttcactgccctatactgaaacctagaacagtgtttggtactggtactcagcatgtcatatttttaaagggaacaattttttcctttatgtccccctacacacaccagtacataggtcagatacacatatacatacaagactaagaattaactgtgtccattgtgtattatagttatagaactgaaccaaaaatatgacttttgacctctaacaaattaaacaaagcttataatcattaaaataaactctcaaaacagttgactttttctctaaaacatattatggccctctcagaaggaaggaaggaaggaaggagaatggaggaagggagggagggaaaagaaagaaaaaaaaatcccaagatggcccactagactcaagacaaatggaacagctcctactgagg

SEQ ID NO: 858919 - DNA, 589 bp, Homo sapiens
ctgtcctgaaattttcctttattttctaaataagtcaacaataaaatagttatattaactgaataaaataaaaatgaaacttttttcactagaggtaatttttaaaacattcatatttcatattctgcctgtggaacaaagtcttccatgattgccaagtttatggtgcttgtattcattcatcccttcttgtaagataattattaactgtatttttatctttttaatagctggactcattttaacaataagcaacaatgtattttgtagcaggagtttaagtgcacactgtcctggtttcagttctgaacattttagtgcttattatcaagaaaaaacaaaagacaaaacagcttgtcccattttacaatactcactaaaaggcacctctagcaacttctttgtttgggctacgtgcaaggttcacatgtgttcattttaaaccttccagaggatatgcaactcagaagttcatkttagacatgtcactaaagccatttccacttattgattgcactgaaaggacagcaattgtgttttgctctataaaagatgtcgtggtggggattccttcaggggagaagcgaca

SEQ ID NO: 858920 - DNA, 670 bp, Homo sapiens
cttgtcccataagaatcatttttaaaagttcattgctccactgctatacttcctttgatcactggaaaagcaatctgatttcctttccaattagacatcttgatgtatcctcctactttggcccattctctaccttagaacaacaaattattttaacacttcttgaggacaggaagaccagggagagctatagataatacaaaatggctattcaagacatagcaagaaaagcctcttcaaaggtacaacttagaaggttataggttaatccggtattctctatttagaaaaaaaaaaccttaaaaattgtccattagattaaaaaaattacaatgcactgtatctcttaacatagtaagcatttcataaataaaaactggttcctttaaatgacttttcgttgccatgcctccaggtttccactttctattagtcatttaacaatattcccaaggataaaaacgtactttaactcctacttttcagaagacaatcacattatacattctcagaagtttagacacagtatttttggtatatttttaaaaaatgttctccaagrtaagttcctgtgtgtttaaaaaagtgcccagaaaagttgtggagatagaagcttcaagacaaatcagacaaaagtcaaatgacagaaaataaatgaccacataacaga

SEQ ID NO: 858921 - DNA, 566 bp, Homo sapiens
ttgcagcacacaattaagagaactgacttggctgccaagttgctgttcttcttcggagaatacacccaactttctcaagagaccattaagtaaagtggaaaaaccatcagacaggaagycagcaggaatcccagctttactacttactcatattgtaatcttgggcaagtcatttaaagcccactaaacttcagtgttcttatctgtaaaaggaagccaatgatatattccttacttgccttctacacttaatataacaatattagtaatggttgtggaacttgcctaagatcagtgggtaccatttacccactatatattgtgtaccagctactgtactgggcacagtgtactggttaatagcagattccagggcccaaattttctaggtttgaaaccgtatctaccgcttattagctgtctgaacttaggcaagttccatagcctctctgaacctcaatttcttcaattataacataaggatgagaaaacttaccatacagagtttttatgagaattaaataatatatacaaaacacactgtagcttgcatagagtaagccttc

SEQ ID NO: 858922 - DNA, 518 bp, Homo sapiens
attgagtatttttttccataccttcaggttcagtctgtatgtgtcctcactagtagagtgagtctcttgtaggcagcatatggttctttaaaaagaaaatttattcagctgtcctgagtctcttggttggagaatttaatctgtttacattcaaagtaattactgataggtaagcacttgctactgctgttttgtcattcattttctgaattttttgtaagtccctgtttctttatttctctcttgttgttttctttttgctttgtggttaccatgaggcttacataaaatatctgagctttataacatgctacattaagctgataataattgaactttaatctcatactctcactccccccttttataattttgatgtaaaatttttaatttgtttttgtaatttgtattccttaacaattgcagctacagttkcttttaatagtttttccttttaatcatcacagtaaggatacgattgctttatgtatcacccatacagtgttagagaatgagtt

SEQ ID NO: 858923 - DNA, 604 bp, Homo sapiens
ctggataaatagttcaaatgctgtatctctgttcctattcctagactttctggcacctattacccttcaagtccatgtgtcttccagtaggttgcagtgctctccccaggagatggcagctacytagatttgtatgttacagaggtggtcgtgtgccttctctacctctctcctatgttcccatgtaacctaaccacacaggccataatcagctccaccctaggaaacataacattggtacacctgtcccttgaagttgtccttagagagaatggtctgaaaacaaagggagattaaaggtcttttctgtttcagggaaagtatagttctgtcagtagatttctggttaaaagacacagaagaaggaaaaaagacactcatctgtaggaactcagtttagccaatgtgacttccacttggaagcatttttcctctcctcttcaagcccaactctagggaatgtcctgtgcaaaaatatcagtgtaggcgcatctctttgcggaactgagttgctctgctttcagtttcctctctccagtgcccccaagctcctgcctggcttcttctgctgttcaacccaggatcccatgctctaggacagcct

SEQ ID NO: 858924 - DNA, 604 bp, Homo sapiens
ctggataaatagttcaaatgctgtatctctgttcctattcctagactttctggcacctattacccttcaagtccatgtgtcttccagtaggttgcagtgctctccccaggagatggcagctacctagatttgtatgttacagaggtggtcgtgtgccttctctacctctctcctatgttcccatgtaacctaaccacacaggccataatcagctccaccctaggaaacataacattggtacacctgtcccttgaagttgtccttagagagaatggtctgaaaacaaagggagattaaaggtcttttctgtttcagggaaagtatagttctgtcagtagatttctggttaaaagacacagaagaaggaaaaaagacactcatctgtaggaactcagtttagccaatgtgacttccacttggaagcatttttcctctcctcttcaagcccaactctagggaatgtcctgtgcaaaaatatcagtgtaggcgcatctctttgcggaactgagttgctctgctttcagtttcctctctccagtgcccccaagctcctgcctggctkcttctgctgttcaacccaggatcccatgctctaggacagcct

SEQ ID NO: 858925 - DNA, 599 bp, Homo sapiens
ttttaaagcacacatggagggtggggatgaggttaaaaaaaatgtgttgtaggagaaccacattttcttcaattggtcaaggactcacatctttattttaactgtccctgaaagaaactgaaattttagtgtcatctttttgaaaattttatcagaggtaacagttcactgatttcaatttagtttccatcagtctatccatgctaactttatgcttcattttgcaaattcaataaataaaaatgtgactggattactttaaaataaaactagctagtaccgtgggaatcagctggattcaaagccacttttccatgtcactgggggtgacatatcactagagatagaagcaggctggggaactttcaccagaaatgggagttcactgtagtcagttactaatcctggatctttctcgtgaccctctatttcctgaagatatcacccacctcagccagactgaagttcccactaaaggcaaaagactgagcccccaaggcctcattctccaaggccagragcagcaggtctccaaagaaggttcaggaaaggccatgttagaggaagccgtacctgtcagcctcagccagggcagcccg

SEQ ID NO: 858926 - DNA, 593 bp, Homo sapiens
tttgtgtaagaaatgaatttatataaaatacaacaaactggacaaaagtctgtaaaaatagctaaagtcaaaaataatttttgatttatttatttgtggggaaatttctgtattcttttgtagcaattaatgtcatggaaagacagtatccattgaaaatctagtttaggaattaaagtaagattagaaattagtctttaaaattgttttttgcctttgtagatcacatcaataggaatatgaaaacattattggcttcactaaaatatagtcttatatttaaggagccatttaagaaaaacacaattcaaaattatgaattaggactttaaacattgcaaaaatgctccctgcttatacttcacccagttttcaacttatatgatgtaaattttggaggaagagctcatataattccttgctttccattcaaattttctgttcctattttctatgctcaaatgcagaaggtacagtaatgatacctgaatcatcattcatccagtaaaatccccgctcttcattcattcaatcaatactyttaattcattccatttaatcaccagtacccattttgtattcttccttctcaa

SEQ ID NO: 858927 - DNA, 670 bp, Homo sapiens
ctgtactaaaaaaaccacacaggatcctactttaaaaaggtttggcctaattgtctagcacagggtttctcaacgtgggcaatgcagcattgacatttggggccaggacacttccttgtctcatataagcattgtaggatttttgcagcacttctggcttccatccactagatgtcagtagcacctctcagttatgggatctaaaactccaggtcttcgcaagggtccccaggaaggaaaaattcacccaccgacccctacctcccacccaccaggtgagaaccactagtctagcaaatttattcatgccagcaaggcagtgtgcgataattcagggggaaggcagaacagaaaaaagtaagtaactgggatgaattacaactcgggtaatacaaacaaaagcagcaataaaactaaaaatgtttcatctgcaattttacagaagttctccagaccatattataaattaaatgtcaagtcagagtgagaattaaggttattcctatatctctcgatcacccccagtccaaagcctcactcctccaatcagttgaaagaaacaaccacagaaggatgtcaactggggtccctgggtgcattttaggagaytgtctatacactcctgatattggtggcaaaatgatatccatttggcaattatctgggacat

SEQ ID NO: 858928 - DNA, 525 bp, Homo sapiens
tagtcaagttcagcatgatggcagctgcctgagtcaggcctacgaatgaattttgtaaggccagagtcacacagactacccatgagagagaggagagaggttagatcccacttcttgccccgtatctgagttcacaggaccaaaggttctcatgtcttattagttcaggagactcctcattgactgtgacatgggcagtctgtcccgtgccatgagcaagaatagtgctcttaattcattcttagaatggtgaacctaaatattctggcttggcttctcctggggttccatcaaagtttctatttgatatttgatatgtatcccatggggctacacggagtaaagcagcagggccaccttagggaaaatgttgagacattgaattgatggttattatctttgaagtccttgtagggcaaattcaggcmctgcaaccaggggagtaatggagaaccaagtcatgcctcccatctgtgctgtttagtacccttcctgattcccctgatttggtcttcaggaagggtc

SEQ ID NO: 858929 - DNA, 528 bp, Homo sapiens
  misc_feature 1, 2, 3, 4, 5, 6: n = A,T,C or G
nnnnnnagagttgggtgcttctccattttttcgctctgccttacattgagtagctttattctcagatattatctggtggcccctaaccgttctgggctcatgtatttacaggttaaagtytacagatttgagaacatgcttcttttccaatagtctcagaaaaagccgtatgcagccaattgttcgtgactgaatcaaacaccaatccctaaacctatctatatagatgggtgaatcctctgtcctgataggtgggccatgggtcacatgtccaccgtaacactaaagattggaaatggcataggtgtaataagaaaaataaagagaaatggatgctgggaactgcccacctccccaagtgaaaatttaaaaaaccccataaatattcaatacaaaataataaaactctcccaaatataaagtataacatgatttaagatcatttttgctacctgtgattaggagggaagtctattttataatggaacttgggaaagatttttatcacctacctccatgttaatgatg

SEQ ID NO: 858930 - DNA, 535 bp, Homo sapiens
tccattttagctgtaccccaaaagtttttattttactttattttgtcattgaattagaacttaaaaaaagtactctagtcataagtatatacctagtgaktttcaaaataatagctaataatttaatccatgtaactatcaccagatcaagacatagagtatttccagactcctagtcaattaccccacgctacttccatcgtctctgactgccataatacaataccacagactgggtggcttaaataagagaaatttggtttgcattcttgaggctggcagtttgcaattagggtgccagcatgtctgggttctagagaggaccctcttcctgggttgtggacagctgccatctctgtgtcctcatgtggcatttcctcggtgtgttagtctctcttcttttaagggcattaatcccacatgagggttcccattctcaagacctcatataactcaaattacctcccaaaggccccatctctgaaaaacatcaaattgggggttagagcttcaacatatgaatttgaaacaaaaa

SEQ ID NO: 858931 - DNA, 603 bp, Homo sapiens
gtctaagttcctaaagaactaattaattccttattttatttsatgttgaatgcttccaaatagcagatatttgtgtccaaaatagaaaatacagaaggattacagctttctccctctctagacaattctgcttctgaggaatagagtgaggagggtcagctggaggaatgaaataatgggatgtggcaaacaaggctcagtaaaagattcgaactgtgtccaccatgagcttattttttggtgcctctcatttgaccagtggtatgataacagagaattttttaaagtgtggatgtcccatactgtggccatatagtactataatctgcagtctgccctttcttccataaagtaaaagattatttgctcagttcttcttcagaaatgaaacttctagacttatgctgtctaatatggtggccactagattcatgtggctacttaaatttaaattaattgaaatgaaataagttgaaaattcagttcctcagtcacattagccacatttcaaatcacctgtgttcacatgggaatagaagctactccactggacagtgcagatttatggcacgtctccatcatcataggaagatcttctggaca

SEQ ID NO: 858932 - DNA, 596 bp, Homo sapiens
aattggaaactgattcaggaagagatattgtgggccaggsaagtcgttagctcaggagtgagaggactgagggtggaatgttaacttttccactagcagcatggttgagtcagctttcccaacttcacagtttatactgaggaggtttataactgggggaagtggggcatattttgacagaacttcttaaatgataatctctcgcaaaccagccctctacagctccatgggagatgagaccctgagctggacagaccatatgtttgtggctctgcattgtacttctgatcaaccaagaaacttgttatgtgctgtagagttcacttggtgcaacagaggatgtgcgaatataaggcaattcctcttcttgagaccttaaggtttagttgctattgtgggttgaattgtgtccccctaaaaagatgtatggtcttttaacccctattacctcggaaagtgaccttatgtggagaaagtctttatagagtaatcaaagtaaaatgaggtctttagggtgggccctaatctgatatgactgttgttcttataagaagagaaaattttgacacaggcctgtacacagggcgaatgccata

SEQ ID NO: 858933 - DNA, 598 bp, Homo sapiens
ccttagtattccccacctctaacatgaagaactctgtacaatcctttctgatctgacagcctttgaaactggataggctatggatggctctgacactcacccaaggcawtatcaggcttcatacaccttgtctattactaaagggagagattacctagagtccacttgaggaacagataacacaacaaaagtggtggagtggtagggctcttgacgtaacaggagttggcaaagcctatctgtatctctaggaagagccatgccctcatctctcactgttctttcatagaagaagaggtttcatgttttctccacaaccctttctacttaactctagttttaataaagaacccagtattcgtcaattataccacaaatgctgtgcaactattctcaggatttctgtttgtgcttcacttataactagataagaaaaattggagaactcagctcttttgataaagagaaattccagatctagaaagtagaggtgagggaggctcataatttggagagcataagaaccgttgctacacggggagctatacaaagcaagggtggctccaggaaagaagaacatcaagaaagtggaaaagaa

SEQ ID NO: 858934 - DNA, 514 bp, Homo sapiens
aactctgtctcaaaaaggaaattatcattgaaaaagttgagtgaatgatacaggcaaggttgcttraatggtgtctggtacatgcgaaaccctcaataactatttgctgaggcacctggaacagagtgggtcttcattaaacattaattctctttctcccctgtcccaggtgtgtggagtgggggccctgtccttccttcacttacccaacatatgcatagcaccaggcaggtaggtaggtggagaaaccgtgatgctcaggactgggaaggatggagagtgcgtttataatgtaggtggagaagccatgtgcttcaatggcactcttttgtttaaagtaacaccacaaagccaagcagaagttctgccctaagcattcctatttttggtcaatatgctgcgagggagcaaaggaaatggggctaaattaaagtagcatttataaataataatgatgaataaatgattcatcaaagttgctttgcaaagtaaattattccgagacacacagaga

SEQ ID NO: 858935 - DNA, 514 bp, Homo sapiens
aactctgtctcaaaaaggaaattatcattgaaaaagttgagtgaatgatacaggcaaggttgcttaaatggtgtctggtacatgcgaaaccctcaataactatttgctgaggcamctggaacagagtgggtcttcattaaacattaattctctttctcccctgtcccaggtgtgtggagtgggggccctgtccttccttcacttacccaacatatgcatagcaccaggcaggtaggtaggtggagaaaccgtgatgctcaggactgggaaggatggagagtgcgtttataatgtaggtggagaagccatgtgcttcaatggcactcttttgtttaaagtaacaccacaaagccaagcagaagttctgccctaagcattcctatttttggtcaatatgctgcgagggagcaaaggaaatggggctaaattaaagtagcatttataaataataatgatgaataaatgattcatcaaagttgctttgcaaagtaaattattccgagacacacagaga

SEQ ID NO: 858936 - DNA, 646 bp, Homo sapiens
cccaggctggagtgcaatggtgcagtctcggctcatgcagcctccatctgctgggttcaagtgaccctcctgcctcagcctcccaagtagcttgggattgccggtgcccaccaccacgcccagytaatttttgtactttaagttgagatagaatttcactgtgatgttgaccagactggtctcgaactcctaacctcaggtgatccacctgccttatcctcccaaagtgctgtgattacaggcatgagccactgtgcccagccatattttggtaaagtttttaggtttttctatatatttctttcatattgtctgcaatgagggacaatttgaattcttcctttccaatttagaggccctttatttctttctcttgactaattactctgactatgacctccagaactatgttgaataagagtggtgaaagtgggcattcttatcttgttccagttcttaaaggaaagtttataggcttccccatcctgtgtgatgttagctgtggaattatcttatatgatttttcttgtgtcatggtgtcttctttctatacctaagaaaggagagagtttgttgagagttttttatcgtaaaaggatgttgaatattataattttcatgcatgtattgagatgatataattttt

SEQ ID NO: 858937 - DNA, 498 bp, Homo sapiens
gctgtaatttacccgtttaattctggcaattttgaattttgtatttcactagttgttctttgtgatgccttcctactggaacacagcttataacatttcatcaattaagagaaagcagacatttgggcatgtaatacacacttggaggatacaagaaaaaatatttttctactcataacacttctgaccacaaatatgtgggttttccacaccagttctctgtggacaccatctgggtgtccagcaatttaattcaattctggaaccacactaaataccctgagttagtgcagacctcacaggttaagggctaagtcccacaagaatgtcccccacttgagatgctggttacaagtattgggtgcccagggtattcccatttccgtccaacttggstgtagagttcctgcaaccttctcctcagtttctgtaacttgctatataatagctcatagaacttatggaaacactttacttagtttaccagtttattataaa

SEQ ID NO: 858938 - DNA, 498 bp, Homo sapiens
gctgtaatttacccgtttaattctggcaattttgaattttgtatttcactagttgttctttgtgatgccttcctactggaacacagcttataacatttcatcaattaagagaaagcagacatttgggcatgtaatacacacttggaggatacaagaaaaaatatttttctactcataacacttctgaccacaaatatgtgggttttccacaccagttctctgtggacaccatctgggtgtccagcaatttaattcaattctggaaccacactaaataccctgagttagtgcagacctcacaggttaagggctaagtcccacaagaatgtcccccacttgagatgctggttacaagtattgggtgcccagggtattcccatttccgtccaacttgggtgtagagttcctgcaaccttctcctcagtttctrtaacttgctatataatagctcatagaacttatggaaacactttacttagtttaccagtttattataaa

SEQ ID NO: 858939 - DNA, 587 bp, Homo sapiens
tgtatcctttgtgatatcctttataatgaactagcaaatgtaagtgtttccttgagttctgtgagcctctttagcaaattaatcatgaagccagttggtcagaaaactgggaggccsgggcttgagactggtgtctgaagtaggggcagtctttgggaccaaacctgttacagtaggtagctagtcaggtataagcagggcaggagaaggctctccaaccaacacacaccggaagtgttgggcagccatcaggtgatggtcaggcgattgttaattgttcctctaaagtaataattgatcacagctggcaccagggaaaggcagtctcctaatagctagagatagaaaacacctgaaactgatcagcagcttcccaataagatctcaagagtggggagaagttacgcaagatcccagaagtatgccaatgtatgaaaccccaagtcaagtggtcaacacacttggtttctgaagctgcctgcttggctctcttccaagagaactttccttcctttctttcctttccttactgttctaaagctttttagtaaacttccactcctgctctgaaacttgccttggtctcg

SEQ ID NO: 858940 - DNA, 637 bp, Homo sapiens
aaacatctaaatttgcaaaacctgatgatctcaaattctagaattttaatctttaaggatctgattgtatgtagatgacaattactgatggagatctgtttgttttctagcaggttgtggtggtctgtgtytgattgcttcttgaacattattctattcacacattcgttttggctctttattaagctccccatatggtggtcctttgccaggctgtgcatgggatatacctgaatgggacacaggccctagcattaaggcatttacagttatgtttacatgcctatgaaaagcagtcctgacagtagtggctgtacctggtccgagtcacaggaaaagtttcccaaaggattcttcctccttgttcaagagtcttctttgcaccattttccctgaacataacccactttggacttggttgttgctgtggggagcattttttgaagactcaagttctttatgttccctggattgttcttttggttttgaactttccaatggattgtatagtaaccttttctgtggtatataggacatgtcagggagcaaggaaaataactttatttatgtctatttaattagagatttttcaggatttggaaagttattttttaacataacaaagtatacttttagc

SEQ ID NO: 858941 - DNA, 612 bp, Homo sapiens
cttttcataatgcaaaatataaactcattaagtagcttctctttgtcgctaagatggggattgaaatccttgacattgcacaaaggcccaggaggtgtagtctgtggctttctctgaactcttacttcctcttgtgtttcctattgttttattcatatccattggcttccttttagttccaaaaagatgtagtgcagctgtctccattatgatctcagtacatctttctccttccacctgtcatggtctgactcaactttcactcccacagctctctcccccagcatatttcttgctaaactgctgaattcaaaaatgttttttactcagaaaccttccttgacttccaggctacatggaatctttgacccttaggccagaatattctatagcaccatgaaaactctttcataacatttatcatgggtataatttgacactcatatctgtgacattgtgtttagtgcccagccccgcccttacctacccagcctcctgccactcagactataagttctatgaaggcagagtctctctaccctttttcwcaccacaaatccaccgtctcagcaccatgtatgacaagtgctataaatatatgctgcttaatga

SEQ ID NO: 858942 - DNA, 627 bp, Homo sapiens
gactctgatggtagtttcttttgctgtgcagaaactcatcttgatgatactgttttaaagtgtttacaatagtctctaggcctgctctwacaaaagattaaaaagggggttcaaaagagcctaagaagaaaatatttacatgtgtaaataggacacccaaaatacagattcataaactattttcatttttgagttataatttctattctatttccctgaaatacttcaacactgaccgtcacattgtggtccttcctatagatccacaagcctagcctgaaacagagtgtgagttatcttccttaggatgttgtgtttccacaaacctcaagtcaaactgcccttttttcagctcccaaattcatcattgtatagatatatgttcttgaaaattacttaacatgttaatattctcagtttcttcaatctataaaaatgttgtcattatagtacctacaccatcagttttccatgaggatcaaatgatgtaatgtgaaatggaaagcatatagcaaacacataaatacatataatgttatttacctcttgtacaaatagttctgcttaattaacatttaaattataccccatcaatgcacataaatttaggttttgatgtgctgaagc

SEQ ID NO: 858943 - DNA, 624 bp, Homo sapiens
gttgttaactatagtcaccctactttrctattgatcattaacgcttattccttctatataattctatgtttgtacccattaaccagcttctctttcctcccttcccacccacccacacattcttcccagcctgtgatgtgtattgttctactctctacctgcatgagatcatcttttctagctccaacataagggtgagaacatacgatatttgtcttcctgggcctgagttatttcacttaacctaatgacctccagttccatccattttgctgcaaatgacataatttcattttttatggctgaataatactccattgtgtgtatatattcatttcctttattcatttctttattcgttttatttattaattcacattttccttattcattcatccattgatgaacacttaggttgagcccatatctttgttgttgtgaatagtgcctcaataaacatggaagtgcaggtatcccttgaatataccaatttccttttctttggatatatatccagtagtgagactgctggatcttatggtgattctattttcagctttttgagaattctccgtactgttttccgtaacagctgtactaatttgcattcccaccaacagtgta

SEQ ID NO: 858944 - DNA, 659 bp, Homo sapiens
attagatactgaccatttacatctccactgttcctacaggtaggttctctaatgttagagctataatgcttttgtttaagagttgcttaagatgtttttcagatcttgaatttcagggggagggctgataccaaccagtctgaagacccctgccgaggaatcgaatcagcatgagaatgcagctttttcatctcccattccatgacctcccctgcactctttgatcaatccaggatcccaacacctcagcttactccaggcgcctagaaatctctagctccaaactcctaagggagatgaattgtaggtttcctcccacttcctggttcagtggccttacaattaaaactctttctctgctgcaaccttcatgttgacatgttgacttaccacacatcaggcaatggacctattacggtcacaaaagaacaatatatgtcatttgtaactccttaaataataagcgtatttaaataatcatggtaaatctatttaaataaaatagaaggcaggtgtttaaaaatgatgtatatttctatttactagcaaagaawgtgctcattagatacagttatagttaaacaataaagcaactggtaaaacagcacatatagtataagacctgccttgtaaagaatatatccatgttctaagaatgt

SEQ ID NO: 858945 - DNA, 550 bp, Homo sapiens
tataaacatgggcaagagaataggatataaggataataaagtggatattgtccacacttccttacttgctctctttatgtaagtgtgtatatgtgtgtgtctataacaggtttttttcctaacagttgtatgtgtgtttggaagtttttaaaatagatttttcaaggctattttatgtacactttttttggttagtattttggtgatttttagttaaagaaaaacaatgttttccaagggcaaaaaaatgaactgaagttcggaaggaagctggatgtggacttcttacaagctcttgctccaaaacctggaaacgaggaaagagggccctcccgggaaacctgagaaacattggcacagcagagggaatcctttggtggggtgggcggagatgccagcccacttgtgtgactgtattgttttgagtgggctctaaggcaatttctgygtgccactccattgacttaattaacattattaatcttgaagggcattaaattaatgaatgatacaagggccaaaagagtgatttattcccttggattctgaa

SEQ ID NO: 858946 - DNA, 550 bp, Homo sapiens
tataaacatgggcaagagaataggatataaggataataaagtggatattgtccacacttccttacttgctctctttatgtaagtgtgtatatgtgtgtgtctataacaggtttttttcctaacagttgtatgtgtgtttggaagtttttaaaatagatttttcaaggctattttatgtacactttttttggttagtattttggtgatttttagttaaagaaaaacaatgttttccaagggcaaaaaaatgaactgaagttcggaaggaagctggatgtggacttcttacaagctcttgctccaaaacctggaaacgaggaaagagggccctcccgggaaacctgagaaacattggcacagcagagggaatcctttggtggggtgggcggagatgccagcccacttgtgtgactgtattgttttgagtgggctctaaggcaatttctgcgtgccactccattgacttaattaacattattaatcttgragggcattaaattaatgaatgatacaagggccaaaagagtgatttattcccttggattctgaa

SEQ ID NO: 858947 - DNA, 488 bp, Homo sapiens
tctgttggtgcactctttcctttaaagaggaagaagtggaagttataggaaaaasaaggaaagtgtgagggaatgaggtcctcatttcacatgaggatgaaatgagactgagaagaggatcagccacagaggagtgatattgcttttggtaataggagggctttaaacccagatagatgcagatgtgtctaagcttagagagaaatttgtctgatggcttctatctttgtgggacgatgaagtgtggtagttgttagggtggagttttaaggatgattcactgaatggaagaagccagaaaaccgcaaaaaggaagttgagaatattgtcaagggagtgtctgaagtaacgaccatcaaacctatgctgggtagagaagggactaagataggaagaagttaatgggaaaaaattaatacaggtgtcatgtctctagaggtctcaagatttaggactgattaacttgaaaaatataaacctaagagatg

SEQ ID NO: 858948 - DNA, 561 bp, Homo sapiens
tattctaaagattattgtatatttaatcttaaacaatgtatttgtattatttgaaattccrcagtttttttctggatattttctatcacatatttccattaattaaatatacttaacactttatgattctaatgaaaattataaatccattttttggcataagacaaaaaaactgcttgtctcattcaaactaagaaactgcacaaaagaggtgatttctattctttgcccttctttttcttttttgttaaatctattttacatactaattagagtttccagagacataattatattttcctgaggtggataatcatgataaaatattgcattcagcatttacaatcattatggaatcttcaaaatccaagttctacaaaatattagaaaacaaaacttaggctcaaaactaaatttagcatgaaatgatttcgtaatcatagaatataaacctgcatgaatcaaataagaaaattatatttcagtgagcttcacttttctggcaacctcttattaccaaaattcccacaaaccatattttccatcttaagaatgcaatat

SEQ ID NO: 858949 - DNA, 611 bp, Homo sapiens
tttcataatgcaaaatataaactcattaagtagcttctctttgtcgctaagatggggattgaaatccttgacattgcacaaaggcccaggaggtgtagtctgtggctttctctgaactcttacttcctcttgtgtttcctattgttttattcatatccattggcttccttttagttccaaaaagatgtagtgcagctgtctccattatgatctcagtacatctttctccttccacctgtcatggtctgactcaactttcactcccacagctctctcccccagcatatttcttgctaaactgctgaattcaaaaatgtttttttactcagaaaccttccttgacttccaggctacatggaatctttgacccttaggccagaatattctatagcaccatgaaaactctttcataacatttatcatgggtataatttgacactcatatctgtgacattgtgtttagtgcccagccccgcccttacctacccagcctcctgccactcagactataagttctatgaaggcagagtctctctaccctttttcwcaccacaaatccaccgtctcagcaccatgtatgacaagtgctataaatatatgctgcttaatga

SEQ ID NO: 858950 - DNA, 506 bp, Homo sapiens
catctcttaggtttatatttttcaagttaatcagtcctaaatcttgagacctctagagacatgacacctgtattaattttttcccattaacttcttcctatcttagtcccttctctacccagcataggtttgatggtcgttacttcagacactcccttgacaatattctcaacttcctttttgcggttttctggcttcttccattcagtgaatcatccttaaaactccaccctaacaactaccacacttcatcgtcccacaaagatagaagccatcagacaaatttctctctaagcttagacacatctgcatctatctgggtttaaagccctcctattaccaaaagcaatatcactcctctgtggctgatcctcttctcagtctcatttcatcctcatgtgaaatgaggacctcattccctcacactttccttstttttcctataacttccacttcttcctctttaaaggaaagagtgcaccaacagagtttggtatgggttgaat

SEQ ID NO: 858951 - DNA, 584 bp, Homo sapiens
attttaaaaatacataacattaaatttattatactaaccatttttagctgtatagttcagtagtgttaagtttattcacattgttgtccaacagttctctaatactttttcatcttgcaaaaatgaaactcaacacctgttaaacactaattcctcctctcctccccccagcctttggcaaccacctttctactttctgtttctatgatttttgaccactttagatacttcaaatgagtggaatcatacagtatttgtcctttagtgactggcttatttcacttagcataatattctcaagtttcgtccatagtgtagtgacaacaggattttctactatttttttttttttttttgagacagagtctcactctatcacccatgctggagtggagttgcgattctcctgcctcagcctcccgagttgctgggactacaggtgcacgccacygcgcccagctaattttttttttgtattttttgtggagatgaggtttcgccgtgttgaccaggctgctctcgaactcctgacctcaggccatccacctgccttggcctcccaaagtgctgggattacaggcatg

SEQ ID NO: 858952 - DNA, 548 bp, Homo sapiens
tactgcaaggatgttcactgcacattatttgtaatagcaaaaaattgcaaacaccacaaatgtctaccattagaagaagagataaatgggttgtggtatattcagacaacagactactaccrtgcaataaaaacaaataactagagcttcacaaatcaatgtggatacagctccaaaacacggtaagctaaaaaggcaagctgtaatatctataattccaattttttttgttttttaaattacagcaaacatagcataatgtaaggaagaggtgaatggtagtttgcctaagaattaattattactgttattgccttggggaagaggccagggaagaatgtgaggctatgccttacctagctatacacccagcaccagcctgaacatgcacagaactgtcactctataaatggagataaatggcaaaagaaagaaggagtaacagtcttactttctcataaataatgtatttcagtggtaccaactttgttattactgagggtaaaggatccagtgaagttggcttgaaagtcagtttttcttcaatc

SEQ ID NO: 858953 - DNA, 618 bp, Homo sapiens
atttgtgtaagaaatgaatttatataaaatacaacaaacggacaaaagtctgtaaaaatagctaaagtcaaaaataatttttgatttatttatttgtggggaaatttctgtattcttttgtagcaattaatgtcatggaaagacagtatccattgaaaatctagtttaggaattaaagtaagattagaaattagtctttaaaattgttttttgcctttgtagatcacatcaataggaatatgaaaacattattggcttcactaaaatatagtcttatatttaaggagccatttaagaaaaacacaattcaaaattatgaattaggactttaaacattgcaaaaatgctccctgcttatacttcacccagttttcaacttatatgatgtaaattttggaggaagagctcatataattccttgctttccattcaaattttctgttcctattttctatgctcaaatgcagaaggtacagtaatgatacctgaatcatcattcatccagtaaaatccccgctcttcattcattcaatcaatactyttaattcattccatttaatcaccagtacccattttgtattcttccttctcaacataagcatctattctcatgtcttt

SEQ ID NO: 858954 - DNA, 605 bp, Homo sapiens
tatttgacagtgatttttcaagattaaaatacacacacatgtacattgtttttttccaggggaagactcctgaacttgcctcacccaaagatatgatgtacgcttcagacaatgctggactgatgtgttcaattaaacaaatgcaccaataaaatgctgcatgtaaaaagagtaaactgccagggttgctctgctgtatctaaccacaaaccaggagcaccaaagtggctctcctagggattttatcaggctatacctagtacccgtttcctacagattacaggcatgacttcatttgaatgtatcctcacctagcatcactttgtccttaattatgtgaataggcacagcagtgtgatttgaggaaagaaagtaaagataaccttgtttagaggctgctgctctgaatgtattttcactaaagatctggttccttgattttcaggagattaagaattgagctgtttgctaaaaagtatttcagacttgatttggaatttcagtttttgattggaggtggagtgcacrcagaggaagaatgtttggaggctgttaaaagcattgtcattggaaagaaactgttccctgcaaaagttctattatga

SEQ ID NO: 858955 - DNA, 477 bp, Homo sapiens; identical to SEQ ID NO: 858071

SEQ ID NO: 858956 - DNA, 597 bp, Homo sapiens
ctcttatccaaacacttccataagatttcctatcagtcactgacccctcagtctagtatagctccaagggactagattctcctatctctggttctagagaaaaastttatccttcctaaaatgagttttaggctctgaggcacaggagacggtgagactttgtatagtgcttatgacagtgcttacttgagggaattcttccctggattcctgagattcctgagtattactgccttcttcacagaagcccaaccctgattctttcagatggacttatccctattcctcacatccaagcagtatcagatccgagaggctaaataacttgttctgggccagggaactaagtgcccaaaacagtagttcaatccagacctgctccaccctagagacggagactgtaatactcctaaactagaggaatgggaagtagcaccaaagggcacaaaaaatgtgcacgtgtatgaaaatctattaacctgaagaggctgttatttcagtgagggtatgagcaaaaacggaaatgcgctcatgctagaaatgcacacacaaacacatccacagccagatcaaaagcatgggattcctcccttaata

SEQ ID NO: 858957 - DNA, 618 bp, Homo sapiens
ctcctccacagaacgaaagtaaagatgttatcttactgtgcctcacggtagttaacctattagatgaggtcatgtgtcaaacaaaagacagtctaatctacagaaacagggaggttaaayagcaatttaatgaaataccaaatgacaatcttatttggtccctgagtgaccacaaacatgaattctcagtgtaagaaccaccgaatgtgggagactcttgcctatctctgtcctggacaggatctggacaccatggaggagagctctgagataaaagtggaaacaaacatttccaagacatcctggattcggagttccatggctgccagtgggaaaagggtcagcaaagccctcagctacatcacaggagagatgaaggagtgtggagagggacttaaaggtaaaattctatgagaacaacactgaccctgaccctaaaaactcacctccacccatccccaggaaacccattgccatgggggttccctatagactagacttagactagactgcactctgttactgtggtctttcctggaagctgggagttttgctgttaaaacagacatacagcctcttgaactataaatagcaatacatgcaagagtgtgagctcat

SEQ ID NO: 858958 - DNA, 620 bp, Homo sapiens
ctattaatcccagtaaagaaatcaatatgggtaactgatttattggtagcaattacatttcaattgtattacctcactgcccaactaaccattctgctttttaaacaatgccaaactattaatcwttacacaaaaaagcagctttttatacaatgcattccagaccaaggtcattttatctcggtaaaacaatgttagataccaacatctgtgtgacttgcaatgaatcttggaggtcaggaaccaaaattaagtccatatggagctgagttggctccatagttaaagataaaaaaccgtatgaataattaagcacttatgaaaaagtacttctatttcataatctaagtggtggctgtcatttattttcagattatctccctcttcaaatttcatagctgaacatattgcttgataagcccatgcctctgctgtagtgacccattttcaaagccataccaacttatgggaggcatcaggcttcagctcaggcaaggacaagcagcccaaagagataaatgccttgagtttctggaactgaatctataaaaccctaaggtggcagcatcaaatgaaaacactcaagtggcattttccatcaactcccaaagcaggaacat

SEQ ID NO: 858959 - DNA, 554 bp, Homo sapiens
agcgacttttgaaaacaatgaaattgataatttctcttccctgcttaaaaccctttcatgacwtttcattgttctcttcttaaagttccaactgtcacacctgtaatcccagcatgttgggaggctgaggcgggcagatcacaaggtcaggagatcgagaccatcttggctaacacggtgaaacaccgtctctactaaaaatacaaaatattagctgggtgtggtggtgggtgcctgtagtctcagctacttgggaggctgaggcaggagaatggtgtgaagccaggaggcggagcttgcagtgagccaagattgtgccactgccctccagcctgggcgacagagcgagactccgtctcaaaaaaaaataaaaaagttccaactggagatcgacacaggaggcccttcaggttcaggacccagcccagaggctggtctactgtctgtgcctcccctccttcacctgcccccacccaaccacagttcccaagccatctttgcacctgtggtcttcccaacccattttcatcctctgggtcagctccttcttaacc

SEQ ID NO: 858960 - DNA, 552 bp, Homo sapiens
actaattaaccaatccttaacatttgagttaaactttcttaaacccatggttctttaaaatactttctcattctgtttatatatcctcccaacagaataagagagagagagagagagagagagagagagtgtgtgtgtgtgtgtgtgtgtgtgtggtttaaaacaatagaaatttattctctcacagttctggaggccagaaatccaaaactaaggtattgccagagttgtgtttttccctgagaaagaagattccatgcctgtcaactggctcctggtggtagtcagcaatccttgatgttccctggcatttcctggcttgtagtggcatcactccaacctttgtctatatcttcagatggttttcttctctttgcgtgtctgtggctctgtggctccatgttttcctctcttttcccttacaaagatgccagtcattggatktagggcccaccctaatccaacgttacctcatcttaactagctacatctgcaaaggctctgtttccaaataaagtcacattctgaggttctggatagacattagcctta

SEQ ID NO: 858961 - DNA, 552 bp, Homo sapiens
actaattaaccaatccttaacatttgagttaaactttcttaaacccatggttctttaaaatactttctcattctgtttatatatcctcccaacagaataagagagagagagagagagagagagagagagtgtgtgtgtgtgtgtgtgtgtgtgtggtttaaaacaatagaaatttattctctcacagttctggaggccagaaatccaaaactaaggtattgccagagttgtgtttttccctgagaaagaagattccatgcctgtcaactggctcctggtggtagtcagcaatccttgatgttccctggcatttcctggcttgtagtggcatcactccaacctttgtctatatcttcagatggttttcttctctttgcgtgtctgtggctctgtggctccatgttttcctctcttttcccttacaaagatgccagtcattggatgtagggcccaccctaatccaaygttacctcatcttaactagctacatctgcaaaggctctgtttccaaataaagtcacattctgaggttctggatagacattagcctta

SEQ ID NO: 858962 - DNA, 540 bp, Homo sapiens
gaacattgtactcaatgggtaatttttcaaccctcgccctcctcccaacctccccycttcaggagtccccactgtctattatttctatctttgtgttcatgtttacccattgtttatctcccacttatgagtgaaaacacgtggtatttgatttcctgagttagttcactaaggatactgccctccaattccatccatattgctgcaaaggacatgatttcatttgttatggctgccgaataaattctattgagctttattttgtatttcaaaatacagacaatttaaccaattagaattaagtatgactgcaactagcatagactcaaagtaatagtgggtaatttctttctcctatttggaaaatctggaggcaggctgtctgtggctggtgccccaccaagtagttgaggacccaggctttttccctctttcccaagaggacctcccagtctaagatggttctggatcagtggctcttcatcagggataatttcccccctaaaggacagttgacaatgtctggagacatttttattg

SEQ ID NO: 858963 - DNA, 540 bp, Homo sapiens
gaacattgtactcaatgggtaatttttcaaccctcgccctcctcccaacctccccccttcaggagtccccactgtctattatttctatctttgtgttcatgtttacccattgyttatctcccacttatgagtgaaaacacgtggtatttgatttcctgagttagttcactaaggatactgccctccaattccatccatattgctgcaaaggacatgatttcatttgttatggctgccgaataaattctattgagctttattttgtatttcaaaatacagacaatttaaccaattagaattaagtatgactgcaactagcatagactcaaagtaatagtgggtaatttctttctcctatttggaaaatctggaggcaggctgtctgtggctggtgccccaccaagtagttgaggacccaggctttttccctctttcccaagaggacctcccagtctaagatggttctggatcagtggctcttcatcagggataatttcccccctaaaggacagttgacaatgtctggagacatttttattg

SEQ ID NO: 858964 - DNA, 644 bp, Homo sapiens
catccatttattcttccttcattccttatctacatttctccaaaaaaacacactttaaaggaatagcaaggaaagtaaagtatatgttcattttagagagattactttgaattttctgaaaaatcccagcctggtagaacacaaggtttgtgtcccatgtgcggttgctggcatttttggttttggggtctgcatcgagactttgatttaagaacataaaatgcataagaaaaaaaaaattttatcctttctttccccaagtcgttaatatgatgccaaatgaccaggtcatgcaatgagattttttttgaatcgtgacaaacatctaaatccttcatcctttgtcaggtaatcaatgtgttaaaacatttaaaaatcaaataggagcataagaataaaaaacagagaaatcctcaagtgtgatatttaacatcatattgttcgtatgatacaaggataaccattcaaacaatgtgaataacaaatatgttatttttaaaacaagagcccactaactggagctttttttttttttagttgaaataatgactgtagcgaatctggtttkgtttatgataaaattgttaagtatcaaataaggtgaatgtggttttccaggatccctgttaaaaattaaaacagtg

SEQ ID NO: 858965 - DNA, 644 bp, Homo sapiens
catccatttattcttccttcattccttatctacatttctccaaaaaaacacactttaaaggaatagcaaggaaagtaaagtatatgttcattttagagagattactttgaattttctgaaaaatcccagcctggtagaacacaaggtttgtgtcccatgtgcggttgctggcatttttggttttggggtctgcatcgagactttgatttaagaacataaaatgcataagaaaaaaaaaattttatcctttctttccccaagtcgttaatatgatgccaaatgaccaggtcatgcaatgagattttttttgaatcgtgacaaacatctaaatccttcatcctttgtcaggtaatcaatgtgttaaaacatttaaaaatcaaataggagcataagaataaaaaacagagaaatcctcaagtgtgatatttaacatcatattgttcgtatgatacaaggataaccattcaaacaatgtgaataacaaatatgttatttttaaaacaagagcccactaactggagctttttttttttttagttgaaataatgactgtagcgaatctggtttggtttatgataaaattgttaagtatcarataaggtgaatgtggttttccaggatccctgttaaaaattaaaacagtg

SEQ ID NO: 858966 - DNA, 602 bp, Homo sapiens
tatggagctcattacaaagccagtcacataatcrgctctcataagtgattagtgatagaaggatttttctatagtgattagaaacagacaaaaaacatcaacaatgatttaaaaaaaaaaaaaaagaaaacagcacccttacatcttgagagagctcagacagttttctatattcaattcatgataacatatttaaataaagatagatcagattctaagattcacattcttatgaaaatgaccacagcattttcaaaagttcattttctctgctaaagtaatctactgctaatccttggagttccagtaccctttggaaaaattgcgaggcagatcaaaaagtgctatgaaaatcttgggactcacggtgtgcttatgatttgggagagatgacttatttagttctgagatcaagatagatattataatatggtgcaaattagaatgaagatactaaataatttacgctaatgctctcagttataaagataactgcttcactttgcgactgatataaattaagggaatgtatttaaatgtatattttaatcaatcaagaaggctcgtctgccagccggtgttagatgctaatgcatgctctc

SEQ ID NO: 858967 - DNA, 566 bp, Homo sapiens
cgtaacatgcatgtctttcgtatactgtgctcgttttcagataaactgcacagtcacctgagatttagccagctgacactggatgtcaccattgtgctgtgtaatgwagctgcagaacaggtgtgctatttagtattcaggacatggttagcctcatcaagggtttggagataacgttcgctattttccctcatataaccgaattatccgtgtggcacttttgtagtgacttactttttcagtttctaatattcaagctctataaaatagtaatcagaaatgaacaaataatctcttagaaccaggaaacaaaaatctgaaaactcagaaactgtgctaaaaccaagcagggctcttgattgcaatccagagtaattgactctggctgacttggtagaagaagaatttactgagaggatatagagcagctaccggaattgatgggaatgttgaaaaactaggtttggaaaatgggaggatctcatatgctaggacaccggtgaaatcaggttgtgagatgaggagttaggatcctcctgacgtagccactggacactggccactgg

SEQ ID NO: 858968 - DNA, 628 bp, Homo sapiens
tttatctgtttgttttgcagaaagcacactgttagtaaacagatggtttagaactattatagttgccrataactggaaacttggccctagaaaggacaaaatactgtatataattgttcattaaacaaatatttattgactctctgatgtgggccttagaaattcaatagtgatccaaataggcatagtctctgaccccacaactgctcctagattctaatagaaaacagacaataaataaacattgtaacacatgtggtaatgatggaaaagaaggctacaggaaatttgaaataaaagaagaaagtttacctagagtacacactggaatttaagtttactaaataaatgacttgtacatgtaaaacaacaacaaccaaaaacctaaacaaaaccccatatggtttaatattgctaattaatgatctttcaaatagccagtaaacatgtttcacagcactaccaatttgttaccatcctgctatccttcaagctagcacaaaatctacaaaagaaactcttcatctgattcccatttaactggctctctgaaattaatctctagtgtccatggcatggatgccattgataacatctgtgagtgatgctcactgcctctggatcccac

SEQ ID NO: 858969 - DNA, 580 bp, Homo sapiens
acataattaaaaaactaataatgtttaacattattgttttacacaatgacattagctttaacagcttagcaacacatcaaggcctcatttccatagtcacagagtatattatttatcctaggtttctctggtaaccagtttgacaatagtaacagcaatgtgagttcctaaattgttttgccatactgcttcataatttatgccattgccagtaattgtaatgtctgtataatttccttttaattatcaactaatgaaatttagattcatttgggtaaaacaaatattcacattcaacttccaatcacctgtccacgcttccatttaatttactcaagtttggtgccttttatttatatttttaatatcaaactgtgagaaggatatgaacattcattttctgattagtgtttagggaaatagtgattacatggttcttttctcttctttgcctttaaattttcagtgtgaattttttaatccaagaagatacacacacttcctagttttttcacattaaactccaargagtttaagtggaattaatttagtaaactttaattgcagaataatctctgcc

SEQ ID NO: 858970 - DNA, 627 bp, Homo sapiens
gatgaaaatagaggaagtcaagcagaaatccaactagttaattaattaatgtgactagtacataaccatttaaagcttacatatatgtatatgatgttttgatgatgatgatctgtaaaataataatttattaaaacataaagatattatttaggacagttcaaacaggtgaccagtttcaaacttggaacaggataattctcatcctgttcctaaaagcagatagtaagcaaaagtcacagcttatctttacgagtaaataagtgtcccctttgtgtgcacatgatttttgtgtgtggtatcaagctgtcacagatgcgcaggatatagcatttcaggtgcctctggaaacagaagcaggcctcaagtgtccacagctgacctgagtgtggacgctcagggcctcaagtgtccacagctgaccctgaaattctccctaggtgcctctcttgccccctcctgtcctgtatcactgtttcgccctgaactttaaacttggtgacaactccatacttgagtcctaaggagatgctgctttccactccataatcttaaagagactaaaaatatttacttaaaaacttagcttaaccaaataactatgmctttggaaataattgtttggaa

SEQ ID NO: 858971 - DNA, 657 bp, Homo sapiens
ttcgtaatgggatttttcagtttatatggatttctttcctattattttaagagttgtttcctctttggccaaccttcatatatttagattatttyacaactttctcagtagtatatttacttgtttgccaattcttctaattatttatcaaatatacagcaatttgtatgaaataggatggtttcaagcacttttgaaatttctgcagttttaattgtttggttttcatggcaacattatatgaaagatttattttttcaaaagctatggggtagcttgtcttcttaagaaaagatttatcattctaaaaactatttttatatatttaattaaaatttttaacataatgccattacctcaaatctcatatacattcatatatttgaaattttcaaaaaaagaataagatcaatatgaaacaccaagattttattatatgttttaaatataaaattgcagcagttaagccatttgaacattgatgaaaagatagtaaaagtgcctaaagagttataataattttaaatgatacaaaagaatgtaaaggttgcaagagaattctgaagtgatcaaaattataccatcaagtattaaatactgaaatttaaaaagtgaatttctaagactaaaaaacaaggttaatacatttattaatat

SEQ ID NO: 858972 - DNA, 541 bp, Homo sapiens
gcgcttggcatttgctaaaagtcaagtgactggtggggtggagaggccagggccacagtagttagtatgctgtgacaaagagtggtggagtggtcatctcaagtcttcactgccatagctcacccgctccccaaaccctactgctgcaggaggtcacacgccacctgcggatggagcaaacacatgcagacaagacaggccccccgccactgctggcacacgggacacccacccagcctatggtcctgtctctggctggacaacgtaatcagaataacaggtaatccttactgagcactaactatgtggcagacacatgtccaacaattaatatatagtaaagtgtttaattcttacagcaatattgtgaagtaggtactgctatttagtttatatttcttacctttttccttttatttttaattcttttctgaagtgttaatttctaagttttcctaacttagatttatgttattacttcatatsttctatttactcccttcaggtcttgagcttgttctgaaactgtaggctacagctt

SEQ ID NO: 858973 - DNA, 541 bp, Homo sapiens
gcgcttggcatttgctaaaagtcaagtgactggtggggtggagaggccagggccacagtagttagtatgctgtgacaaagagtggtggagtggtcatctcaagtcttcactgccatagctcacccgctccccaaaccctactgctgcaggaggtcacacgccacctgcggatggagcaaacacatgcagacaagacaggccccccgccactgctggcacacgggacacccacccagcctatggtcctgtctctggctggacaacgtaatcagaataacaggtaatccttactgagcactaactatgtggcagacacatgtccaacaattaatatatagtaaagtgtttaattcttacagcaatattgtgaagtaggtactgctatttagtttatatttcttacctttttccttttatttttaattcttttctgaagtgttaatttctaagttttcctaacttagatttatgttattacttcatatgtyctatttactcccttcaggtcttgagcttgttctgaaactgtaggctacagctt

SEQ ID NO: 858974 - DNA, 634 bp, Homo sapiens
aaagcttgaaatcaaatagctacaggatttaagtcaatattttagtatgtgacagttaataaaaatctagattagataaattacatctattacaaccaayagcaacaagcttttcatgaatttaaacaaaacaaaacaaaacaaaaaaaactcatgtcggccccagccctggggctacctgacctgacaaaaccctttacaccctgtgtatcacaaagagaaaaaatggcagttggagttttaacccagactgtagggccctggccaaggccactggcctatctctcaaaacaactagacggggtttccaaaggctggcccccatgtctaaggactctggcagcaatggccctgttagcacaagaagcagataagctcactcttaggcaaaacctaaacattaagtcccccatgctgtggtgactttaataaacagcaaaggacattattagctaatgaatgctagactaactagatgccaaagcttgctctgtgaaaatccccgcataaccagtgaagtttgcaacaccctaaaccccaccaccttgctcctggtatcagacagcccagttgaacataactatgtagaggtactggactcagtttattccagtgggcccgacctccgagacca

SEQ ID NO: 858975 - DNA, 634 bp, Homo sapiens
aaagcttgaaatcaaatagctacaggatttaagtcaatattttagtatgtgacagttaataaaaatctagattagataaattacatctattacaaccaacagcaacaagcttttcatgaattwaaacaaaacaaaacaaaacaaaaaaaactcatgtcggccccagccctggggctacctgacctgacaaaaccctttacaccctgtgtatcacaaagagaaaaaatggcagttggagttttaacccagactgtagggccctggccaaggccactggcctatctctcaaaacaactagacggggtttccaaaggctggcccccatgtctaaggactctggcagcaatggccctgttagcacaagaagcagataagctcactcttaggcaaaacctaaacattaagtcccccatgctgtggtgactttaataaacagcaaaggacattattagctaatgaatgctagactaactagatgccaaagcttgctctgtgaaaatccccgcataaccagtgaagtttgcaacaccctaaaccccaccaccttgctcctggtatcagacagcccagttgaacataactatgtagaggtactggactcagtttattccagtgggcccgacctccgagacca

SEQ ID NO: 858976 - DNA, 574 bp, Homo sapiens
ggatagatggatagatagatagataataggtagatgttataaaattttgattttgggggaatgaaaaattattcacaaatgatattcatagctcatatgatatcatgtatagaaaatccaaaagaatctaaactagtggaattaatataataacatggtatggttgctgatacaaactcaaaatacaaaaaatcaactttatgtctaaatataaaacaattaaaaattaaataaacatcatctatttgtacatatatatgtcatttttatagatctaaacattttgaatatctaggaataagtcaaaaatatgctcattactactaaggaaaatattcaagtgagagaaattgaaaaatatagaaatatgatgtcatcatgaattggaagcataatgctgtctagatgctagtttttttcaaaacaaatgaaatctccaaagttccaatatgrcattttattttcagaacttgagagattgattttaaaatttatatgaaaaatgaaaaatgcctagatatgccaggaaaaaagtatgaaaagacatggtgtatggtaataaagacaggtggta

SEQ ID NO: 858977 - DNA, 497 bp, Homo sapiens
acactacttactagctcaatgatcctaggtgagttattttacctctatttctctttgataaaatagagataaaaacagaacttaggctggacatgattcctgcctgtgattccagcacgttgggagacagaaacgggaggatcacttgaagccaggaatttgaaaccagcctgggcaacatagcaagaccgtatctctacaaaaacaatattaaaaaacttaagaaaatagaacctgccaatattttagttgtagagattacatttattgatatatgtctaatattttgaatattgcctggcacaaaaaaaaaaaccttacatggacatgtggcctcttattagtagtgattgggatccagaaaagaccctacctaacagacattaaatatatgtatcaaattttgtgtcaygtaaagtgctattaatgaaatagactatggtaggcaaaatagttccttgaagatgtctacttcctaacacttgaaacttatggag

SEQ ID NO: 858978 - DNA, 610 bp, Homo sapiens
ctgctcatctgctaagtgccacgtattacagcattttcctcatagggctgctgtgagctttaaatgcgtttatgagttaactgcttagaacagtgccagctatgtaataaacactacgtaagtggcagctacaccatgcataaacaaacgcaaactgtgtgcatctgaggaataattctagttaacattaaagtgtgtttttgtgtacagagttggtgtctgttgtctgtgcattcactttttaaaaatcgggaaatagcagatgttaggaacctatttattttgcttgctcttccttctactttctgcttgctacctactctattctagttccagacttgatctgtttctctgtgcagggttgctcctatgtacaaccaatgcagaactgaccccatcaaatttacaaagtgtattagtctgttttcacgctgttgataaagatataccttagactggacaatttacaaaagaaagaggtttattggacatacagttccacgtggctggggagacctcacaatcacggtggatggtgaaaggcacatctcacgtggcagacaagaggagaggakcaagtcacatcttacatggatggtggcaggcaaag

SEQ ID NO: 858979 - DNA, 417 bp, Homo sapiens
atggttaaaagatccattcaaagtacaagacggaccaatggaatttaatgtaacagagaacaaaacattcattgatgtagtttccaattctatactgcaactaacctttaagaaactaccatttgttgagtttgggtttgatatcaaaaaagaatgtccataattatctgaaaagcctagtaaaatagtcttccctttcccaactccgtatctgtctcaggccagattttctgtatatccttccatcaaaacaacattattacaacagatggaatgcagaagcagctatttgaatccagctgttaatgcagaccttaaagcaactggtgaaaatgtgaaccaatgccacygtcctcactgaacttttgttttgaaaagtagtaaattttgtttaaaaaaagtcactttatatatatg

SEQ ID NO: 858980 - DNA, 602 bp, Homo sapiens
aatgtagtgtagcctaagtgtacagtgtttataaaggctatcgtagtgtatagtaatgtcctaggccttcacattctgtcaccactcactcgctgactcacgsagagcaacttccagtcctgcaagttccattcatgttaagtcccctatgcaagtgtcccattcgtatcttttatattggatttttactatgcctcttctgtgtttagatacaaaacacttaccattgtgttacagctgcctacagtattcagtaatcacatgctgtacaggttcatagcctaggaataaggcctaggtgtatagtagtctataccatctaggtttgtgtgagtacactctgtgataatcacacaatgatgaaatcacataaggacacatttctcagaatatatccccatcattaagtgatacacgactgcaattaatattggataagcacaaaccatactctcctctaccaccactctcaccccatccccaaagtatttactatataaaatacataattttgtttagaattatttttatcaagataaattgttaaaacatgtaactataaagattagcatcttaatataatagtggtttctttatcactg

SEQ ID NO: 858981 - DNA, 578 bp, Homo sapiens
cttgacctattcactagtaaatattgtgtaaccttttactttcttattatctggagttagaggtgatataaaataaatacaaaagtcagaataaagtttaataaagatttatcaatttcctaacattatatctcatctatgtctgtcattcatttttgtcattcactatttttgaaaaaaacttagtacaaaaaatatagaatgaatagaaatataatataaaatgaatagacaaatgatttctataagatacattctgcttcgaaatgctccaaaacatagttagtaggattggaaacagaattaaacaactttgtcttctaaaagtgaccattattttttaaaaatccaatcatcaaaatagaaacatattttaaagaatgatgacctaaattggctttaaatgattagagagaatggaatagaaaatatttcttctgagcaaacaaggaccggaaataaygacagaaagaaatgtccctcagtgttccctaaagagtaaccaatatatattgagctcctattatgtgccattcaggaacttgtaggattatctaagtaaaaaactgaaaaacaga

SEQ ID NO: 858982 - DNA, 448 bp, Homo sapiens
taaaaacaaaggtatgtatgtgaaaaataagactcatgccattttcagtggaattataaataacattgctgatgggtgggcaatcasgcaatacatagcaaaagttaaaaattgcatgcttttcaagtttctgttttttaggatttatcttaaagaaataattagacaaatgtaatatacatgcaaggatgttcaccatagcagagggggaaaaaagaaaagcaaacaagaaatgcccaacaccagaggtggattactaagacaagatatctgtggtttgtcaagatatatgaaatacaagcttttattgctactatgttcagatcacattaaaatgacagtgaagtcataaaaaagctatccactctccaggtcaacttttgaggtcttactcctgaatacgaacagacagccaagattatgagctatttgagtaaagcctctaaaa

SEQ ID NO: 858983 - DNA, 554 bp, Homo sapiens
tcttgctaaaatgtcatggttcccataatgtaaataaagtggaatatagttaatattaagctcattaggagtaaacttgggaatctcaaaaacttggttttgaaaggtgggttaatgactacattgcacagargatggattattttaatgactgattttctttttattgaattttctttctgctgggctactcaatagatacagactcccaccactcaccatttcagcaggttctactacttatttccccaattcatgtagggagctgatactcaactgctgtctcctggaacatctctctttcttttattaaaagaggaaatgtatatcaggatctgtcaacttgtattgtttcaaatctaggagtttacaaataaagaaaccaacattatatacttaagagttctacttatggaaatggtagaacataaggagccccatggatccaataaacagagaaaaaatcataaaggataaaaattattatttaaaaccataaccaaaaacagttaaagtctctataaaaaaaacttaaagaataaagaaatatttgt

SEQ ID NO: 858984 - DNA, 466 bp, Homo sapiens
gggcaacagcaaggagaggaggataagtatcctaaacaggagaaataacgattgctgatttgggctcaatgcttggcccagagcaggcagccaatacatgcttattgattgatggcttgctagttactggtttgtaccaggattgctcaagtaccttctctgatggtttctattagggttagagttgattagcttacataagctacatttgtgaacactttcccagtcccaagccctaccccagccctgtatctcctccattgtagagagaagcagagggatacccagaatacaactactaccaaattctgtaatatgagaattagaattctataacattaatgatacttggccttcatgggtgagggtagaagcagaagacagactaacttaatcaacttratatattcaatcaaaagttaagtctaaacctttttttttcccctctgtaaactgttcagggata

SEQ ID NO: 858985 - DNA, 558 bp, Homo sapiens
attggataatttgacaaatatagcatcattttaagataatcttgaatatttaggtttgataataagtattagttgatgtaaaactgacagtgtaaaataattataaaagggcaaatgctacattttggtacaatatcaggactgtttgaacaagagaagaaaggtccttaaaatataacaacaaaaatggtttgaaaatgttttctgaaatgaatatgactttgtattaacttgacttgtttgtaggaagaaaagcatgaggtcattgttttcagatagaaccagtgtttatctgttggaaatcatagcacatgtaaccagttgatgcttagctgaatcctccctacctacccagacagagaaggtggctgcgtgttatttacatgagaaaatggtttcaaattgtgtttcttccttaatttaaaatartaagttacagatacattatgagtgacttttcaaaaatgttttctaactttattgcaggaagaggttgtgggaaagattaggttaggagacgagtctgtgaaattaaatccctgtgaatgaaatgaaaat

SEQ ID NO: 858986 - DNA, 591 bp, Homo sapiens
gatgggaatgcaaaatggtgcagctattatgaaaaacaggaasggggttccttaaaaattgaaaatagaattatcacatgatccagcaatcccatttttttagtatatatccataataattcaaagcaggatctcaaagagatacttgcacacccatgttcattgtagcattatttgcaatagccaagaggtgcaaggaacccaaatgtccactactgaatgcatagatgaagaaaatgtggtatatatatacaatggaatattatccagcctaaaaaatgaaggaaattctatcacatactacaacatgagtgaatatctagggcatgctaggagaaagaagccagtcacaaaataacaaacactatatgatttcacttatatgaagtatagtagacaaaatcagacgagagagtgacaccagcaagatggcagagtagaagttccttcagcatcattctcctaccaaagtacaactaaaaactactcaaagagaagaatactaccctaaattcaccatatattggggaggggagtggaaaagccacctggacccacagaatcaagaaatgcttcaactagtaaggggaa

SEQ ID NO: 858987 - DNA, 602 bp, Homo sapiens
agggctgtaattatgttcactatcaatcaagtgccaagcctggaagttaggacgagatgtgcccacttaattggcttggtgcccctaggatgacaccctggactccagcagctgatgggcagtrgggacaggaagcctggtgactgcaggagacagcactggggaagagcatgggtgaaggttcctcacccataccccattccttccggcagctgaagaagtgggccacctcaaacccctctttgctgaacccccactacatgccctttgctcaacacatcttcaccaagcacctactgtgtgcccattaaatattccttcataccatctgctctgtgaaagacccagagcacagatgagttagtcacaatcttgtccttgagggtctcatgacctttcaactgagcctacaagctgggagcagggagaaagacggatttaggggcctacactcaagcctttgcttttcttcaaaatctgcaaagcaacaaagccacagcagagtttagaaagatatctacccttatgagctgaaagttaacaactgctttgacttttaggaggaaggaaggaaatgctaggcctcaagatggcccctttcc

SEQ ID NO: 858988 - DNA, 471 bp, Homo sapiens
ttccatcttcctctcgccactgagcccattggaaaagaatgttgtgctgggcaggtggtcagggagagctacaaaagctgagctttcagcaaaggtgttagggaagggagagagatagcatgcactgattcaattcgactcaattcagggaatatttattaagcgctgcctctattagtcacctatatgtatcatctcatttttttcctcgaagatatcctcccatgtaattgtcattatcctcactttacaggtaagatacttaaaagactcagagatattaagaaatgtgtctaggatcacacagccagcctaaggcttagccgggatttgactctaagtcttgttctttaaacctaatacaccaagctgcttctccaagcacytctgccacttgctgggtcacacattcctttttaaattgttttcagagttacatcttgaggtctcatttctgaagcatctcttctt

SEQ ID NO: 858989 - DNA, 507 bp, Homo sapiens
aagactggcgtccacttcctttggggctccctaccctgagccagatgttttttgttgaatctggtaattttcaaagaagagtccagattggagtgtcagaccaatggctgggctctgtgaatagagcctgtgaaagaacacaggaaaagcacccataaactgtgcactacacagcactttgcaacctctcagcctttccatgccctctcacagcagcccagtgaggcaggcgtcattattgaccccattttgtgggtgagaaaactgagcctccaagactttcctgggtccagtgcagagctgggacccatcgtgtctcagaagatgcaggtggcgcctggcacgtgatgggtactcacacaccattgaaacttcagactcctagctctgaggcttttgtcttccatcttatggtctctgcctcaagaaaagtaatctatcccraaggctatttcttcaaaatataagaaaatccttacagggctgtgatctcatgttcctccgcag

SEQ ID NO: 858990 - DNA, 614 bp, Homo sapiens
gaattctcactaatctcaggtgaaggawgccatttgctattgataaagctagttaatctccagagtacaacctgggctttatgtatttttagatgagaatcacaaaaattgatctgcacttgcttctcatacaagcttcacgtgccggctgcaataaaatctatgactgtgattcaaagtatacttccagtctgcatgaagaaagagactccaatgctgctaaaaatgaattatcttctttcttcaattttgaaaatgccttagaaaaattaactaattaacagatgcatctgatgagaatcctgtagactatcactcagagatcttctattgtatatgatgtaatacattaccactacaatagaaaattatcttagctcttaacaattcttagaagctatgtagaaactgagactgattccatgtagcattaagaaaaaagattcccaagtagcaaactccttcatcctttacttaggccaaggaaattatgacctaaaaacaaaatcaaacaaaacaaacaaaaaagaaccacaagttaaaaaaagaagaaacctaacccacaggcgtttacttgcagctgagattgatcttaaggttagcaggtataaaac

SEQ ID NO: 858991 - DNA, 682 bp, Homo sapiens
ttgtctctggttagagaaggaggtsggatccttaaggtggacctagaccagtatggcagttgtggctgcaccaattttcctttcagttgcccagacttctgggttaattaatattggtctgcactagggtgagacaaagagtctgtcctggagccataaggatgatgggtcccgtaccagctaaaatagccctgcctagcagaggagttgggctttcaggcatgatttaaaaggcatgggtaaacaaaaggtcccctcaactataactaaggggttgggaaaaatatcagattaaaggctttcctgagacatccctcacagtcacactaagaaaggaaggggaggcctggcctaataagttgcctcccaagagggaaaaaaatcagtctcttacatagcaaagctccctgtagtcataggactgtgctgactcctgacatgattgcgggggcggaaacaacttaaacgcaggtaggggaagttgcctgagggaaataacctcttgcccaatgcaaatggattccttcaacaggggaaagaaaactctcagtcattgcatccttcttgcttctaagaacagacaaaaaccaagttgttctgaattacactgctgatgactaagcaaaatgctcattccactcaataatattatcactgtggtttgcagcaacacccttaacgt

SEQ ID NO: 858992 - DNA, 716 bp, Homo sapiens
agtttagaaaatgatcatcttaaatacattgtctttcttttcattttgcagtttagtgcttagtatctagttacttgatttgaaatgtagctgtatcrtgtggattaactgctgtttttctagctatatcagctaggtgatttcgctgaatgtttccttaaaatgccagatttagcagttataacccagaaaactccttctactgttttccaaaatttactttatgttttcgtgaggagttatttctcagatgactttacatatattagtgaatctttgatgaaacagtagttaaagttacgagcgtgagccaccacacccggcctaaagttgtagttcttaaccactatcacatcgtcatttgtttctctgtttaatattaaaattgccatttataatgtatttttctttaagtgcaaatagtgtatctgacctattatcaatcatgtttatacttttattaggtggaccacacaggagaatatggaaatctggtgactatacagtcatttaaagcagaatttcgcttagcaggaggtgtaaatttaccaaaaataatagattgtgtaggttccgatggcaaggagaggagacagcttgttaaggtgagccttcccttctctggcttagcccttagagttttagtgatgaaaatttttagttcatattttctttctgctttatttgggattttgtctttattttgaatacttaca

SEQ ID NO: 858993 - DNA, 540 bp, Homo sapiens
cacctgaggcaaatacaattaatatgttccctctttcatatgaggaccaagttctccgtatgcctttttctggcctaagagaaaaatattacragttccttcaactagtgtaaaaatgacatattattcagacttctcaccatttcagtcatctttcccaagacacattccagtcaacttaaaatgctgactatacaaaatctggtgaacatggtaatccaactgtggcttgactagtatgcgaaacaaaaggtctattatttctcacaaacaaggtactacaaaatctattaaagtagtctgaaactacattagcttttctggcatcctcatcatcctgccaattttaaattcaccctaaatatgcagttaactaaatccctaaacatatcatatcacctcctaataagcctgatcttcatcctggagataagaggtgagtaaaagatgaaaaactattaaaagtcactattctttcacttatagtagtttcatgggctacatattatctagatatacttattagaagagcccataaaa

SEQ ID NO: 858994 - DNA, 557 bp, Homo sapiens
actcttttttagacagagtctcgctctgtcaccaaggctagagtgcagtggcgctatcaaggctcactsctacctccgcctccccggttcaagtgattctaatgtctcagcctcctgaaaaggtggcatttacaggaatgtgccaccacgcccagctaattttgtatttttagtagagatggggttttgccatgttggccaggctggtctcgaactcctgacctcagatgatctgcccgccttagccttccaaagcactgggattacaggcgtgagccactgcacccagcctaatcctttaaattctaatagactctctcatggtaacacagacttcaagattgttatagcatactcaactggaaggaaatgcttaaatttctctttagtagtataactttacatcttaacatacttaaatatgtttttatatttacatagagtcaaatacagactatcatttaaaaattataattaagatatgtatggaagaatatacctaaacataatttcgaggtttataaagattaaaacttaaaatatgctttcaaaagtta

SEQ ID NO: 858995 - DNA, 557 bp, Homo sapiens
actcttttttagacagagtctcgctctgtcaccaaggctagagtgcagtggcgctatcaaggctcactgytacctccgcctccccggttcaagtgattctaatgtctcagcctcctgaaaaggtggcatttacaggaatgtgccaccacgcccagctaattttgtatttttagtagagatggggttttgccatgttggccaggctggtctcgaactcctgacctcagatgatctgcccgccttagccttccaaagcactgggattacaggcgtgagccactgcacccagcctaatcctttaaattctaatagactctctcatggtaacacagacttcaagattgttatagcatactcaactggaaggaaatgcttaaatttctctttagtagtataactttacatcttaacatacttaaatatgtttttatatttacatagagtcaaatacagactatcatttaaaaattataattaagatatgtatggaagaatatacctaaacataatttcgaggtttataaagattaaaacttaaaatatgctttcaaaagtta

SEQ ID NO: 858996 - DNA, 629 bp, Homo sapiens
ctaacttttcaactgctgtctcaaagttcttgtcttctatctcttgtcttacctggccaacaattacaccttatttccctgtaactatctttagtgtggctagttttgtttttattcccacatcagagactgggtgtgaggtggctgtttctttctcccttctttcaaacattttcatcttcctccttcttcaaaaacataatttatttgaaatagacaacattagactttatcacacaatcatctttctgattgctgtcaactacctgcctcctcttcaatctcctcattcactgatgattttagcacctggtttgctatttcttcttcatctctattcattccaaaattcttagcaatttttaagattcatttggatgatccattcaatactttttttcactctgttctttacattcagctccattgatttttcctccatctcacctgttatgaactcaatatttgctccccacccccaaaaacaacaacaaaaaacttatattttgraagtctaactcccagtatagtggtatttggagatgtggtccttggaaggtaactcgggttagttaggtcctgagggtggggccctcatgatgggattagtgaccttataaaagaaaaaa

SEQ ID NO: 858997 - DNA, 623 bp, Homo sapiens
agtggatggcaatgagaaactgaatcagccctaggtggtgatctgtgtggtccagggagttcttatccagagttgaaaagcttgtgcacatggaaaacctgaaacaagccaggagtgtatgaagcgagccagggagagaagttagggctggggtcagaattaggaattctagggctggaataatcaatttgtaaatcaacaacagacgggtggcatttaaagccctggaatgaatgggatcacccaggaaatggttctcaagcctggctacacatgggaaacacctgggaatctttgaaactataataatgtttcagtcctaccctcagagattcttatgtaattggtctcaggtgcggcctgaacattggtgttattaaaagcttcttggatgtttctaatatccagccaaggttgtgaaccactgacttagggagaaagcatagagagaagatattcaaggactgaggtctggactactcccaacatctagaatccatcagggaaggaggagccaacaaaggaagactgaaaaaaagccgtctctaaggtgggatgaaaaacamagaattcaagagggggaaaaacgagttttaataaagactattcagtgctgctgagag

SEQ ID NO: 858998 - DNA, 623 bp, Homo sapiens
agtggatggcaatgagaaactgaatcagccctaggtggtgatctgtgtggtccagggagttcttatccagagttgaaaagcttgtgcacatggaaaacctgaaacaagccaggagtgtatgaagcgagccagggagagaagttagggctggggtcagaattaggaattctagggctggaataatcaatttgtaaatcaacaacagacgggtggcatttaaagccctggaatgaatgggatcacccaggaaatggttctcaagcctggctacacatgggaaacacctgggaatctttgaaactataataatgtttcagtcctaccctcagagattcttatgtaattggtctcaggtgcggcctgaacattggtgttattaaaagcttcttggatgtttctaatatccagccaaggttgtgaaccactgacttagggagaaagcatagagagaagatattcaaggactgaggtctggactactcccaacatctagaatccatcagggaaggaggagccaacaaaggaagactgaaaaaaagccgtctctaaggtgggatgaaaaacaaagaattcaagagggggaaaaaygagttttaataaagactattcagtgctgctgagag

SEQ ID NO: 858999 - DNA, 635 bp, Homo sapiens
tcccactgtgtcaccacagatgatgcaaacagagctaactgtccaaacccttgctgatgcaggagtgccctgttacccttccaccaacagcacaaatgtgtacatggacrctggcaactctgcctctgccaccgccctgcaccagccacactgccactgccataggcatgagcatacacaggaccacttcaggctcactcccaccagtgtgccacccaagccaacaggagtaaaccctgccagcaccagctttgtagagttgtggccagtagactgggacacctcagccccccgagtgaatcagattcctaacctcaaagggccagagactgcagctgagggcctagtacagccatccagagttaacaggcagtccaggagtgctaagctgatccttggccccctaaaaccttccagaaataaagtcagtctactgaacctacctcaaaccacaaccaaacttccaaaggcatcaaagaaaataaaattgtaaaaaactccatccaaagaacagtaacttcaaagactaaaggaacatcagcccaccaacagtgttcaagctgagagccaaatccagatcataatcccattcacaatatccacaacaataataaaatacctagaaatacaaataa

SEQ ID NO: 859000 - DNA, 588 bp, Homo sapiens
tatccttttttcggtgttttatgtatatgtatcttctaattcacaaaaatggcattggatcataggacttatttagtttcctaatttttctcatctgttattatatttttgaagtctatttatgtggcygtgtgcttcttttgtttcttgctaccaactgctacatggtattccattgtttgcatctaccactttttatatatccattcttccaggcatgtaaactcagattacctctaatatcctgctgcttcaaatagcatcatcatgaatataaaggatactgttgtaatataattattatatggtattttgttggatctgcctactaggttttcttttaaaaaggagcacaaataagttgttcattttgtttaaaaaatagcatttttttagttacttgttataggagttggatttagtcagattaggataaatgtgaaaataatatcaccatgtggaatgagtttacaaatattaatatatttgattttaataactagttttcagcaagaaaactaaagtatattgtgtgatgtagggaatgaatgtagtgagtattttaagtatgatttaacttctatatat

SEQ ID NO: 859001 - DNA, 619 bp, Homo sapiens
tacattgcttcagtgcaggaatccttaaaagatrtccatctagactatgttattattgtcagtatgttaagatacaatgctgcctataccacttttaaatgcctcttttacttcatgactttcaccttcttttgctaaagcactctgaatctctgagtcactcgccagtgttcagttctgcctttatttgatgctgcacttcagaagatgatttaattctattgtggagcaggataaaactaaataaaagtggtggtacctacctttacagagcttaaagtctaggagggaatgcaggcaataaataaacacgtaaaatgggaacagagattaggaaaatataacctaaactaaaaagctagaaatagcctcttggaggaaaaaaacatttaagcagagatttcaagaagaatggaataggcttagcagagtagaaacttaacaaatattggttgaaatgtattgagataaatcagaccaaatcattgcccatgcctgagcctgaaattttaccaacacagggtttaatattatgagtctacagtattagaaaaatggcttctattacttctattttttcagaataatatatttatatagttacaaaaaagagcacagg

SEQ ID NO: 859002 - DNA, 595 bp, Homo sapiens
ccagagcagccaagagagtgcttgcaccacctctctaccaagctcaggcaacacagctcacagttctgggagagacctcttccttctgcttgaagagaggagagggatgaataaagaggactttgtcctgcctctgggatgccagctcagccacagtaggatagggccctgggcagaggcctgaggccctgattccaggcactaactgtcaaatgacatttctagacacaccctgggcaagcaagaaacttgctgccttgaagagaaggacccagtcctggcaagattaatcatcttctgactaaagagccattggcccttgaataaccagcagtggtacccacgcagtactcgccatgggccttgggtgagactgagagatgtactggctttaggtgtgacccagcaaattcccaactgtggttgttatggagagggactccttctgcgtaagaaaaggaaagggaagagtgaatgrgactttgtcttgcaggttacataccaattcagccacagtggggtagagcaccaagcaaggttccctgattccaggcactggctctcagatgacatttcttgacactccctgggccag

SEQ ID NO: 859003 - DNA, 628 bp, Homo sapiens
gaaggggctcgagggcaggccacgtttggggggggggtcccctccttacccacgctgttggctgcactggctcttcactagggactgactgtgtgccctcttggggaaagtcactgcgaacagtgcagtaataagaaagccaagcgcacagtcctgagaatgtgtacatgggggtctgaagctagctttcttcatgtcctagctgcgtgtatttgagcaaatgatgaacctctctgggtctcagcgtctttgtctccaaaacagggctaatggcagttttgaaatgttgtttatgttaaattttttcaaagatttgatccctgcttcaagaagtttatctaatgtagagataagatatgcacacaaatgtaaacagcagtaatagtaagagctaacatttattgtgagttatctgtgtcaggcctaagctttgtgtgggttgctcatttaattcccatagaagctccatggaggtgggaactatcattatccctactttaytgatgaaaaaactgaggcacagagaagttaaggtcacgcagctcataggtggcagagttggagtgtgagtccaggcatcctgtactaatacaaggaaatttatagtatatgccatggtgggtggcat

SEQ ID NO: 859004 - DNA, 531 bp, Homo sapiens
ctgcatacaacactcaggtattactggaaaaatgaaaaatctgggggacaaaacccagtaacttagggaagggaacaggagaagaatgaggaaatcatttgagcttggctcatcccgtcattacataaatcctctaacagaaggcaaaggactccagagcagcagaatccaagtccccagttaatcattcctgtgtccatcatggcttgactgtgtttccttcatcatcctaagagccagaggcagacacaggaagacacagagagggtagcatccatatacagagtccagaagcagtaaaggagccgatcatgcctatactcctactgcaatagaaatcactagtgtggtccactcctggggtcttttttgacccccaagtttctctgagtaaatgtgcatgaattccacrtgccctgtcacttatgactatttcaatctgtctctcaactgaaaaatctattactgttgctttctgaatctgaaaacccattagatgctcaatgtcagaaatctatacctgattatatc

SEQ ID NO: 859005 - DNA, 586 bp, Homo sapiens
agtgtagagatgaatgggaagggcatcccaggagctaggaacttccagagcaaaggcccagaacatgggatgtggagggtcagtatgggggagtgggggatatggtttgactgctgtgtgggttggaagggaggtaagaagtgtcaggagaaggttgaaagatcagcaggggcccaatcggggagacctttgaatcctctgaaaataatgacagccttagcaaatttgctgttttattcaaaacaagagataggctacctgagtaagactgtttctgaattctgtactttattggtcaatccaaccactcaaattttaacaatttcgttgtctgagctttttgaaaatgattttctgcttaaaatgatgaggctattgatgataagaatggagtgtaagtgaaagccggcctgcaccgctcttgttctttctggctgtgttctatcacactatcggcacgacattttttctagtcacttactaatgctagaggaactttcttttgcagctgatggaggtagagtggcaataggttttaagaagtcagctcagrcatcttatcactcatctgggaatggggaaaaac

SEQ ID NO: 859006 - DNA, 590 bp, Homo sapiens
attaagcatttcactgttcaccttaagggcgtgctacatagactattttttttttcctagtctggcatgctctggggcataaaatgatttggttgccgaagttttgacattttaaaatatttcaatgattaaatgtttaattaagtcagtggaccctgaggtcacttggcaaagggtagtttttttgttttgttttgttttgattttgattttggatcaaattcattaaaacacacacacatacacacccaatttgagaaaagcattggtaaatctgttgggaaaaaagctttcctaaaaatattcatttactaccgtttcttgagttaatcagagttacaagaaagcggtacttctgcatagaattatctggaagtgtttcactggaaaaaggttcattatcctaataaatgatggagtaaataacaaataacaggcctggtacaggcctggctcacacctgtaatcccaggactttgggaggcygaggtgggcagaccacttgaggctagaagctcgagaccagcctggccaacatggtaaaaccccatctctactaaaaatacaaaagttagccgggcgtggtgaca

SEQ ID NO: 859007 - DNA, 600 bp, Homo sapiens
ttattcagattcattcataacgggtaaattcttgaagttctaactccacaataaaagaaaaacttacagcacattcataataatattggatttgtagtttcaatcacaaattaaaaccaacaataatgtttttatgcccattatccattgtctctatgttaatgaattccattgatccatcaacttatatttagggtttctgattgtctattttgctgacaagtcaataccttcaactcattgaaaccatggaaaattcataagatgtgcaatagaggtgagttgatgtcagatggctatctgataattcttcccacgtgtgggttactctgactctgagtatcaaaaagaaaaagtccatctcttcctagagaactgtgagattttcagcctctcttgcagctagattgagagcatgtgatctagtttttcaagtcagtttttcccaccttagactttgaattggaatttagggcaaaaaccatagaacaccaattttagcaatagtggcaacatcaycaaggccccaggaataggagcagcaatagtagaagcagtgcagtgcacagggagaatacagtatttggtgctgacagtgac

SEQ ID NO: 859008 - DNA, 554 bp, Homo sapiens
caaaaagatggcttccaagctctgaaaggtattcctgagtcataaagttgacaaaagrcctatctagttttcaaaataatttctgtacatttcgaagagaggagaatgtacttacaatgataaggtttctaaagtaaatgctctaataaaaatgaggatgaagaagtccctttctttatctcaatgggggaattaagtctcttatttttaatttttatttattcaaaagtaccccaacaaattcacctgaattgccccctccaaaatgaagtagcttaagatgacattttaaaaataattctctttaacaatgacagttgctggcatttgtgtagtgattctatgaaccagttttagggaattaagaaacttcctaaatgcagattttagggcctttggtcatagaaaccaattaaaaagacctgggattcagttcaaatagtttccttcttatcaaattctttcaaggccattttgagtcttgttatcccttgccactccttaagaaataccacctatgactacacaacctcagtgaaataataacctcacct

SEQ ID NO: 859009 - DNA, 584 bp, Homo sapiens
cttttaaatatttattatttttattgttgtattgttatttttattatgttttttaaaaatacttcaattcattgttggttgaattagagaagcagcgtgcaattaaaaaaaaaagtgtggcatgtggtgtctgtagcattgaatgaatttccatatatatttatcacgataattttttgagacagagacttatgtttttattgcatattctgtgtttttttttttttgttttttttttttatgttctcctccctttctttccccccttaaggaggtggccacattctactttctttcctcatatgagattagtttttgtgcttctagacttttgtttcccagtgtcttaacccactgaaaataatagaatttgaagaaacatgctgtatctctagactaaataaggattcttgcaggttgagtggtgtgtgtgtgtgtgtgtgtgtgtgtctgtgtctgtgtgtctgtgtgtctttgtgtatggcgctgtgtggggggagatgccatgtggcagcatctccaaagatgtggcagaacctcagtagtaatgaacacacattacaytgagaagactggaagggtcc

SEQ ID NO: 859010 - DNA, 530 bp, Homo sapiens
actctaagaaagaattttaaaaaacggctagagataaaaaacacagaaacaaagaaagcctttgatgggcattagtacactgaacatgagtgaggaaggaatctctgaacttgaagatgtcagtaggaacttccaaaattgaaaagcaaagaagaaaaaaagaacaaagtatctaagaaccatagacaactttaaaaggtgtaacatagtcagactttcagtaacaacatggttgaactcaatagcatgataaaccaactcgataaaattgatatctgtagactactttatctaacacagtagaatacatattattctcaaggtcacattaaataatcatcaaaatagaccatattctggaccatggaaacagcttcacagaattaaaataatataaattattcaatgcctactctgaaatcacaatggaattaaactagaaatcaataaaaatgatagttggaaaattccaaaatacttagagattaagcaacacacttstaaataacacatgagtcaaagaagaaatc

SEQ ID NO: 859011 - DNA, 445 bp, Homo sapiens
tgccctatgtgggaattaaaagttgatctcatagagggagagaggagaatgacagaggttgggaagagtgtttatgtggggtgggagatgaagagagcttggtgcatgggtacaaacatacagttaaattgaagaaataagtaccaatgtttgatagcagagtagggtgactatagttaataataacgtattgtacatttcaaaatagttagaagagaggatttgaaatgtcactaccacatagaaatgataaatacttaagaggatggataccctatatagcttgactttgatcactacacattctatacatgtaacaaaatatgacatgtacctcataaaaatgtgtaaatattatatcaagaatatcttgactggctgaaaatrttgacaaatgacattactaacaaatgattggtacttttcagtgttccacttttatgaa

SEQ ID NO: 859012 - DNA, 530 bp, Homo sapiens
caaagacttgggtgagcatccttggctggcaccatttttaatgtgttatcacatatcattgctggaagaattaactgtgtctctgtgtgactccattgggagagaatgcatgaaagcrtgtgcctgcttcctcctgaactttagaccacgtgacttattcctttgctgatttcaatctgcatctgcaaagttatataataatctataactatgaatatagcagtttttctgagtatctgagtccttctagcaaatcttcaagcctgagaattgtcttgggaacctttgacacagaataaatagtaagaatcattatagatgaacttaaggcttcagttccagttgaaatacatgctaaggtactgaagtaactagtatatcgtccatatcacccttaataatttttgagctattatagaaaataagtgccagaatagctgtgatcatcacagatcatcaaacatgatcccaatttttcaaagaaacaacgtcaggaactacaaatatgtaagcttgatatcagattctag

SEQ ID NO: 859013 - DNA, 549 bp, Homo sapiens
gagctttttggtcaaatgagcaaaaggagaagcagcagacaagtggggcaagcctatttggtcaaaagcacataaaccaaaccaataaattttgtcctcaaaaggaaactgtacaggtctaggctgtcactcctgcttatagaaaactgactagttagataagaagatggagaaatatacagtatttctcttggaaagaaaaatttgggggctgggcacagtagctcacacctgtaatcccagcactttgggagggcgaggcaggcagatcacttgagctcagaagtttgagaccagcctgggcaacagggaaaaaccctgtctctacaaaaaaaaaaaaaaaatacaaaaattagctgggtgtagtagtgcatgcctatagtcccagctactcaggaggctgaggtgggaggatggcttgagcgtgggaggcggaggctgcactgagctgagattgttaacactgccgagacagaccttgtatcaaaaaagraaaaaaaaaaagaaaaagaaaaattttgatcccacttcccaaaaacatatcagctt

SEQ ID NO: 859014 - DNA, 657 bp, Homo sapiens
cagcttgggtgacagagtgagactccatctctaaataaaataaaataaaaataaataaataaatwaaattattggttcctgcaagtctccattataattggatttatgtattaatttttatttcccttaaaaccattctggttccccaccactatatactgctgtcattttgttgtacttaatctcttagtttgcttatgctctttctaaaagtgtattttagtcatgtgtttgtttttctttccaactatttttcaattttagttttctaagaaatcatgtgttatataaactcattgtatttcagtttcactttatatttttcagacatatccatgctgtaatatatatttctaagtgcttgctttctcatatgtccagaatgtacacaaaccaactactgtctatcttttttctttttctccagtaggacaatcaagttgccttcaaattccaagaactaaaattactgttgtaataaaaatgtttgtacttgttcctttataaacaggagtcagaaattgttgagatacattctctggagcacaatttctagttcataggctctgcatacacactcttattatcctcctgaactgtgccccactttacactgctgccagcttgccactaggattacaatgtcagcacatctct

SEQ ID NO: 859015 - DNA, 627 bp, Homo sapiens
aaccaaatctttatttctggctcatgttattagaggccacaaggaagctgtagctctscgtgactcgtggctcttggcccaattggctcaaaatgttttcttattgcaaaccaccgactgaaggagctgtcctgtggttgggatatgacaaagaatattgcatcacctagccccatatggaagaggcatggtaatgtgctcctgctacaaggtgatcagactaatcacatgacaaggggagcagaatgatgtatcatactattacagagaaaagccaataaccagcagtaatactccaattggctacagcttgtcttcattgtcacaaatatttgcattcatctactcacaatataaattaaattcactccccaagactcacctaaaaatttgtgtaaacctgacctaagggcttgaattcagaatcttacaatccaaattacgtgatgatgcagctttcatttttaaatctagaatggagaagactactttccttaccagagattaccttacacatgttgaaaatgggtcactattctggaccctgcacttctgaggaacgaactctgaacttcctctggctagacatttctataaaggataagaaggccgtgtgtacaaggggac

SEQ ID NO: 859016 - DNA, 627 bp, Homo sapiens
aaccaaatctttatttctggctcatgttattagaggccacaaggaagctgtagctctccgtgactcgtggctcttggcccaattggctcaaaatgttttcttattgcaaaccaccgactgaaggagctgtccwgtggttgggatatgacaaagaatattgcatcacctagccccatatggaagaggcatggtaatgtgctcctgctacaaggtgatcagactaatcacatgacaaggggagcagaatgatgtatcatactattacagagaaaagccaataaccagcagtaatactccaattggctacagcttgtcttcattgtcacaaatatttgcattcatctactcacaatataaattaaattcactccccaagactcacctaaaaatttgtgtaaacctgacctaagggcttgaattcagaatcttacaatccaaattacgtgatgatgcagctttcatttttaaatctagaatggagaagactactttccttaccagagattaccttacacatgttgaaaatgggtcactattctggaccctgcacttctgaggaacgaactctgaacttcctctggctagacatttctataaaggataagaaggccgtgtgtacaaggggac

SEQ ID NO: 859017 - DNA, 640 bp, Homo sapiens
ttgctggggattaagtctgcagaacttttgatgctgcagtcctggaagggaaacctgaygtgtattatctaaaatattattttaatttatatgtctcagctgtgtggcatcatcataatttttgaatcattcatagtgctaaattaaaagaaaattcatgtaaataattatcttcataacaaaactatccttggagaaatagagtgattggtgggagtgaatttatctccagaaaagttgcaaatgaagtcctgtgcctttatcaacacctgtacaatgctggaagtcatagtgataaaatttagataaaaatcattctatttaaaaagaaaagtcaaaatacatattaaggaatatggtggcatttgacatgttctgcaaaggaatttctaatccctcattgatgatattattctgattggttgtcagtcttcactagttctattgtgagtatgtgtgtgtctgtgtgtgtgcacatcatgtattgtagactctgctgttataagatttagtatttacagcgtcctttgttaaggggacctgactccactttattcaaggtgttctggaattttgaactatcccttgtcagaaaattaggtgacagatcctgactctattgtgttaattcaaagaatat

SEQ ID NO: 859018 - DNA, 648 bp, Homo sapiens
caaagagtgtgtatcagaaaatacgaaggtaactgctttgtttcttctttcatagagccttgtgcctccaaacaagcaacaaaaaggccacratcaaattctttttctaattagctctaatttcttagagggctatctgtacctagtcatgaaactaattgttttttttaatctacctcaaaaaacattattattattattattattattttatttatttattttttttggagtctctctctgtcgcccaggctgcagtgcagtggcacgatctcggatcactgcaagctccacctcctgggttcacgccattctcctgcctcagcctcccaagtagctgggactacaggcgtccaccaccagtcccggctaggtttttgtatttttagtagagacggggtttcaccgtgttagccaggatggtctctatctcctgacctcgtgatccgcccgcctcggcctcccaacgtgctgggattataggcttgagccaccgctcccggccaaaacattgttattcttaattttataaatatttatcaaattttaattgtcaggcaataaaaacgtcaaagtgatgaaaacagtgtctttagacatggaatttatagtctctggaatagggggattttattcaacttttcaata

SEQ ID NO: 859019 - DNA, 648 bp, Homo sapiens
tagttcataaacaagataataagcatatgtaaaacacaagattacaagacttctttagaaataggagaaaaatcttygtgatttttgtgattttagggttgtgtaaaatgttcttaaatatgatactaaaagcataatccatagaggaaagattgaaaaattagactttcaaatgaaaaagctaattgtccttctaaagacacaattaggaaaatgaaaagataagagccagatggaaagaaaaatgtttacaaatcaagtatctgaaaaaaaaacttgtttctagagtatataaaaaaactttcagagtcaacaatatgaaaaaacataacccaacattaaaaaataggcaaaagatttgaaccgacatttcaccaaagaggatatatggatggccaaaaaacagagtagaaagaagccaacatctttaatcctaaagaaactgtaaatgaacaccgcaagacaccacgctacagctcttacaatgaaaaaaaaccctgacatgagcaagtgctggggtagatgttgaacagccaaatgttgccgacgaaaatgcaaaatggcacagcctctatgaaaacagtgggtggccctttaaatttaaatgccaaacgttcacttaatataacctctagcaataccatttct

SEQ ID NO: 859020 - DNA, 591 bp, Homo sapiens
cacgtcgccatgtgaagatgtgtttgcttccccttcacctttctgccatgattgtaagtttcctgaggcctcacagccatgcctgctgtacagtctgcagaactgtcagtcaattaaacctgttttctttacaaactactcagtattgggtagttctttatagcaatgtgagaatggactaatacattatcactcttgccatgtgagatgcctgatcccactttgccttctgccatggttgtagcttcttgaggcctccccagaagctgagcagatgctagcaccatgcttcctgtagagcctgcagaaccatgagctaactaaattttctttctttataaattacctagtctcaggtattttttagcagtgcaagaatggcttaatgcaccaaggattgtgtaggatgacagggattattgagtgcatataatctattttgcttttcaaggagctcctggcccagggkagagatcaaaatccctcagacaacacagacaatcacacgggacttgagcatgtactgtgggaacagagcatggccatctctgtctccctgggaaggaagatgtggagaggcttggataatga

SEQ ID NO: 859021 - DNA, 591 bp, Homo sapiens
cacgtcgccatgtgaagatgtgtttgcttccccttcacctttctgccatgattgtaagtttcctgaggcctcacagccatgcctgctgtacagtctgcagaactgtcagtcaattaaacctgttttctttacaaactactcagtattgggtagttctttatagcaatgtgagaatggactaatacattatcactcttgccatgtgagatgcctgatcccactttgccttctgccatggttgtagcttcttgaggcctccccagaagctgagcagatgctagcaccatgcttcctgtagagcctgcagaaccatgagctaactaaattttctttctttataaattacctagtctcaggtattttttagcagtgcaagaatggcttaatgcaccaaggattgtgtaggatgacagggattattgagtgcatataatctattttgcttttcaaggagctcctggcccaggggagagatcaaaatccctcagacaacacagacaatcacaygggacttgagcatgtactgtgggaacagagcatggccatctctgtctccctgggaaggaagatgtggagaggcttggataatga

SEQ ID NO: 859022 - DNA, 591 bp, Homo sapiens
cacgtcgccatgtgaagatgtgtttgcttccccttcacctttctgccatgattgtaagtttcctgaggcctcacagccatgcctgctgtacagtctgcagaactgtcagtcaattaaacctgttttctttacaaactactcagtattgggtagttctttatagcaatgtgagaatggactaatacattatcactcttgccatgtgagatgcctgatcccactttgccttctgccatggttgtagcttcttgaggcctccccagaagctgagcagatgctagcaccatgcttcctgtagagcctgcagaaccatgagctaactaaattttctttctttataaattacctagtctcaggtattttttagcagtgcaagaatggcttaatgcaccaaggattgtgtaggatgacagggattattgagtgcatataatctattttgcttttcaaggagctcctggcccaggggagagatcaaaatccctcagacaacacagacaatcacacgggacttgagcaygtactgtgggaacagagcatggccatctctgtctccctgggaaggaagatgtggagaggcttggataatga

SEQ ID NO: 859023 - DNA, 497 bp, Homo sapiens
tgagatatggtttggctgtgtccccacccaaatctcatcttgaattgtaataatcccagcatgtcaaggtcagggccaggtggagataatggaatcatggagatggtttcccccatactgttctcatggtagtgaattcgtcttatgagatctgatggttttataaatgggagttcccctgcagaagctctcttgccttcctctgtgtaagacatgcctttgcttctcctttgctttctgccatgattgtgatgcctcctcagcctatgtggaactgtgagtccactaaacctctttcctttataaattacccagtccccggtatgtgtttattagcagcatgagaatagactaacattgtgtttgcagaggcaaggaaactattcctaaaaaagaaygtacaggtgtcaagtgtatggaggtggatgagaaaaatcgcaggcagacaggaaggtgagaagagagaccaggacgtggtggatccacagacacacagc

SEQ ID NO: 859024 - DNA, 497 bp, Homo sapiens
tgagatatggtttggctgtgtccccacccaaatctcatcttgaattgtaataatcccagcatgtcaaggtcagggccaggtggagataatggaatcatggagatggtttcccccatactgttctcatggtagtgaattcgtcttatgagatctgatggttttataaatgggagttcccctgcagaagctctcttgccttcctctgtgtaagacatgcctttgcttctcctttgctttctgccatgattgtgatgcctcctcagcctatgtggaactgtgagtccactaaacctctttcctttataaattacccagtccccggtatgtgtttattagcagcatgagaatagactaacattgtgtttgcagaggcaaggaaactattcctaaaaaagaacgtmcaggtgtcaagtgtatggaggtggatgagaaaaatcgcaggcagacaggaaggtgagaagagagaccaggacgtggtggatccacagacacacagc

SEQ ID NO: 859025 - DNA, 653 bp, Homo sapiens
tttggtgcacccatcatctgagcaatatacactgaacccaatttgtagtcttttatcccttttattcctcaccccctcccaccattttccccaagtccctaaagtccattatatcaatcrtatgcctttgcatcttcacagcttagctcccccttatgagtgagaacatgtgatgtttgactttccatgcctgagtttcttcacttaggataatggtctccagttccatccaggttgctgcgaatggcattcatttgttcctgttatggctgagtagtattccatcatatatatatgtatataccacaatttcctcaaccactggttgattgataggcatttgggctggttccatatttttgcaattgtcaattttgctgctataaacatgcctgtgcaagtatctttttcatataatgacttcttttcctctgggcagatacctggaagtggggttgctggatcaaatggtagttctccttttagttccttaaggatctccacactgttttccacagtgattacactagtttacattcccatcagcagtgaagaactgttcaaaaaaaggcaacttatattttaaaattggggataaaagtttccctcctctagtctttacctttcccgaaaaaacaatcactaagattgtt

SEQ ID NO: 859026 - DNA, 629 bp, Homo sapiens
gagttaattactgttaaaattttgataaacattgcatgtgtttattcttaatagtaaataaattatattgcatatgctggcataacttaaaaaaagcttagccatctattatgaatgcaattaaaagaccaaagttttctaagagttgggagggaacttggaaatctgctagattcattttctggtgaggaaaacatttattacatagcattcctccgaagatcctctagcttcctccttaataccaccaagggcaggttccacagccttattatgcctctgccttaaattatttttggattagttattctagaactttctgttctactcttctcacctgttgcttactcattgatcctggttttgcccttcttagtatgagtggaagtgggccaggaagggcaggcttagaggcagtgaggaggtggcatggtgaagtcagtggccattgtctttcatgagcaaaacagtccttggtcatgagactgaatgagtktcttgggtgatccttttcacctcctactcccactatattttttcttcagagacttacattgggggacttatgccttttttgtcatagcagaaaactctaaatatgtagaaagtttaaaagaaataaatctcat

SEQ ID NO: 859027 - DNA, 566 bp, Homo sapiens
catagctccttagaacttgttttattgaaacaaaatacatgttcttattttgcatttccctactaccattcactgctgcatcatccactgagcaacccatgaatactracttccaatgactctcccaaaaataacttggctttcttgatagtgagctcaaattaatgtcttacctagagtatgcaggaaatatgaacaataattacttttctgaacatgctaattttactgttcagaattttttagtggaaaggttgaacaacatatcttccaatcatgtcttcctttggactttttaggccattgtcactacatctctagaatataatatttcagtgtttactgcacctctgccttccatatactttcatccatgggaggagaggcaatggccttttgtgtagagtgagaaaggcatttccgtctgcacaaggaacacacattccctcctccagcagagtgtaatagtcaagaatgcacattgtcaccacattgagaaaggacatggattaaaagtgccaactggttgtgaagccacagtctgaaaagccctcagaagagataaa

SEQ ID NO: 859028 - DNA, 431 bp, Homo sapiens
gaaggggagagagaaaaagaaaacagaataaacctctaaagaagaggcaagtaatagctgagtaatcctgaaatttacaatatcctgaactgaactttgtgaagctcatgcagaaagaaacttcagatttcatgcaaatttgagaataatcattatataaaaaccaatttggtaatgagtatttattgaataattaatatgcattcagcactgtactagacacagtggaacacagaagtgctagacatgacttctccaatacatacattatcctatcatgtccaaaagataacctgattcaaaaatgcgttctctgacagtgttttggccaaggagttggttaaaaaaamcttcagttttggatgtcaagttagactttgccacaagattagagggtaaggcctccatctaagttgcttctaaacctccaa

SEQ ID NO: 859029 - DNA, 456 bp, Homo sapiens
agaatggcgagatcacccagggtggtgagatccagaaccaagtgcaaggctgccctaagtgtcccttgtccttggaaaaaattgccttttcatatggttgggagtggacggtgcagtttttctttgagggttaattgttttgctgacagcacagataattaggaatgagaatcccggagtgagggcgacagcaccatctgctgtgaatatgtttcaaccccaacttgcaggagagcttggaagagctcctatcctcaccctccccacgccaacaaaaatgaatgtgctgtagctgtttgcctctggggccacagctgccaggtgacctgcagccagtcggggtgggatggtgacyggcttcttaagagtgtagtttcttctccttcccccatggcatcttctgcacatagcagggctcactgaaagtcccaaggctgaacaaggatccatggacag

SEQ ID NO: 859030 - DNA, 601 bp, Homo sapiens
agtatcatgcagaatagttccactgccttaaaaatcctctgtactctgtctattgatcccttcctcacccaacccctggcaaccactgatctttttactgtttccatagtcgtgccttttccagaatgtcatatagttggaatcagacagtatgtagccttttccagttgccttctttcacctgctttcatgttttttagtaatatgaatttaagtttcctccatatctttctgtggcttgattgctcatttctttttatcgctgaattacattcttttgtctggatgttccacagtttatttatccactcagctactgaaggacagcctagttgcttctggttgttggcaattatgaataaagctgctataaacatttgtgtgcaggtttttgtggggatataagttttcagatcgtttggtaaatacctgagggtgtgattgctggagtctatggtaagcctgtgtttagctttgtatacaactgccaaactgtcttcctcagtggctgtaccattttgcattccaagggtggttgattttagtaktggagataaagcaaacatagcctctgaaggatcctgggaggggcagctgctgc

SEQ ID NO: 859031 - DNA, 604 bp, Homo sapiens
actgtagtaaagttttcgagttggcaaaaccaaagcacaagacaccagtgaaggycatgttcgccataagaccttatctgaaaagccattttgacgtccttgctcctggcagcaaagcctgccctaggcctggtgatctggcctccctgtctactctgagcatcttgccttctcctccactgaaaaccattctccagaaaataaaacacaacaaaatcaagataaaaggcatcagcatggccccacaccaggctttaacgggcaaatttgtatgagcaagggcaaaatgaagggcagcaaggaaaacactgaattaaaacccacttaaattaagaattcaatagcagccacttaactaataaatagtattcctctctgccattgattgactcaggattgtaatgaagagttccaggggcaacagcggaatgttttaattcatcggataaacgtcaccaactcttgggttcctaagattgaatgtgttggagaaaagcggaatggagagcccacaggaattaattcttggaacatccctgcagggtcagcattattataccctgcttctaggtggatttaatatctcgagtgctgggcagggcac

SEQ ID NO: 859032 - DNA, 633 bp, Homo sapiens
gtatttcatcatcgtactcttagaaagggtgatttttttttyttttccctgccatgtgtaaggggaaactaaagatcaaggacagtttggggccgggtgcagtggctcatgcctgtaatcccagcactttgggaggccgaggcaggtggatcacctgagatcaggagtttgagaccagcttggttaacatggtgaaaccccatctctactgaaaatacaaaaatcagccaggtgtggtggcacttgcctgtaatcccacctacttgcttgggaggctgaggcgggagaattgcttgaacctgggaggtggaggttacagtgagccgagatagcaccactgtactctgcctgggcgacagagcaagactccataacaacaacaacaacaacaacaacaacaacaacaaagaccgttttggcttacctaagattaagaaacatgtggtgctggagcatgtactgaggctaagacctgtgctccctggtccagatccctgtgctagcgtgcattacttttcaaggttgtatttgagattttataggaattcagttgctgctctcggctggttagtaggacctgagacctggactgccctttaagaaactcacaaccaaataagaaagttatttcaa

SEQ ID NO: 859033 - DNA, 615 bp, Homo sapiens
tgactccctgtaagaacctgtaatgaattttacagtgcakaactcaatatgaataaatgaatgaatgaataaacaaatgagtggcatggctcattgtcctggctttgttactaactcattgcgtgacctccttttcaataattttagaaatggctgctctgcttcatttcatgggggctggtatgaaggatcaagtgagacgacaaaggaaatcgttgaaatggatagaggacagtacttaaaaaaactatacaaatgtaaggaaatgctattaatcattgtcctttcaggcaagacatgatcgttatggcaggcaggtgggaaaaagagaaggaagaaaggaagaaagggagagaaggagggagagaaaagaaggtaggaaggaaggaaaggagggagggagaaagaaagaaatgaagaagaaaaaagtgaaaaacagaatgaggtgggaaaggaaagagaagggaaagaaacagaacagaagagaagaaaagaatacaatgaaacacatcacatggacactccactcgaatcacactaccttctctgcatagtgcagaagggtgcaggtgacactgggaataatgaggaatctgataaagagggattgtgtta

SEQ ID NO: 859034 - DNA, 588 bp, Homo sapiens
acctgtaatgaattttacagtgcagaactcaatatgaataaatgaatgaatgaataaacaaatgagtggcatggctcattgtcctggctttgttactaactcattgcgygacctccttttcaataattttagaaatggctgctctgcttcatttcatgggggctggtatgaaggatcaagtgagacgacaaaggaaatcgttgaaatggatagaggacagtacttaaaaaaactatacaaatgtaaggaaatgctattaatcattgtcctttcaggcaagacatgatcgttatggcaggcaggtgggaaaaagagaaggaagaaaggaagaaagggagagaaggagggagagaaaagaaggtaggaaggaaggaaaggagggagggagaaagaaagaaatgaagaagaaaaaagtgaaaaacagaatgaggtgggaaaggaaagagaagggaaagaaacagaacagaagagaagaaaagaatacaatgaaacacatcacatggacactccactcgaatcacactaccttctctgcatagtgcagaagggtgcaggtgacactgggaataatgaggaatctgataaaga

SEQ ID NO: 859035 - DNA, 596 bp, Homo sapiens
aagtgccctgtttctatatgtatatatatttgatatacctatgaaattgtatattattagtaggaagagaaggcactctggagtccaaatgtctggatatgaaatccagtttcaccacttcctattgagcaacttcaagaaaatgtcttaaattttatgattgtatcgctttcaaacagtgtctaacacaaagcaagagctcaaaaatattgtttgctgttattactgtacaccagtttcccatgtgtccttacagccacagcagagtagcaagtagacatttgcgtctgtctcccaacccgtatattctgccatgtggagtaccaactctttgtgctttgtatctaaacctcacaaaaactatacaaggtaagcgatatcaatccatttgtaaaatgaagaaaaggatacagagaaataatttgtccaaggtttcacagccagcaaatcaggattagaagccaattccttttgattgtgaagtctggayggcttccatatatgccatgttaatatcatttgtagttccacttctaggccttttagatgttggctattctcatggagttttatttttgatgtaaggagggtggtat

SEQ ID NO: 859036 - DNA, 602 bp, Homo sapiens
ataggacccctaattgcctgtcctgtgcatgtagcataaggaaaaaacaagttgttttcwtaatgagttgttaaattgcagcacatcccactccatgctgactggaacacacacgttacttcacttcctctttttaaccagcgaataaatgtggaattcttttactaattgtaataatgcagacacaaaaaagaaaaagaaaacacttagggagataggataactcttccaaataaataaataagaatgtcaggtctgcaattctaaacctggcatcaatattatccattttctatctgtctatcagtgaattttctgccacataagtgtgaaatttcagttagcaatagctgtttactattatctgaaagaaagagcagaaggaaggaaggaaaaacacagatagaaagaaagagaaaagaaaagaaaagaaaattcctcctgcacacttagaaggcctgttgcctgcatttggtgtggttggaggaagaggtggtaattgctcagcataaaacagtcctttcctgtctctatttctgctgcacagcagtaaacatgcgggagagttatggagcaatgaaaagactttactagtgagacta

SEQ ID NO: 859037 - DNA, 602 bp, Homo sapiens
ataggacccctaattgcctgtcctgtgcatgtagcataaggaaaaaacaagttgttttcttaatgagttgttaaattgcagcacatcccactccatgctgactggaacacacaygttacttcacttcctctttttaaccagcgaataaatgtggaattcttttactaattgtaataatgcagacacaaaaaagaaaaagaaaacacttagggagataggataactcttccaaataaataaataagaatgtcaggtctgcaattctaaacctggcatcaatattatccattttctatctgtctatcagtgaattttctgccacataagtgtgaaatttcagttagcaatagctgtttactattatctgaaagaaagagcagaaggaaggaaggaaaaacacagatagaaagaaagagaaaagaaaagaaaagaaaattcctcctgcacacttagaaggcctgttgcctgcatttggtgtggttggaggaagaggtggtaattgctcagcataaaacagtcctttcctgtctctatttctgctgcacagcagtaaacatgcgggagagttatggagcaatgaaaagactttactagtgagacta

SEQ ID NO: 859038 - DNA, 615 bp, Homo sapiens
gcggctcactgcagcttccacctccccagggtctggtgatcctcacacctcagcctcctgagtagctgggactacagttatgtgccagtgtacctggataatttttgtattttatgtagagacatggttttgccatgttgcccaggttggacttgaacctctgggctcaagcggtctgtctacgttggcctcccaaagttctaggataacaggtgtgagccagcatgtctgacttgcatttattaataaatatttgtctctggtccagaaaacctgatgtgtgaattcagggtaaaattaataaaattaatattaaaaaactaacgcttatcaattttgtaaataaatatattgaatataatttaataaagtcagaatgacaaaactttcatggataaaataatatttggtcctctccccagatgttggatatctcccgatattttagtttttcagattagcctctctaaaaataatattgttcatgtctttagtctattctgacaaatttattcaytgtgtttctttaattctttactttatgcctgaatgtacaaatcatccattttaataacttactcaatgcaattacaaatcaaggtattgatatttttt

SEQ ID NO: 859039 - DNA, 566 bp, Homo sapiens
tttactcctatgcatttctgtttttgtmtgttcaggctgcttaacaaattactgtagactgggtgacttataaacaacagaaatgtattcctcacagttctggaggttgggaagtccaagagcaaggcacaacaggttaggtgtctggtgagggcctgcttcctcgttcatagagagccacgtggtggaaggggtaagggagctctctggggcttcgtttctaaggctctgctctcatgacctaatcagtccccaaggccccacctccaaataccagcaccttgagggttaggatttcaacatatgagctttgtgggaaacacacacattagaccgaatgtgccaatgtacttgtttactgcctgtctctgcaatagccaagacttcgtctatatcatttacttcatttacttctgggtccttggtgcttaggacagtgcctgacacagagatgctcatgtactcactgaaggtgacacagctggtaagcaatgaagcctgaatttgaatccaggcagtctgactttagagctggctccataagttaatgttattcaagccatcta

SEQ ID NO: 859040 - DNA, 582 bp, Homo sapiens
gatccacccaccttgaactcccaaaattccgggattataggcatgagccactgtgcccagccaagagatacattcttaagaaacagtggtttcccacctaacaggtttaatgaaaagcagtaraagaaataacagtggctacttggaatatgaagatttaatatttatggctgttaatattttatagattagaaaaaaatctgtgatcttatttttacccaattactggaaattgatctgaaaaaaactattttacaaagtcaggatattttttagtttgatttttcctttttgtaagtaactttgatgtaatatcaaacaaatgttctatgcagtgcaattcaaaactcacatcaattatttagctgaaacaaacaaaaagagacttagaagaaattggatgtatacagtaaatttcaagccatgctcccagatttcctaagagttaagtatttatctccctctgccattagggattccttaaaaaggaaaggtccagaaaccattctattaggataaaccatggtttatgtgaactcgttgagctaaagaaaatggaacaatgctatgaagaatatattg

SEQ ID NO: 859041 - DNA, 582 bp, Homo sapiens
gatccacccaccttgaactcccaaaattccgggattataggcatgagccactgtgcccagccaagagatacattcttaagaaacagtggtttcccacctaacaggtttaatgaaaagcagtagaaraaataacagtggctacttggaatatgaagatttaatatttatggctgttaatattttatagattagaaaaaaatctgtgatcttatttttacccaattactggaaattgatctgaaaaaaactattttacaaagtcaggatattttttagtttgatttttcctttttgtaagtaactttgatgtaatatcaaacaaatgttctatgcagtgcaattcaaaactcacatcaattatttagctgaaacaaacaaaaagagacttagaagaaattggatgtatacagtaaatttcaagccatgctcccagatttcctaagagttaagtatttatctccctctgccattagggattccttaaaaaggaaaggtccagaaaccattctattaggataaaccatggtttatgtgaactcgttgagctaaagaaaatggaacaatgctatgaagaatatattg

SEQ ID NO: 859042 - DNA, 618 bp, Homo sapiens
atctcaggattcacagaaacatggatcctggattgtaaaatcacagaaccagagactcttacatcaaagcattcagagtttagggtccagattttccctacttcacttactttttttttttttycctagattctcctttctccaagacttgagacatatcttgttagggaaatccaagcatctttataaagtactttatgctcattgtataacagaaaaattataggtataaagaagcgtgtgggtgggcggagtcttcttcaactcctgtcagtatttaggcacatttcctttttttcattctctctgtctttttttagttgtttttttttttaattgagatgtaatataccataatattcacacttttagggtaaaattcagtggtttttgtatatattcacaagtttgtataaccatcaccactatccaattccagaacattttcatcacctcccaaagaactctgtaccaattagcagtcactccccatttcccactcccatcaacccttggcaaccactaatttaccttctgtctctatcaatttgcctactctgaacatttaatgcaagtggaatcatataatatgcagccttctgttaacagaattatgtt

SEQ ID NO: 859043 - DNA, 594 bp, Homo sapiens
catttctgtttcttcatctgctagtaagaataataacctaggtccgaaactcctagaaccaggtattctttggamtttagaaattgcgaagtatagagaggcaaaatgggccgggcgtggtgggtcatgcacataatcccaacactttgggaggctgaggtgggcggatcacttgaggccaagagttcaagaccagcctggccaacatggtgaaacatcaactctactataaatacaaaaatagctgggcatggtggcgggcccctgtagttccagctactcgggagactgaagcaagagaatcacctgaacctgggaggcagaggctgcagtgagctgagatcatcccactgcactccagcctgggcaacagagcgagactctgtctcaaaataaaataaaataaaataaaataggcaaaatggtacatgttccatatattctgtaatgacctctgcaagatctgtaccttattattaaagccattaatacctctgtaggaaaacacaaatattctcaccaagaggctaaataaggcataaatagcctcgcatcagtttgggtcaggtttgccaataaatgaattctgcatta

SEQ ID NO: 859044 - DNA, 594 bp, Homo sapiens
catttctgtttcttcatctgctagtaagaataataacctaggtccgaaactcctagaaccaggtattctttggaatttagaaattgcgaagtatagagaggcaaaatgggccgggcrtggtgggtcatgcacataatcccaacactttgggaggctgaggtgggcggatcacttgaggccaagagttcaagaccagcctggccaacatggtgaaacatcaactctactataaatacaaaaatagctgggcatggtggcgggcccctgtagttccagctactcgggagactgaagcaagagaatcacctgaacctgggaggcagaggctgcagtgagctgagatcatcccactgcactccagcctgggcaacagagcgagactctgtctcaaaataaaataaaataaaataaaataggcaaaatggtacatgttccatatattctgtaatgacctctgcaagatctgtaccttattattaaagccattaatacctctgtaggaaaacacaaatattctcaccaagaggctaaataaggcataaatagcctcgcatcagtttgggtcaggtttgccaataaatgaattctgcatta

SEQ ID NO: 859045 - DNA, 482 bp, Homo sapiens
gctctgattggactagagactgtttcaggaattttttctgataagagaccaccgaccatggatgggttctggccagtttatagacaccgcacttgagcccttcatgtccttgcttcaccttttgatgtatatatgcatttgaatgttaagtctccaacccaaggtgaacatgggtcttatgaaacatgcatgtttattccatatgcatacattaggatcacctcatgaatattcatagctcctcctataacctgttgaatatgtatatttggtcaatgcgttcagcttaaatttctgtccaacccctcctcccttgaagtgtctgtctctggactctgccaaagactgagctccccagcccatcagaatggccaccttgtaggctgtaactcttcatragaaataaagtctcatacctataatcccagcacttcagggggccaaggtgggaggactgcttgagaccagcctaggcaacatag

SEQ ID NO: 859046 - DNA, 623 bp, Homo sapiens
aagcgctccccacccacctgggctcctcagacagcaggaaggggattataacctgtaatttctcatctcggttagcaggtgacaggctcccataacatggcatccatatggcgtcaccccttctgttgagcacaattttagggcaagattcataccgcttctctctgtgctcaaaatagatgcccaaaattgggatagaatttacataagttggctgaagagactgtgttcaattaaaaagcttttgttgccaaggaatttttttagttgatacatatgctcctttattgcagtgctttagggggaaagatttcagcactctctcttctctctctccatcttcctcctgctctgcctcccccacttagtaaataaggaggtgggtggatatctccccggaagcctgagtgagcagcaaatgaagaaaccacccatatggaaataacaggaaccctgacccatgagaaacagaagccagtgatgccctcttgcctagcctggggcaackcaagccaaaaagctcttctctgtgtgtattctggcctctgccccagaaagaatgggtcctcccacttgcaagcaccataaatccaatgggatgtgttttccacggcactgacact

SEQ ID NO: 859047 - DNA, 600 bp, Homo sapiens
gcattactagttctaagcaacaactgtggaaataaacaatgataaataccgtattaaatctaaagagttaygttaatagataataacaagtaggagagctaatagctagccattaatacaggccaatttattatttaaaacatttattaagatttaacaatagtcaaataatttttttgtgaaaacagttattaaactgaatctctgcaataccattaatcaactgatatttatcaatttcagaatgtatctcattatatccaaaagggtgtgtgtataggcttcaaaaacaaactggaagatttaaaatgaactgtagttcatttttgcaaagtgtagatgtgtaaagattattatgtttgccagctgggtagccagacagtgaagtggacttgtctaattaggaacaatcgctgataaatcaattctttccttttataggacaattacagtttgtgtgtatatgtgattgtgttttaaattctaattcgattttgtgcattgttctgtaaccaagttaattctttgaagcctttttaaatggtacaaattttccataaaatataaataggtttattgctgttttatcagtcacgcaaa

SEQ ID NO: 859048 - DNA, 598 bp, Homo sapiens
ggattacaggcgtgagccaccgcgccaggcccaacgtgacattctatacccctgtctttgctaaccttacaaaatgatggattttaaccattgtttaaatatagttatgagagtgttaaactcctgatcattgctcaattaatatttcttgtgttgaactgaattaaagtggaccatacaaattcttttcctaaaatggcaaagaaatgctccatgtgaataatcaggaaggctgggaacccaaaataaaccttggccctgcccttgcaaaaaaaaggagttgtgatggttaatattgaatgtcaacttgattggattgaaggatgcaaagtattgtttctgggtgtgtctgtgagggtgttgccaaaggagattaattaacatttgagtcagtggtctgggaaaggcagacccaccctcaatctgggtgggcaccatctaatcagctgccagcgcaaccagaataaaagcaggcagaagaacgtggagacactagactggtttaacctctgagcctaygtcttcctcccgtgctggaggaagccctcaaacatcgaactccaggttcttcagctttgggactcaaactgacttcctt

SEQ ID NO: 859049 - DNA, 370 bp, Homo sapiens
atttgaaatatcagtatgagctcataatgtatttttctctttttaaaaaacccataatttttagctctatgaaaagatttagagcaatggttgacccaattgtaatgagatctctagcatccaaatttattctygaatactgtttcccagtaaaaggaactagggctccttgaagaaatgcctgattctaggtttaaaatcctgtttgtcagcaacagcagtaaatgaacaaaatggacctggaaatttttttcatatcagaaagcaaggaatttatcaaagatgattaagatcatgccaaaaaaaaatcagtggccaacctgaataagttctcatcaggcaaagatggaataatttgagcatcaccaat

SEQ ID NO: 859050 - DNA, 572 bp, Homo sapiens
tctgccccatagaacggtaaaatgaacagcgggagaaatttatgctctaggtctgttggtctagaatgagtgacctgataaragggaaaaaagtggaattttcaaacacacacacacacacacacacacaaaatggctatttaccttgaagaaatttattagtaaaaacaactagtcaatcctctttgacaaatacatgataaagttcttgagtatctttccatttctaaaacaagtataaataaaaatgttcatttatattgccaagtttaagaaagactttaaaatgctctgaagtacttcagagcatatgattttagaaaaaaatatatatatagtctacacatctaggaaaaatactggaaagtcaaatggcagtgtgttaacaattcctatctctgattggtgtgactataggcatttttattatttttcctttattagtgaatatcagcattgagcatgtattacttccatacattaatatattattaatataacccactaaacaagtaacaccctaagcatttcgtagactgtgatgggaggttcataaacatcattcagatgat

SEQ ID NO: 859051 - DNA, 591 bp, Homo sapiens
cttcaagagactttgagaaagcagaaagtgtgagaacaaattatggattcttgtggatgagggcaaaggtgagatgaggctatctcgaatcagcttccttaaggaaatcgaatgctgctgtagcagttctacccttgactgtgtgtgaacagtgcaccaggcaatatggagtgaatcctaagacttaaaactagatcatcacaatcgtagaatcttcaaaaacacaggtgggatgttcttgctgtggttgggactgaactatgattattttatttgggtgacaaacataacatgaaaggctgacagatttattagctttctattggtttcatttagaatacacaagctgaccccagacagatgcgaccaagtttgcatgctcctccagtggagcatgtttgagatccatcttttattctccatcagtgtggtgtagccagcaacttggcagcagttcattaggaaatgagtatccaaaaataagcaaatcacaaaatccatcaggtttctcccatatgagtttatagattrtaaatgtaccttatttgtacataccctgaacaccataaatcagattttttttttttgctg

SEQ ID NO: 859052 - DNA, 585 bp, Homo sapiens
aaaagacagtcacttagaaagaaatgtatcaatttgcgtgaagaggtcaaggtttttcaagaagtaaaagaccagctatctactcccaggaaggtttcccccttcatcagttaggcagattgggtaggggattgattgcctcaattaaatcaggaattgagcatttactggctaacttgattttttttcctttttttcttttcttttcttttcttttttctttttttttttttttggaaaactggtcagtatctaccctctcagcttacaaaaactttaggtgacgtatctctaaccttgagagtttccaagtctccaacttcatgctctaagaaacttcatattctgataaatatcatgaggaaaatatctgctatataattgaagttgatctcttcccatgaagaatattgcttcctaggtgtgcgcacacacacacacacacacacacacacacacacacacwcacacactgtagaagatttcattttccttttccttttgaaagctctataattccccagcctctgggcaaccctagaattcagcatttgtaaaccatctttgagtgagagggtcccagtg

SEQ ID NO: 859053 - DNA, 456 bp, Homo sapiens
aaagcttgctctgtgaaaatccccacataaccattgaagtttgcaacaccctaaaccccgccaccttgctcctggtatcagagagcccagttaaacataactgtgtagaagtattagactcagtttattctagtaggcccaacctccgagaccatccttaaacatcagtagactgggagctgtacatggaaggaagcagcttcgccaacccctgcaaagtgactctgaaaaagacaagccttgctccagtcacacccggaagctgactggtccatacatggccaaagcatgagaaaactcatcgcgggactcattttccttaaaatttgggcttgtacagtaagaacttcaactgaccttcctcagactgagggctgttcccagtgtatacatcaagtcactgaggtaggacaaaasgttgctacggtcctattattttacagttattataaggat

SEQ ID NO: 859054 - DNA, 628 bp, Homo sapiens
cataagtcggtctttcagtttttaaaatgctacttctacatctgttgatatgtgrtttttcacattcgatctcttaataggatgtattacactgattgacttaagaatattgaactagtctttcattcctaaaatcaacagcatttcatcattacacattatccttcttacacattattttattttctagtattttgtaaggagtattttctctcttttcacaaggaatattggtctgtatcttataatgtctttatctggttttggtattagggtaatgaatgagttagggattaaccactcaccttttattttcttgaagagattgtgatggtgaagctatctgtgactgtagtttttttttttttttgccagatgattagtttttctttcaattttaaaaatagatataggactattcaggttatctatatttctctgtgtaaattccagtgctttatgtctttaaagaatttggtattttttattctaagttacaaaacttgttgctttaaagttgttaatattatttatttttctgttactgttcatgaaatcatataaatgccttctccttcatttgtgttattgatattttgagtcttctctatttcttaattaatctaac

SEQ ID NO: 859055 - DNA, 655 bp, Homo sapiens
ttccattaaatcaggcactttgtgttaaattttctatatctttactaggattttgtctcctttctgtataagtgattaagcaaattatgtttttcatgttttatataattttccctctgatatatrtatatatatatatatatatacacacacacacacacccacacatatgatagatatcatatatgcattatatgtagtgttatatttagtacctatgtaataataatttatatataatatacatgtatctgtagttataaacatgtatgtatatatttaagattactttgtcaggtttgcaaaatgtgtatttgttcattctttattgcaattgaatgtactattatttcatgttaaatttcttagtttctaattattttttcaaataaactttattttagaacaatgtaaaatgtactgaaaaattgtaaagatactataagagctcctatacccagttttccctattactaatatcttatattagtatgatgaatttttaacaattagtgaaccagtattactatattattagtacctgaagtccatactttattgagatgtccttagtatttgcctaacgtctttttttttcttcttttccaggatcccaaccgatatactgattacgttgtgatagcatgtctcctta

SEQ ID NO: 859056 - DNA, 441 bp, Homo sapiens
atatgtagtgttatatttagtacctatgtaataataatttatatataatatacatgtatctgtagttataaacatgtatgtatatatttaagattaytttgtcaggtttgcaaaatgtgtatttgttcattctttattgcaattgaatgtactattatttcatgttaaatttcttagtttctaattattttttcaaataaactttattttagaacaatgtaaaatgtactgaaaaattgtaaagatactataagagctcctatacccagttttccctattactaatatcttatattagtatgatgaatttttaacaattagtgaaccagtattactatattattagtacctgaagtccatactttattgagatgtccttagtatttgcctaacgtctttttttttcttcttttccaggatcccaaccgatatactgattac

SEQ ID NO: 859057 - DNA, 539 bp, Homo sapiens
taattctctctctctctctctctttttttagatggagtctcactctgttgccaggctagagtgcagtggcgtgatctcagctctctgcaacctctgcctccagggttcaagtgattctcctgcctcagcctccctagtagcaggtactacaggtacatgccaccacgccaagctaatttttgtatttttagtacagacggggtttcaccatgttggccacgatggtctcgatctcttgaccttctgatccacccacctcggcctcccaaagtgctgagataggatatattgtaattctcttttcagcatgagcaaattcagttcatacaacatcaaggtgagaatagaggaaggccttcatggaaaaaaggtgttcaaataaactattttctttcatctgaaggtctacagagtaagtttggatcaagtatacttgttggaaaccraaggatgttttcctccctacccattttttccacaaaccaaactagattctcacttccacatcttggttccagtggctcccttcctggcctact

SEQ ID NO: 859058 - DNA, 630 bp, Homo sapiens
atgaggcataggcagaagacagtaaaaaggaaaagtggaaggaactgagtgaatattcagatttaggaagcaaaaacttgaagatgagtgctatcacaaactaagtggggaaagtgaggatcaagagctgtttaagtaaatatggctggtaaagaaaaagttaagttctatttagatatgtgtttgagttgctgagatagctagtggaagtgtccagtagacagttaggattttgatttagaaattaagtagttgtggccagaaatacttccacgggaaccatctgctcacaatcaaaactgtgtaggtagatgaggtaatcattggagattagtacataggaaagagagtagagaatgaagccttggaaggtgaccagaatgagagaatgaaggaggatgggaaagcgaagttgtaaaggaaaagagagacaaaaacaaaggttacatttttctgagctgggactcgaaataaaaagtgatagcagacagggtgtggtaccacctcatttggttcacacatgggagaaaaggagagcattgcatttctcaagagattttaggaggaaacactctgaaaaacactgcccttcaaggcccagaaatatmcatcctatccccggatcataaa

SEQ ID NO: 859059 - DNA, 573 bp, Homo sapiens
agctatttctagtcaatagctgacctaccaggggggttaaccttgccagttaggccaggcaccttgactgccaaataatkatgacggtgatggtggtggtggtggtggtggtgatgatagcagcacctaccacttattgagcactcactctaaagaagtgtcaacaatctttcagggcagctaatattttcaatctacaaatgaggaaactgaggctcagagaggacaaatgcattgctttacgcctcacaggttgggagagataagctggtgtttgaacgcaggtctatctgactccagagaatgagtcccttctactactgggtgctcctgagggtcaatgcaggttgctgtgtagtcattaacaagtaacccacaccaactgcatgccttttggccttgtatcaaggattgagcttctttcatggttcctaattattgctccagtcacttgttgagaggacacattgactggtattttccagaaccttgcccagaatggtggtccctgtccatcattacctgagaatccactgaaacaggtcctctataaaccatacgaacaaccctgga

SEQ ID NO: 859060 - DNA, 647 bp, Homo sapiens
cacggagcttggtagttgcttattgaaagtcttttaaataaatgactgagtaagatataacttcctctgtgcaaccttccagactgtgctgtgtggagttcgtaaccaactcctgtctttrtgctcatctggcactcatatccaactatggctttccccatctgtaaaatggggctaaccacatgtcacagtgttgaatagaaagtgaactttgatgatggacacgctcattgcaatggctgtcattcagagagtgctcaaaaaagtgcttgttttctttacaatcacacttagttcttttaagcatgagcactctaaaggaaacaggcctcacctctctcatttcattagccctcaaaaagccttgcacataataagtgagcccccaagagtgctccatgtctgaatgatggaactgagacattagttgacactctccctggctgtcttttctaagactaaatccttaattgcctcatcttcctgtgaagcatcttttctgatcacataactcttggcactccctggctaattcatttttatcagctggattgctctacagttaaattccagtgcactgcagcctctggagttctcctcagcactggaaggcagtttggctcatttgaacaaattgcttaagatgt

SEQ ID NO: 859061 - DNA, 583 bp, Homo sapiens
aattatcatgctcacttcttcatctcctttaggtttctgctcaaatgytgctttatgagagaggctttctctggccatttagatataatggtatccttcttccctcccatgagcctttaaatcccttactctgctttctctttttccaaagtacttagaattaatgtattataaatgtattattatttttgtttattgcagtctactgaagactgtaaactccaagagggaagagatcctgttctgtttgcagctgtatttccagtgtctagaaaaagacacattactacatgatggacatacaataaccactcaaataatatttattgaatgaatgaataactctctagctggacaatgagcaagccgttcttgggttagatacttgctctgatccagccagtggctacctcttgtaaaaaatagctgactttgttccctgaactgggtcagtccctggcaggactgttagccaggaggggcctctgggcatagtaagtccacattcattgaattacatgtaaaataaaccacatcttttatttccttggcatggactatcactgtttttgtgttctttgta

SEQ ID NO: 859062 - DNA, 612 bp, Homo sapiens
tgttgtccacactgactttctcgatacactcctttggtcatatctcttccatatcctttccaaaatcttcagtgattgctcattgcccagagactaaaagtctaaggtctttagagtaggaacttaaggcttttcagatcttcctggctcttgctctttcgactcaacacaggaataaaccttggcttgttccctgaacatgcctggcatgcattctctcctccatgaggttcttgctcaagcatcattccttaggcagtctgccttagtttcccttatcttagaacagatgactgtcctacgggccccttgcagcctgacattcctgcacactcacacatgattttgaaatatactgtttatgtgcattatcctaaataataagcctcttggggacaagcattatttctaatttacttttgtatcctagtaattagcagagtgtctagcccaaattacagaagtatgaatagaatcactccatcattttttacaaataaagaaactaaagtgcacagcgtaagtgtgtcttgcccaaatmcacatagctagttgccaggggaatcaagacttgaacatcaattttttatacttagagagtacacactcaaa

SEQ ID NO: 859063 - DNA, 614 bp, Homo sapiens
gaaaactacttcatggtctaagcacattccctctgtgagccagatgaagcttcagcctgccaattagtgacctgtactcatttctataggactcccttgaatacagtatcatgggtcaaggagctcagacctgtagaatgagagagaagttccaatttcctttgtggctgacttatttaaagccactgatattgggctgatcttagagccttcaaggtgagtgggacgaacaccctcgagtttcacttgaatgctctggagctgtgtcaactccaaatgacagttttcctggtcattaaaaatgaccaagagtgcgaatgatggtctgcaaatgggctttgctgtggataaatgcaaatcaatacaaattatgaaaggggccctgtgatggattggctggctgtcaagaaagatgaaacgctgaaggattattgtgtgtgtgtgaaggggagcatatttctctgaaggcctggctctttggaaatggggtggagggtaatgttcagycttagaggaaatgatcagctctgccttaatgtaggtactgagagcgaggcaatgggagttttggccacattgacttgaacattcatttattatgatgaaatgagcta

SEQ ID NO: 859064 - DNA, 558 bp, Homo sapiens
gacaggagaaaatcaaattaatttttaaaaataggcaaaagttatgcacaagcaattcatggaagagatcatctaaatggtcaataagcatgtgaaggatcattttgacttgccaggaaaataaaaattaaagcaacaatatataccacttttcactatctagattggcaaacattgtagacagcaaaaatatctgcttatagggagaatgaagggcaacaggtagtctcatacactgctggtgggaggaggaattagaaacagttttgtaaagttaccaaacaatatcttttaaaattaatattacacatatcatttgtccccagatgtgggtccatcctacattaaaaaataccagcatgcaaagatttatgtataataaaatttattgcagcaaacagcacaaaacaacaaaagaaacttgaaaacgatttgacaatcattattctgggaatcatgagtraatagtagtatatttatatgtattatggaataatatatagctattatatgagttagttttatatcttcttataaattttgacctggagcattctt

SEQ ID NO: 859065 - DNA, 464 bp, Homo sapiens
taaccaggtacccttgagcccccagtaatgctgaacaggtagcagactgtcccrgggagagccagggacacagagctgagtgcccttactaaaggcagcaagcagtggtctcgtgagccgtggaattcacccttctgaattcagtcttctgaattcctctcctatcatcagctcttgatgacctgcatcaccccacacccactgtggttcagagatgcttctaggaaagcctacagcgaggaagctgtggggtcccctggggagcctccttgctttgtttcataaagggatatatatatttcctgactatatacttactgaaataagagggggacaccaaaaccagtgggttgtggggggagataggcggaggcttttggtttaaaatctttgtagaaaatccagagtggaaaaattatatgtaaataattgactgattcctgtagcctgtctgaaaagcttaa

SEQ ID NO: 859066 - DNA, 600 bp, Homo sapiens
gcataaaaaccttaatccctaccaccccggccacttgtccatgagctcatttgatgatgataggggtgactggggaaacaaattgcctggaatccatacagtggatcatcctatccatttgattattaaaatcttcctctgctcagctcatcgtttagtgagcattcacatgagacataagtatcttcacggcttttgcccactcagagaggtctatctgtatacctcttctctagacctccttgtcaccaatttttcaatcatatttcttccaagaccctgaccatctaaccacactattggccaccgcccatcgactggtatataatcacatgtctggccatttttcctcccaagcaaagtgaaaaaccagctgcacaggtcaaaattctgcccacttgaaggatttcccttcaccattgtccttcagggatgtgccacagaagagctgtggtgccacagcgtccacttttgggtgaggcctgcatacttgyacagaatgatctgtaaaccagtcctgagttttctcttcctctgccaactgatcacagggaactccccataaggaaatacatgtggactgggagagagaaggcagtg

SEQ ID NO: 859067 - DNA, 622 bp, Homo sapiens
gaaaaagttgatggacttaacactacgtaactttatgatttactataaacatagaacagtaagacagtgtggttatagcataagaatcaataaatccrtgcaacagaatagagagcctggaaatagacctatgctttatagtcgtgattttaagaaggtaccaaagcaatccattgaggaagggaatttaaagatcttatagtcctagtccaactaacttactttacatataagtaagcaccaagtctttggtgtaaatggtgctaggataatgaagtattcatatagaaaaaaaatgaacctggccctctaccttattaagcaaaattaatttgggatggatcatagacttaaatgtaaaaactaaaaatcatacatattttaatagaatgcattggagaatatcttgatgagtaggggataggtggaagtttcctagaaaggtcacagaaagtaaacaccatatgaaaaaatttgataaacttcgtcaaaatttaaaactttttgtcagaaacatggttaagaaagtttacaggcaagcaacagactaggagaaaatattttccaaaacacataacctgccaaaggactggaatctaggatacatgaaaaagttcctaca

SEQ ID NO: 859068 - DNA, 588 bp, Homo sapiens
aaaattaatatgcaaattataaaaggaactcaaacaactcaatagtgaaaaaaaaaaactcaatttaaaaatggcaaaggatctgaatagacatccctccaaagaagatacaaattgccaaaaggtatgygaaaaaacgcttgtcactaagcatcagggaaatgcaagtcaaaaccacaaagagatcttctcaccccacctaaaacagctgtgattaaaatgacaagagataacaagtgttagcaagagcagagaaaatgcaatcctaggacactgttggtagaaatgtaaattagtaaagccataatggaaaatagtatgaagtttcctcaaaaaattaaaaatagaacttccatatgatccagcaattctactatcggtaggcatacaaataaaatgaaatcaatatgttgaagagatatcttcactcccatgtttattgcagcattattcacaatagctaagatatggagtcaacctaagtacctatcaatggatgaataaagaaaatgtggtatatatgcacaatagaatactgtttagcctaaaaataagaaaactctgtcatttgtgacaacatggatgaac

SEQ ID NO: 859069 - DNA, 526 bp, Homo sapiens
aagattttctccaatgttttcttctaaaagtttcaataattttatgctttacatttatgtacataattcattttgggttamtttttgtacaagatgtaaagtttagattgaggttcattgttttgcctatcattgttccaacagcatttgttgaataaacaatcctttctccattgaaatccttttgcatcttgccaaaaagtagttggcaatatttgtgcagctctgccgtgggaccttatattgtgctccattgtgctctgaatcatatgatcagcatatgtttaactttataagaaactgccaaacttctctggtgactatatcagcaatgtgtgagaaatgcctctatattgtgcctttaccaatacaacactcttgattattgcatctgtataagtcaaaatcaggtcatgttattcctctaccttcactcttctatttaaaattgttttggctattgtagtttctttgcctttttatgtaaatgtttgttagcatcagcctgtcaatacctgcaagtaat

SEQ ID NO: 859070 - DNA, 596 bp, Homo sapiens
ctatttataattgaaagctatcaaataacaaggaattttaaaaaatccttaacattatataaaaaatacatcaagcctaatattcaacaggaaaactttagatgyattttctctaatgtcaggaataaaatgaggatgtccactattattgttacagctcaacaaagtattggaggtcttggaagatataataaaaaacaaaaaggatgtaaaaggtatagcattagagagaaaggagatacaactcttattatacatagatgataagattatctacacagaaaatattataaaaccaggctattaggactaataagagacttctaaaaaagttatagtgttctcctacttaagtgataattacaagaaaataaaaattataatattctaaatagcataaaaacttatgatacatataaaattaatggaactctatagctccttgtggaaaatttgaaaacccaaaaagacataaatgaagagttatcctgtatttgaataagttaatatgacaaatataaaacttttctttcaaatttaaattcaatgaaatttaaaattaattttttcctaagttatttttgaaaaaaatcaac

SEQ ID NO: 859071 - DNA, 534 bp, Homo sapiens
atgggcagaagtaatgaggagaagcttcttggttcaatcaaataactttagaagtgaggttgatttcaagtacaaatgcctaacaggcaagagtcataagccacctcacccaagcatgacaaagtactttcccaggatgctagaccatcaagagtgtaacccagagatcttactctatttggaagaacccaggttgtggccatctgggctggaggatatctaattcaatgtatagttaggtggcttgcccagaagttggtttgctggcttttaagaacttgatctgagttcaagcatttttggggagaatgattcagggctggtcccatccagtgatctcaatatagagaggatcacttgctaccttgtcatgaacatcaacagcttgacctctgcactccttctctatcctactcaaggtaggaggcctttggtgaatagctgagtactgccaatcagatatcctaactgcccctggtagaagaaacattgggtagkttccttttattttaagagttatctatatgacacctc

SEQ ID NO: 859072 - DNA, 636 bp, Homo sapiens
gactttataaatgataaaatttatccccattctttatagacaaggaaattgagacctagacaggaaagaggcatgtatgccaaatgccacagagcgagcagggggtgcagagattagagtacagattcatgctgtggcctagggttctctgtatacttcaccacctaaaattaccacacttttaaaaaggaggaaacctggacttgcaagattgataacttgtagtgttgtattttaaaagcaatgaatttagaagagtttcacagatatatttctttttttttttctttttttttttgttgagtctcactgtgttgtccaggttggagggcagtggtgtgatcatagctcactgcaacctagaccacccaggctcaagcgatcctcccacttcagcctcctgagtagctgggacgacaggtgcgtgccaccctgcctggttaatttttatttttatttgtagagacgaggtcttgtgatgttgcccaggatggtcttgaactcctgggtccaagaaatactcccaccttggcctcccaatgtgctgygattataggcattagccgttgcacccggcccttagaaaggtcttgaactcaggtctctggactaccaaaccagaatcatcttatggga

SEQ ID NO: 859073 - DNA, 530 bp, Homo sapiens
agagtgattctataaattcaggaattaacactgatgttacaagatgggattctagagttgaagtatttcactttcttcctgaagaacttcctgaactatgaaggaagtgacctcctcactatgatcagttcatctcaccctgcccaccacattttttttaaatagatgaagaaaccttagggaagcaaggtggcccacacaatgtcacctagagagtgaactagatctcctgaaacccaacccattggcccttctatttcactgttttattcgggagtcatcacctagatttgtcaagggtacacagtcccagcaaaagactacagagggaaatgatgagagaggtcacaaatcctctatagaacagccacaatcaagagcttatgagggataagaaaagatgagaggtccttgtcartctatggaagactaggagagaaaatgtcaagaagagagtaatcttggaagctcaaagtgaaatctcggaaaagaaactcctctttgatttctattaacccttgcattatctg

SEQ ID NO: 859074 - DNA, 562 bp, Homo sapiens
tagaaatgagtaaaaccactagtcaggaatggcaactacttttcaagaaagtccagaaaagttgatgatggatacttaagctgccaaaccactggtggactgccctgtttttgtgctgtgtctgctcatgttctaaggctgtagcagagaaagtgattgttcacggcatcctaagggagttggaggaggcaacagtctgttaaaaaaagaaaaaaagttccctatgtgtctggtgggaatgctgaattttatgtcttatttggtagtttgtattcctaaaatgctccaaatacttgaataatgtattttcctggccatctaaaagacataatccgtgtcttttaaaaacctgctagcttctctctgtaaagataaattatgaacttacaggaaatcatgcaatcagatctatgaaagtctggaccctccttggacaactgaaagaatgctccattctacccaaaagggcataacagatgtgcataaataattggkcaaattttcatcagaaatgtcattgtgacagccagttaaaaggattaaggaaataaaaactgggaaa

SEQ ID NO: 859075 - DNA, 562 bp, Homo sapiens
tagaaatgagtaaaaccactagtcaggaatggcaactacttttcaagaaagtccagaaaagttgatgatggatacttaagctgccaaaccactggtggactgccctgtttttgtgctgtgtctgctcatgttctaaggctgtagcagagaaagtgattgttcacggcatcctaagggagttggaggaggcaacagtctgttaaaaaaagaaaaaaagttccctatgtgtctggtgggaatgctgaattttatgtcttatttggtagtttgtattcctaaaatgctccaaatacttgaataatgtattttcctggccatctaaaagacataatccgtgtcttttaaaaacctgctagcttctctctgtaaagataaattatgaacttacaggaaatcatgcaatcagatctatgaaagtctggaccctccttggacaactgaaagaatgctccattctacccaaaagggcataacagatgtgcataaataattggtcaaattttcaycagaaatgtcattgtgacagccagttaaaaggattaaggaaataaaaactgggaaa

SEQ ID NO: 859076 - DNA, 461 bp, Homo sapiens
agaaaagctcctttgccttggaagaagcctttctctcctcttctggctctctctctcttcctctggttctctccctccccactctttttcctttatctattaaatttcagagattgctttgatgtccaaatccagatgtgaggacatgaaaggaagagaggaaaatagaataaaagagataatggggaaatggaaggaaaaatagaactacaatttgtcacactcatcaaaagggaaaggacaggccgtctgtttggacagcctactcccatagccacataattttcctttcactgggtccctgtatggactttgagaagcagatctctctatgccataaacctagggttttttrgggcaaagactgactgcccttttctttatcctcccagtcccttattatttgaatccctgtattaaaattgtttgcacacactcatgttttatcagattttcttgta

SEQ ID NO: 859077 - DNA, 596 bp, Homo sapiens
aataatatgctgtgctttttttgtttaaaaatgaggtgccaggagttgtatctcaataaattatgacataaatgtcccatatccccttgccagtcttctttacattggaatgtccacacrctttgtcagccaagtgagtcagtcaaggtggaaatactaattcgtttgagtggacatgctctactagctcatactgtgaaaagaaatccctggtatatattaccaaactctgtatagcattttatagtttacaaatcacttttcataattatcaccactattctgtaagataagtattattgttcttcctcatttacacatgaaggacctaagattcagtttcagtaatttactcaaagcacacagcagagaggtggtaaaccaggacttccacccaggtcctgtgactccagatctcgctacaagagcaggacctctgtggattctgtggaggggagattataggtgcttggaggatgcgtagaaacagcagcctttaaggactgatgagattttagtagaaggagataggagggatggcattccaggcacagggcactgcaaagttcagtatatgaatgcaggaaatatagaac

SEQ ID NO: 859078 - DNA, 602 bp, Homo sapiens
ttaacaatttgcctctcaccagaggtagcttgagtagctcagtagccaaatgataaaatgaaaagatgagagttttagagttagayctgtatttgaatgctgatttcaacacttactgacttgacaaattcctgaaaccctttgtgcctttagttcctaatttgtaaaatgtggctgataacagacacctcttggggttgtcacaagataacctgtgtaaagaacctggaatgtgataagctctagatgaaagttctccaatacctccttccggagcagctaaagtacatctggttctaaagcacttgaatagcccaggaagtcagttctgggctcaggccaggcttttcttatgtggtaaatatttaactggacatggggacccatctaggtgctgggatctattggactaaggattgatccctgtgggtccaagacacatatgagttcagatccatggatagcccaatgggatgagtctaggagcctgaccatattggacctggccacagagataacctgtaatcactggattttgagattgtacacccgtcagttaagaggcaccaatttagcaggggatgttcctggtatccattgga

SEQ ID NO: 859079 - DNA, 694 bp, Homo sapiens
atcatcactatctgatacagattgcataagggtttatgagtctttacagccaaaaatatctgggtttaaatccccattctgacaatttgtgatctttggtgagtaattatatctctaagatraggtatgttaatctaaaatttggaacaacaataacattcacaagcttgttatgaggattaaaacagataacacaggtgagagtactatggaaagcatgtgacacatagtaaatgctcaacaaatatcatatagtgtcactcttattattacttatcattcttatcattacttataatatttgagccatgtgccaagccctgtacctaaggtaaataatttatttagcatagataaattattttcttttctagtactatttaacaaacttattaagtagaaataattacattcatttactaaagaagaaaaataaagctcaaggacgttaagtaatttgccaaaggtcaggcagttaggaaatgatagaattcaaattttattctagatctcactctaaattctacatatttgctttcaagtctatgtttttcttctatccaagaagaaagatattccatgggatgtttataggtatgctaggaagagtaatattcagggatctctggaataaataacttaggtttgttagctgcagaatttctcaaacccttaatatgctaatgcatgtagg

SEQ ID NO: 859080 - DNA, 594 bp, Homo sapiens
acctttgccctctgaaggtttgctgaaacaataactcccaaaggcgagattaattggagaaaaggcatacaaaatatattaacatgtacactgggagaactacagagagattaccaccccccmgccccaaagtggttcagaagcttatagacaatcctgacaaaacaggtaatgggagatgggagagaagaggaattctgttgagggaattactagggaaaataaatgaatcagggaacagagattaacttgtacagtatcttgtgaaagaacctgttcaggtgtggttatatttttggtcttacagggagaggaaaaataaaacaactgttttccttggtgggtccagacattaggtggataaaggaatttaacaactttatcctgtgctttaagagacaaggtgagggggttaaagaggtcattgagaccttgaggctccatcagttcagcatgtcaaagcaccatattttggggtatggattactgagtaccaacaactttgaggttactatgtctatgatgtcactagttgtcagctccactatcttatggggccatagatatcatatggccactatcatatgtggtctg

SEQ ID NO: 859081 - DNA, 622 bp, Homo sapiens
ataaggaaggacatcagagaagcagcttttgtgagggaggctttggcaggctgttggatgtctgcattcattccttcatcaaacatttacagagaaatttctatgtgctaattctctactaattcctggccaaatgaaggaaaaaaaataaatggttcctggcacctgaaagtttatggtgtagggtgtcacagatgtgtctccctacatatgtcctacaatttgacaagaagaaacttggactggtgaatttcaatgtcaagtttagtcagctacaaagctttatgatatagttcaggatggggagggaaaaactaagcacagtaaagccagaatagtatttcacaagaaatacgaagttatgttaatagaaggaacactacccttatgtataggatggattctttatgtaaaatcactttatgtaggagatcaccagagagaaataagtcctgaggcacagcatctagttgcttttgaaaacactgtggaagamatagcactattttaaagtggaagtcctccaccatttcgtactctctctacatctataggatcggagctcagtcctcaccttccttccctccaacatccactgctaggcaccacagactacagacag

SEQ ID NO: 859082 - DNA, 622 bp, Homo sapiens
ataaggaaggacatcagagaagcagcttttgtgagggaggctttggcaggctgttggatgtctgcattcattccttcatcaaacatttacagagaaatttctatgtgctaattctctactaattcctggccaaatgaaggaaaaaaaataaatggttcctggcacctgaaagtttatggtgtagggtgtcacagatgtgtctccctacatatgtcctacaatttgacaagaagaaacttggactggtgaatttcaatgtcaagtttagtcagctacaaagctttatgatatagttcaggatggggagggaaaaactaagcacagtaaagccagaatagtatttcacaagaaatacgaagttatgttaatagaaggaacactacccttatgtataggatggattctttatgtaaaatcactttatgtaggagatcaccagagagaaataagtcctgaggcacagcatctagttgcttttgaaaacactgtggaagacatagcactattttaragtggaagtcctccaccatttcgtactctctctacatctataggatcggagctcagtcctcaccttccttccctccaacatccactgctaggcaccacagactacagacag

SEQ ID NO: 859083 - DNA, 579 bp, Homo sapiens
gttgattccatgttttctattgtgaacagtgctgcagtgaagatacacgtgcatgtatcaaaactgcaatgagataccatctcacaycagtcagaatggcaattattaaaaagtcaagaaacatcagttactggcgaggttgtggaaatataggaacacttttacactgttggtgggaatgtaaattaattcaaccattatggaagacagtgtggcaattcctcaaagatctagaaccagaaataccatttgacccagcaatcccattactgggtatatacccaaatgaatatacatcatacatctactttaatacaaccccaattgctttattaacagtttggtttaagaaaactcctccatatgctgccgacacttttttaattaaataaagtaaaatcatgtctttatatgaattggccaattagttttctaggtggcaaaatcttacacagaaactaggtattcatcttaccaaagactaactatatgttagtctagtattaaccctaccaaagactacatgttactgaacaagtcacttaatttttctgaatcttagttacctcatttttggag

SEQ ID NO: 859084 - DNA, 579 bp, Homo sapiens
gttgattccatgttttctattgtgaacagtgctgcagtgaagatacacgtgcatgtatcaaaactgcaatgagataccatctcacaccagtcagaatggcaattattaaaaagtcaagaaacatcagttactggcgaggttgtggaaatataggaacacttttacactgttggtgggaatgtaaattaattcaaccattatggaagacagtgtggcaattcctcaaagatctagaaccagaaataccatttgacccagcaatcccattactgggtatatacccaaatgaatatacatcatacatctactttaatacaaccccaattgctttattaacagtttggtttaagaaaactcctccatatgctgccgacacttttttaattaaataaagtaaaatcatgtctttatatgaattggccaattagttttctaggtggcaaaatcttacacagaaactaggtattcatcttaccaaagactaactatatgttagtctagtattaacmctaccaaagactacatgttactgaacaagtcacttaatttttctgaatcttagttacctcatttttggag

SEQ ID NO: 859085 - DNA, 564 bp, Homo sapiens
tactatcctttcaggggaagggtctgtattttattcattattagatttctgacatatcactgatgtcctgacccatagtgagtgctcaataaatatttgtagaaaaataccgatwacatattgtatatgtttcagtaaaaattagtaaaaaagttaagctcataatgtggctggaaaagcagaacaaccatatgttataaatgattctatatgcaaaataatagctcctcaattatatgtacagattgaagttaggatagaattccttgaagcctgtggaaccaataaagtatgactgtccccaaaaaaactggctcatataaacagaaagcacagaaaagaggtacattcttgggcattcagcaataaaccagaaagaaatctctggaaacagttggtaaccaccccattctactaccacctctcatttctctctcaagagatataaaaacattattgatttgtagactcttagaatagcattagatcctttgtttaagataaacaatctgtgttcttttaatcttttctaaagcatcgtatttcccaaaccttgtgatcact

SEQ ID NO: 859086 - DNA, 629 bp, Homo sapiens
gtccatattatatggatatgaaaagacacagatatagtttccatcctttcaaaatgatttggatggaaaagaaagaatatgcmtatgtttagcatgccctctttaaatatgatgaacttaggttcacacagagtaagtgatttgcccaaactgaaagaatgcattaataagcagaaagaaaactaaagcactgagctcttaatttctattcaagagcccttttcactaaagtgtatcttcaatatacacatttttaaaatttatagcacataaaaaattaactaaaaacataatggttttgagaaagcacttctaaaagacctttataagtattgcttagaattgaaatgtagcaattgttacagaagctctccacttattaaactggaaatagctccctttttaataaaaccaatgcattagaaagtcaatgtataccctattgatgtgctcattagaagtggagactgagttacaaagatcaatcaacagctatccaatgcaggatttcaaggggacatcattggccctgcccccacataccaatctataggtgttctatctctaaaccacccacagtgctcagatctttatttcttactgatttagcttacctttccccagcattt

SEQ ID NO: 859087 - DNA, 666 bp, Homo sapiens
tttaatttctataatataaacagttgtttctcttaatctttaataaacaaggcattttatgccaaatttcttccagtwacctccttgcatttaataaggaattgcatttttttattattttgaaagtcaaaaattttaaaagctgcctacttagttattaataaattgtttttgattggcatcattataatgtccttgtgtttgaatcccacttccctcaccatttcctaattgaaaatttgaaaactgagagtttcctagaataaacaaaataattctgacttactatctcttcctaaaataaagataaattgggaatcaagtaagtgtttataaacagtgcaatacaaacagcttactttccaatgttttgggaagtgaactttaatcgaaatcttgcttgtaaatcgattgcagatttgtaagaaagtgtatattattataatggcttggtaataagtatgaccctttgcaaaggacatatccttagggtattaatttaactttctcataagcaggagtaaagtccatatttacctcagggcactttttatattgccagaaattaaggtttgcctagataaaagtatatttcaaataaccacagaaaaggcactgtaaatgtaatttctgcctttattgaaaagcttctgtataatacataca

SEQ ID NO: 859088 - DNA, 602 bp, Homo sapiens
agcgtgacgcgccgcgcggagtcaatcgggatccgtagtttgggtcttgctggcgcgaggtagtcagaggacgtggccgcggggcttgctgggacttgaggttagacgtcccggccgtcggttgcsgcctacactgtctgccgtcgcgtcgcagttactaaggcgtggggaagatagcggcaggcaccgcagtggagcggctccgagatccccggggggctcgcaggcgcgcatccctcctgactgggacgtcgcctccgcagacccctcggaggctgaagcgacgccggaggcaggtgcgactgaaacttagttttcgaattcgagtctttctccggcccaggtgtggagtttccaaaggagtgggcaggagcttgtccttcatccttttctagcccggttgtggcacttaccgattattctctcaagcagctgtcattttagctgtttgtaatgttttcgtgttaacggagaactcgcgtttactgagtgcctacagtctgccaggcagtatcctatgtgcacttccagccatcctctctctcactgagtcccacaacagccctgttagatgaggaggaaactaaagaacctacccaaag

SEQ ID NO: 859089 - DNA, 602 bp, Homo sapiens
agcgtgacgcgccgcgcggagtcaatcgggatccgtagtttgggtcttgctggcgcgaggtagtcagaggacgtggccgcggggcttgctgggacttgaggttagacgtcccggccgtcggttgccgcctacactgtctgccgtcgcgtcgcagttactaaggcgtggggaagatagcggcaggcaccgcagtggagcggctccgagatccccggggggctcgcaggcgcgcatccctcctgactgggacgtcgcctccgcagacccctcggaggctgaagcgacgccggaggcaggtgcgactgaaacttagttttcgaattcgagtctttctccggcccaggtgtggagtttccaaaggagtgggcaggagcttgtccttcatccttttctagcccggttgtggcacttaccgattattctctcaagcagctgtcattttagctgtttgtaatgttttcgtgttaacggagaactcgsgtttactgagtgcctacagtctgccaggcagtatcctatgtgcacttccagccatcctctctctcactgagtcccacaacagccctgttagatgaggaggaaactaaagaacctacccaaag

SEQ ID NO: 859090 - DNA, 631 bp, Homo sapiens
tataacagttgtatttgcaaggccctttaatggagagagtgtactgggttgagctctatactgctattatggcctggactaaaatatttattgttaggcagtggttctggttaactttaagacattacatccccttactatttaagtaccattttaatgagaggcagaataagtgccttaaaagaatgtaggaactgaatggtggttttcctgctgatgggacaatatcaaaactaaaatttggttttggagggcattttcctcctcattgttgagttttcccattcacagaaggagcataaagcctggcctctagtagaggagtacaaaaggggaggagaattggaaaactagagtgtttaggcaaagggctgacaaggtacctcatggagaggatttctattccactaggtggtgctgtagaccttgaaataccatgtgatctccagagcaagcggggagagagatgctcactgccagggaaagggagatcctttctattcctagaaaatcacaaaaatkgcaatcctttgcattatattcctggttactatggcatttgctgatgctatctaacaggattatttccctgaagtgtaaaaattcccacagcatttcatacagagagggg

SEQ ID NO: 859091 - DNA, 616 bp, Homo sapiens
tgctcctggcccctcccaaacctcaggtcctcacatttcaaaaccaatcatgccttcccaacagtccctcaaagtcttaactcattccagcattwactcaaaagtccacagtccaaagtctcattcaagacaaggcaagtcctttccacctatgagcctgtaaaattaaaagcaggttggttacttcctagatacagtgggagtacagtcattccaaatgggagaaactggccaaaacagaggggttacagggcccatgcaagtccgaaatccagcagggcagtcaaatcttaatgctccaaaataatctcctttgactccctgtctcacatccaggtcatactgatgcaagaggtgggttcccatgttcttgggcagttcttcccctgtggctttgcagggtacagcctccctcctggctgctttcacaagctgacgttgagtgtctgcagcttttccaggtgcacggtgcaagttgtcagtggatttacaattctggagtctggaggacagtggccctcttctcacagctccactaggcagtgccctagtagggattctgtgtgggggctccaaccccacatttcccttctgccctgccctagcagaagttctc

SEQ ID NO: 859092 - DNA, 569 bp, Homo sapiens
ttttttgtttttttaaaaacctcttcaggtgattcatatgcacacataaatttgaaggtattgctaacacgtcttagttcaggctactataacaaaaacaccttagactaggcaatttttaaacagacacttattgctcagtgttctggaggctgaaaagtataagatcaagctaccagcagatttggtgtctggtgacggtttgctttctgcctcacagatggcaccctgttgctgcatcctcacatgactgaagggcaaaggggctaacaagcctcttcgggtcttttataaggtcaccaatcccattgatgaggactctgccctcatgacctcatcacctcccaaagaccccacctcttaagaccatcatcttgggtgttaggtttcaacatatgaatttgcggaggacacatatatccagaccatcacatacacattgcgcacacattatgggctagtatgattactgtaggaaaaaataataatcarggcagctcccatgttttgaacatcttctatgtgccaaaggtttaaacttttatctaaaaaagttttatctatctgca

SEQ ID NO: 859093 - DNA, 600 bp, Homo sapiens
gcattactagttctaagcaacaactgtggaaataaacaatgataaataccgtattaaatctaaagagttaygttaatagataataacaagtaggagagctaatagctagccattaatacaggccaatttattatttaaaacatttattaagatttaacaatagtcaaataatttttttgtgaaacagttattaaactgaatctctgcatacattaatcaactgatatttatcattcagaatgtatctcattatatccaaaagggtgtgtgtataggcttcaaaaacaaactggaagatttaaaatgaactgtagttcatttttgcaaagtgtagatgtgtaaagattattatgtttgccagctgggtagccagacagtgaagtggacttgtctaattaggaacaatcgctgataaatcaattctttccttttataggacaattacagtttgtgtgtatatgtgattgtgttttaaattctaattcgattttgtgcattgttctgtaaccaagttaattctttgaagcctttttaaatggtacaaattttccataaaatataaataggtttattgctgttttatcagtcacgcaaataatc

SEQ ID NO: 859094 - DNA, 630 bp, Homo sapiens
agtgtcagtgccgtggaaaacacatcccattggatttatggtgcttgcaagtgggaggacccattctttctggggcagaggccagaatacacacagagaagagctttttggcttgmgttgccccaggctaggcaagagggcatcactggcttctgtttctcatgggtcagggttcctgttatttccatatgggtggtttcttcatttgctgctcactcaggcttccggggagatatccacccacctccttatttactaagtgggggaggcagagcaggaggaagatggagagagagaagagagagtgctgaaatctttccccctaaagcactgcaataaaggagcatatgtatcaactaaaaaaattccttggcaacaaaagctttttaattgaacacagtctcttcagccaacttatgtaaattctatcccaattttgggcatctattttgagcacagagagaagcggtatgaatcttgccctaaaattgtgctcaacagaaggggtgacgccatatggatgccatgttatgggagcctgtcacctgctaaccgagatgagaaattacaggttataatccccttcctgctgtctgaggagcccaggtgggtggggagcgctttgggtat

SEQ ID NO: 859095 - DNA, 597 bp, Homo sapiens
cagaaacctttgctttttatgtaggtagaggagagtggcagtaggtatttcatacttggagcaattataatctattgtatrgccattgcaagagagaattttttaaaaatctgcttatcttccatttaggctttatttgcctttgacaagacctctcccttagcatggttttgcatgatacacaacagaatgccgatggagcatggacagctctcagtgctagaaatccttaggaaatcatcagttccccacagggactggagtcattgattccctcctgggaactgcctttagaaagaaagatctcagaggaatttagaagaagcattagctcagtcagtaagcccagagggaaaaagtagagacaaattctactctcaattcaatttaattcagcaagtatttattgagcctaacacagtcttcaggatacaaaagtagaagaagaagtccctgtcctcgggaagcttgacagtttggagtggggggaagagaggcttcttcctgaaggtagtctacctctctgagcctgtttcatacagagtgaataaatatcacttgcctctacatgactgtctggatcaaatgacataatgc

SEQ ID NO: 859096 - DNA, 479 bp, Homo sapiens
ggggaattaatttctccatgattccccccatccttttccaggattcccaaccctcatagaacagccaaggagcgggtcaccggmtgcctcgttaaagttgaatttcaggtaagcaacaaataaatggattaatataggtatgtcccacacaatatgtgagatatatttacactaaacaatgatccattacttacctgaaattctaatgtaactgggcactttgggttttttccagagagtgatgggggacctcctcccagcgtgggtctgcatctctcctggaggaaggagggtgtcctgtgctgaccgctggctctctaccccaggcccatcccgggggtgtgcaggccactgtgagaggtcactggattccctggctgactctggtggggccctccttatacaggcaacggaggggagactgcttcatgagggccacccagacctctggtgggcaagacagacagacagacagagga

SEQ ID NO: 859097 - DNA, 614 bp, Homo sapiens
caaggctgagtcaacactgggtggatgggcactatgatttgccaccatggaaataactttgtattatttttctaggaatgtcatagatgctcatgcactttagcagaaagacacaagactagaaatcargcagcctgggttcaagtcctgctgtacatctaaggagctgtgtaacctctgggctattccttaacctctctgaacctttgcttcctgaggagttcggcctccatgatctccaagttccttgccaactctgtgtcatttttgctgatccatccacattctttctcctgaccttacgactgacaaccttcattggataaacagccacaccacggtgggcgagcctgcagagccaaaagttatcggaggtataatgtgggtctgtgacatacaatgtgcccttgaactgcatgaaaggtcttacattgtttgtcttcattctctcccgaagccctgctccaacagttttgtcaccatctgccccacatttcagtagagaacagtgaagctcagtaagagtcttgctactgaacagttataggggctctcacctggcaggtgctcaattaaagtgtgtgcaatacctaggccatttctctgcttaaacc

SEQ ID NO: 859098 - DNA, 492 bp, Homo sapiens
gcaagtagagtgtaatgaagaatactgtgagaggacaattaccttagaaggcattatcagactaatgttttactgagtgcatagagtacatatctataggttaatatgcctttactatgcaatgcatccagaaatttcaaagtcaagaagattctaggaggctgaattccacctttagaaatctcagctatgaaagctctgggtttcaacttgatataactcttcactggccagaaaaaaaaaaaaaaaaaaaaaacggcaactctttggcaaatagagctctggaagatgcgctggctggcgccgacataaactgctatcctgatctccatcaaagatgtgggccttctcatgctgcagtttcctcaactgcagaacagggagattcttccaatgataattttacctcgaagtgatgttgtaataaagatggtggtaaaagcattttgcaagaycaaaaaaagaaacacctactaaacaggcatgctgtct

SEQ ID NO: 859099 - DNA, 672 bp, Homo sapiens
aaaacaagacgaggaccaagcatcaacatgctaatttcagagggatccgagggttgcccaaaggcctctatctccagaagtttcctrttcaggggtaattccctccctgcatccctgaaattcctgcctagaattgctgattggacagaactgcaaaggccgggcatggtttccaacaccaacccgcctccaccctcggattcacaagcgcaaagggatgtcaccatgggtctaaccaaagaaaagtggaatcaaccctggagggaagggggtgataacaggagtattgtgggggaaaaatggtccagggagtagatacaagtgacagccctcaacagtcacacttttcaaataattttgaaattcccttctgattcctacacatctctcatctgaagatgcaggttgctgagggcagctgggcacaggctggaggtcctgcttttgtacagagacagcagcagctgccgtagggggccgaggagcacacagggaagcctcatccacaggtcctgaagcaactcccccatcccctgcactagtgtttacggataggaaggcctggggctgggccatgtggggaggaaagcccagggtctggtctgcctgctgctgataagtaattccacaagacaagcagaaggaatccagacagagatctaagaacatcca

SEQ ID NO: 859100 - DNA, 619 bp, Homo sapiens
ccgcaaaatctctttgcaagctgtggtttgtgggcctctgtagtgcctgagttccccactagcccgagctctatgagaaagtaggtttgtctcacgccccaggttggcactcaggggtcactkgttgggtggatggacaaatgaatgcagggggctctttcatccaacgtgactgatcctccacaggtctctttcagggggtcccaaccctactccccgccaggctctgtgctgtgtgtggggggctgcttctcttccctcctgatttccagctttgcctccagatctgtcttagagatgagaagcacaaggtcggcagaggtgtggtctttgcgtttgtctgctgcctccaatctgtgccccggctgggggaggcggggagagggatgggaggtaggaggtggagaaggggctctatgaatactggaggagtagagaattttagccagagatttcttttttattgcaaggaatgggagagaaggtagtgggacagcaatgtcttttccaagctgacccttggctcaacatgaaaaaaaaaaaggcagcagtggaaagtgatgtcaggataccagtagtgtgtttgaaaggcaggatccctgggtccagtaccaactgg

SEQ ID NO: 859101 - DNA, 704 bp, Homo sapiens
tgtagcctagatcatcactatctgatacagattgcataagggtttatgagtctttacagccaaaaatatctgggtttaaatccccattctgacaatttgtgatctttggtgagtaattatatctctaagatraggtatgttaatctaaaatttggaacaacaataacattcacaagcttgttatgaggattaaaacagataacacaggtgagagtactatggaaagcatgtgacacatagtaaatgctcaacaaatatcatatagtgtcactcttattattacttatcattcttatcattacttataatatttgagccatgtgccaagccctgtacctaaggtaaataatttatttagcatagataaattattttcttttctagtactatttaacaaacttattaagtagaaataattacattcatttactaaagaagaaaaataaagctcaaggacgttaagtaatttgccaaaggtcaggcagttaggaaatgatagaattcaaattttattctagatctcactctaaattctacatatttgctttcaagtctatgtttttcttctatccaagaagaaagatattccatgggatgtttataggtatgctaggaagagtaatattcagggatctctggaataaataacttaggtttgttagctgcagaatttctcaaacccttaatatgctaatgcatgtagg

SEQ ID NO: 859102 - DNA, 300 bp, Homo sapiens
tctacagacataactatggttagaataagaaacttagcaagtttacaggacccaactgtcaaataaaaaattcagtttttttatatgtaccagcaacaatgactattggaatttttarcaattaaaaacctgtgatgaaatccaaaaatacaaaaagaaatagatgcggaagatcccttcactaacaaaaactacaaaacttcaaaaataaacatttaaaattcctaacagacatactctattcaggaattagaaaagccaatattgtgaagatgttgttagtacaagatgatttatgga

SEQ ID NO: 859103 - DNA, 600 bp, Homo sapiens
aagataaaaatataaagaactgtggcaatacttattatcaatgtattaagatgtaagataatgattgttgtattctctaaattatataaagcaatmtaaatgaagtcattataaatactaaatatagtcatgttatgttgtgctatgcattttctgcatttaaatatgtaattaaacaattctaattaaaaatttggagaaaattattgccattgtacttattctaataatattctacaaaatgaagaaaatgtgtatgctctcttattcttggaggttctggcataaaacacttgagattaaatgataaagcctactttttaagaaagatacataactcattcaaataaagtcaattttgcccctatcataatagcagtaaaatttttttttgtaaatttgttacctgggttttctatttcctccttggtcacttgttccaaatccaggcttctgcagtttttcctctgttcctagaagattactgcctagtttgaagaagataatcaggattgacacccttttaatacaggcatgactgcaaagaaaggaagaggccacatggtcactaaaggtgcaaatgttttgtcacacagggat

SEQ ID NO: 859104 - DNA, 600 bp, Homo sapiens
agagggaagtaggaagcccaaaggagatggagcacagccagaatcacccacaacattgtaagtcacactaatttcaaaatcattaatgaaaggggtctgatgtctgataaagcaggrtgttgagcagagggaaataatgaaaatatgcagcacctatgatgatattctccaaaaggcatgacttctcggggaaatgatgatgagtagcaaggaaaggtacttttgggtgacctcctgggaaaggaaagtacaggacctataagaggaaattaaagtcctgaggaaacaaagaaggatgacaaaatctaaaggtattctaattcatccttcctcacttaaatgttgtactatgctaaaaaaattataaagaagccacctatgaactaaaaatcttagaagacacccaaaaaccgtaactcttcctctatctatacagagccttacttcagcacttcaaaatgaacagaagacaaaaatcattgtaactccatagaaagctctggtaagaagaaaccaaaaaaggagaatcataacaattcaattcatgaccccctctgagagaaccaagagcaaagaacatttacaaaattgtgtaggttg

SEQ ID NO: 859105 - DNA, 576 bp, Homo sapiens
tataaaattatttctgtaagttttcttaacacacagacacacacaaatcacaaaatatctcctyatttttataactttctttacatctttctttcttcgtggttcctttatgttggagtgataagacccaccaccatgtcatggggactaccaagtctggcggagtcaaagaaatgagacaagacaagttaagagtacatagagtgggtccagggggccaacgtcagtttgggggctgtgaaggccccaagctctgggagctcacaatatttattggtaatcaaacaaagaagcatgtggtgagcacgttcagatgtgggggtagacaagtgaggatgtgaggatagaaaggtagtggtgcatcaagcgtagctgtgacggtttagcatattttctgctacttgaaataagggagaacaggttcttctaattcaagatacaatcaatttatgatcttgggagagcaaggagcaagggtccagtgagtttggacacattccagaggctacaagaggttttatgccctgtgccctgggctctctccaagccacaaggtgttttatgccctgggtttag

SEQ ID NO: 859106 - DNA, 652 bp, Homo sapiens
gaattttcccaggttcagtgccctttcacctttcccaccctctgttcttctctgtarcttcactttcactcggactcacctcacgtggccaccatcctatcctgcaggacacggtcacagagagcttagccctgaggttgacttcttttgttccaaaattctcaggcctgggccattgcgtcttctgctggaggcacgcatctagcggcgtgtactcctcccctgatcctcatgttgtgttttctatcaagaactactttctcttaataagacagagcccattctctagggaaagcctgcaaccaggcatgtagagcctggtagcatctccatcttcaggcttgctgttcaagaatacctgcagcgatgaatcataaagagggtatatttccagatatgcttggagaaagaacagaaggaggcatcattgccaaaacagtagagggcaggccatgaactagcttctatgaattccttagagtcacttgcttaaaaggagaacctcagtccttctggagcactgaaggcggacaagagcagctgcaaccttcaccagatcccaagccctagggctgtggtaggccacgtgctgcagctgcctaggctttccttgctacgcacagagaatgcatgatggccagagccctgatct

SEQ ID NO: 859107 - DNA, 652 bp, Homo sapiens
gaattttcccaggttcagtgccctttcacctttcccaccctctgttcttctctgtagcttcactttcactcggrctcacctcacgtggccaccatcctatcctgcaggacacggtcacagagagcttagccctgaggttgacttcttttgttccaaaattctcaggcctgggccattgcgtcttctgctggaggcacgcatctagcggcgtgtactcctcccctgatcctcatgttgtgttttctatcaagaactactttctcttaataagacagagcccattctctagggaaagcctgcaaccaggcatgtagagcctggtagcatctccatcttcaggcttgctgttcaagaatacctgcagcgatgaatcataaagagggtatatttccagatatgcttggagaaagaacagaaggaggcatcattgccaaaacagtagagggcaggccatgaactagcttctatgaattccttagagtcacttgcttaaaaggagaacctcagtccttctggagcactgaaggcggacaagagcagctgcaaccttcaccagatcccaagccctagggctgtggtaggccacgtgctgcagctgcctaggctttccttgctacgcacagagaatgcatgatggccagagccctgatct

SEQ ID NO: 859108 - DNA, 652 bp, Homo sapiens
gaattttcccaggttcagtgccctttcacctttcccaccctctgttcttctctgtagcttcactttcactcggactcacctcacgtggccaccatcctatcctgcagsacacggtcacagagagcttagccctgaggttgacttcttttgttccaaaattctcaggcctgggccattgcgtcttctgctggaggcacgcatctagcggcgtgtactcctcccctgatcctcatgttgtgttttctatcaagaactactttctcttaataagacagagcccattctctagggaaagcctgcaaccaggcatgtagagcctggtagcatctccatcttcaggcttgctgttcaagaatacctgcagcgatgaatcataaagagggtatatttccagatatgcttggagaaagaacagaaggaggcatcattgccaaaacagtagagggcaggccatgaactagcttctatgaattccttagagtcacttgcttaaaaggagaacctcagtccttctggagcactgaaggcggacaagagcagctgcaaccttcaccagatcccaagccctagggctgtggtaggccacgtgctgcagctgcctaggctttccttgctacgcacagagaatgcatgatggccagagccctgatct

SEQ ID NO: 859109 - DNA, 536 bp, Homo sapiens
ttataacaactccttggtagctgacgcccgctccctttccaatgttctgtgcctttcctccttcctctgctccctcagatggaacggagctggctgcctctgttccaagaagcctgcggctgagtgcgggcttgacatgagatatttatcatctcaggatgtcttcgctcagatcgctggctctccacccccagacttctttatcttattttgctaaacaagatgagtttctgtcattgctggaagtaattgccttgttttttaatatatatcaaggcccaggttaacaactggacaatgcaatgcatttgttattccctctctctcctgtttattctagtgtgaaattgttttccaggtagtgattaattctgccaaagcttcctgcccttgctgggtaatttgctgtatttgggaagaagatgctaactgcgckgctctgccatcagaggtgtcgttactgttttgtcaaacactagctcctccattgtcttctgccaatcagccaagcctgtggtcctttattcatttcctgt

SEQ ID NO: 859110 - DNA, 674 bp, Homo sapiens
tgacaaaaccaaattgtcttcttttctgtcagttcggcaaatccatccttttcatcactgatacctgtcaagtccacccatgaaatgcccgtgacttcacgtattcatttcccctcgttctgctcctctgcgagtccaggcttcactgctgggggtttatcttacacatccgtcaatctgcgacagttcaggagggcagggggcttgggggacagacacatggaggaggctcaatatggagggaaccccccacctggtctcccctgtaaccccttccctcaagggcctcaccggtgcagacccggcctctgcactccacacgcctgtgcacacccactcattcctttacggcagcctcgtattccactccttggcttccttgtctgtgtttctgggctagtcttgagggcagggttgacagcttatttatgtctctatccctagctccatattcaatacttagtgagaagcttggtaaatattggctgagttaatgaagaagtagggctccaaatcaatctgaatcagtaagtctgattaaagtagcaatgaatagttatgaataataggtcaactgtagttttaaaataagttagaaaattatctttttaaagaagcaygttattgttccttggtatttatccaaaggagctgtaaacttacgtccacacaaa

SEQ ID NO: 859111 - DNA, 599 bp, Homo sapiens
agagtctagaatacctatttgtctacacagaagctttgttctggcatcagggagcatctgtttcatgttagttccttagaatttcatttcttgcagatataagtttattacgaacagggagactgtcttcttgcccattttagttttcaactgatttttggaatgttttataaaagacgtatttgcccaaaagaatttattactgaccttttttgaaacatttcatgatgcaaaataacctatgccgcagcagtattatgcgctctccctttcccatctctcagtgcctgggaaggtgacatgactgacggcagctgcacatgcctgagccacgctgtgttgtctccagttatactccagccccaagccctagagttagcacttctgagggtgcctggacaaacttgtcttgaagaaggaaccgctcttcttggccttacacagcctcgtgtggactcaggcagctgtcrtcctggctcttggaaaactcagaagagaaaaccaaaggacaagctatggaagggatttgggggaaaatgaagttcaggttccagggagatgactttccctgttcccatcaaagatgatttcaggcataa

SEQ ID NO: 859112 - DNA, 585 bp, Homo sapiens
aagtttaaattgggtcacattcacactggcgcccaacacagagcctggcccacagtttccatcaccctctccatggatgactcccagctccaacgctagaggcctctaggactccagctgacatgatgcagtgtgtaccctgcacgttgcagcctcttcccaggctggctgtggaaactgagcctcctccagacagcagggctgctccgctcacgcggatcaagtccggagcctcattagtcatgtcagatgacatagttaacacttggggccagtacagccagttcatcaaaagctcctatgtgcctggctccatcaccgcagctgaggaactactgtatgtggagcaggcagcacatcagaggagcagcaccagagtgcttccaaattggttttgattaattgcatagacatgtctttaattggtgccagtgtagcagccagagaacttatgggaaagcaggatgttatgctttcattccctgaagtcccataaagcaatgaaagatgaggaacagaatcactgctcgttgaaaatkcatcgaccgtgcagacctagaaaacacaaataagtatctgaattga

SEQ ID NO: 859113 - DNA, 617 bp, Homo sapiens
acagtgacttaaataagtagttattttctggcataataagaattccaaaggtgctcctttggtctttccatcttggttacaagatggctgtgacaccctgccctcamctccaagttcaaggcaggcaggggttgggaggtgcggacagttcagactcagcagtcctgtttcatcaggaaagcaaaagctctcccagtaactcccagcagagttctactaaatctcattggcccaagggagctgcagtggtaggtaacaaggagcaaatggcttttgggtagccagtcaacagggtctgccatgtgcatagaaagcacagtatgtatttggcatggagtcggtactcaataagcattagctatttggcgtgcctgtgtgtgtttgtgtgtctgcgtgtggttatatgtatattttccattttcccaaacagtccttggaagtagcatcctcctttactaatgggacctaacacacagctggcaaaaggcacagttagagccacacatcagactcatttctttctgactgaagtctgagggctctttccattgccatgctatgttccaccctccccttcaactgcccctctaaagtcttgtcttggagtcacatgaggt

SEQ ID NO: 859114 - DNA, 583 bp, Homo sapiens
cagcccctctgagtctgagaggagggcacctggtcacgtccatcatgacatcactggtcacctggctgcyagggggtcccatcagcagagctggaaggcacagggctttcccagtcccagaccctctggcccactgtctaagcagccagtgcagatgctgtgagggaagctggctccttaggctcaaaagtatcttcttctctggcctgccccagtacctgaaatgtcatcattaggggccaggcacagtggcttatgcctgtaatcccagcactttgggatgctgaggcaggaggattgtttgagcccaggagttgggaccagccttggcaacaaagtgagaccctgtctctacaaaaaattttaaaacttagccaagtgtggtggtgtgcacttgtggtcccaactatacagctacacaggaggctgaggtgagaggatcacttgagcccatacaggtacacaggaggctaaggtgacaggatcactggagccccggaggtcaaagctgcaatgagccatgattgtgtcatgattgcgtctcctgtcactctctttctctctccttctctctctctctcta

SEQ ID NO: 859115 - DNA, 594 bp, Homo sapiens
catatgtgtatattttatacatatatgtgtatattttatacatatatgtgtatatacacaaatatacatatatgtgtatatttatggaacatagagtccaattaggactccaatgtatatgttgttcatccaactgaaacacagatcttttcaaaatttgattatctactctatgcaagcactataagaaatttaatgatggtataagacataattccttttctcagttttttaatatttgagattgatttatcacttagagcacaagcacctggttcagtatatgatcaataaatatttgttaaatttgtggaatgaataaattaatgaataacaatcttgtttctgatcttgaacaatgcttaaaatgctgaaagttgggaacctgacataaaagtaacaaataccacagccctgttaggtttggagcagtaatcccagccaaagactgatcctattggaaagagtgattaaaagttaagctcaaggctgcccactgggtaagtatactgtgcagcagtaggaggcagagaggagcacaggaaakctgccacctctccctccaagggagtacttctgtactctagagtggag

SEQ ID NO: 859116 - DNA, 589 bp, Homo sapiens
cacatatgatagtggccatatgatatctatggccccataagatagtggagctgacaactagtgacatcatagacatagtaacctcaaagttgttggtactcagtaatccataccccaaaatatggtgctttgacatgctgaactgatggagcctcaaggtctcaatgacctctttaaccccctcaccttgtctcttaaagcacaggataaagttgttaaattcctttatccacctaatgtctggacccaccaaggaaaacagttgttttatttttcctctccctgtaagaccaaaaatataaccacacctgaacaggttctttcacaagatactgtacaagttaatctctgttccctgattcatttattttccctagtaattccctcaacagaattcctcttctctcccatctcccattacctgttttgtcaggattgtctataagcttctgaaccactttggggckggggggtggtaatctctctgtagttctcccagtgtacatgttaatatattttgtatgccttttctccaattaatctcgcctttgggagttattgtttcagcaaaccttcagagggcaaaggt

SEQ ID NO: 859117 - DNA, 449 bp, Homo sapiens
tttctacctgatttttaaaccaaatgatatataagatgtaagagccagtaaatggggctgaaaatatcacctttattactaataaagatgatactrtaaaatatgacaaatacatcctgtcaagcaggtattccagtaacaaaccccaaaatcagataaatgtgggtgcccagacatggaagcattggaacagggaaaatctctcctaacgttgtcctgcccattccctcccactaacaaaaagcatgtccagggaatatgagagatgatttgctcctttgtggcaactgaatccaatagctataaagagaagttattgggcaatgcatgtcttgtcattcctccaaaactcaccaataagtcacttgccctttctaataaggagcagaagagattagaaaaagatgctgggagtggttaggtcagtaaggtttccccatagataagga

SEQ ID NO: 859118 - DNA, 571 bp, Homo sapiens
tcctccaccctcaagaagacctcagtgtctgttgtttccttctttgtgttcataagttctcatcgtttagctcccacttacaggtagcaacgtgcagtatttggttttctgtctctgcattagcytgctgcatagcttgctccagctccatccatgttcctgcaaaagacatgatctggttcttttttatggctgcatagtattccatggtgtatatgcaccacattatctttatccaatctgtcattaatcagcatttaggttgatttcatgtatttgctattgtgaatagcgctgcaatgaacatttgtgtgcatgtgtctttatggcagaatgatttatattcctctgagtatatacccagtaatgagattgctgggtcaaatgttagttctgcttttagctctttgaagaatcgctataccgctttccacagtggcttgccggatctgttattttttgagttattattatagtaatagcccttctgactggtgtgagatggtatctcattgtggttttgatttgcatttctgtagtgatctgtgatatttagcttttttaatatgtt

SEQ ID NO: 859119 - DNA, 561 bp, Homo sapiens
tattggacactgactgtaagatgaatttacaaaatggaacgagcctgatctctgagtcactacttgaacaaaagttactcaggacagctgctctacctggayctccataagtgaaaataaactgattaatctaaaccacagagtgggtggattgagaaatgtggagagagtgtccaacagtagttacagagtatgtgaaaatcaattaacttgaaaattatagcaaaattgctggagccctggttaaataattcacagtcatactttccctggttgaattgtacttagctgtccagatgcagttattgagaggcagatggacgaattcatcaagatttgtgaatctgctagatgaatgatacaggaagagaaatgagaaaagaggaaaacagtgaagtacaaaacagtttttaaaatagtctatatttcagttgaaaacaaatatatttcctgatttctatacgtttcttcagatgcctctgccattccatatattacgtttgtaggaaagtcacagagaaaagcgaaaatttactttataaaacttacttggtgtcattt

SEQ ID NO: 859120 - DNA, 601 bp, Homo sapiens
agcattctcacttttattaacccatttatttctcaaaactgtactgggatccatgcatataagagttctaccttacatttggaaatgtggacactggctctaagcagttacacaacatgctttgascacacacttggtatgtttcacaagtaggatgtgaaactagaaattttgcactctgttctatcatgttgcctctgcacaaaaattaacaaaaatagccttatatttttatggatgttagagtttataaagtactttcccggggcaatattaaggttgtaataaaaatataattgaaacaatgtataccaaattccaaacaaaaatatatgggaaagatgaataaatgaaaaaagtgggaaaggaattagcatatgtttcatctttaattttattacatctttactgaactgtatggtggctactaaatctgcattttttaaatgaggaaatttagttttaaggaggttgagtgacttgctctaagtcacatagcttttcaaaatgcactgccaaaatttgaacccatgttcatctgattccatgtctgatgccatgttgccttctgtaaatgattgaagtacaaggtcctcttgcc

SEQ ID NO: 859121 - DNA, 574 bp, Homo sapiens
aaatggctaaatcaagccaattaacattttcattacctcacatatttagtatttcttatgaagagtatatttaaaatctcccatcttarcaattttcaggtatgcaacacattgttattaattttagtcattccatttattgctgcataacgatgaccacactttgtttattcactcacttgtaggagatttgaatgttttctatttctagtaattatgaatagagctgctataaatttttatattcaggtttttgggtgaacatattttcattcatcttgggcaactactcaaaactgggattattaggtagtgtggtaagtgtaacatcatgggaaaatgtccaactcttttccaaagtggctgtctcatttttcattcccaacagtaatgaatgaaagttcctatcctaggagtttgattttcatgcctgtcaaaagtaaaatgtgtgtttctggcatgatactctcttgtcatgtgctagttctggtaaatttcataagtcatttattatttatttttgaaaaaaatagtccttacatgttctgtcatcagttaactctgtttttataaa

SEQ ID NO: 859122 - DNA, 573 bp, Homo sapiens
gtaaaaactcaggtataaatgttaaggataggtaggacttcagtaaatggatatgggttgaaatagaaaatttcaatcctttgccttccttattaccttcatttaataaatgtatccaaccaacaaagttatgcgtaatgatagcaacaaaaatctagaaaaagtaatacgcaaaagacaaaaagtctgatatttcagccctgatattacctggaaagaacgtttaatatctctggacaccatctcatttccatccatagggtgatagagtttgattagattacaagatctcaaagactatgatagtgataacaagttggccatagggcaaatgatttttggatgaatgaagaggtaaataaatacatagatagcaaaggaacaaatacaaaataagaaaaaaatcttcatttagcaacttataacaagttgagatttcttaaagggaaaactcattttactgaggaaatttgtgaaaaatctgttcgaatagggaaaaaagatgaattctgtaattcgtactgaaatttaaaacaygtttattggataggaacagtggctcatgcctgtaat

SEQ ID NO: 859123 - DNA, 698 bp, Homo sapiens
gtccagtatttttcttaaatatcgtccaagacacccattccataacacattataaattaatattaaagacaatgttacaattggtgtatatatatatatatatgattatatatatatgattcaagtggtgtatcattgacaactggtaattcattggaaaaaatcaataatatccccatgtcacatttcactgcaaaatcatattgtttagagaatgaattcataaaatttaaaggagaataagatatttaaatatatctttaatataattgtaagaaattataggtagtgatacaatatttaagcttgaaaatataaaaacaaacacagaagaaaatataaatggattctattactgaaaatgtgagtattccacatcacatatcatacagaaaatataatatcaaagaactaactaaaaatattatatgacctaatgttatatgagctaatacactgtcatatataaaggatttatacaaattgataaggaaaacacatataaaatttgaaataaaatttaaaaaataaattaacagttcactaaaacacagcaaataaagtggttagaatgtcaaataatgtcgataacaaaagacatgtcaatgaaactgactatttttacctattatatcagtaatgayttttttaaaaaaaaattcctctacctaccagtcattatcttgaatttcttctat

SEQ ID NO: 859124 - DNA, 599 bp, Homo sapiens
aattctcattcagtggaggaatcagtcttggtgggagttgtaagtatagagccattccctatcctggtctcatgaacaatttccaagggataactgattgtctgatctgtaggtcagaaatggaaaacagaggaaatgaatgttgaaaggctttggattagacatgaggtatttatcttgatgtaaagggtacagtctgacatggagtgtcaattctaagaggtagtgtacaacgttgagaagacagaatacccatgggcttggtcctatgaaacctgcaaactctcttcattccaggactttcctggttcatggtggaagatgctttctgagacttgaaaagagtcgtatctcatctatagcctactttctttttcaggttcagcaagcatttgaaagtccggaggcaacagtccaaatgcccaccatagaacgagtgtccatgacaagatatttctacctctttcctggcaaytgaaaatggttaagcattgagagttgttggtggtgtatgaaataaatgaaagtgtgatattggaggtgagttccgatgaccaatgacagttgagtacttggatggccaaattagtgtactttgt

SEQ ID NO: 859125 - DNA, 591 bp, Homo sapiens
attaagcatttcactgttcaccttaagggcgtgctacatagactattttttttttcctagtctggcatgctctggggcataaaatgatttggttgccgaagttttgacattttaaaatatttcaatgattaaatgtttaattaagtcagtggaccctgaggtcacttggcaaagggtagtttttttgttttgttttgttttgattttgattttggatcaaattcattaaaacacacacacatacacacccaatttgagaaaagcattggtaaatctgttgggaaaaaagctttcctaaaaatattcatttactaccgtttcttgagttaatcagagttacaagaaagcggtacttctgcatagaattatctggaagtgtttcactggaaaaaggttcattatcctaataaatgatggagtaaataacaaataacaggcctggtacaggcctggctcacacctgtaatcccaggactttgggaggcygaggtgggcagaccacttgaggctagaagctcgagaccagcctggccaacatggtaaaaccccatctctactaaaaatacaaaagttagccgggcgtggtgacat

SEQ ID NO: 859126 - DNA, 655 bp, Homo sapiens
aatttacataacaatatagatgttgtacaaattgttacactgtattacttttaaatatttattatttttattgttgtattgttatttttattatgttttttaaaaatacttcaattcattgttggttgaattagagaagcagcgtgcaattaaaaaaaaaagtgtggcatgtggtgtctgtagcattgaatgaatttccatatatatttatcacgataattttttgagacagagacttatgtttttattgcatattctgtgtttttttttttttgttttttttttttatgttctcctccctttctttccccccttaaggaggtggccacactctactttctttcctcatatgagattagtttttgtgcttctagacttttgtttcccagtgtcttaacccactgaaaataatagaatttgaagaaacatgctgtatctctagactaaataaggattcttgcaggttgagtggtgtgtgtgtgtgtgtgtgtgtgtgtctgtgtctgtgtgtctgtgtgtctttgtgtatggcgctgtgtggggggagatgccatgtggcagcatctccaaagatgtggcagaacctcagtagtaatgaacacacattacaytgagaagactggaagggtccagcaattccagccaatatggtaat

SEQ ID NO: 859127 - DNA, 641 bp, Homo sapiens
acaagggctgagaaattggaggttgctgggaaaagcagctctactatagaaagggtccctttctaagtaagtcacccttgggagttcagtctgtgaatgtcagtagaaggatgaagggaagcaggttacccagttctgatgtggggcatactattgcacactgctttctgcaagcagcacttagtagcactaattgaatccaaccccactgatcatttcagataccaacccccatctggcctatatctactcaggaataatggctgtgggtgtcatagaggtaatttgaaagacattttcctctactgctttaagtgaaacctcaagaatattttaaaaaaccctcagcagtcccaaaatgtcttattcagggttaataactttctttccactggccataatggaatttagtcctcatttatgtgttcttgcttttatgaatcccagaaagatggcctgattttaaagcttgtccttgactcttcttcaagcagcaggatccagatcattcactctgccaccataattttaacataaaacactcctaaactgtgtctgagacgattacaaatttctttatcttgcagtaaaagtaaaatctcaaaacttttacarttcttaatagtatttaggttacccta

SEQ ID NO: 859128 - DNA, 575 bp, Homo sapiens
aatttctgttacagatgattgccgtactttatgtgtgtaggtggataggttttgattgtattagcccacatagaggttgcctattttcattcaactattaaacaaaagaatagrgaatacataaaatgcatagctactttaaaatgccttcatttcacttcatttagtaacttctggatgttctagttttgaatctattgaggaaaaattaatttcctagtccaagatataatggcatacctcaagctgctaataaaacttcaatgcaagtagtaaaattaaggtttctggttagatgcacactatatagagtactggtattcaagcgttttaagtcctagggcctttttatactctttagttgaggactacaaaaagcttttgcttcagtgggttttatctgttgatatttaccatattaaaagtgatatatttattagtatatttgaaaagccattagatgttaacaaatgtgcctgttatgaaaaacattttctaaaacaaaaatctggcgaagaaaatagcattactttttggcaactctttggtgtctgactttatagaagatatctgca

SEQ ID NO: 859129 - DNA, 614 bp, Homo sapiens
gacccagcccagtggaaagcccattacaaaactgcctccctgctgcttcactgcagattatgggagtcagcacaggcaggaagacatyagagctctggaataaggactactagacttcaagttctggcctacacacttactgcctttatgagcctgggcaacatactttaacttatgtaagcctaagaggttttttccataaaatgagatttaatagtaccaacctcgactgtgcgcggtggctcatgcctgtaatgccagcactttggaaggtcgaggtgggtgtatcccctaagtccaagagtttgaaatcagcttgggcaacattgtgaaaccctgtctctagaaaaatacaaaaattagccacgcatggtggtaagcatctgtagtcccagctacttgagaggctgaggtgggaggactgcttgagcccaggaggcagaggttacagacagccaagatcatgccactgcactccaggctggatgacagagtgagaccccatataaaaaaaatccatatatatatacataatattatatatatgtatacattatggtatcaacctcaaacatttgttcaaatatcaaatacttaatttaaaatactggaac

SEQ ID NO: 859130 - DNA, 592 bp, Homo sapiens
gaaacagttgaaaacgttgagtaattgattctgggagacaagcatcaggaacctggaagataccagctgctattttttcatkgtaaacatgggaccactatctgactaatcaatgtactcataactgcttggttaagaaataacagtagccagatttacccctctttgaaacaataaaaataagacgcaatatatgaaacaacaggcaagccagtgtacatcagacaatgaaggacagtaatccctgagagatggaaacaaatgaggtaaacccaaaattgcccacacttactgcttgaaggagtttacagagagcagagtacagaggaggccccatgaagaatccagcagaatctttgaggcaaggagacggaatcgagagcctgagaagaccagagctggagttctcagaacaaagtactggaggtgagagctgtaccagacactaaccctaggtatctagagaggatctcctgtgagcattctgctgaatactgatcaacatatgcatgtgaaagaactagctaaggctgggggaagaggcacctgaagaattacagaaaatagcgttctcaccatttgtatctaacat

SEQ ID NO: 859131 - DNA, 592 bp, Homo sapiens
gaaacagttgaaaacgttgagtaattgattctgggagacaagcatcaggaacctggaagataccagctgctattttttcatggtaaacatkggaccactatctgactaatcaatgtactcataactgcttggttaagaaataacagtagccagatttacccctctttgaaacaataaaaataagacgcaatatatgaaacaacaggcaagccagtgtacatcagacaatgaaggacagtaatccctgagagatggaaacaaatgaggtaaacccaaaattgcccacacttactgcttgaaggagtttacagagagcagagtacagaggaggccccatgaagaatccagcagaatctttgaggcaaggagacggaatcgagagcctgagaagaccagagctggagttctcagaacaaagtactggaggtgagagctgtaccagacactaaccctaggtatctagagaggatctcctgtgagcattctgctgaatactgatcaacatatgcatgtgaaagaactagctaaggctgggggaagaggcacctgaagaattacagaaaatagcgttctcaccatttgtatctaacat

SEQ ID NO: 859132 - DNA, 404 bp, Homo sapiens
tgggactccttgataacagaagatctgatattgtgtaaaaaaaaaaaaaaaatggggaccccttactttaacgttcttctgaggtaccaccacccatgtatcctgagcactcctatttctkgctacaatgcagttctttcccttcactcttcctttcatctgctcaaactacttgcagagactcaactgcagccaatgtacgtccactcaaaatccaaggagttctgatggggggggtttcctttcagctgcattcacgtgtcggtcaaggcagacggcaggggatgtaagacgatatgtgcgaaacacctactgctgctgacacatttctcattcttttttttttttttttttcttggaaggcggtgggttcaggggcaggggcagctttggggaatggagtc

SEQ ID NO: 859133 - DNA, 451 bp, Homo sapiens
catctgataacctttcctttgctaggattactcctcggtgaggaattgtcattacattgccctttacaagaattcttaaggttttatgttgctggcatttgcaacaagctttctcagagaccacatgacaaattcttggtactagcagcagctcatgaaatgagagaagttgagaattcagccgcatagcttgggagaggattcattaccatcagaatatttgcaaatgaaattgttcttcatgttgcaccggtcatcattccactggaacatgtaggggcctccgatgccagcgggtgccgatggctgatggtacatgaccacgcagacctcgctgccgcaggayggctcatccacataccagttcctgtagggaagggatcagcagtagaggcaactggagaaggatcccctgagacttcaaagcctttgttttcccgtcaagtctcac

SEQ ID NO: 859134 - DNA, 603 bp, Homo sapiens
aagttccaatacaccacatgtatttttgtttaccttcctactctatgtattccctttcaacccatgtccaattttatatcaattttagtataaaatcataataaaattatttcagattgaatttgactttattccctctagaaaatagagacatctttgccgaagccctaaagatacaggaatctgaggagaaagtaaagtatctccaaaaggtaggccaatatttcagaaggtcatctgatcatcattaaatttctaaataatcttgattttttaaacacatgtatatttaaaaatctgctacttctagtgcatcagcttgagcaaattaaggaaacctttattagaattttaattgaaaatttaaaaattctattcaacattggctattatcaatctcagcaaaagtccaagaatgtataggaacaacagaaccagagagaaatagaaagaggtagagtcacacactttccatccagtaaggtccccaacyatatacagtgttctaagaacagaaatagcataagaggccaggtgcagtagtacacacctacaatcccaatgctttgggagacctaggcaggaggatcccttgaggccagg

SEQ ID NO: 859135 - DNA, 643 bp, Homo sapiens
tattgagtgcttactgtgtgactgattccgagaatgcagagacacgaagctttcagaatggaacgcaatgagagccaggtggcttgggatcatctgtggttaccactccagkttcaaccgtagttaattcttgctgaaacaattgttagaaagactctctctaacctcccaccctttctcctaactctaatttatcttcacactgttgccaaagccacttttaaaagaagcgtgactatgaccccgtcactcctcagtgaaaaaccttccatggctccctattgcccatactttcccaaaggaacacaaatggaacacaattggaaacacatttccaaggatcacaagcagcttggaacacagttccaaggaccagagagatggaacacaattccaagctgcttgtgatccttggaaatgtgagaggcctcaggcataactccgcctgtgccgcccaggcctgtaggatggcgaggaggaagaagtcccggccagcagaggttctaggttctgcgtaacctgagtccagtggctaaaaaaagaaaagactaggattctcatgtaacatttggcaaaactctacacttccttgagcctcacgtgacatttctcctagataaacctggctaaattcctgcctgta

SEQ ID NO: 859136 - DNA, 554 bp, Homo sapiens
aaatgttgatttttttcttttggctgagcaattaataggcaatggatgaaatcagcattttccaacacccctcttccccacgcacattgatgatgcacaggcagctcatttggacgaattcccaaatctttttacctggccgtgtggttagtgattggtactattagcaatcagctaactacactgcctagtaactagactcatagaaaaaattgcagtctcaagttggtaccccaacacgttgtgacaggcaggcaattcattggttgagttggagctcaactgagttgctagcttggtgaatactctactagacgatggcaaatagacacagtgaatcacagcatacagtattaaccgttacatggatggaggggcttcacctccagggattttgctttcctggcatgagactgtttcatcttctgtgactcctagagagagctaacagtttaactgtatctggagaaaccgcgggtttcctcgcacttgcagcgggcgctcgcggggcaggctgcrcaggacccacgccgacgccgcgcttctcaggcatc

SEQ ID NO: 859137 - DNA, 564 bp, Homo sapiens
cattcattatctcctgggatcctcataacaatcatacaataaagatatcctttttgtactcattttacagatgaggaaattgaggcttacagtcatacctagtgagaaacagagctgagacttgcccaaaccaattaccttccattccattcaattcatttctattggcatttcagttagaatttatcctggccaaggcaatagcagacaagctgctgctggcatcattctgaagggtagaagcaggggacctatatcagagtgtgttacagcaagcaatggaggaaggctcagcagtaggttctgatcgaagagaaggggacagatgagagcaggtaggatggatgtcttccaagaaggtacaaccagagccttccgggaacatggcaaatttggccctgaatccatccagaaaacaagtccttcatattacaactggsgtagctccagccaggccacgctgccctatctaagaccctccccttcccgcccccacctcagctagctgcagtggtgtgttacccttctgactgttccgttcattcagcgaaatgtcagtgtagg

SEQ ID NO: 859138 - DNA, 564 bp, Homo sapiens
cattcattatctcctgggatcctcataacaatcatacaataaagatatcctttttgtactcattttacagatgaggaaattgaggcttacagtcatacctagtgagaaacagagctgagacttgcccaaaccaattaccttccattccattcaattcatttctattggcatttcagttagaatttatcctggccaaggcaatagcagacaagctgctgctggcatcattctgaagggtagaagcaggggacctatatcagagtgtgttacagcaagcaatggaggaaggctcagcagtaggttctgatcgaagagaaggggacagatgagagcaggtaggatggatgtcttccaagaaggtacaaccagagccttccgggaacatggcaaatttggccctgaatccatccagaaaacaagtccttcatattacaactggcgtagctccagccaggccacrctgccctatctaagaccctccccttcccgcccccacctcagctagctgcagtggtgtgttacccttctgactgttccgttcattcagcgaaatgtcagtgtagg

SEQ ID NO: 859139 - DNA, 633 bp, Homo sapiens
aggaaaaatgaagggtattttttagaagcagtaaggattcctggaagacagtggcagcatttctgggtagggggttcacaggtgttgttgaggccctgctgcatgccaggcactctgtaccataggcaggctccatgctgatcatggagataaacacatacacaaaagacacaggagccctggcctcatggagctcatagtccctccaaggatacagtcgaaaaagaagactggagagcccccagtgctgaccatttaaggagcctggggacttgggggttagcaatggagagttaatgacagtttttaatgctgcaaggttatgatcagcgccttttagaagatttatctggcccgatagtagaagaaaaacttaagaagaaagacgggaaatattgaaatttcagttaagaaactactgtagtaacccagatgagagataattaccaaaatcagagcagtaggtaggaagaaaaatagggtatgaatgcaagagatactaaccaagcagactacactcaatytgggaactagcaagggcaagaaaagcatcgaaatggatctgagggcgggcacagtggctgacgcctataatcgcagctctttgggaggccaaggtgggaagatcgcttg

SEQ ID NO: 859140 - DNA, 613 bp, Homo sapiens
tcagctcagagacttcccagatcccacagtctgaattagtcatgagttccttagagatgccttacggattgacttctctgtccttgtctgctcttgggctgtttataatatatccatgcctctcccacgcctgactataaactccgtgactgtgcctcgcttttgatctcatgaagttcttgtacagggtaagaactccttgttattgacttgaatgtgtgactaatcctgggaaacccccatggttgacgggcaggggacagaagcattaacagaaagggaaaagcaaagcgagttgggccgggcatggtggctcacgcctgtaatcccagcaccttgagaggctgaggcaggcagatcacttgaggtaaggagttcaagactagtctggccaacatggtgaaaccccatctctactaaaaatacaaaaattagccaggcatggtggtgcatgcctataatcccagctactcaggaggctgaagcatgagaatcacttgaacccgggaggaggaggttgcagtgagccgakatcgcaccagtgtactccagcctgggtgacagagcaagactccatctcaaaaaacaaaaaaagaaagaaaagtgagttgaa

SEQ ID NO: 859141 - DNA, 656 bp, Homo sapiens
tattaataaatgtattaaccttgttttttagtcttagaaattcactttttaaatttcagtatttaatacttgatggtataattttgatcacttcagaattctcttgcaacctttacattcttttgtatcatttaaaattattataactctttaggcacttttactatcttttcatcaatgttcaaatggcttaactgctgcaattttatatttaaaacatataataaaatcttggtgtttcatattgatcttattctttttttgaaaatttcaaatatatgaatgtatatgagatttgaggtaatggcattatgttaaaaattttaattaaatatataaaaatagtttttagaatgataaatcttttcttaagaagacaagctaccccatagcttttgaaaaaataaatctttcatataatgttgccatgaaaaccaaacaattaaaactgcagaaatttcaaaagtgcttgaaaccatcctatttcatacaaattgctgtatatttgataaataattagaagaattggcaaacaagtaaatatactactgagaaagttgtraaataatctaaatatatgaaggttggccaaagaggaaacaactcttaaaataataggaaagaaatccatataaactgaaaaatcccattacgaa

SEQ ID NO: 859142 - DNA, 363 bp, Homo sapiens
cctgccttgcaagagctcctgacaagagcactcaatatgaaaagattgttaccagccactgcaaaaacacactgacatacacaggccagtggcattataaagcaaccacataaacaagtctgcaaaataaccagctaacatcatgacgacaggattaaattcacacatattaatataaatatttcaagataaatgggctaaatgccctacttaaaaggcacagagtggaaactggatwaaaaaagcaagatccattggcatgctgccttcaagagacagatttcacatgcaatgacacacataggctcaaaataaagggatggagaaaaatcgaccaagcaaatggaaaacagaaaaaagcaa

SEQ ID NO: 859143 - DNA, 363 bp, Homo sapiens
cctgccttgcaagagctcctgacaagagcactcaatatgaaaagattgttaccagccactgcaaaaacacactgacatacacaggccagtggcattataaagcaaccacataaacaagtctgcaaaataaccagctaacatcatgacgacaggattaaattcacacatattaatataaatatttcaagataaatgggctaaatgccctacttaaaaggcacagagtggaaactggattaaaaaagcaagatccattggcatgctgccttcaagagacagatttcacatgcartgacacacataggctcaaaataaagggatggagaaaaatcgaccaagcaaatggaaaacagaaaaaagcaa

SEQ ID NO: 859144 - DNA, 465 bp, Homo sapiens
agaagaagagtatactatacttccatactccctcctcatcctttgtgctagttttgtcaagtattttatttctacttatgttatggaccacactatgtstgtgtgtatctctcttaggtatttgaaatacaactttattctgtttctaaatgaaaaggaatgggaatggcagtaaaataagatcctcaccactgaatattatgatgttaagtattaggttggtgcaaaagttactgtggtttttgcaatactttggcaaaaactgccattacttttgtaccaacctaatatatatgaaactccagaaggaaacaacaaaaacagctaaatatgcaggtccaaaaattgaaggtatttttgaagtccattcatctccttcagcatcccaaagataaagcacatgttctgcttagctacacaataaaatggcaaacatgctacaccactgacagcacagcacagatg

SEQ ID NO: 859145 - DNA, 476 bp, Homo sapiens
accgatggagtgtcctgtggctgggggtcctgcctcccttctgagactggttctctggtagcctcagctctgtgcctctcttcctccctcgagctagccccccagcccctatttgccctgtgtctgcagatggctggctgggagggcttcgacctggataggagtcccccactgatcccagccacctgtgaggaggagaacaaggcgggagggaggatttctctaaggctctccccctccctaagacctgggagccagagcttggacagagacactattaacacaaactctgcaaacatggcttctaaaaatagctctggctggcaaggcccacctggcacagactgcacctttgcggctgctggcctgctccccttggagcatgggccatcagtctgtcagcagacatgtcactctgccctcttcccccaggggacggggcagccacagcsttaggtgggatccaggggagagac

SEQ ID NO: 859146 - DNA, 559 bp, Homo sapiens
ggtggcgggcacctgtagtccaagctattcgggaggctgaggcaggagaatggcgtgaacccaggaggcggaggttgcagtgagccaagatcgcgccactgcactccagcctgggcgacagagcgagactccatctcaaaaaataaataaaaataaaaataaaaaagaattatccagacgtggtggcccgtgcctgtagtcccagctactcgggaggcttgaacctggcaggtggaggttgcagtgagccaaaatcacgccaccgaactccagtctgggtgacagagtgagactctgtctcaaaaaaaataaaaataaaaaaagaaactttctcctattccacatgttctagttttttttaaataataaatgataaattttgtcaaatgcttttttaagccatctattgcaatgaccatatagttttactctcctttagtttattaatatggggaactacattagattcytaatgttaagccaaactcctattctttgaataactgctacttggttgtgattttttaaaaatatactactcgattcagtctgtgtttca

SEQ ID NO: 859147 - DNA, 585 bp, Homo sapiens
ggagaccaggagacccaggctgaaatagcaggtggagttgttcatgtggcagacatagcagagaggacccatcagggacttgaatcaatgtgtgattctctatctccttcctctcagatcagagacagctgtccagctaagcccatcttaacctagaccaagcttgagaggggccaagatacaggggggtacagagaggcaggctctaaagagccagtacctcaggaactgggtggggaaggctggcccaagttagaggccattccctgggaagaaggttgcctgaattaaggggagacacaggctgtagatggaacagtgtcaaagtgtttctcaagaggaaagtgaggaagtttggggcctgctgctgccctgcgtggtgacctgtttcccccaggccactccttatccatcaaccatgatgggacccatgatgggaggctagggagaggggctggaatatagtggatgttcatgtagccaacccaggggacaaacaagaaatgaggacaataactggtattgcctgccccagagtcacgagatttaggccctggatccsagccccctgtcccgcaccccgtc

SEQ ID NO: 859148 - DNA, 609 bp, Homo sapiens
actgacctcatagagtaagttggggaaatgttctctcctcttctaatttttggaagagtttgtgaagaatttggtattaaatcttctctaagtgtttggtagaaatttatactttttattgctgrgctgtactccatttatgatgaatataccacaatttattcatccattcacctgctgatagatatttgggttgtttccagttttagaataaagctgctatgaacattagtgtacaaatctttgtatggatgtatgttttcattttcttgggtaaatatttacagtataattgctgggtcatttggtagatgcatggtaactttatgagaaagttccagaccaattttcaaagtggttgtgtcactcctaccagcaacgtatgagacttttgcttacattctacaatcttaccacttaagctgttgccaccgtttgattttagccattctaatgggcatgtagtgatatctcaatgtcattttcatttacattttgctgaataataatattaaaacacattttcatgtgcttattggccattggtatatcttcctttattcagtgccggttcttattttttgcccattttttaaaaattagatttta

SEQ ID NO: 859149 - DNA, 522 bp, Homo sapiens
attacttgcaggtattgacaggctgatgctaacaaacatttacataaaaaggcaaagaaactacaatagccaaaacaattttaaatagaagagtgaaggtagaggaataacatgacctgattttgacttatacagatgcaataatcaagagtgttgtattggtaaaggcacaatatagaggcatttctcacacattgctgatatagtcaccagagaagtttggcagtttcttataaagttaaacatatgctgatcatatgattcagagcacaatggagcacaatataaggtcccacggcagagctgcacaaatattgccaactactttttggcaagatgcaaaaggatttcaatggagaaaggattgtttattcaacaaatgctgttggaacaatgataggcaaaacaatgaacctcaatctaaactttacatcttgtacaaaaaktaacccaaaatgaattatgtacataaatgtaaagcataaaattattgaaacttttagaagaaaacattggagaaaa

SEQ ID NO: 859150 - DNA, 646 bp, Homo sapiens
ctcccataagatgattctggtttggtagtccagagacctgagttcaagacctttctaagggccgggtgcaacggctaatgcctataatcrcagcacattgggaggccaggtgggagtatttcttggacccaggagttcaagaccatcctgggcaacatcacaagacctcgtctctacaaataaaaataaaaattaaccaggcaggggtggcacgcacctgtcgtcccagctactcaggaggctgaagtgggaggatcgcttgagcctgggtggtctaggttgcagtgagctatgatcacaccactgccctccaacctggacaacacagtgagactcaacaaaaaaaaaaaaaaaaaaaaaaagaaatatatctgtgaaactcttctaaattcattgcttttaaaatacaacactacaagttatcaatcttgcaagtccaggtttcctcctttttaaaagtgtggtaattttaggtggtgaagtatacagagaaccctaggccacagcatgaatctgtactctaatctctgcaccccctgctcgctctgtggcatttggcatacatgcctctttcctgtctaggtctcaatttccttgtctataaagaatggggataaattttatcatttataaagtccctgccaat

SEQ ID NO: 859151 - DNA, 587 bp, Homo sapiens
gttgatttttttcaaaaataacttaggaaaaaattaattttaaatttcattgaatttaaatttgaaagaaaagttttatatttgtcatattaacttattcaaatacaggataactcttcatttatgtctttttgggttttcaaattttccacaaggagctatagagttccattaattttatatgtatcataagtttttatgctatttagaatattataatttttattttcttgtaattatcacttaagtaggagaacactataacttttttagaagtctcttattagtcctaatagcctggttttataatattttctgtgtagataatcttatcatctatgtataataagagttgtatctcctttctctctaatgctataccttttacatcctttttgttttttattatatcttccaagacctccaatactttgttgagctgtaacaataatagtggacatcctcattttattcctgacattagagaaaatrcatctaaagttttcctgttgaatattaggcttgatgtattttttatataatgttaaggattttttaaaattccttgttatttgatagctttcaat

SEQ ID NO: 859152 - DNA, 626 bp, Homo sapiens
gacactataaacttcatcaacaggaaagccctcgccaaaaaagagcagttgaggaaattttaggcaggaatataaaattataataaatcagaaatgtagataagaatatctgggaaggaactttggccaaagacaatggctttgtaaaagaaagaacattttctaaagctatggttgctgtaacaactagcccaataaggtttactttccagcaaaagatttaaaagttcaataagctaggaaattacttttagatcctgaagttaaaagttaaggcccacagagattaaaagttaataatactaagagtcttaataaaaatttattcaaaaatctttttaagaacatttcaacactaaaaatagcagcaaataaagtgagaagcatgacacaagcagaaagcaagaagatgggtgcagttaggaaggcacaaacagcctgaaagaagtttcagctttccacaatctacctcaaatatactcttacaaattgtagaggacagagaagattgaagaaaaaaagcctgaagcaaaactccacttaaaatgtctttattctaatgtgaagttgaggctataaagacaytgccagcatcacagattcaacaaatttatttagaattcagt

SEQ ID NO: 859153 - DNA, 594 bp, Homo sapiens
ttagtagagacaggatttcaccatgttagccaggatgaactcgatctccggaccttgtgatctgcccacttcagcctcccaaagtgctgggattacaggcgtgagccacctcrcccagccaaggatggcatgatctccgcttactgcaagctccgcctcccgggttcacaccattctcctgcctcagcctcccaagtagctgggactacaggcacccaccaccatgcccggctaattttttgtgtttttagtagagactgggtttcaccatgttagccaggatggtatcgatctcctgaccttgtgatctgcccatctcagcctcccaaagtgctgggattacaggcatgagccactgtgctcggccagccaaggatgattcttatgaggactcagagaaagggaaagcctggaacttcttagagattacttaagtggtcataacccaattgttgatagaaatatggacattagaggccattctaatgaggactcaaacagaaattagtaacaacatattagaaactagagtaaaggccatccttattataaagtagcaaaggctgcctgaattgcatttgtgtcctaggactt

SEQ ID NO: 859154 - DNA, 564 bp, Homo sapiens
gtcctaggactttatggaatgtagaacttaggagtgatgaagtaggatatcttgcagaggaaatataatacctaagcagcaaagcattcaggctgctgtgtggttacttccaaccgcatatgttgagatccaacaacaaaggaatgaattaaagatggaatttataattaaaaggagagtagaacagaaatgtttggaaaattttcaccttggccatgtaaggaaccaaaacgcatgggagaaaacactaagaggatggctacacaaccatttgctaaaaagattcacatggctaggagggattcaggtgctattcaccaagtcaacaggagaaagacccggaaggcatttcggagttcttccaggctgcccctccccttacagccctagagctccagtagggcaaatggtttcgtggggtgggccagggcgccctccaaaggctcacttcccagagctacckcgagactctgctccctgcattatagtacagcactcctcatccaccccagccatggctcaaacaactccaggtgtaacttaacatacctagctgtaaccttg

SEQ ID NO: 859155 - DNA, 529 bp, Homo sapiens
atgaaataatctctacctgggctgcaaacttcactttttaccttcatcttcacaggagatcaaattgayattgaaatcaaaagcagatttctctataattcaaaataatgtcagtgtatcacatttagcctaatgctataactctggtcaagaattattcagttatatacccaggaggtatacacaggagtacataaaagtattgttggttgatgcttgcctgcctgcataatccagatctcttactctaaatttctcattccaactataaaatgcaaatgttaatatggtttggtaaagataaaagtcagtataacctaaatccaaggatatcagcatctacattgtccagaaatatatccaggacatttctgaatttggctagttatgaaaaacaattagatactgctataattttcagtcagatgactttcatttctacttaaagagtgaaacatcttagaaattagaactgaagaaagtttgtactttatggtacatttgtaagacataagatgtgtaaaggata

SEQ ID NO: 859156 - DNA, 528 bp, Homo sapiens
atcctttacacatcttatgtcttacaaatgtaccataaagtacaaactttcttcagttctaatttctaagatgtttcactctttaagtagaaatgaaagtcatctgactgaaaattatagcagtatctaattgtttttcataactagccaaattcagaaatgtcctggatatatttctggacaatgtagatgctgatatccttggatttaggttatactgacttttatctttaccaaaccatattaacatttgcattttatagttggaatgagaaatttagagtaagagatctggattatgcaggcaggcaagcatcaaccaacaatacttttatgtactcctgtgtatacctcctgggtatataactgaataattcttgaccagagttatagcattaggctaaatgtgatacactgacattattttgaattatagagaaatctgcttttgatttcaatrtcaatttgatctcctgtgaagatgaaggtaaaaagtgaagtttgcagcccaggtagagattatttcat

SEQ ID NO: 859157 - DNA, 513 bp, Homo sapiens
cacatgctgatagaaaaatggtgctgatagacttgctcaatgcagggttgcaacaaaccttcaatttgtaaaaatcacaatatctgagaagcacaataaagtgaagtgcaggaaaaagaggtatgcctgtacctgtcactcctgaataactaatagaaataataatggtggtagttggtggtgtgatgctggtggtacctgtcacgtgcaagaaatatacccatactttgtaaatattattcatatgcaacattcatttaggtgtaattatcttgattgtacagataggaaagctgaatttcagggaggtttaacatcagagtaacgatttgaacttagatttgttacactcagagttcttttaaaaaagcaaaattacttcctgatttgtatgcttctcatcgattaaaatggctactttaaataaaatstaagtatacatttatttttgtgaaaaaattcatatttatttgactagaaatttttgagcatataaaactagaacttactgac

SEQ ID NO: 859158 - DNA, 598 bp, Homo sapiens
tggtgatctcccctttaccattttttttattgtgtctatttgattcttctctcttttcttctttattagtctggctagcagtctayctattttgctaatcttttcaaaaaaccagctcctggattcattgattttttgaagggtttttcatgtctcaatctccttcagttctgctctgatcttagttatttcttgccttcagctggcttttgaatttgtttgctcttgcttctctagttcttttaattgtgatattagggtgtcaattttagatcttttccactttctcctgtggatatttaatgctataagtttccctctaaacactgctttagctgtgtcctggagattctggtacgttgtgtctttgttctcattggtttcaaagaacttatttctttctgccttaatttcgttatttacccagtagtcattcaggagcagtttgttccgtttccatgtagttgtgtggttttgagtgagtttcttaatcctgagttctaatttgattgcactatggtctgagagactgtttgttatgatttccgttcttctgcatttgctgaggagtgttttacttccaattatgtggtctctt

SEQ ID NO: 859159 - DNA, 434 bp, Homo sapiens
taatcccagcactttgggaggctgaggtgggtgaaycacttgaggttaggagttcaagaccagactggcatacatggtgagaccaaccccctgcccccactcccaatctctactaaaaatacaaaattgagccagcgtggtggcgtgtgcctgtgatcccaactactcaggaggctgaggcacgagaatcacttgaacctaggaggcggaggttgcagtgacccgagatcgcgccactgcactccagcctgggcgacagtgcgagactccgtctcaaacaaacaaagagtaaaccgacaaatactacattctctctctctacactctggcccactcttaacacaaaaaactgtccaggatcaggagactttttgttctcctcatctcctccttccaaagttctctgcccacgttctactgtctccccaaaatcc

SEQ ID NO: 859160 - DNA, 600 bp, Homo sapiens
ccaatcccctcaccaccctttccagtctctggtaaccatcattctactctccacctccatgagttcaacatgaagcatattttttatatgagcttggcaggtgaaatcaaaactattttatcctcagaaacaagtaatattttctttatcattttatttgaacttctcttgtgacatttgtccctttttcttgtatggcaagacatgtattatctcctccattggagtctgaatttcttgataacacaacagattttctcagctcagtatactttacaattactagtgcaacaataataccctgcaaatggaacataaataaattatgaagagaattagtatcaccatatattaaggtatatggaaaagataaagcatttaaatcattgaggtgctgctgcaagaacagacagaaagacacacagaacaatagacacagtctccaagaaagaaactgtaaatataagaacttcttaccgaaggtgctaattaacayagaaaaagaaacaactaatcaccagttcatgctgggacaatttgtttagcttcttacttcacacaaaataattttcagctgaatttaagagttgaatgtttaaa

SEQ ID NO: 859161 - DNA, 622 bp, Homo sapiens
ttatacatgcatctaaaaattaaatgtgaaaagcaaaaccatagaagtactataaaataacatgggagaacactgtattatcttggaggagggaaggaaattttaatcaatacaaaaaaatacccagmagatataaaatagatatttatatagataaatttgacaatgtaaaaattacatagattctgcatgtttaaaaaaaaccccaaaagtcaaaacccagtatgacaatggaccaattttcttaatatagaaataatttctttaaaagcaatttttaaataaaaaaaggcaaacaaaatacatgtctaatttaaagaaatatatatatacacatatatgtgtgtgtatatatatatatgaatgctttaaacacattaaaatatgcccaacctcagacatattaaaaataaaaaacattttaaaaggctgggggtgggaaaaatggagagatgtggtcaaatggtataaaatttctgctagataggaaaaataagttttttgagatctattgaacagcatggtgatcacagttgataataatgaattatactatatttcaaaattgctaagagtatacatttcaaatgttcttaccacaaaatataagtcttcaagtgtt

SEQ ID NO: 859162 - DNA, 615 bp, Homo sapiens
ggctgctcaagtactgcaagggtgactctccatgtagattcagagtctgggcactccagtcaacactaactgataaatccttttaagcatatagcaaaaagatgaccaccttcttatacttcaaagacaacactgatacctaaatgtaaactacttagtaaatgaaagttctaccagccagttttaaatcaaatgcttacaattttaatcaaaggatagcccattaaccaaacaattgtttttatgaagtgtgttttttttttgttttgtttgttttaaatgtctaggagacaccttaccaagacctcatttattttaacacttcctgggagacctttattgtcaaactcgaccagatttattcaacaaacagcaattcgagaaagcagtggaaaagagctgagtcacagtgaaagtgacatttccctttgcagctgaagaaaccaccggctgtgattaactgcttgactagtcctccagtgtgaaggatcacaatgggatcaagaaggcttggctgggctaygagaaagaaaagaactgaatcaaattggagcctgggaaactcagttcacaggatcccctaaaagttacaaatgtcacaagtgtgagtgacca

SEQ ID NO: 859163 - DNA, 571 bp, Homo sapiens
gagatctttctgactgttttacatgggcatttagtgcaatgaatttccctttgaacactgccttacttgtctcagagattctggaatatgatatctttgttctctttagtttcaaaagcttattgatttctgcctaagtttcattatttacccaaaagtagttcagaagcatgttgtttaatttccatgtaattcatggttttgaattattttcttagtcttgacttctgtttttattgcactgtggtctgagagtgtgtttggtatgatttggatttttttgcatttgctaaggattgttctgtgtccaattacatggtcgattttagggtatgtgccatgtagcaaagagaagaatgtatactctgttgttttggtgtggagagttctgtagaagtgtatcagatccatttggtccaatgtttagttcaggtcctgaatatctctgttaattttctgcctcaaagttatgtctmatattgtcagtggagtgttgaaatctcccactactattgtatgggagtctgtgtcttgtcgtaggtctctaagaacttgcttcatgaatctgagt

SEQ ID NO: 859164 - DNA, 568 bp, Homo sapiens
aagctccagctttgaatccaaacggtgcagttaggaaggaggaagagcaaagaagccgggcaaataaagatgacagccaggagccagaggaatgtgtttggytcaggactccccttctcttcatagagaatcagatactcaatcacagcaaaggtgctcaccctgctaagcatttttgctccacctcaaaccaatcagcattgactgagcccctctgtgtgtcaggcactaagctgggtccagtggatggcagtgataaataagacattacctctatctgtaccagaggcagtatggggcaaaggtgatggcatgctttttgggacctggcagaccctattccttactagctctgtgtactggcacttattatttcactttttttttttgccttagtttgtttacctgtaagatgaagaagaataataccattttaaatgactgtttagtgaatatagcaccattttaaaggactgtttagtgaatatagcaccattttaaaggactgtttagtgaataaatgatataatctatgtaaagcactcatcatagagtttaacaggtagga

SEQ ID NO: 859165 - DNA, 467 bp, Homo sapiens
tatttattaaacctagtctcccatagtcagtcttcattgtgggtaacatgctttcctgtcccaagtaatctcatccttatattcccttaagggtgtctattcactcattcattcaccaaatattattcatactatgggggacaacaccattttctaccttacttagaaaaacacaagacttgtgactgtgatttaaaaacactaataattatgtattgcgagctaagattcagcaggagatttgaaaaagatattttagtctcagctctcatattaaaaatatattttagtctcagcactgaggctttgggcaaatatctttatatatctgaacctcrgtttcataaaataaagcatactactagattttcagcctactcagatgaggagcctttaaagaatttctgcttgaaatttaccacttctgaagtatatgtgtgtgttcatgccaggggagttagttttag

SEQ ID NO: 859166 - DNA, 627 bp, Homo sapiens
taataactttttaaagaatgtcaatcacattctttaataatttataggaacttgacatcgagagcatcctcatgaattctattgccatgttgtgtgctatggactgaagtttcgtgttccaccaaaattcacgtgttgaagtctaatccccagtgtgattgtatttggaggtggggcttttgggagatgatttcactctcttgaatggggttagtgccattataagaagagacacaaggtgataattcattcagtcatgtgaggatacagagggaaggtggctgtctacaggccaggaagttgcccttcaccaggcaccagttctgttggccccttggtcttgtactccccagcctccataactgtgagaaataaatgtctgttgtttaagccacccagtctgttatgtttggtatagcagcccaagcttattgaacatgatgatagacggaattctaagctgactcccaagattccagctccctggtgtacatgccttgtatgatcccttatgcttacatggcttggggatggaamctttgaatatgatgggacagccactccatggattaggttgtgttacagagcaagtgctgatggaatagtcaggtgtgtgatcatctgaca

SEQ ID NO: 859167 - DNA, 527 bp, Homo sapiens
tatatacccagcagtgggagtgcaggataacatggtagctatatttttaatttttttgaggaacctccaaaatgttctccatagtggtcgtactggcttccattcctaccaacagtgtatgaggtttcccttttctctacatcctcgccagcatttgttattgcctgacttttgcataaaagacattttaggctgggtgcagtggctcacgcctctaaccctagaattttgggaagccaaggcaggtggaccatgaggtcaggagattgagaccatcctggccaacatgctgaaaccccatctctactaaaatataaaaagttagctgggcatggtggtgcatgcctgtagtcccagctacttcagaggctgaggtagaggaatcacttgaacccaagaggcggaagtttcagtgagcagagatcgtgccactgcattctggcctggtgatggagcaagactccatctcagaaaaaaaaaaaaagcctatttaatgggrataggatgatatctcattgtagctttga

SEQ ID NO: 859168 - DNA, 592 bp, Homo sapiens
agcttccatgagttcagtgttcagctagctmtttggaaactctctgaacccaatcctcttgggtttttatggaatcttcattccttcagggtatatggggtgggaccctctctggaatgagagtcttatgacccacatcacaaaggtgggggttagacacttgccttcaggtagggtgaaaggaagagagcaggagaaggttggagagagtctgtttcctgaggcctaaagcacccaacactataacgagactgcaacaaggctaggggagttattagccaaggaactgtggacagatacacacacacacacacacacacacacatacacacacacacacacacacacaaaataacacagcaaatcatccacgggatctaaagaagcatgatacagtaaatgcctatatacctaccatctaacttattaaaaagaacattaccaggaaaacaagtgaaaacagaaggctcctttttctttgtccctcatccaagaggtattccatatcctgaattttgtgtttatcattcatttgcatttccatgtttgatttcttaaaaaatgtatttttaatgtttttgaaatttttttt

SEQ ID NO: 859169 - DNA, 612 bp, Homo sapiens
cttctttgcacatgtaagattaatttcattacttctttcttttatgaaaatatttttattttctataaatacatttggaagaaattatttcttcccaacccagtccaycccattaactgtcagttttttctactaaaaaagatgctaataccaccctcacctgtgactgctaaacagaaaaatattgcctggactaggcattattcccctagttggaaataaaggctgttgggcatgggagtttgatcttgtaaagaaatcaacactgagacaaaggatctcttagcaaggctggtttactttctgccaaaagggtgcactcaccagcagtccagccacgagagcacaccaaacaaaggagacggggacatttataacctttacatcctgatgcaatcccctatggctgtgtcccgttcccattggctgggatgggacctcacactctaaacttaactggattggttaataatttaaaactttcctaaataggacgaagggaaaaaggacaaagaaaagaggaagttagtgatgagaggtcagaggggttcccaaataaggaatggcatgtatcctgatctgggactcatttagccttatctcaacctactg

SEQ ID NO: 859170 - DNA, 557 bp, Homo sapiens
aacaaaacttgatatttgctaaatgatttctattgttaagtgacaaaaggatgaaaaacatggttcttgtaaaaagggacttcccygtctctaaaggaaccattgggttaaaagaacaaaaaaagaaaaaaggaaaaaaaaaaaaaagtaactttccaaagtcccatttttccaaaaggatgtattgaggggtatggaaaacaggctcttaagtataatgtttattgttatgaaagtgtaacttggtactcaatctccatagatgccagtacagcaatatctatttaaaataaaaatccatatattctttgatccaacagttgcacttctaggaatttattctacagaaatatttaaccatgtgtgaaataacatgtgtaaaaatattcgtagaacattgaaattgtaaaagattggaaagatcctaaatgtctgtcaacaagttggaaacaatttaaagtacaagaaaaagagttactggaaaaatacacctatgtacacacaacatatatacatatcttaatgcttataatgaagtatctctggaaaaataagca

SEQ ID NO: 859171 - DNA, 644 bp, Homo sapiens
gatcagctgtatgcagaacttcaaatataagagacttggaagatatcttgcataatattacatatgtaattcattctagacaggaattattgttcaatctatttaaaaaaaaaacaaatctgtatttatgttagaggccatggataaatatatagaatatagttaggaatgaaaacatttatctggataaatcaggaaaaatgaacaaaccacccccaccctgcaaagagggcctacttacacacattaaatttgcttatataacttcatagacttgttatttattttgttgtttagaagccaaaaacaaataatgaatcctgacttcctttttactacatattgaaataacaaaaactaataggccagtaataattcagctctacggtgttaatcaagcttgatcacaaggagccttagaaggaaaacagtcagccaccctgttgtttgccttgccaatgccattctactcttctgccttgcaaacaccaccacaattttgtttgggtaktaatctcccaaccccaggcccagggaataaattcttactaatctccactagtcataggaatcttattctttattggcctacaggttagcatgcaacccagtccaggaaaaatgagacctaaggagatactcta

SEQ ID NO: 859172 - DNA, 647 bp, Homo sapiens
ctgggagccctcccaaacgcttttgtatcatttctggtgactgtattcagtagcttttcaagagaagtattttatttttaatccmatcatttttattaggaaactgagactcagagaaattgaatacattgcagtcatgtaactaaaaactgccagatgcaagattcaaatacagtctaattcagaactcatgtgctttacattacactgcatgacagtttatactttacagttttaagggacatgagagtagatttagtccaatcacttggcccataccagtgattcacattcatgtttatttgctttttttgaagttctttctctgaagaattacactgattcacagtatgggcaccaaaataccacttttaattcttatggaaagtaattccaacttttattagttatttgagaaatctatgacacattcaagccatcaaggactatgtaaaccaaaataaagaattcaatttcaagtgtcttactatttcaaatatgagtcaatacaggtttaaagtatcagccattctacttggccagttgaattctctttaatacagttagtctcgtagaggacagccttgtgattttaatgcactccacactgattaacatcttaaattcagttgtctatcttctaaaac

SEQ ID NO: 859173 - DNA, 528 bp, Homo sapiens
cttcaccagttctgtcttctgccacatatagtcttctggttaatcttcccacagagttttgaattttaattattaatagtttctaaaagttctatttctagtagttatttttaaaatccacrttacctgtgttttcaaggttctcttttatttctttaatcacattaaatatggttgtatattctgcctgagaatcccaatgtttatggttttggggtctattgctttcttacttatgacatccttgggtgttgatttttgactgcaaatatcttccttggaattatgtctgtagatagaatgtggttgaggcctagatggaaactaaattccttgtttctgccagtcccctgggtgcacaactagccaggaacattctaggctaaattctcaagtttttttcagacccattgagggcgaacttgtgcttatatattttcaaggaagtttttacttttttctgtcacttatcgggcattactgttatattttcaaaaaagtttttactttcttccaccacttatctag

SEQ ID NO: 859174 - DNA, 561 bp, Homo sapiens
tttctttagaagtttggtgatgttttgtaaccagaaatatgccataggaacttatcytgtttatataaattagtctatggtaacgttggtatccttagatgtcattctgcttattcatagtttccaagaacgtattgagaatgttcagtgagtacttactgtgtagaggacagacagagcaagatcggcttcaatgatgtgtgttggtctcccatgactagggtatctctcccggcagaagatgcagtgcctgtacccctcatacgcctcagtaggacctcaatccctcccctgtggggtctgaaacactgatgtctgggggactgtttggagaccacagactcacaagcttaagcaaaacaagggaacactcattgagtctgaaacagggaaagatatttccgcacaaagtgataagcttggcataggcagtgtgggctctttctctcttggtaaggaaatgttccaggctcaaagcccattcttatgtaactgagcagcaatcagcagaggttgatagactgtgcaagtgagtctgccttttccaaaagttataaatag

SEQ ID NO: 859175 - DNA, 641 bp, Homo sapiens
aatacagagctgaactttaaaacttgaatagaatcattgttatctttttattttaacatttggtaggacaatttctgaaaccaggaaagctagtttccaaattatacacaggcctgcattaattgctatatcacaagaaactccaaaaatccttcaggaatgtcatttacacatatgtccaataataatgtgtatttcctgatggctttcagaatgaatattaggattctatggaaaatagttaacataaaattgattagtgaactagaactttcaaataaattttaatataaatataacaagaaaagtgaacaaactataagtacacatcttcataattttcataaaataaacacacccatgtaaccaatgcccaaattaagagctattaccagaactcctcagtctcacctcatttttcacccagtcacactcctcattcaaagaaaccactactggattgctaaagctatcacttagttttgcttgctgctttttcttgattttttaaatattgaggtgtaatttacatataataaaattcacaaatcttaagtgttmagttatacgttttgaaaattatatgtactcatttaatcaccacccaacacaataagagagcatttaaatctcttcagaag

SEQ ID NO: 859176 - DNA, 614 bp, Homo sapiens
aagaatgttagctattatttatagtaattatcaccattattattatttgtgagtactgtagctaaacataccctaaataaatatacttctaatgatattctcatataacttttggaatttaaactttctgttacatgagagagaagtgggtaataaagaaggtgtatgacaaagaaaatggggaaaggaagaaaacaggggtgctgttttaaataatcttatacctttaagttggaaagcagaattaataaacttccccccaggaaacactgaaatctttgtgcattggaaatattgttttaagattgtaggtttcggatcattacactttgtaaacttcaatagagttaggcagaaatgcctaaccattttctgatacttctgcgtaaagaagtgctttaaaattgtatcttgaggttatgatacttcttatcaggatttctcataatttattcaatgctgattttcacaggctcatacatagaattattaaatctggaaatgtacaactacaartgatcattgtgctattaatgtaaatcttataatttatagatgagaaggaggataaaggaggtgaaataacatgctttcctttatacagtgaattaggg

SEQ ID NO: 859177 - DNA, 621 bp, Homo sapiens
gagacatagaaggcaatctttgttgtttcttcctgctctataatccaataaatttgttaattcttagcctctkctagtaattaggaaaacaaatgaaactatgtcattcatatgatgaaaagtacaaaagaagacgattaggatgggaccttgacatcctggaattagagaataaaggtgtttatgaaagctatgttgggaatggtagcaggagaagactctttattcaaagagagagaggaagcagcacattggtttggtatctattagtttttgcacttagtgtaaatcacacttaggattcattctgtttaaacaccctatgtattgcagagtcataccacatcacacggcctgagacctttctcctatattattttgggacttatagaagtcttaaaggcaaggcagcagagaataaatggctcaggacttgaaggcagttttatgatatgctacctgaacagggcagcagttgagtttacttttttttttttttttttggagatggattttctctcttgttgcccaggctggagtacaatggcacaatcttggctcaccacaaacctctgccctctgggttcaagcaattctcctgcctcagcctcctgagtagct

SEQ ID NO: 859178 - DNA, 596 bp, Homo sapiens
atataaaaataatagtactttcttttaaaatttgaattttcaatgagataatgcaarcaaagtgaataccatagtgcacagcaaatgtaagaattcaatttgtattattggtatgttttgtggagtgttctgtctgtattcatgggaaagatccagtgaggtatgaagcatatttggcctggtgagaatgcataaatctggccaatgctcccttgaaagctcgtcattctggtctaatattttttaaatatttgccacttggtccaaggcccttcttatttcaccattgcttatctctagattgaaacccaaagtagcagcttttgaaggttttatttcaaaataacttttttgcagcttaatcttttgtggttggtgagatggatggggccttgactcaggaattatcaagttttctcttaacttagaatgttaattaacgtgacaaagaaacaaggttgatgcataagaaggaagaatgagtactataaggagactttaggaatattgcacatcaaatatatttctgtgtgattaataaattttttaatgtattatgtttaacacacatatattgaattgtcaagttcacttct

SEQ ID NO: 859179 - DNA, 623 bp, Homo sapiens
gaattcagttcatggtttgactctgaaacaaaattgataacagcccttttccaaaaagacccacttcttgcctggggtccaatctgcctttgcaggactaacaaattagcgacaagatttgaaatcacaatttaggagtcatgcagcctctggctccaagagtccgaacctccccaaattgctcctgggggtaacatcactaatgtaaaacctaagatcactgcttgagatgttttgctgaccctgaactggatgaatcagctgacaccactcagattgataatctggcccaatcagttctgccatcacacccaggaacagaagacattatgaaaacctaactttggccccctatgattcaatctccaacctgaccaatcagcactccccacttcccaagcccctatctaccaaattatgtttaaaaactctgatccccaaatggggaaactgatttgagcaataataaaactccggtctcgcgcacagccagctctgagtgaattactctttatccattgcaattcycgtgtcttcataaatcagttctgtctaggcagcaggcaaggaaaacccattgggcagttatagatcaatctcaatatggacatactttgacatga

SEQ ID NO: 859180 - DNA, 681 bp, Homo sapiens
cctttattcaagtctgctcctttcctgtctctatctttctatatcttatagcagacgaacagattttcatagagtgttttgagccctgaattctggactggctacataatttgtggtgcctggtacaaaagaaaactgtgaggccccttgttaaaaaattattaggaattcaagacaatgaaggcacagcattaaaccaagtgtgaagccttgctaagcacaggccctgggaagctgcatgggttgcacatttatgaagctattgctgcctgtaattcctgatacaatcccccaaattgatttcccaaagcacagctttttaaaaatgatgtttcagtatctaagaatcttatcaaaagaaacatttctggaatgaggttccagctaggtggagtctttgttactggtcagtaaattacatcctgcaagtcaaagcttaaccccaaagtactatagattatgaattgagatattgccttaatctcctggcagttaacatttctttagtcagtttatgttaatctttctatctgtagggttattattgaagcttaagaataatattctaagaatayatgatttgatcaaaaccacctggatgtttcaaaataacctccatgtggagaaaaagcactgacagtcccaagccctgcaacaggaaacagatgtggaggaagtaca

SEQ ID NO: 859181 - DNA, 544 bp, Homo sapiens
ataaaaaggacattttttatatgccacaaattttaatattatctaataatcagtcacatatgtaagtttgtctaattttttagtttgttttaatcagaatgcaaataagggctatagtttttatttggttgtgatgtgtcttcattctctttaagctaaaacgtaccccaccctccaccttcttctctctcattcacttatttgaagaaaccaggcttctgttctgtataatgccccacaacttggatgtggctcattgcttttttgcagtatggttacatttgttcctctgtccatttactcttgaaccttctccaattaggctttcacacccaaatatgccacagcaactgctttactgaagatcaccaattattccatattactaaatagaataatcaattttcagacttaaacttacttaaaatatcacagcatttgtttccaatgatcactctatcttcccagaaatgctttcatcatttagtatccagatcaccacmttctttagatttactcttaccttctttttcccaggctccag

SEQ ID NO: 859182 - DNA, 635 bp, Homo sapiens
atggaattaaacccttttagagcagaaataggagtctgagaattgagacatggagtttgtgtgtccccatggaggaaagcattaaaagaaatagagaatccattcaagtagcagatgctgctgggaatgtcatgatgggttggggtgaggcccagagaagttggggaggcaggccatcaggacaccaggctccaaacagtcatgggagtgctccaggtgttgagggcaaatgtcccaggtaaatgtcccaggggttggggggcagacagcacagacaaatgcctcaggagtagagggcagttggatgaggctagcgctactctaaaaaccggctctgatctaggaggtaggttgaaagaaccatcacttagccctttactgggtgggaaaatgcttaagtaaaatgaaaaggaacattattttcaccagaaaacagcttttcctttcttaactgtaataaagcctgtcatttgtttcatatcctttcctaatagaaacttcccctgaccttctctgtagcaggtcagtacacttggtctttgttctcaaaggcctgtgtgatttctctttgtaatawtattataattttaactgattaattgtacaactcttggtttatgtctatctacccactg

SEQ ID NO: 859183 - DNA, 554 bp, Homo sapiens
gtcattcttaggagttggggtttaaatatttaggggtgaaacttcaaatggctttgcatttgtttatttgtattacatatctagtgaatacaacaaaatgttcaatcgttgaatctaggtggtggatctgcagatgtttcaacctttcagttatgtttgacattttttaataataaagtaacagggaaaataaaagactcctctcgattcttaccttctctggaaggctttcctacccacctcctgttactgctttaaagtctgtgctgtccatcctttttctttccaaggtatagctctgtggcatatatcatactgtactttaatttcttgttttctggtctctctgtaaactttgaagtccttaaagggcaacatgctctctttcatctgtaactgtccagcatttattcctgtacctggcacaggattgggtgactcattcatcctcgttcagtcaagaacagaagaaagtctaatttaggaattttcttcagggctaccamttcaagtgactccaagaagagcaacggtttgaggtttttaatttttgt

SEQ ID NO: 859184 - DNA, 451 bp, Homo sapiens
ggtcagagaaccaatacaagaagtctaccagttgttgccgggcgcggtggctcatgcctgtaatcccarcactttgggaggctgaggcaggtggatcacgaggtcaggagatcgagaccaccctggctaatgcagtgaaaccccatctctactaaaaatacaaaaaattagccgggcgtagtggcgggcacctgtagtcccagctacttgggcagctgaggcaggagaacggcatgaacccgggagtcggagtttgcagtgagccgagattgcgccactgcactccagcctgggtgacagagcgagactccgtctcaaaaaaaaaaaaaaaaaaagagtatgttgttgagtatgtctactcatacacctactgaatatatctaaactgcaatgtatacccacctgtgcattctggaactggggaaataatgatgcgatgagttctgggaac

SEQ ID NO: 859185 - DNA, 611 bp, Homo sapiens
tataaagtaaaaaaagttaaagtaagctaaggttaatttattattaaagaacaagattgttttgtaaatttagtgtagtcttctaagtgtacagtgtttataaagtctacagtacagtagtacatggtaatgtcctaggccttcacattcactcaccactcactcactgactcacccagagcaacttctagtcctgtaagctctatccataactgctctatataggtatatatcttttatcttttatactgttattttatcttctatactgatatcttttaacttttatactgttatttttatgtactttttctttgtttagatatgcttagatacacaaattcttaccattgtgttataactgccttcattgtgttacaacagtattcagtatagtaacatgctatataggtttgtaccctaggagcaataggctataccctaagcctaggtgtatagtaggctataccatttaggcttgtgtcagtacactgaygttcgcacaaggatgaaattgcctgaggacacatttctcaaaatatatccccatcattagtaatgcatgactgtatattcaaaggaaataaaatcagtatgtcaatgagatacct

SEQ ID NO: 859186 - DNA, 540 bp, Homo sapiens
atttcctacactccatctccatgtcagtcccctgatcttttcaataataaacctgctttctacccgagttactttgaggggatgtgcacacgcgtacgttctggccggaatccaggtgtttttcccatccacacagtacacttttgttacctgttactccctggcccatcctagttctggctggggtcaagactacctcatgaactactggcacaccccctcatctggggtcactgaaaattccctgagcactcagctgtccctaattcagtggccttcatgcagggggtgtggaaagcctccctcacatgttgtggccacatgtgtctctatgtcctctgtgccatcactgagcctgtggccaggccgccttagaggtttcgatctcgtttgtttcagttctcttgtttgtttcccagtttgagtggtggtgttcagggaayggactcttccatataagtcacggattgcttaagcccaaaacagagacaagactgttggcatgtttatgagtttatgtatttttgttctctgatgaaa

SEQ ID NO: 859187 - DNA, 621 bp, Homo sapiens
ctttacagtacctttgctctgcctgccaaagaactgatatattcagttacactgaggcatggaaaatagttaaatgtttgcagatawttaacactatattcatacatgtttaccttttaaagttatttgataaaatttgagagctgataatagtcattcattgtaggaatttaaggcaacatggccaagaaaatgggaaagatactttcagttgaaggaacttgatctggcttttagagggactcaggtaatggtgatggtaaaaggggaacatttattgaatttacaatgagcagtctcagtaccaagcagttttcttggatttattatagttaatcttgatagggacacagggttggtattaccattatttccatttctcagatgaggaaactgaggcaaagtaagaaaggttagtaacttgcctgttatcgaaggccagaggtgggatcaaaatctgatctgtccgacactgggacccacagaggtgagcccaaatgttgtgaaagcttacaaaattgtctgggggaaggataggtccttgtcaagaaaaaaaaaaaaaaggcaaaaaacagtagatactggccaggcctgtgcaagggaggagtctgaggttccaac

SEQ ID NO: 859188 - DNA, 601 bp, Homo sapiens
tattaccattatttccatttctcagatgaggaaactgaggcaaagtaagaaaggttagtaacttgcctgttatcgaaggccagaggtgggatcaaaatctgatctgtccgacactgggacccacagaggtgagcccaaatgttgtgaaagcttacaaaattgtctgggggaaggataggtccttgtcaagaaaaaaaaaaaaaaggcaaaaaacagtagatactggccaggcctgtgcaagggaggagtctgaggttccaacttcaagctttgggtaccccaccttagagaatggatttttttttttttttttttgagacagagtctcgctctgttgccaggctggatggagtttagtggcaaattctccgctcactgcaacctccatctcccgggttcaagggattctcctgccttagcctctcaagtagctgggactacaagtacatgccaccatgcctggttaatttttgtatttttagtagagatgggttttcaccatgttgatcaggctgatctygttctcttgacctcgtgatccaccctcctcggcctcccaaagtgctgggattataggtgtgagccaccgcgcccggctgag

SEQ ID NO: 859189 - DNA, 533 bp, Homo sapiens
atgatttattaacctaagaaagactatctcagatcacttccctttttgtcttctcaaagtcattacaagtgaractctctcctttaagactgtcccattaatttctcaagtgactgacctgcagacgaaacttggaatcagcaaattgtatttacagattcctgtactgatctatctccctggaaatgccacatttatacagtgaactgcagcagaaaggccgagcgccactggaactgcccacagtgtggtgggaggaaggatcacagccctgtccaagcagagcctcctttcacattgggtaatttacaaggaaggctctagacatttacacttcaagggtcagcattctgtaagggtcaagggctccatgcacagttgttactggggcaaaataaaggccacatcttctctgggcctctttaggtgcactgactctgcatttcagtggcctttcttccatttccttctgtcattttggctttggatgtgtattgggcttctgtaattgaaaccaaaaacaacagcttaaa

SEQ ID NO: 859190 - DNA, 608 bp, Homo sapiens
ttcagccagaaattcaccctcccacttctgagtataatagcagtcagtccctaggagtgaaatgtgctccttttttgggtcaacagtagagcaakccagaattaacgcagcccttttagaagtcatcttgctaatgacatcaggaaaggttgaagcatttggcaagtaatcgtatattattgctttacattattatgtaacttttccttatgtgtttcttcttgcttttaaaaaaattagatcttaaggtcttcgataatagtgattttaaaaaatctatccttgagttcatgtcctttgtagggacatggatgaagctggaaaccatcattctcagcacactatcgcaaggacagaaaaccaaacaccgcatgttctcactcataggtgggaattgaacaatgagaacacttggacacagggtggggaacatcacacaccggggacttttgtggaatggggggaggggggagggagagcattaggagatatatctaatgtaaatgatgaataatgggtgcagcacaccacatggcacatatatacatatgtaacaaacctgcacgttgtgcgcatgtaccctagaacttaaagtatcattaaaaaac

SEQ ID NO: 859191 - DNA, 626 bp, Homo sapiens
gcaaaagaagtcacacataatactgaaataaataggtttgactgtgttccaataaaccttcatttacagaatcagagttagggcacaggccayagttcactgagccctgacttagagcagcaaatacgaggcagcaacgcttaaaaactatagcttccactcattagttaacgtatttctttagacattctagtttctttttgccatctgtgatggttagtgctacatgtcaacttggctaggccatggtacccagctatttagtctggagtcaggttcaccaggaggatatatattctctgaatcagtatccaacatatggtatggtttgtcccataaccaggattcacaggtcccagaatcaaggggtggaagtgggagtggcaccactcactgttatccctactgatccactagcaaaatttttgcttcctgttcctataactttatgttatattggcctagagggcctagtttcaaagggaggaatacttctagcaacagaagcaaaaatgattccattgaactgaaaattaaggtgccacctggctactttggtctcctcatgcctctgcatcagcaggcaaaaaagggagttattgttctagctggggtgactgatcctg

SEQ ID NO: 859192 - DNA, 623 bp, Homo sapiens
tgttatattgctttcttcttttacaagttaacctcaaataatgaaaaccagaaataaaaatgcaagccccacaccctatggatttaggagrcttctctaaccctgaaacacaatgtatgaacatggcaagaggattgtgcagggtggaataacttcatacctgggaggctccaggggtggctaccgtggagaagccagccagtcctccctgcagaacctcagcaaggcttagaaaccagaagcaccagctattaaggaaagtggagaccagggtgcagcaagatgatctccaagtctggtgagaaggaagacttccatctttctccccaaccccaaagcaagtagcccctatcattttcctactgcaacaagaagcaagaggtatattcttttggaaaactatacccaaataaaacaaggaaaccccaaacctacctatttatttatttacgtgtaagcttgttattaccaaatctcagtgacaatattaagagaatcataaaaagcatatccaagaaactccagactctgggctaccaagccagagagctgagtagaacctggcctctagtagataatcctggtcaggcacacagaagtcccaaatgtttttaaagaacctc

SEQ ID NO: 859193 - DNA, 371 bp, Homo sapiens
tacataaaaccaaatatgttcaaaattcccagtgtgagccatttgttagataaggtaacttgccatttgattgtggaagaaataggaatttcagtccctctgaaaaccatcatttggtgccagagctagccattctttgtccaaagttcaacatttcagtggtagaccttaaacaaagccatttgctgagaaaccttgatttcagctttgtagtgaccagattcaatagaatacatttatcaagctagttaaaaagcattctaaatccacttgttttctcatttytagacagagcaagaaggaaaaatttttaaaaaaagacaaaatcagaagtgtggggtcaagtatttttttcaactctttgcaaagct

SEQ ID NO: 859194 - DNA, 591 bp, Homo sapiens
tctcggtttgtgggtcctgcctccatcttcgaatcctctctcaacactttatgagaactccaataattgcattgggcccaccaggataactcaggttaatctctccatttcaagatccttaacctaatcacatccacaaagtcccttttgtcaagattacgtattcacaatttgggggggttaagatgtggacatctctgattatcttctattatctatctagatagatagataatctattatctatctattcccattatcctgtctatttcatcagccttcgttttctcttcttaaaaacagggtaatatagtatggcctctctcagagttaggataagaaataaataaaataattcatgtgaaatgctgagtacagagcctactcacaaagaggaagcacttaataaatgtttattattattgttatgacattcaatgaatgaatctcagggtctcttccrgctaataacccaggcattcatgcctctgcctcaccgggacaatgcaggaggcctggaagactgaaaaagaaggcgccttcccaccagctattcttcctcactcaaattcttggcaatcaccaaattag

SEQ ID NO: 859195 - DNA, 669 bp, Homo sapiens
gcctgcagaaccatgagccaaataaacctcttttttttttttgagacggagtttcactcttgttgcccaggctggagtgcaatggtgcgatcttggctcactgcaacctccgcctcctgggttcaagcgattcttctgtctcagcctcctgagtagctgggattacaggcacccaccaccacacccagctaattttttttttttgtatttttaatagagacagggtttcaccatgttggccaggctggtctcaaactcctgacctcaggcgatctacctgccgtcgcctcccaaagtgctggaattacaagcgtgagccaccgtgcccagcctcaacctcttttctttatcagttacccagcctctggcattcctttacagcaacataaagggactaaaacagtaatgatgtgtggcttattatgatcccttcaaggtgctatattatcacaatattttatggactaatttagattctaaactttgattttgtagcttggaagtttgcatggagaaattaagtttctaattctttgtgggatttgggatcaggtacaatggaacctacttcctgactaaggaaagagtgcttccagcatatcattgtgtcagaatgtgacaatgrctttcatacaacccagactgagcttcattaaagctgcttctgtt

SEQ ID NO: 859196 - DNA, 634 bp, Homo sapiens
cagagctgctttaatcatgtaaatcttgctctctgccttctttgtgcagtgtttgttgctytaccaacatgggatgcctttttctccttccttcttgcttgacaaattcctgcacatcacttcatatgtcaaatttctgaaaagatctccctgccctgtctcctctgagttgtctaattgtcactccaatctgctgccctcataccctgaacttactgtgataatgtcacttttcacgtttatttgagcatatcctgatgcagtgcataacacataatagccactcaataaaaccagttgaattaattcattcttccatcctccttcatcttctccatttttttcatgccttctctctctttttcttctcttttattcatttgttatattttaatcaagcatattatttaaaatgtataacctcgggtgttttccattaactagcttattatcactacattctctaattttgtgtcacaacattaaaaaatcttcagtgttgtgattttaactgttctatttgttcagtgacatgtgtacaactatttatcttaaaaaatagaactataaaatgctttacattttgtttgtttttagtggtacaagccaactattcttcaaactatatcagata

SEQ ID NO: 859197 - DNA, 643 bp, Homo sapiens
attcatctcctgtttatttatttctgactctgaaactgactaaaagggtgtcactaagccacttagtcagtgatttaacctgaagaygggaatagtatttaatgaatggaaaccttcagtggctctgcctgcagagggaggaccatcaacatggaatcctaggacaagaaggaaagaagatgggggtgggagtggaagtgtggatataactataagaatgtctcatatatttatatatatatatgtacatttatatatatatacacacacgcacatatacagtcatgctctgcaaaacaatgcctcagtcaatgatggactacatatatgagtggtcccatagattataatggagctcgtctgtataggtgaaccattttttatcttttatattgtattttaatgtactttttctatatctaaaaatgtttagttacacaaatacttacaattgcctacagtattcagtagaggaacatgctgtacaggtttgtagcttacaataagctatactatatactatacacctaggctgtaccatggtgcataccatggggcatacatatataaatcatggtgtataccatgtaggtataacccaggtgtgtagtagactatatcctctaagtgtatgtaagtatac

SEQ ID NO: 859198 - DNA, 622 bp, Homo sapiens
gggtctaaaactcagcgaaatgtgattcaggctggagatgtgggctccaccctgtgcggctctcttcccactgattgcgggtttgagtctctctttaaagaggagaagagactgtttaaagcttactcccatcttactagaatattctatagggcaggccctctcttcagagagtggaggtgtggccaatccacagaattgatttgaatgtttaactctaggctcattttcttgcactgagcggtagagatcagttcagaaagcagggaggaaaaagttgctggaattcacatctcattttcagcaaattcaccacaatgaatttcgtcttataaaaccatttcttaataaatgattctatttaggagaggatttcccaactaaattctttttgattgtatgaactcctcttaatatgcttaagactttaaaaatgttattttatatccacattgtaaaatccccacattatataaaatcaagtatacttgagcaaatgctgacctgtgtctacatagatgtataaatgattgtattgtggagtgagggttttaacagattttggttgtrccagtcctagtggaataaagttgatccttaaatatttattaatgaattatct

SEQ ID NO: 859199 - DNA, 472 bp, Homo sapiens
accaaaaaaaaagaataaagataaacaaatctaccagaatggtaaaaattagactgaactatagcaatgaggataaagggcaatggaactctaacatgccattggtgggaatgtaaaatggtacaaccacttggggaaaagtctggtcttacataattaaacttacatttattttgatataacaattccaatactagttatataccaagaaaaatgaaaacgtgtccacaaaaacacttttacaaaaatatttataccatctttagtcataaatagccaaaaacagtccagttgtccatcaatgggatcatggataaacagtaacatatttattcttaaatrgagtaaagctcagtaacaaaaacaaatgaacaagatgaccacttcatttttgctacgatacttgacccctgttattttataaatgacactgcttaaatatacctcatattagtatataaaaatatttata

SEQ ID NO: 859200 - DNA, 626 bp, Homo sapiens
ccaaaagggggaattaaggctccatttctattcagccacaatccattcccagaaatcaagaaatattcatgagctgcaagcattggatggcaatgtctctctgtcatcatcaggaatgacagattcctcagagaagaggcagagctcaggtttcccatcttctctaagcacgtcactcagtaggatttcaaatacagacaactcttgaatgaatgcagtcactacccacggaagcaaaggttggaggatgggaaaattcagcagaatgttgaagactatggagttggaatcctgactccaccactggtaagctgtgcgacattgtgcaaaccacatccccttctgagccagggacgatgggcttgctctaagaatgaaatgagatcatccctggctttttttgagtaagcactcagtaattggtagctctgtgaggtatggcatccctgaaataacaggtgcgtgctgtcgccaaactctcacaattcaggcccacaaactcaagcctttctcagtatcagcagacytactgccttgatgttctaacaacccctaatgagtatagtatgatcatcagttaaataaacaaacaattagtgagtgagcagaaggctcttcctcagcac

SEQ ID NO: 859201 - DNA, 597 bp, Homo sapiens; identical to SEQ ID NO: 856903

SEQ ID NO: 859202 - DNA, 605 bp, Homo sapiens
gggccccagctggcagaggggaggtgaactgccaggaagtgatccagcattgcctggtaacytgggaggaactatctctggcatctgcctgggatcctggtctccctggtttggtccagaggagtttaccccagtctctgtgctcccatggagctgagtgactagtgaggaatgggagcattgtccctttgcttctcttgcccatcagtcaatccacctcccgtgagtgcctcagttagtgtacctgtaaagtacaatggcctctcccacccttctcctggccatgtatctgcataatgctttattatgggccctctcctgggtcattctcaccttaccatagagacgaggcatgtttatttggttttatttgacgcaagatctgagactgcactgagtgtccaaccctacctcacatttctggggtcttccggctggaccagggacctaagggaggaggggcctcagtaaagctgtggatagtgtgtgtgaggggcaagtttctggcacctgctccagaaccccactgctgtgctgtctctctccttcgtgtaattgctagcactgagaatttaccaggtgtcaggggtctttctgagcccctg

SEQ ID NO: 859203 - DNA, 612 bp, Homo sapiens
caccataaaatgcccttgttggcagtgctttcatgtctagttacmtcatgagatcctggacaactttgatttgataagcaaatcaaagttttcttctgcttggtgacttttcaccccttttccatcaactgtgcccagagaggcagagacacaggtcgtaacccattccaattgtgagtgaggggcctttcacaaggagtctgtgggcttagcaacccacagaatagcagagacttctcttcagtgtagttagtccatcaacttctgatgagaaggtaggtcattgacaggctaagacttatgaactaggggcacagggaattctggaatattctagggagagagttggccttcagtacacaaggattcatgcactcatggaactatgtctttgtagaagaaagcaagcaattttaggataacatgatggaaacttaaactcttagggctggtaaagattctaggcatttgaggcattaaagaggagttacagaaagcagcttaaacttggtcacaaaggcccatgccctccactcttcttttctccacatctctttttctttttttccatcctctggaactttttaaatttatcttttcactgtagttctg

SEQ ID NO: 859204 - DNA, 612 bp, Homo sapiens
caccataaaatgcccttgttggcagtgctttcatgtctagttacctcatgagatcctggacaactttgatttgataagcaaatcaaagttttcttctgcttggtgacttttcaccccttttccatcmactgtgcccagagaggcagagacacaggtcgtaacccattccaattgtgagtgaggggcctttcacaaggagtctgtgggcttagcaacccacagaatagcagagacttctcttcagtgtagttagtccatcaacttctgatgagaaggtaggtcattgacaggctaagacttatgaactaggggcacagggaattctggaatattctagggagagagttggccttcagtacacaaggattcatgcactcatggaactatgtctttgtagaagaaagcaagcaattttaggataacatgatggaaacttaaactcttagggctggtaaagattctaggcatttgaggcattaaagaggagttacagaaagcagcttaaacttggtcacaaaggcccatgccctccactcttcttttctccacatctctttttctttttttccatcctctggaactttttaaatttatcttttcactgtagttctg

SEQ ID NO: 859205 - DNA, 636 bp, Homo sapiens
agtattaaaaaatcagactacaaaatgcagacagaaaagggtcattaaagttgttaaatgttcttgcattttctagttaaatagtaaaagttccattataagtttgattttaataagatttagtaagattttaatttaaacaagataaatgctaaaaatctctaagacagaaataataacaaaagcatgtataattaataagctattacaggttaaaatggtataaaatatgtatttgattaattcaagaggaagaaaaaaagaaacaaaaattttgtggcataaatagaaaataaatagtaaaatgtagtttttgactccccacgtcagcaatcgtattaaatatataatttaaactctaattaaatcacaaagattgtcatacaatattgaaacaaaacataaagcaaagaactaactatatgcaacatagaagaaatatctcaaatacaaagttaaagaaaagttatatatgcaaggatgagacctccacttgcagatagaatgtagaaagttgtagcaagtgatggatttgtcaaaaataattaagaagacagacaaaatgctgaaatattytgtatgataacatcagaaatttgtggaaacaaatactacagagactaaaacttactctct

SEQ ID NO: 859206 - DNA, 624 bp, Homo sapiens
tttgacactgaagtcacaagtatttgaagaaggaaataatgaataattaatacagaccacaaacttaataaatgtttactgaatacatgagtgaacgaattagggagagaaataaagggcaaaacataaataagtgaaagcactgctatttaacatttttatagctgctcacttctctctaccctactgtctttgctcaagctcaggtccgcatcatctcgctcctaaactactgcaatatctcctaactgatttattctcctttttccaacctgatccttccaaaagtaacttccaaacttcaattagacttggtcattctgagacagagatctaaacacattactcccctgctcaagactcttcagtggctctctacagcccaggctttttagcacagtcactcactgctatccccttacgtttaacctaaattccagtcatacagaactgcgtacagtcccagaatattccacgctgtttaacgtctccaagccttgcatatcttttcattttgctggaccactcactsttccttacctcactgattttgactacctattgaactcaacttaatcctcaagaacaaactcaaaacatcttctccattaagtctttaaggat

SEQ ID NO: 859207 - DNA, 585 bp, Homo sapiens
caggagactgaggtgggaggatcctgagcctgggaagttaaggctacagtgagctgtgattatgcgactgcactataccctaggtaatgagcaagaccctgtctccattaaaaatacaaattaactaggtgcagtggcacacacctgtagtcccagctactcaggaggcagaggcagggggatcactcaagtgatcctcccagggatttgaggctgcagcgagccatgattgtatccctacactccaccctgggcaagaccctgtctctaaaaaaaaagaagaagaaatttatttacttatttatttacttattgagatagggtctcactctgtctcccaggctggagtgcagtggtgcagtctcggctgaccgcaacctccgcctcccaggttcaagcgattctcctgccttggccccccaagtagctgaaattacagaaggaaagaaattttgacccagagagagaaagtagtttacccaagatcrctcaaccaaaaaatatctgactttaggttagaactcagaatttatattcaatatcactattgttgatattgagtataaatatcactttatatctaag

SEQ ID NO: 859208 - DNA, 546 bp, Homo sapiens
ttctagttttcatcctgggatatttgcttgttcaccacaggcctcaatgagctacaaaatggccctctgcagattctacaaaaacagtgtttccaagctgttgaatacaaagaaaggtttaacttggtgagatgaatccaaacatcacaaagcagtttcacacataatttctttctggtttttatctggggatatttagtttctcaccataggcctcgatgaacttcaaaaatcctttcaatgattctataaaaaaactgtttccaatctgccacatcaaaagaaaggtttaactcagagagatgaatccacacatcacaaagctgtttcacagatgccttctctctagtatttatctgcggctattcactttttctccattaacctcaatgagaaaaaatgtcccttcgtggtttctacaaaaacaagtttccaaaytgctgagtaaaaaggaaggtttatgtctgtgagatgaatccacacatcaaaaagcagtttcacagatagcttctttctagtttttatctggggatttttggttcatca

SEQ ID NO: 859209 - DNA, 590 bp, Homo sapiens
cattgagaagaaaatttagaaagctgttggccagtatttatatactatttatcattaatagattaaaatagagttattatgtatcttttcacctcaggagstataattctgtttggaaaagtaggtgactaatggtgaaaagatgattccttggttagcactaatatttctcctctgataatcacttttggtctaaaccctaaccctgaatgagtttgtgaacattctgtgatggctgggagtctactttatttgagaggcatactacatgtaggtgtcatataacatttttcaattgaatgaataaataaaagattacacttacaatacacatttccacaatattgaccattattttagaagtaagtggcttctaatctctgaaataagtgtctacaaaaaatagattaaattaaggatatggaaaagcacattgtatatttggtgaatatcgaaactgtctggagcagtataaaagtggacaattgtaagggatggatttggggaggtagcctggatccaggtcatctagggtcttgtaggccaaggtagaaagattccatttcattgagtgcagaatataaatccac

SEQ ID NO: 859210 - DNA, 590 bp, Homo sapiens
cattgagaagaaaatttagaaagctgttggccagtatttatatactatttatcattaatagattaaaatagagttattatgtatcttttcacctcaggaggtataattctgtttggaaaagtaggtgactaatggtgaaaagatgattccttggttagcactaatatttctcctctgataatcacttttggtctaaaccctaaccctgaatgagtttgtgaacattctgtgatggctgggagtctactttatttgagaggcatactacatgtaggtgtcatataacatttttcaattgaatgaataaataaaagattacacttacaatacacatttccacaatattgaccattattttagaagtaagtggcttctaatctctgaaataagtgtctacaaaaaatagattaaattaaggatatggaaaagcacattgtatatttggtgaatatcgaaactgtctggagcagtataaawgtggacaattgtaagggatggatttggggaggtagcctggatccaggtcatctagggtcttgtaggccaaggtagaaagattccatttcattgagtgcagaatataaatccac

SEQ ID NO: 859211 - DNA, 695 bp, Homo sapiens
tggggatccttggagaaatggcttagtctaggaccacggctggcaatgtacaagatgaacctggagcatcttgtagtgccagaaagtaaggaattgcaaaacaaaaacaaaaacaaaaaaacaaccaacccactactgctacattatgggtagtatgtcaaagaaatccaagagccagctgaaaacactcccaatggccaaggctaggagtaactttacagtggagaaacctgacaagcatgacttttggccactgatcaaggtccgtatcaacagtgataatcacatttattatatgtacccctggtctgatgtgatgaaaatggcactctacttctgtgatcttccttccaaaaacccataaccaaaatccaatcatgagaaaaacatcagacaagttccagtagaggggtatgtgcaaaatacctgaccagggctcctccaaactgtcaaggctgtcaaaaacaagggacatctgggaaactgtcaaagccaagaggagcctaaggagacatgatgactaaacttaatacaagatcctggatgggtcctggaaatatatatatatatatatatatayacacacacacacacacacacacatacacacacacacacacacacatatcattatatacatatatttatctatctatatacagttagataaaaactttaaaaaatctgaataaact

SEQ ID NO: 859212 - DNA, 536 bp, Homo sapiens
cgctatccttggctggactttcttccactatctctctctgctccgtggatgcagggtgtcccagggttgtgtccttgccctgctccctgctctgtgcacaggcgctgcctgagaaccctcayccaatcccatggcttcaactgctcacagtgccctgagctgcctgttcccctccgctgacctcatgtatagcccattgcttcatgaacacgttcgttagaacgttccacagaacctgggactcctcatgtgccaactccgccttatcaagtaagtttgcctttctttccccatccccaaccttgatgagtaaaggacttcaccctccatcctcggcccttcctgggctcctccttctcattcatctccatatctggtctattattaaatcctgtccttaataatcattgcctccgaggactcagtgcctatagtgtgctggatttttatgtacattatctcatctaatttgcacaacaggactgcaagagaggtattattagcccactattatcagtgaagactgaaatttgtat

SEQ ID NO: 859213 - DNA, 591 bp, Homo sapiens
ctgggtgatgagagagggactctccaggctagggcatagatgccctgggtccccctatcccagcctcttacatctctcagtgaagccatgtccgctgcccatgacagggagtctggctgtaaccatcttttggaagctggatgccgggctagtggcagtggttggagcaatgctacctcctagtggtctgatctgcaagtgcagtcaatggatgtgccagagatctcagagctgccctctgggacccccaccccacctctcctggggtcacagactgccttttggtcagcctgtcttagtcttgtctgtagccacctgtcagcctgcctccagctgtttttacctcagcatgtcccttccgttctggctcatgttagccgtcgctctgtggcatatctctcttactctgtctgccctgctggcttgggctgtccgttcctccatgtctcattccatcagttttcacctcaccctctgctgggccctggctctctattctgcttctcacttgttttggacttctccctgccccctataccctgtccctgtgtcccygagctggggtcatgcctggggtcatgtctgccctct

SEQ ID NO: 859214 - DNA, 584 bp, Homo sapiens
cccccaggtcaacctgctgcctttctcatctctggcaggactccggggaacctgtgcttatttctgggctggtgagggtcaccaacaccaccctgatcccaggcccggtgacgtctgtccggggcagcctctggaagccgagtggatttggttggacgcccgagtctttcctgggccctgggacagggttgaggtttccgtgcccgcctgctcttgctctcagccatgggacctgtcctgccctggcctgcatccagctctgagcctcctcagcagccaggagaggccctcggctcagggctcctcacagctggcttttggaggtgccagcgaggatgctgccgttcctggccctgctacttgtcggctgggtgaccttgggcaagtgctgagcctcagtgttgtcatctgttcgatgggagagacacgcctgccttgatggtagtggggaaggttagatacttgtaaaatcccatttggttctgggcaggtgcggagcaggtgccctyggccagtgccagctcccattgaggcagtgggcagtgccagggctggctgggcgttggggtccgacccaaggggct

SEQ ID NO: 859215 - DNA, 605 bp, Homo sapiens
cgccagccgggactcacccgcagctccatgcttgtgcccggttcgactcgtccatmctccaagaagaggcaggtacgtgccacctgtcggggatccgggaggggggattcggggatcagtgccggtttggagctcagaaagtaaggtgtccacgacattctgggcagagtggacactagaaatatagggagagagccggctgtgcagggacgctccagctgtgtctgccagttgtgtgagggctgcctgctgacagcccagggtgccaggaagagccaactgtgtgctgatcagtgtattctaaggaaatgctgctttggcgggtcctcctcgctgtgccccgtgtatatcggtggtatgtggcctgagcgacactgacaaaccccctccccacgtgtgcgtgcagctcactcgctgctcttaaagctccccggtcagtttgctaaagggggttaggggcgggggttgggcaacaattaagcggaaggggagattttccaccaatcccaaaccagaaagaggcagctttgaaattctcaccagtcccaaaccagaagcaggcacgcggtgctccggagagagcaacttctcaacagtcaagggaa

SEQ ID NO: 859216 - DNA, 626 bp, Homo sapiens
agcatgggtaccttgaggagtgggccaagctgcagccagggtaggaggctagggacttgctcataaccaggccagggacccaaggccccragctggggtagatgctggtgccaggggacatgcaggggcttggcacagtgggtgaaatggaggcttcctggaccatctctcggcctatcagtattgttctggggctcgagttgcacctggcttcactttcattcacctgcagtggaaaatccagagggctgctcctgccagagtctgtacaccgcatgctgttactggatgacggacacctggatcctgtggtggtccttccctcaaaccccacccacaggtcccagtcctgacccgtcccatggagagccagggaagagtgaagcaggggtctgggcttcaggccagatatagcagacagagcacgagtccagcccagctctgccactgctcccagtgtgactttgggaaatccacatcactcccagcatcgccaacttcctcatctgcaaatggacgtgataacagcacctaccgcttaaaggagcagggaggattcagtgagttaatgcactgtgtcccaagccttagtgcagttttaagctttaataacttcagaaatatga

SEQ ID NO: 859217 - DNA, 680 bp, Homo sapiens
tctttaaaatatatttaattatattaaattgtttacagaaggtgtcacatatttctttttcttatttagaacatactaaacaacttgtatcatttattattaactattactaatatgaaatactttataatacaataatatttacacatttaggacctactgaattggatagggttctttgttctacctaagtgatttccaggtaactattaattttgagtttcagttacttattatctattcaccactataatgaactacccctaaacttactggcttttaaaacagtgacagttttatttgctcatgattctgtgagtcagtaatttggtcagggcttagctggacagctcttctgctggtatctcttgggattagtcatgcagctatagttgtttgggaccttgactggggctgcctggtcttaacatggtgtcacctgttaagttggtcatcggcttctctgtcattgttgcctctcatcctcaagttggctagttcatatttatgtaatgccctcaaggttccaagagaggaaagtggggcactggacttggaagttacacagagctacttttgccatattctgttggtcaaagtgagtgataagggctaacccaggaaggatggggaacttacctctctatctctgtctytaggagtggaacagcaagtcaaat

SEQ ID NO: 859218 - DNA, 343 bp, Homo sapiens
gactgggccatttacaaaagaaagaggtttattggactcacagttgcatatggctggggaggcctcacaatcatgttggaaggtgaaaggcacatctcacatggcagcagacaagacaagagagcttgtataaggaaactctccttttaataccatcagatcttgtgagactaattcactatcacaagaatagtacaagaaagatctacccccattattcarttacctctgactagctccctacaacaacatgtgggaatttaagatgagatttgtgtggggacacagctaaatcacatcagggccctgggggtatacattttccaatagtttttctaggaag

SEQ ID NO: 859219 - DNA, 679 bp, Homo sapiens
atgttgttgctaaaaacatgatttcattcttttttatggctgagtagtattccatggtgtgtgtatatcatatrtatttatgtcacatgtatatatcactatatttcatatatatacatatacatatacacaccacattttctttatccagtcctctgttgatagctacttaagttgattccttatctttgctactgtaaatagtgctgtgataaacaaggtgcaggtatcttttttatataatgatttatttctctttgggtatatacccagaggttaaattgccggatcaaatggtagttatattttctgttatttgaaaaatctccattctgttttccataaatgtttcactaatttgcattcccaccagtagtgtataagtgttcccttttctccacatcgttgccaacatcttttgtttttagactttttaatgatagcaattctgactagtataagatggtatctcattgtggtctctgatgattagtgatgctaaggatttgtcaatatgttttttggcagcttatatgtcttcttttgaaaaaatgttcacatcttttgcttactttttaatagagttttttgtttatctcttgttgatttgtttgagatcctcgtaaattctagatattagccctttgtcagatgcatagtttggaagtttcttcccatt

SEQ ID NO: 859220 - DNA, 536 bp, Homo sapiens
gcttccagaagaaaatatggtaatagacaagctatgaaaagcaataaccataagagaaaaagctgatcaattagacttcatcaaaatgtactacttctcatcaaaaaaacacctttaaaaaatgaagtagggagacagggagaaaacagtcacaaaacatccatttggcaaatggacttatattctggatatgaaaggagcccctattactcaatgataaaaagacaatccaatttttttaaatgggcaaaagatttgaaaagatacttcacaaaagaagatatacagatgaccaagaagcacaagaaaatatgctcaacatcctcagacatcaggtaaatgctaattaaaattacaatgagataccactacacacactccagaatggataaaattaagaagcatgataacaccaaacattgttggggatgtggagcacctaaaacttccatgatgagaatgaaaamtgatacatcactgtggagaaaaagtcttacaggctcttagaaaactaaacataaaccaaccctaacctg

SEQ ID NO: 859221 - DNA, 636 bp, Homo sapiens
cagcaacttctccatatcattgccaatacttgttattgttyatctttttagtatagccatcttgtgggtatgaagtagtttctctcattgtggctttgatttgcatttccttaatgactaatgttgaacatcttttcatgtgcttattgacaccatttgtatatcttcatagtagaaatgtctattgatatcctttgcctatttttaaaatagccatagttgtatttttcttattgagttgtaagacttctttctatattctagatactagactctggatacagatatgatttgcaaatattttcttctgtgagttttcttttcactttcttttttttaacatcaattaaattacatttatttaaatatcctcatcaaaacacatcttatgaagcatcttttctgtgacaccctgatctatgccagatccactctatgctgctgttttctgacatcagtttctgccagtgccctccagtgaggagcccccaactgggcattctgagggtgcatgtgtctccctcgaggcttcctgaagcaggggcacgacacctcctccatgtaccagggggtgaaggtctgcagggtcaggggttggggggaacccctgtattgttgctgctccctgctgctgtc

SEQ ID NO: 859222 - DNA, 552 bp, Homo sapiens
ggtacacattggttcagtccagaagggtgggacatctttatggggggtggcagggagggcttacaggtcataggtgaatttaaagattttctgattgacaattggttgaaagagttgaggttttcctaaagagttgaagtagacagaaagaaatgcttaagataaggggggttgggcagagtgcagtagctcacgcctgtaatcccagcactttgtggggctggggcagggtcgcaggtggggatcacttaaggtcaggagttcgagactagcctggccaacatggtgaaacctcgtctctactaaaaatacaaaaatcagctgggtttggtggtgtgtgcccctaatcctagctacttgggagactgaggcacgagaatcacttgaacccacgaggctgaggttgcagtgagccaaaattgcaccactgcactccaacctgggtgacagagcgagacttcatctcraaataaaaataaaaataagggtattggaagccaataacaagttcttgttatgtttttatcatatagatgaagtcccaagttggag

SEQ ID NO: 859223 - DNA, 332 bp, Homo sapiens
atactgcatttgttcagttaaccaatatgactgcctgctatatgccaaacagcatgctagtccctgtgtgcacagagatgaacatggtttcattctcattgaattgacaatcttaaggagagwgacataaacaagtaaattattggtttgttaagatttaaaatattctaaaatattaagagggaatgcatctttcctccatgtgaaggaagctccagtagcataacactgtcgtcactcttcatccccttatccactctgccctaggtaaagtgacttgcccaattgtaaatctggaaggagaaacaaggtgcaattagcccacttcctcc

SEQ ID NO: 859224 - DNA, 573 bp, Homo sapiens
agaaaaggagggggccattccaggtagagggaacccggaagcaaggcagaggccagatgtagaagcatattcaggragttgaggcaggtgtgtgaggggcagctgggggtggtgcctcatctggagggtctggaatggctggcaaagccaggcaacatttttctgcgggctggaggagacttttgcatggagcagtgaggtaccagccctgagtttcaactcccttggggtgtgagggttaagaaggggtgggggcagtgggtacttggctcaggctatgctgggatctcagccagagatgtggctatgcagaggcgaaggagatgaattctggaaccatttgggggttgagaaaagggagaagtcagagtgatgaattaagataagaagcactcatatttcacacctttacttatttacaaatatgtatggaaagcctactaaccagggtctgtaagagaaagaggatgattccttgagcagtgtccagcagacctggggacatggtggggtggtgctctgatgcagagacaccgtgacacagactctcaagcagaaatcctttcccagaga

SEQ ID NO: 859225 - DNA, 648 bp, Homo sapiens
actctcagacttaggagctgtggctgggactcaacaaagggcagctgtgaaattctgagaagagccaaggggaaaggagccgagaactgggtcttcccaactctrcctccaattctaggaaacgggaagaatcataaagtgaagtgtgatgaggccttcagatttgccagacttgtatggaatctccaggcttcctcctctcacatcctcctgcaccgcgcccccccccggcaccaaccaaagggggaaaaaaaaaaaaaaccttcttgatttttccatgtgtgtagtcagggtagctgagaaacagcagattcttacgttcctggaaagttgggtgcttggtcccttgcagtcctttgaaagatatggttcagggtcttcctaagagaaagacagtagcctcaactcaaagaaggaggcttcctgaaggatgggtaccttgctcataattcctatcatggatatagaattttaataaataatcctgcttactaataagaacaaaggagccacttgtcttccccagcccatcagtctaagagcaggagaccctggcatgggagagaggagggcggtgaggtgggaaagaggaaaggtagacagagctagcatccagtgattcagagctattccaaattccactttctg

SEQ ID NO: 859226 - DNA, 646 bp, Homo sapiens
ctatctgtagatgatttatcatgcaggtcctcactggccgcactgctcaggttcccccaaggtccagcagcacattcaccctcttttccattccagcaagcccatrgcgcaggaccgtcagcctaaaccagatggatagggacgtatgtgggaggcagagagacctttcccgtagaaggcatgtttttagtgagctatcctgtgggcttatgctggggaatctctcctccctcttctgcagtcccactgaccaaactgaactggggtgcatgtgtggggctccgaggatagagatgggatgggtgtgtcatcccatctctactgactgctttgcctcctttaaagccaaccagggacagctttcctttactcctcatatttttgaaattcagtttgggctgcaggggagtttaaaaaaaaataaaaatggagcagggcaccaaacaccctatgaaacaactcagcgaggcagtttctccagcgaacctgcgtcttctatcttctgtgacaaaaagatttatagcaattttttattaaaaaagagagagagaaagagagctgcagataatcagatctgaggctcagaaatgggagcgtgggggtgttatgcatgtaagttattttaaaatatatgttaggttcgtga

SEQ ID NO: 859227 - DNA, 631 bp, Homo sapiens
tgtttctcagacaggctggctgagaatcacagcctttgaatctcggagcccctggcactctgtgggtcayggagcagccctgccaggggaggcatctcacagatggggagtggagaagcccaaattttagcctgccctggctggttcacagggagcaagggccacagtgctatcttcagacttctaaactcagccagtttggcccacccacactggcaatgctgcccgaaaggagacagaggaagaaagtccacgctgatgttctcagatgttctcccgggataactacttccttgtgtgcaatctcagcaaatggacaggtctgtgaggagtctccttgggtctcctgactcctcaggatgctgccatgtgctggatcaccattatcctgcttccgggaaagtctcttaacctccacaggccttacttagtttcctcacctatcaattaaagagggcaattcctgtcaaccttcctccaggctctgggacggccagtgtcttcaggttggggagatgccttaggaaagctctttgcatggaggcctgcaatctttattgcttattatatattatttatttagtcttaatttacaattgcttgatttccagaggatcttagtgccatgggg

SEQ ID NO: 859228 - DNA, 535 bp, Homo sapiens
aaaaagctctcaaattaatgattataacttccattttaagacactagaataagaagataaatgaaccacaatgtaagcagatgaagagaaataataaagattgatgccaaaatcagtaaaaaacataaattctgatatttaagcacaatgaatctgaagaaagacaaataaaaatgaatccatcatagctatttcccagtgaagcttcagaatgtaatagaaaagagataaattccaattgctaccagaaagaaatttcctaaagaaatgataattagatcgatgatatatatttttacaagcaacaatatatatcagaagacaaaggactaacttcttcaacgtagcatggaaataactgttggaagagatttcaacaggcaaccaacttcaaactgaattcaaaaccaaagtgccaaataaaaacgttttcagaaatataaaaactggaagtgkcaacaacttacaaatccttaatgaaataactgtataagagatatgcttccacaagaaggaaattaagcccaagaggaag

SEQ ID NO: 859229 - DNA, 607 bp, Homo sapiens
agcctgtaaagttgagctgcagacatagacaagctggcagcttgcatgggtgaatgccagcagaaactaaggactagacattttcaagatggtggcttcatcttcccttctctgccagccacgtgttacacaagatggacccaatcaactggaaagcccatttgcataagattagggtggggcgaccagccttccacatgcactttgcaaacgtcatacatgatgcaaccaatcagaaaccacctcctcaaaccggactataaaatttggcgcattcaccaccaaccagtcttttccactcggagacacatcatgggccatgccttaaagccacggtgtcagtgcagacatctatagaggaagctgtttctctttcccttctcttctacctattaaacctctgctcctaaactcctcgtgtgtctgtgtcctgaattctcctataacaatgaaccccagggtatgtactccagacaatgtacccacttcaaaagggctgaaagttcttttaamaatagaggaaaggggggaaaaagtgtacttagcacctagttttgcaccacagaaggaaactggcactcacagatcctgctgaagttactggaaa

SEQ ID NO: 859230 - DNA, 580 bp, Homo sapiens
ctctaccttcaagtaagcaccagtgtgtgttgttcccttctttgtgtccatgtgttctcatcatttagtatctacttataagtaagaacatgtgatgttyggttttctgttcctgtgttagtttgctaaggatgatggcttccagttccatccatgttgctgcaaaggagatgatctcattcttttttatggctacgtagtattccatggtgtatatgttccacattttcttcagtcagtctaccattgatgggcatttaggttgattccatgtctttgctattgtgagtagtcatcaatgaacatatgtgcacatgtgtctttatgctagaaccatttatattcctttgtgtatatacccagtaatgggattgctgggtcgaatggtagttctgtttttagctctttgaggaattgccacactactttccacaatggttgaactaagctatactctcactagaagtgtataagcatttccttttctccacaacctcaccagcatttgttaatttttggctttttaatcatagccattctgactggtgtgagatggtatctcattgtggttttgatttgc

SEQ ID NO: 859231 - DNA, 599 bp, Homo sapiens
tagagtaagttgggaaatgttctctcctcttctaatttttggaagagtttgtgaagaatttggtattaaatcttctctaagtgtttggtagaatttatactttttattgctgrgctgtactccattatatgaatataccacaatttattcatccattcacctgttgatagatatttgggttgtttccagttttagaataaagctgctatgaacattagtgtacaaatctttgtatggatgtatgttttcattttcttgggtaaatatttacagtataattgctgggtcatttggtagatgcatggtaactttatgagaaagttccagaccaattttcaaagtggttgtgtcactcctaccagcaacgtatgagacttttgcttacattctacaatcttaccacttaagctgttgccaccgtttgattttagccattctaatgggcatgtagtgatatctcaatgtcattttcatttacattttgctgaataataatattaaaacacattttcatgtgcttattggccattggtatatcttcctttattcagtgccggttcttattttttgcccattttttaaaaattagattttaattg

SEQ ID NO: 859232 - DNA, 565 bp, Homo sapiens
gcgcagcgaagctgagtgccgggatcggcctggaaagggccttcagcgttgcccacgcggagagggagagtagaggaggcactgagcagctgaggagtmcacaggaagcaaggagagggagtggccccaaaactccctttaaagggggtgggcggactgcaagtcatggagtcaggccgggcagcgaggggaggtgtgtgtggtgccaggtgggtctgggagctggttttccaccaagggagtggactgggcagaactctggttggagccgtctcaaaggcttagtgcactctgcatctccacctcttgaaatcctactctgcgtcttccttgagggatcaaagctctgctgttggcctccctgagaagtccatagccacgactgcaagtgtcacttcaaaatgtgaaaggaaaataaaatcctgggaccccgaactcactatgccaaagggaaaagttaagctggatgcaaaaagctgactttccttttattcctatacagattgctgcaagatagaaggccacgtgtctccccaggaggcctccttcaccctaacaatgtaag

SEQ ID NO: 859233 - DNA, 565 bp, Homo sapiens
gcgcagcgaagctgagtgccgggatcggcctggaaagggccttcagcgttgcccacgcggagagggagagtagaggaggcactgagcagctgaggagtccacaggargcaaggagagggagtggccccaaaactccctttaaagggggtgggcggactgcaagtcatggagtcaggccgggcagcgaggggaggtgtgtgtggtgccaggtgggtctgggagctggttttccaccaagggagtggactgggcagaactctggttggagccgtctcaaaggcttagtgcactctgcatctccacctcttgaaatcctactctgcgtcttccttgagggatcaaagctctgctgttggcctccctgagaagtccatagccacgactgcaagtgtcacttcaaaatgtgaaaggaaaataaaatcctgggaccccgaactcactatgccaaagggaaaagttaagctggatgcaaaaagctgactttccttttattcctatacagattgctgcaagatagaaggccacgtgtctccccaggaggcctccttcaccctaacaatgtaag

SEQ ID NO: 859234 - DNA, 622 bp, Homo sapiens
cccaagacgattccaagtaataaaaagcaaacattatttcacaatgtgtctgtgtgtatttctaaagtctgctggaatgatatctgtgtctcccgtgctcatttgcaatgtgaacttgctgctttctcatggagaggtggagtctatctctccaccccctagaatgtggcagggggtcacattccagggtgatgctgggccagtgccaggcggggcccttcactggcctgaagcccggtgccaggagaaaggagtgcaaatatcctgagaaggctctgcagcgagaagcccaaggcctgtggggaagccgcagaggataagctgccttgaagggaggcaggctgaggagcccagggtgccgaaaagtgagggaagaaaccatctcacaaatagatcctggcaccctcaccctcgctggtgccatgtgcatcgagaccaactgccccgctcagacttcccaaattcttgacccacaaaaatgtgcacawataaagtggtttttaaaaaaataataaaatctcattttattaataaaattaataagttgattaacctagttatagggcaattttttatgcagcaaagcacataacaaccgcctggtttctataaggaaaaaagt

SEQ ID NO: 859235 - DNA, 524 bp, Homo sapiens
tgctcctactcaacagccctagcccctgttcctgccgaggttctggtgggagaggggacattaagattgctgcttgtaaggccaggcgggtggctcatgtytgcaatcccagcacttgggaggctgaggtgggcggatcacctgaggtcaggagttcgagaccagcctggccaacatggtgaaaccctgtctctactaaaaataagaaaaattagctgggcgtggtggcgcacacctgtaatcccagctactcagggggctgaggcaggataattgcttgaatctgggaggcagaggttgcagtgagctgagatcacaccactgtactccagcctgggccacagagcaagactctgtctcaaaaaaaaaaaaaaaaaattgctgcttgtaactgcgggctcgagagaacatttgtgacccatgaagcctgcggttggaggggcctggcgttagggagaggacactggaaatgttaatgcagctaatccagtgagattagcctgctgagctcagggatttgaggg

SEQ ID NO: 859236 - DNA, 563 bp, Homo sapiens
tttcagacaggcaagaatataaatcttgtgattaaaacaacaataataacagcaaacttttgtggggaaccattaattcctaagacaggagatctcagacagatgtagtaataagaacatttgccacggagagagaagacattaatatagagtgagaggctctgctgtgttacctgcaaacttctatttttggggtattgtagttgataacccaaggctccttccaatctaacattctctagagatagaatgggcatgatgacagtgatttctggtggggctttccagacaggtttggaagtacagtggttcacattttgatgaggaggcaagtcgggggagtaaagtggaaggagctcaggcttaggaattcaagggacatggatttacatcctgaccctgccacttactagcagtgtgatcttgggaaggttacttgatctatcttycctgaagtttgctatctgtagaaagaggataacagttctaacctcctaaggttgttttgaggattaaaagagatattatagctatttaaagtgcttgtttaacacaatatctga

SEQ ID NO: 859237 - DNA, 537 bp, Homo sapiens
tcccagtttactgcaatatcctcgctccctattaattacacccagtgattaagcccacaatgccttttaaaytttcccagcaagccttgtacaacaatccaaatcaggccaaaagtaggaggagagctattttcttcctgcctgctttccctctgagcatacaaatttggaggccccataacaactgctcccctcttcatgctggcagagcctaattatttctcaacttatccctaaacaaagaatagatcaccaaaatacttcagatgaaacgtagagcagacaggtcctgggctgggaatccaggagactgatgcaacaaatgcaacaaagagcattaagagactagcaatgtccatgaagaagggaacctaataagtaagctgccacagctcaagtcctcctggccaaagccaggtcatgtccctctataaccagccagtgagaagggaatgaggtccctaaacgggttcgggggattcatgattctctctggggactggagagagagcctggaggtctcactttcttgagcac

SEQ ID NO: 859238 - DNA, 645 bp, Homo sapiens
ttgtcctttctgagggcttaggatcctgacctgtctctatttagtatcctgttttcttgtttcctcatgttaggcaattggattttatgaaagctatacatctcttcccagattaatgcacatccagatgaggtgcatatagcttggtccatgatttttttggaacttttggggacacactcatgaatccaagtcaaagaccatgccttttgtaattgcttgtttaattatccgtagctgccaccaagctctcctctccttgagggcggggaataggttttcctcaacttctatccatttctcaacccactacaattaggttgtcatctcaaaactacccttcagaagtgggtagaagtgctctccaggccgccaactgcccgagccattcccaattcctgtagttggtcattattactcactcttttcttctctccttttcttggctctcacgacaccattctgcctttattctgctagctcttggatgctttcttcttcgtttcttccctggcttctctttgtcttctctacccctgaatgctcatcttcctaaggrctctagtcccactccccctttcctcacattctacatcccctttctgaggaagtgcatctcagttcttggtttccatcactatgtgt

SEQ ID NO: 859239 - DNA, 637 bp, Homo sapiens
gcagaatagaatcagtgcaggggtcaaatgcagagttagagatgcaggcaaaacctgccattgtgtatgtgtgttttaaaaataattccagatgggaagctaaaacgataaatattgttttctgaaaattagttkaaaaacccattttcttctgcccccaagctggtcccaggcaaaactgcagttgtacatttccagagacatgctgaagttaggaccaaggccatgtggtgtagtgggggtgggaagtgtaggtcagggtgggaggcgggttcctggcacaggtgtttccaatctgtatcctctcatgcacatcacctgtgggagaggagctatgcgggaaagcccaacatgagaatgcacaaaagaattgcctggcttggccaatacagacaacattgcctcttactaagctccttgaatgccttgcctctttctccttggtttgcacaggaaggcgggctccgggcaggatgaatagctgaggcaggccagactcttgtgcaactactgcctcctaaaatggcgcccaccagctgtgaagccccatcaaccttgaacatttggtgggaggtgatggtgagagatgtctgcctccctgccaatgccaggatccttcttatagatgggagatgaa

SEQ ID NO: 859240 - DNA, 519 bp, Homo sapiens
tctgtctttgaataggagatgcccaaacttgtttacattcacccagtatttctcagatcmgtccagaaatttagataccatcttaatttttctttttttttttaatcacatgctgtatctaatctttaactcatttgactctaccttcaaaatgtatctgcctttgaattacttctctccccctattgccaatcatctaagccaccattagttttcacctggattattgcaataactccctaatggtctctccacttctgcattgttcccctgcagcctgttctcctctgctgctagagtggtctgtttaaaaacataaatcagatcagtgctcaaaacccttcagtgtctttccacacttgctgaaaagccaaatttattgtggcctataaagttccacactgtctgacctctggttacatctctgatcccagtcgcttaccatatttctctttgtttactcaactttagtcttgccagtctttttgctgtcctacatgcccagtgtattctcatcta

SEQ ID NO: 859241 - DNA, 519 bp, Homo sapiens
tctgtctttgaataggagatgcccaaacttgtttacattcacccagtatttctcagatccgtccagaaatttagataccatcttaatttttctttttttttttaatcacatgctgtatctaatctttaactcatttgactctaccttcaaaatgtatctgcctttgaattacttctctccccctattgccaatcatctaagccaccattagttttcacctggattattgcaataactccctaatggtctctccacttctgcattgttcccctgcagcctgttctcctctgctgctagagtggtctgtttaaaaacataaatcagatcagtgctcaaaacccttcagtgtctttccacacttgctgaaaagccaaatttattgtggcctataaagttycacactgtctgacctctggttacatctctgatcccagtcgcttaccatatttctctttgtttactcaactttagtcttgccagtctttttgctgtcctacatgcccagtgtattctcatcta

SEQ ID NO: 859242 - DNA, 445 bp, Homo sapiens
tttacaatataaagagaattaaaaataaaaactatacaatcacctcaacctattcaaaaaactatttgagaaaaatctaacatcccttcatgataaaaaccctcaacaacccgggcatcaaaacaacatacctcaaaataataagcgcaatctatgagaaatccacagccaacatcatgctgaatgggcaaaagctggaaatgttctccttgagaactgaacaagaaaaggatgccaccactcatcactcttatttaacatactactggaagtcctagccagagcaatcaggcaagagtaagaaataaaaggcatccaaataagaaaagaaaaagccaaacaatctttctttgctgccaatgtgattctatacctagaaaacactaaagactctgccaaaaggttccttgaactaataaatgacwtccgtaaagtttcagaatac

SEQ ID NO: 859243 - DNA, 614 bp, Homo sapiens
cagttaaaaatagcttttatccaaacgacaggcaataatggatgctggcaargatatgatgaaaggagaaccctcaaacaccattggtgtgaatgtaaattaaattagtgcagtcactgtaaagaacaatcttgaggttcctcaaaaaactaaaagtagaactactatataatccagcaatctcactgctggatatatagccaaaagaaaggaaattagtatattgaagagatgtttacacttccatgttattgcagcactattcacaacagccatgatatggaatcaacctaagtttccatcagtggatgaatgcatagagaaaatgtggtacatatacacaacggattattattgatccataaaattaatgaaatcttgtcatttgcaacaacatgaaagatattataagtgacataagtcagacacagaaagacgaatatcacgtgttcttacatatatatgtgtgtgtatatatatatgtgtgtgtgtatatatatatatatgtgtgtgtgtgtatatatatatataaaactcctggagatagtagaatggtggttgccagagcagagactgggaagtgtattggggaggagagttgataatgaggaaat

SEQ ID NO: 859244 - DNA, 614 bp, Homo sapiens
cagttaaaaatagcttttatccaaacgacaggcaataatggatgctggcaaggatatgatgaaaggagaaccctcaaacaccattggtgtgaatgtaaattaaattagtgcagtcactgtaaagaacaatcttgaggttcctcaaaaaactaaaagtagaactactatataatccagcaatctcactgctggatatatagccaaaagaaaggaaattagtatattgaagagatgtttacacttccatgttattgcagcactattcacaacagccatgatatggaatcaacctaagtttccatcagtggatgaatgcatagagaaaatgtggtacatatacacaacggattattattgatccataaaattaatgaaatcttgtcatttgcaacaacatgaaagatattataagtgacataagtcagacacagaaagacgaatatcacgtgttcttacatatatatgtgtgtgtatatatatatgtgtgtgtgtatatatatatatrtgtgtgtgtgtgtatatatatatataaaactcctggagatagtagaatggtggttgccagagcagagactgggaagtgtattggggaggagagttgataatgaggaaat

SEQ ID NO: 859245 - DNA, 612 bp, Homo sapiens
agcataaatgaggtctaggaaactccaagactactgactgtagggggtatagaaacataggtaagagcggataattcctattctctctttttttttccccgagatggagtcttactctgttgcccaggctggagtgcagtggtgtgatcttggctcactgcaacctttgcctcctgggaccaagtgattctcctgcctcagcctcccgagtagctgggactacaggcatgcaccaccacacccagctaagttttgtatttttagtagagacggggtttcaccatgttggccaggctggtctcaaactcctgaaatcatgatctgcccacctcggcctcccaaggtgctgggttgtacaggcgtgagccactgagtctggctgataattcctattctctaggtactccctgcttcatgggtgcaagctgctgtggcacccatggcagcacctgccaaggtcaccaggacttgggtatgcaaggacagaagagggaaagaggackctcttccttctctccctcatgtacccctggtatctgctagaaagagataggagacagggatgcctgctcccctctttctagatgggtagccattcatcttcactctgta

SEQ ID NO: 859246 - DNA, 499 bp, Homo sapiens
ataaaaggtttaggatccacttttctggggaggtgaggaaacaaaagtttataagaatcttactttatggtcaaactgattaagattaaataaatttgtctaaaaggttttattaaagaattgggtttaacattaatagtacactaacgtaaaggtgaaatttggcttattcagtataaaatccataaaggaagcatcgtcaaatgtgaaatagtatttggctttctttggcctatatttgcataaatatgttattggacatgttccaaaattatggaaaacacccataattccttgataacttagtgtatgttattaatagtcataattgttatgtaaaattgttctttgtcacagaactaaccaaaatttccttttcttttcttttttttttttkgagacagagtctcactctgtcacccaggctgtagtacagtggcacaatttcagctcactgaaaactccacctcccaggttcaagcgattctcctgcctcaga

SEQ ID NO: 859247 - DNA, 546 bp, Homo sapiens
acttcttgagtgattagttccaacatkgcttatgcagttgaagtaaaggaggcttacaataatagtcctacttgggaacactctctgccctactgacattaattaacaaaacactccacagaggaaaatgggtatttattctgccttagatgaaaagagtaagagacttggtgcagaccattcatcagattggatgagaacaaaatcaaccattcttctgttagacatcagccagatgggtttgggtggagagaaggtagccaaagatctacaaaaaagcaaatagtatgtgacacatttcctacaaaatatgcttatctatagccagtccacattctgaatttagatgggaaggtgaattgcagccaagcctccctccaacagtttgggggaagatttctcttagggaattaatgaggaattatattaattagggtaaaaattaagctgtcgtaacaaagacactcccaaaatgcagcggcataatgaagacagacagtttatttctcattaatgtgataggtctgaggtgagagtacatgttga

SEQ ID NO: 859248 - DNA, 627 bp, Homo sapiens
atatagatataggcttttaaaaatttcggagatttttatattctctctcctttgtttctttttcttrctcaattagataggggataattattggctaagttgatcaaagagatctcagaaccaaagccaagatttaatgtaaaaattggatccttaattataaataaccaagtagtcaaacttctggctatgcctacctttacatgtataaatattataccccggaagaagaaaatgcttacaacaatagccagattttactaaggaaaatttaaaattacagcggaacattccagatccacaatagtatacttttagaagtgcatgtaaaaaagagagctcctgaattaggttaaaccagggatgtatattgatatgtgaaagcttcttaagagattttaatatttgtattgcctcttttaaaaactctttacaagaggaaattaaaagcttaagtgactaattaataacaaaacttgaatctgctcaccatttggcttagttactattgtacgataaaggccaaagaaaggtggataatgtatttatgaaagggaggccctcagataatacaggcttgcttctttttcagagctattcatgctgagtccctgcatagggaatgct

SEQ ID NO: 859249 - DNA, 441 bp, Homo sapiens
actcccaaaaagacttataatagagactcagtagtatgggtcaaactggttgtttatgactaatgcccatgccgatgaagttgtctgtaccatacaagttgttgaatattttgaccatcactcttgttttgatatatcaggatttaatcaaatatttcagttaacagaaaatgtctatacacatcactaaaaaaattaccagtttacaattgttcaaatgtattcagacctaaaagtttatcaaataaatgcaggttttacctttaaaaatttgtgactgattccactttttttcatttatttaagtgcttcaaggytatttaataaatttccaataacactacatagggtttaagcagaaatataggctgacagagttccagttaattaagatgagtacattgtgggatatattcaatttttattaactatattttactt

SEQ ID NO: 859250 - DNA, 610 bp, Homo sapiens
tagggagtgccagacagtgggcacaggtcagtgggtgcgcacaccctgcgcgagcggaagcagggcgaggcattgcctcwctcaggaagcgcaaggggtcagggagttccctttcctagtcaaagaaaggggtgacagatggcacctggaaaatcaggtcactcccaccccaatactgcgcttttctgacgggattaaaaaacggcgtgccagattatatcccacacctggcttggagggtcctacacccacggagtctcactgattgctagcacagcagtctgagatcaaactgcaaggtggcagcgaggctaggggaggagcgcccgccattgcccaggcttgcttaggtaaacaaagcagccctgaagctggaactgggtggagcccaccacagctcaaggaggcctgcctgcctctgtaggctccacctctgggggcagggcacagacaaacaaaaagacagcagtaacctctgcagacttaaatgtccctgtctgacagctttgaagagagcagtggttctcccagcacacagctggagatctgcctcctcaagtgggtccctgacccctgacccccgagcagcctaactgggaggcaaccccca

SEQ ID NO: 859251 - DNA, 574 bp, Homo sapiens
gtgggattgttttattaagtatcaaattatcttaagtttcaggcttaatgacagtgtaatttcaggggcataaggaagattttcccactcatccaacatagacttatactgagagagatgtaattacaattaacaaccatgtatttctaatttcacatgtgcgggatgctttgttctctttttctcatctgatcaaggcaccatggctccaacatcctcatctatgggatatcttgctgacttttgtaggtagaagtaagcattttctgcattgtgtccataatctactttttaattagaaattttacttaatttcacactatattcatttctgtggtcaaaaaaatcaaataaaattgtgaattggggtggtggctgaaggatagtaataatatgtttaggcaatttgggtaaatcatggagtattttttctttaatgaagaaatatgctgttctgcttcatccatttattgcaattccaaaaagcaaactaastatagtcagattacttggattttatgagaatttcataatattataattattgcaaaatttattaattttaaaaaatcac

SEQ ID NO: 859252 - DNA, 574 bp, Homo sapiens
gtgggattgttttattaagtatcaaattatcttaagtttcaggcttaatgacagtgtaatttcaggggcataaggaagattttcccactcatccaacatagacttatactgagagagatgtaattacaattaacaaccatgtatttctaatttcacatgtgcgggatgctttgttctctttttctcatctgatcaaggcaccatggctccaacatcctcatctatgggatatcttgctgacttttgtaggtagaagtaagcattttctgcattgtgtccataatctactttttaattagaaattttacttaatttcacactatattcatttctgtggtcaaaaaaatcaaataaaattgtgaattggggtggtggctgaaggatagtaataatatgtttaggcaatttgggtaaatcatggagtattttttctttaatgaagaaatatgctgttctgcttcatccatttattgcaattccaaaaagcaaactaagtatagtcagattayttggattttatgagaatttcataatattataattattgcaaaatttattaattttaaaaaatcac

SEQ ID NO: 859253 - DNA, 638 bp, Homo sapiens
tgagtgctgcaagagcaacctggagcctctgtttgagggctacaactctgcgacgggaggccgagtgcatggaagccracagtgggaggctggcctcagagctcaaccacgtgcaggaggtgctggagggttacaagaagaagtaagtgcagtgggaggagggtttggagaaattaaatgggattaagtcaaagtatgatagatttgggttcgaccataagaggaacttcccaacaggaagaaaatagtacaataatcctgtggggtggggggaatttcttttctagactgggagtttaaacattggagattctgaactgctccagctacttcatcattatgtttatttcattaattcatcaaacattttattgagcatctactcaatgttgtaggtgctatgttgggctctgagtgggaaaggagtaaggaagtaagaaggaggagaaaggagaggtaccagaactgggcagggctcctgccccaaaggagttacagcccagaaacagagaggaggtcttcgaaaatgtgcagggcccccaccctgacccacatcaggaatgaaagtccctgaaatagaaagagctttgagtaacatgggttggtttgaatgcccagaagaaagggatggacaagtt

SEQ ID NO: 859254 - DNA, 560 bp, Homo sapiens
ttctcccccatctgaggttgctgccatatagccaccagattttcacctccttcggccctgcgcctggcatagagtaggcaccctgwaaatatttgcgagtgaaagagcaggtgaattatagacaatggctgcatcctcaggccagcaacagctcagaaccacaggcaggggcagtgaccgtcattccttgcctcttagacttgactctgtacaagtgcctggactctcattaggcccttccagccacctccatatgaggaaagcaggggttattgtgagaaaatgaggtgcagaggttaagggggctgctcagagtgacactgacttggaagggacagagttgagccctgagccctcttctgaccacagatctagattatcttccatgagattccagagcggagaggggtggggcatcattagaatttacccactgtacaccagatcttaagttttggtgatagtgcatgacatggattctagagaaatcatcccagtgggtgccagaggaagtacctgcaaacctcagtgtccccctcccttacccaaacctgctcttg

SEQ ID NO: 859255 - DNA, 566 bp, Homo sapiens
cctcagagctcaaccacgtgcaggaggtgctggagggctacaagaagaagtgagtgtgggcaggaggggttctgggcacaggaaatagcayggtggcagctccctgagcccggaggagtatccagtctgcagctggcatctctgcctgagagtggagaagaacctgtaccccctgcttgagacacaggggtcccttgggtgtgggggatggaggctcagcttgtctttccaccagcagatcaaggaaacaatgctctctccctttctccatccatttttcacaaaaacttgtattcctgggtccctttgagaccagatctcaaagtcctggacatgtgtcttcctaagtttgctctctcactcagctaacactatctgatcacctaccacatgcagcacgctgtgctggtgatagtgacacagggccacgcaagccacacagtgcgggttcttgtggagcctgcagtctgctggaaggcagtcatgacagagccacagatctagcccttcagctacaaagtgtgatatatggtatgaagaatacgcactggatcctcagaaggaat

SEQ ID NO: 859256 - DNA, 630 bp, Homo sapiens
cctctgcaacctgggctcctgcgggccccggatagctgtaggtggcttccgagccggctcctgcggacgcagcttcggctaccgctccgggggcgtgtgcggacccagccccccatgcatcactaccgtgtcggtcaacgagagcctcctcacgcccctcaacctggagatcgaccccaacgcacagtgcgtgaagcaggaggagaaggagcagatcaagtccctcaacagcaggttcgcggccttcatcgacaaggtgggtgaggcctgagacggcccagagaagcctccagccctgtcctcccttggggaggtcccagtctgctgaggagacaggatggctgccggtttgaggcagcagagggaatgacgtgcagacccatacaggtggaagggtcagtttccatcacttaactcccgcagcatttaacgaggtccaggtgtggtctagaaattgagcctgtgatccaaagtgtgtgcatgtgtgtgtgtgtacatgtgtgtgtgtgtagcggtgtgtgcgcctgtacgtatgttagtgtgtggtgtgtatatgtgtgtgtgtacatgtgtgtgagcatatgtgtgtgtatscatgtgagtgtgtacatgtgtgtgagcgtgtgtgtg

SEQ ID NO: 859257 - DNA, 563 bp, Homo sapiens
acacattatgcaaacatgtatgtatgtacaaagatgtttacccttgtattatttataatagcaaaaaagttggtaacctaaattaccatcagttgagaacttattaaataagtaaattagtatttaacaacacaatggaatactttgcagccaattttttttaagagacagagtctcgctctgtcgcccaggctggagtgcagtggtgtgatctcagctcactacaacctccgcctcctgggttcaagcaattctcctgcctcagcctcccgagtaggtgggactacaggcacacgctgccacacccggctaaatttttttttttttgtattttagtagagatggggtttcactgtgttgcccagactggtctcaaactcctgagctcaggcaatccgcctgccttggcctcccaaagtgccagrattacagacgtgagccaccacgcccagccctttgcagccattttttaaaagaagtagatttgtacatgctgaaatggaacattctccaagacataccattaaatttaaaaagcaaggtgcaaggggacaaaaggctga

SEQ ID NO: 859258 - DNA, 654 bp, Homo sapiens
cgatgttctccctccctctgcccacctaacaggtcacaatgtgtattatacacccacccccaggtgtccatgtgttctcattgttcagctcccacttataagtgagaacatgtagtgcttggttttctgttcctgcattagtttgctgaggataacagcttccagctccatccatgtccctgcaaaggacatgatctctttcctttttatggctgcatagtattccatggtatataggtaccacattttcttgatccagtctatcactgatgggcattccttctgagacttcagttacttatacactagaccacttgatactgacccaacaatcacttacattatcttttttttccaatccttttctctctgctcagttaagatgattttttaaactgatttttcatttctacatttccccacccttttttttccccacaagtttttaggaagaaattgaagtacagtcagtggcatttatataacatttcctcatgcccccttgtaatccatccttcccttacctcattcctagagaaccagtaacagcctttctgccactacagattgatttgcattttccataawtttacatagatggaatcatattgtaagtactagttttcctgacttctttcattctgcataatgctt

SEQ ID NO: 859259 - DNA, 448 bp, Homo sapiens
ttctttttatgctactataaatgagattgttttcttaatttcctttcatgatagtttattgtgtatagaaacaccattgatatgtgtgtgttgatttttgtgttctacatctttactgaatttattaattctaatcatttttcttgttgagtattaagggttttctgtgtacatcatcatgtagattttataaatcatatcgattttgtagattattgctgcagacagataattttaccttttactttagattttgatgccttttatttctttttcttatctacttgctctgtctagggcttctaacactgtgttgaatagaagtagcaagagtggacattcaygccttgtcctggatcttagagaaaagattgattatgatgttagctgtgggattttcatatatgccctttattatgggatttttttttggatatgacaccaaaag

SEQ ID NO: 859260 - DNA, 659 bp, Homo sapiens
aaattaaagaacatgctcctgaatgaccactgggtcaatgaataaattaacatggaaataaaaaaatttcttgaaataactgaaaatggaaacagaacataccaaaacctgtggggcacagcaaaagtagtattgagggaagtttatagcaagaaatgtccaaatcaaaagagtagaaatattacaaattaatcaagcaacacaacacagagaactaaaaaagatctaattaaaccccaaattagcagaacaaaaataatagagattaaagcaaaataaaatcaaatagaggctgcccaaaatacagaagaccaatgaaatgaaaaattgcttctttgaaaagataagcaaaatgggtaaaccactagatagactaaccaggaaaagaagagagaagattcaaagaaacaaaatcaaaaatgaaaatggagacattaaaatgaatatcacaaaaatacaaaagatcatcagagattattatgaacatctatatgctgacaaacaggaaaacctagaggaaatagagaattcctggaaatacacargcaactgagattgaatcaggaagaaatagtaaaccagagtagatcaataatgagtagtagattgaatcaggaataaaagatcttccaacaaagaaaaactgaattgcatggatt

SEQ ID NO: 859261 - DNA, 538 bp, Homo sapiens
gcaaaagtagtattgagggaagtttatagcaagaaatgtccaaatcaaaagagtagaaatattacaaattaatcaagcaacacaacacagagaactaaaaaagatctaattaaaccccaaattagcagaacaaaaataatagagattaaagcaaaataaaatcaaatagaggctgcccaaaatacagaagaccaatgaaatgaaaaattgcttctttgaaaagataagcaaaatgggtaaaccactagatagactaaccaggaaaagaagagagaagattcaaagaaacaaaatcaaaaatgaaaatggagacattaaaatgaatatcacaaaaatacaaaagatcatcagagattattatgaacatctatatgctgacaaacaggaaaacctagaggaaatagagaattcctggaaatacacaggcaactgagattgaatcaggaagaaatagtaaaycagagtagatcaataatgagtagtagattgaatcaggaataaaagatcttccaacaaagaaaaactgaattgcatggat

SEQ ID NO: 859262 - DNA, 526 bp, Homo sapiens; identical to SEQ ID NO: 809467

SEQ ID NO: 859263 - DNA, 590 bp, Homo sapiens
gaaagtcttttgggaaagcaatgaggcaaggctaagcaatgaccataagtttagatttcctcattgttttgaatagacaggaaatcatttgtccagaaggaggtattatgtagggaaacttttacctttctgtatataaaaacatataactaatacacacacactcatacacaaatatcaatggaggtatacattgtgtttactttttctatgtttatgtacaatagtaatatctttatagttatactaacgttattaaaataagtaattatattaactaagtttaggaccagtttctagtaagtaagaaagaaaaaaaatcatctccaaattctatgaatagatataatgaatttcaagaatgcctgatgaattaacttaggattcaggaaacaaaaaaagttgctattgaatagaaaaatggaaaagtaacagcaacaaaattctggtagcagatgccaataatttcccaagacaaaatgatgtagtaacttcagaagtatataaatgaagactggataccagcaagacatactggatgattttstatccagatagtgctttttttacttattaggttgggttattga

SEQ ID NO: 859264 - DNA, 618 bp, Homo sapiens
tctgcttgccctcagctgaagggatcctgaggacagtagaaataatgaagacatcagtcaggatgatgagcagaagggtacccagcaaaccagacactgagatcagtgttataatgaattctgtgtggttactgtctatacaagacagcctaataactgccagcatatggcagaagaagtgtttgacaaggttgggtctgcagaaagagtccctgaatatcagtgcagtctctgtaagagagataaagaagcctgcagtgcaagcagaggccacaagttgtccacatacaatgttggtcataagcagtggatatcttagagggttacaaatggccaggaagcggtcatatcccatcaaagtgagaatgatacagtttgtgccaccaagtcccaagaagaagcacatctgtaagctacaacctgtgactgaaatgcttctgtccttggccagtagatcttccagcatcttggggacgatggtcagygtatagcaggtctcagagaaggagagtgcactaaggaagagatacataggggtgtggagggacctgtccactcaagttagacccatgatggtcagattacctgcaagggtgagaaggtagagacaaaagaaga

SEQ ID NO: 859265 - DNA, 618 bp, Homo sapiens
tctgcttgccctcagctgaagggatcctgaggacagtagaaataatgaagacatcagtcaggatgatgagcagaagggtacccagcaaaccagacactgagatcagtgttataatgaattctgtgtggttactgtctatacaagacagcctaataactgccagcatatggcagaagaagtgtttgacaaggttgggtctgcagaaagagtccctgaatatcagtgcagtctctgtaagagagataaagaagcctgcagtgcaagcagaggccacaagttgtccacatacaatgttggtcataagcagtggatatcttagagggttacaaatggccaggaagcggtcatatcccatcaaagtgagaatgatacagtttgtgccaccaagtcccaagaagaagcacatctgtaagctacaacctgtgactgaaatgcttctgtccttggccagtagatcttccagcatcttggggacgatggtcagtgtatagcaggtctcagagaaggagagtgcactaaggaagagatacataggggtgtggagggacctgtccacycaagttagacccatgatggtcagattacctgcaagggtgagaaggtagagacaaaagaaga

SEQ ID NO: 859266 - DNA, 521 bp, Homo sapiens
cattgccattgaactgaccctaaaagaaatgctcaaggaagtcctaaacctggaagcaaaagaacataatggaaacacatgaaggtataaaactcactggtaaagtaatcacacataagataaagagaaaagactcaaatgataccactacagaaatccaccaaatcacaaaggtagtcaatataggaaaaagaaagcaacaaagaatatagaaaacaaacagaaaacaactaatgatatgacagcctcacaattactaataaccttgaatgtaaatggattgaattttctatttaaaaatatagaatgaatgaatggattaaaaaaaacatgatcaaactatatgctgcttagaaaaaaactggccttaaggaaaaacttaagaattttttwaaaaatcatgaaacaaatgaaaatggaagcacaacacaccaaaaccagtgggatacagcaaaagtagtgctaagaaggaattttatagcaataaatgcctacatcaaaaaaaaaatagaaagataact

SEQ ID NO: 859267 - DNA, 503 bp, Homo sapiens
gcaaatgacatcttgtgaaaggggaggtctgaaaaaaaaaaacaagtgggtgggttttttcaaagtaggccaccggacctgagataaccagaattcaaattaggatgacagtgtagtaggggaagcaaccagaatcggacctgcttcatgtcttctttggtaatatatgacttgccctccgccagggcttggaaggcattctctatttcatcactggacttgatgttttctgactccttgtcaatcaggaaagcagtatagtcctccagtgagacatagcccttcctgtgggagaaatggatcaggagctgagccttctcaaggcagagaaggaagtcccctttttaatcctactcagtgtctcagaaacasaggaaagccagattctccaagtgcctcttccaactaagctttctgggatgagatgggttatgctctccattttggctccccttcatcaccctcttacagccaaacattactaagccaaatattactaaata

SEQ ID NO: 859268 - DNA, 570 bp, Homo sapiens
tacgggattttttgctctgcattcagagaataatatcagagagatttttcatcccaaaatgttgaagcagagtgtaatattacaggctaggttgatattaaggtaacaagttttgaaaatccctggaatcaaatatcatctacttgagagttttgaaatgatttagaaaataaagtgatatcattggtcatttatttttttaacaggctttgaagcacttagtatatattgggcatcattgtgtgtttttgagatgcagtttctgttatttggtaagttataatttgtagagtcaaagacattcttataataatagtttgtggcaaagcaggtaagattctagtgattactcaggaaatccagaaaaaatggtgcagcatgattaggaagctgtaggaaggattctatgagtaaagtcattttaaatgaaaagtaaaaggagaccacaaaatcagaagcagaaaaacaataagtataaagcagagactatttacagatayagaaagtagtatgaaaaatgacttggttgtgtaaaaattctcactgctaaagtacatatgaaggaatcta

SEQ ID NO: 859269 - DNA, 665 bp, Homo sapiens
aaaaatgggttacatagttatttccttggtgggttagcatctttaaaactcatcaggattttagagccaaaaataaaattatttaaaaggattgaaacctactattcatgtttttrttagtaaatttgcatgtatttaatattttttgagtttgtattatttaagataatttgtctatttgaacaccagatctactttgtaattataatttaagatttgtaattgaaaaattaacttggacttttaaaaattaacttcattcgggttaaatttaatagtcaataaaaattacccagttaatcaagatagtaagcttactattttaggttgaaatcttacttcattgatcacagtattgaaacatttaaaaggatttaagatttgctttagttataattttctttttagattaaaaagattattttaaaagcctgatgaggctttattaagtcagcaaattgagatgcttaaaaatgaaatacatagatcatatttaaacatatttaaagagaattaaatgccaagtttatgaatcaaaccaaatatttgtgtaacacctttaaaaatgaataaaatatattaggtttattaatagaatactaaggtttttaagcgggaattgaaagaattaaagacctacttttttaatgtttacctcaaataaa

SEQ ID NO: 859270 - DNA, 665 bp, Homo sapiens
aaaaatgggttacatagttatttccttggtgggttagcatctttaaaactcatcaggattttagagccaaaaataaaattatttaaaaggattgaaacctactattcatgtttttattagtaaatttgcatgtatttaatattttttgagtttgtattatttaagataatttgtctatttgaacaccagatctactttgtaattataatttaagatttgtaattgaaaaattaacttggacttttaaaaattaacttcattcgggttaaatttaatagtcaataaaaattacccagttaatcaagatagtaagcttactattttaggttgaaatcttacttcattgatcacagtattgaaacatttaaaaggatttaagatttgctttagttataattttctttttagattaaaaagattattttaaaagcctgatgaggctttattaagtcagcaaattgagatgcttaaaaatgaaatacatagatcatatttaaacatatttaaagagaattaaatgccaagtttatgaatcaraccaaatatttgtgtaacacctttaaaaatgaataaaatatattaggtttattaatagaatactaaggtttttaagcgggaattgaaagaattaaagacctacttttttaatgtttacctcaaataaa

SEQ ID NO: 859271 - DNA, 619 bp, Homo sapiens
tcaaactgattgtcaacatttgtggttcagaaaatctgaaagtgaagcctggccatctgcatttctaaaaatctcccagaaaattcagatgatgggtaagattcaggaacagctgggctggatgatcaytaagatcatttctagtcctgaggctatttaatactcatttttaacaattccctaacatgtattatctcatttatcattaacaattctatttaataaatatgaacttctttttacatgagaaacatggtacacagagctgcaataactagtccaagtacacagagataattattatgaatctaaggcagaaattcattatgtctggttccagatccatgtctttattgaccatgatctcatacctagttcacaggctttcatcctaatcactaaacttaataaaatttctaaaggaaatacggtattcaataagtaaatgtaattacaaattatcgtacattaagtggtgaaagaatttattccttgagtcatcaagatttatttattttttaaaaatttgagtaggaactctatgtcaggcaccctgttaggtgcagagcattcacttagtggctatcatatgaatggtcttggctttggaggtctcgga

SEQ ID NO: 859272 - DNA, 595 bp, Homo sapiens
gcatgcagggcttaaaatttagatgacgggttggtaggtgcagcaaaccaccatggcacacatatacttatgtaacaaacctacacattctgcacttgtatcccggaacttaaagtaaaatgtaaaaaaaaaaaaaaaaaaaaaaaaaaatactagagttcttcaagttgtaacaaaaagatgttaaagccaggtgccgtggctcatgcctgtaatcccatcacttagggaagccaaggtgggaggatcatttgacctcaggagtgtaagaccagcctgtgtaacatagcgacatcacatctctaaaataaagaaatagataacatgaaacatttttaagaagttaatagttaaaaaagccactagtaaaagtaaatagtcaaatctggaataatctaatactgtaatggcactgtgtaaatcattttaaattctattataaaagcttaaaacacagaaatattgaaaataactatatctattctaatttggcaatgaatacacaatctagaaagatgtgaagtgtgayatgaataacataaaatgtgggcagagtgaagtaaaagtgtagagtttttgtatgcaatttcagttg

SEQ ID NO: 859273 - DNA, 606 bp, Homo sapiens
tcagccatcaaaaggaacaaaataatgttatttgcagcaagttggatggagcttgagaccattattctagtaacttgggaatggaaaactaaatatcatatgttctcacttgtaagtgggaactaagctatgtggatgcaaaggcataagaatgacacaatggactttggggactcaggggggaaaaggtgaggaggatgagaaataaaagcctacatattgggtatggtgcacactgctcaggtgacaggtgcaccaaaatctcagaaatcaccagtaaagaaattatcaatgtaacagaaaaccacctgtactccaaatactattgatttttttttatctcatgttgaactgtaatgagtttggatgttgtcctctctaaatctcatgttggatgtgaggcctgggagaggtgtttgagtcatgttcggtcatgggggtgaattcctcatggcttggtgctattctccatagtgtgtttttgtgagatcttgttgcttaaaagtgtgtggcatctcctccccytcttgctctcgctctaccacgtgacatgttggctcctcttttgcctcctgtcatgattgaaagcttcctgaaggctcacca

SEQ ID NO: 859274 - DNA, 615 bp, Homo sapiens
attgaagttaaatggttttaagtttaaaataacttgttaaaatgaaaatgtgcttttgttagcttcatggtaaccacaaaacaaaaacttacaatagatacaataaaagttaaaagcaataaatcaaaatatactactagagaaaaattttaaaaagactcaactatatggtgtctacaagactcactttacctgtaatgatataaataggctgaaagagaatgaaagaagatatttcacacaaattgaaaacaaaaaagcaagctatacttatattagataaaatacacttaaagtcaaaaactgttaaaaaaaaaaaaaaagacagaagagtccattatgtaatgacaaagagatcactacagtaagaggatgtaacaattgtaaataaatatgcacctaatataagaacaccaactacatatagaaagtaaatattaagagacttaaagaaaaagactgcaatacaataatagcagagaaactcaaaactccacttycagcaatggacagatcatttagacaaaaaatcaacaaaaaaaacttcagcattaaatggtattctagactaaacaaacctaacagacatttatgaaacatcaaaacattccttcc

SEQ ID NO: 859275 - DNA, 600 bp, Homo sapiens
ggggatgaccacatagtctcttatttgaacagcccatttgcaaaatgggcaaaagatctgaataatcactttattcaaatgtcaaatacacatgatcagatgctcaacattaccagcaattaatgacttccagagcatcaacctatatggtacaagatattagccaagaacaagagaggatgtttaacagcgaaaaataatttattgtgacttttacaggagcttgaatgccctcattggaagagtcaacattaataaaatctgaattattaccattaatatggccatgtcatttttatcggcaggtgctagagaaatgctacttatacatgtagcatttacaattaatatatgtagcattaaacaattatcaggaacattctgtctattaaaatgtaatcttccttcaaccctattatccacttacatttatatattaaaacacattatatatgacaaatttaatactcagctatttctttgaagttttgctttyattatataaatgtaaaatttgcatttcagtccctaatatcttattgcttaaaaatgttttatagtatttgttatagggtaaaatttatacacaaagaaaattca

SEQ ID NO: 859276 - DNA, 567 bp, Homo sapiens
aggtcctattttattcatcatgccatttgctgcctaaataccttacttttttattactgtgttattgttttataagtcctatgagatttatgctttaaatgttttatgttctattttggtgtatttcgaggattcatttcaagatttagagctctttttagcagttcttgtaatgctggcttggtagtggctaactctctcagcatttgtttgtctgaaagagacttgatctttcatttatgaagcttagttcactggatacacattctcggctgataattgttttgtttaaggaggctaaagatagtactccaaacctttctagcttgtaggatttctgttgagaaatctgcttttaatctgataggttcctttataaattacctgatactttgcttcacagctcttaaaattcttttctccgtcttgactttagagagcctggtgactatrtgcctaggcgatgatctttctccagggtgttccctgggtgttctttgagcttctcgtatttggatgtctagatctctaggaaagccagggaagttttcctcaattaatccctca

SEQ ID NO: 859277 - DNA, 567 bp, Homo sapiens
aggtcctattttattcatcatgccatttgctgcctaaataccttacttttttattactgtgttattgttttataagtcctatgagatttatgctttaaatgttttatgttctattttggtgtatttcgaggattcatttcaagatttagagctctttttagcagttcttgtaatgctggcttggtagtggctaactctctcagcatttgtttgtctgaaagagacttgatctttcatttatgaagcttagttcactggatacacattctcggctgataattgttttgtttaaggaggctaaagatagtactccaaacctttctagcttgtaggatttctgttgagaaatctgcttttaatctgataggttcctttataaattacctgatactttgcttcacagctcttaaaattcttttctccgtcttgactttagagagcctggtgactatgtgcctaggcgatgatctttctccagggtgttcccygggtgttctttgagcttctcgtatttggatgtctagatctctaggaaagccagggaagttttcctcaattaatccctca

SEQ ID NO: 859278 - DNA, 624 bp, Homo sapiens
gtgtgttcttcatttccagaagttgtgatttttttttatgctctctatttttttggagatttttccatccatatcctgtaayattttttaaatttctttaagttggtattcatccttctctggtgcctccttgggtagtttaataatccaccttctgaattcttttctggcaattcagagatttcttcttgggttggatccactgctggtaaggtagtgtgatcttttggggctgttaaagaaccttgttttgacatattaccaggattgtttttcttcttccttctcatttgggtacactatatcagaggaaacatctgggactcaagggctgctgttaggattttttttgtcccacagggtgctcccttgatgtggtgctctcccccttctccaaaggatggggcttcctgagagctgaactacagtgattgtcaacacccagcagagctactgtgctccaggctccaggctggtactgggtagtgtctgcaaagagtcctgtgatgtggttcgtcttcaggtctcatccatggatatcagtacctgctcctgtggaggtggcagggcagtgaagtgaactccatgagggtccttggttttaattttgtttattgggataat

SEQ ID NO: 859279 - DNA, 624 bp, Homo sapiens
gtgtgttcttcatttccagaagttgtgatttttttttatgctctctatttttttggagatttttccatccatatcctgtaacattttttaaatttctttaagttggtattcayccttctctggtgcctccttgggtagtttaataatccaccttctgaattcttttctggcaattcagagatttcttcttgggttggatccactgctggtaaggtagtgtgatcttttggggctgttaaagaaccttgttttgacatattaccaggattgtttttcttcttccttctcatttgggtacactatatcagaggaaacatctgggactcaagggctgctgttaggattttttttgtcccacagggtgctcccttgatgtggtgctctcccccttctccaaaggatggggcttcctgagagctgaactacagtgattgtcaacacccagcagagctactgtgctccaggctccaggctggtactgggtagtgtctgcaaagagtcctgtgatgtggttcgtcttcaggtctcatccatggatatcagtacctgctcctgtggaggtggcagggcagtgaagtgaactccatgagggtccttggttttaattttgtttattgggataat

SEQ ID NO: 859280 - DNA, 558 bp, Homo sapiens
aaggaacttaaaataacaagcaaaaaacaacaaactccattaaaaatgggcaaaggacatgaatagtcacttatcaaaagaagacatacgagtagccaacaaacatatgaaataatgctcatcatcactgtttatcagagaaatgcaaattaaaactacaatgagatactatctcacaccaatcagaatgatgattattaaaaagccaaaaagcaacagagactggcaaagctgaggagaaaagagaatgcttatagagtggtggtgggaatgtaaattagttcaaccactgtggaaagcagtttggagatttctcaaataacttaaaacacaactaccattcaacccaacaatttcattactgggtatatactcaaagggaaataagatcattataccaaaaagacatgtgcacttgtatgttcattgccaygctatttacaatagcaaggacgtggaatcaacttagattcccatcagttgtggactgaataaagaaaatatagtacatatacaccatgcagtattatgaagccataaaaaagaatgagaccatgt

SEQ ID NO: 859281 - DNA, 563 bp, Homo sapiens
acaaaggtgggaagaggggtagacagaaaagggaggattaggttgaaagtctgtataatgggcagttagtccctcaggttctctcccagttggagaaggcaggtgactccccttctcagtggtattaagaactaggtaattatctggaaaaaccaagtgaagagtcttcagacaggatccggtagagtagagaacagggaagaggcattgtgtcaaaaggagggggattccatggaagtctagataatcaattttgtgcacccagccttcttccactctatggtctcaagaatactgactgccaaacaattcccctcaggcaaaaggtgggacactctttctctggagaaatggaaaaatcctaaagaaaaacacaccccaaaatgacatttataacacccacaataagacaactggttctgagccccatcgccataccaggaaggcaaygatttgacaagccacaccgattattcctgagactccaatcagctttttagagtctcacttggaatggagcactcaggataagcttccgtccaatggcagaaaatcaaaacaga

SEQ ID NO: 859282 - DNA, 564 bp, Homo sapiens
accaattaatattgcatagaatattaatgacctttggtagataatttggaaaccacaaattgagaggtcttcaaagcctgtttcagctctaggaatctggatcagaagctccaggagggtagggaactagatcccactgctttactttatccccagtgcttgacataaagtaaatgatcaataatatttgcaaaatcaatgaatgaactgtgatcgtttaggtctatttctcactccttgcaggaggcatgggctctgtctacccccttctgaagttatgtgcatatcaaatttaagcaactccagctacagaaaggagataaggaccttttgtagtgtaaaaacacaagggaattatgctgagtctttcttggcaatgtacgagtgtgtcgtcttgaagatatttgaccctaataggattgcttttccatttcctcctgttttcataagtcaaagtcttattcagattcatctrggaaaaaagaaaaaaacaaaattagttggaaggaaatgactgacatccccattctgaagatcaaagagaaggaaagaatctcaggggga

SEQ ID NO: 859283 - DNA, 561 bp, Homo sapiens
caaggatctggatggaagagtggagtggtcacttcagaagggccaggtatagagctcgagaatacttcatctcccgttcctgttccatacaaaatatcaagtccctgaggcagattctcgtgattcttggacgatgcaactgtttggtggctgtcaggctggatgtcccagaagcaagaaggttgtcttttaagccctaaaaataataaaaggaaaagcaatttgaaataaaaatctttcataaagggaaagcctgtcaattctagcatgtcagagcccactaccctctggtcactgggttaggtactggagataatgtaatgatgaagacctaaccctgtcctccagcagccaatctcaaatggccattaaacctatcacctgacctcattcattctttcctgctcacctgcagcatggcaatagcctctgaactggtttctccatttccaggctctactttgctccattctttccagtgcawtgcaggccagactttccctctttaaaggtcttacacaaatcttttgagagtgaaagacttgtttatcactttgattg

SEQ ID NO: 859284 - DNA, 738 bp, Homo sapiens
catccttccgcctcagcctcctgagtaactgggaccacaggcacacgccacctcgcctgactaattttttgtatttttagttgtgaccaagtttcaccatgttacccagattggtctcaaattcctgaactcaggtgatccgctgcctcggcctcctaaagtactgggattacaggtgtgagccactgcgcccggcctattattttatttttatttcttgacttctttatttctgctcattttataaaggaagagttatagaatttttaaaaccagatctctttggattgtaatatttagattagatttgatgaataacttcctgacagtgtttaaactagcatgaatttacctcagtgtacaatctctaacatgttttccaatgccaacattttatgaaatatatataaaaatgtggaatgcttcatgaatttgcttgttatcttgtgcagggaccatgctaatcttttctgtatcattccagttttagtatatgtgctgtcaaagtgagcacgccagcattctttaagtttctctaaaatgaagtggaatctccctagaagagtaataaaagaaggtagattgctcggtcaacaaatgattattkatttagggggaagggaagggggatctcctatgtctgccatgcttataagatagtactgcttaaagcaaggggtatagatagctttttatttgagaggagggaatgtttaactatgttcacatttaaaatgt

SEQ ID NO: 859285 - DNA, 605 bp, Homo sapiens
ctagtataaatttcggggggaggttccaagatggccgaataggaacagctccagtctacagctcccagmataagtgacacagaagaccggtgattgctgcatccccaactgaggtactgggttcatctaactgggacttgttggacagtgggtgcagcccacggagtgtgagccaaagctgcgggggcatcgcctcacccaggaagcacaagggggtcagggaattgcctttactagccaagggaagccgtgacagacagtacctggaaaatcaggacactcccatcctaatactgcacttttccaatggtcttagcaaatagcacacaaggagattatatcacgcgcctggctcagagggtcccacgcccacagaacctcgctcactgctagcacagcagtctgagatcaaactgcaaggcggcagtgaggctgggggagaggggtccgccattgcggaggcttgaataggtaaacaaagtggcggggagcttgaactgggtggagcccactgcagctcaaggaggccttcctgtctctgtagactccacctctggggggcagggcataactgaacaaaaggcagcagaaacttctgcagacat

SEQ ID NO: 859286 - DNA, 546 bp, Homo sapiens
agtcagcaagccatccctagtacggatccccactgggacccagactcagatcatggggactggagtcacaaacatctgttgacctgtgttctagaaggactaaggagaattaggaaaaagcccatgaattattcaatgatgtccaccataactcagggaaaggaagaaaatcttactgccttgctccagcggctacgggaggccttaagaaaatatactcccctgtcacccgacacccttgagggttaattgatcctcaaagataagtttattatgcaatcagctgcagatatcaggagaaagctctaaaagtgagccctgggccctgaacaaaatctggaggcattattaaacctggcaacctcagtgttctataatagggaccgagaggaacaggacgaaaaggaaaagcaaggtargagaaaggccgcagccttagtcatggccctcagacaaacaaaccttgatggttcagagaggacagaaaatggagcagggcaataacccggtagggcttgttattagtgtggtttgcaaggacacttt

SEQ ID NO: 859287 - DNA, 360 bp, Homo sapiens
ccatgatccctctaggaaaactatcaactattaacatccttctagtcttttttttcctccatctaattgtgggaccattcggcatctaccrtttttttttttactgaactaaaaggtgagcacttctccttaaacattttcctaccgccatcttcctcattattgtggagtatgtccacttacaagatgtccggaagtccattcaaccaattctcaactcgggggatgtgggtgttgttccctcttctcggtgtgatgaaaaccccacagctgggccccaggcagagtggctctggggtcctgggctttggtgacaggatcctgcaggaacccggaactcctgaccccagcctggtgttc

SEQ ID NO: 859288 - DNA, 607 bp, Homo sapiens
gcagtgtcaagtgtagtcatggatgggtgggaagaccagacaaaggcatccaatgggactgacttacctaaacaaaccagaaggaagtcagaacagtgggaagatctgatagataagcagtattctgcaggcagatgaaggagcaagctttgggcccccaaatcttcaccagtgcatccacattacagaggataatgcctgagggaggggaagatcatctcaggattctggaacactgggccctccctttcttattccaaaaggctggagcagttctgcatgtaggcttctctggaaatggtctaggaaccagctcgtccaggccaggagcacctgatcattctcagagttacgtacatatgcgataagattgcagggaacagtatagttctatagacttaagtgtgaacatagtcctcatttatagtccctagtctcccatggctcatgcagcttggtctttatgtgtttctgaatttagtgctgcagaggcacaatggggtctggtttctggatcttatacagacaagcacttaggtcagctgcagtggatgtcctgcrcagacaccgtcgcaactcttgcctggttcctttttgtttttggaga

SEQ ID NO: 859289 - DNA, 635 bp, Homo sapiens
atgtaggataacatggctgctgggatccactcttgggccttgggaatagaatggatctcattggctcccccagaaggagaccagtgcagatgaaaaggctgaataccctgccaagacaatgtcctgtgccagattagaatctaaacctcattgtcgaactcaaacacattgcacttggggtgaatagtcctgctgtgcgtgtgtgtatccatatacgagatgtgtgcatatatacacatatgtacaggcatatatatacatatatgtatgtatgcacatgtctgtctgtgtgtatgtaattagagaggactttctggaaaaggaatgtttgagggtggccttgggttcctgttggctgtgaacacactcctaatgagctgccctgtgtctcagtttacacatggtatttgaaattgagtctaaattcccatttcttgtactttctgaggagcagtcaagaaagagccagatttacagtttgccagtctcttagctctatgttccaaaggaattaagtcactcttcttgacartggccttaaaatagggttttaataaaatgaaaagaggagcagtggagccacccacccctgtcacctgtggctaaatggatatacgggcgccaggctgctacgg

SEQ ID NO: 859290 - DNA, 493 bp, Homo sapiens
tactagtgagagttgtttggttgaaaaccagtgagaaggaatgaattcttctcttcagtttcttgtcaaaaggttcagatttgtttagcttgaatttctcataatgattcagctttcttgagacaatagaaactkgttagaggttaatgtgttctttgtctttttggacataagtgaaaatctgttacaagcaaggtgagtttacctaatgagccactaagagttggggagaacttgagtctgttccccaggaatggagagtgaggacctgaagcatatggggcaatggaatctccactgagtataggatggagatgcgtgggctgtactagaactgggttactttcaaaatggtgttcagcaaggtagcttcttctcagagaagagtgtgtgaaaactctaccaccaactaaggcagtgtgcagaaaggtgcaaaaatgtccccagatgtcttccttcctttcctgtcacagtggaggctgataatctcaga

SEQ ID NO: 859291 - DNA, 608 bp, Homo sapiens
tcatctagatgagtatcactttggccgggtgcggtgactcatgcctgtaatcccagcacttttgcaggccaaggtgggggggatcatctgaggtcaggagttcgagaccagcctgaccaatatagtgaaaccctgtctctgctaaaaatacaaaaattagctgtgtgcggtggcgtgtgactgtagtcccagccacttgggaggctgagacaggagaattgcttgaacccaggaggcagaggttgcagtgagccaagattgcaccactgcgctccagcgtgggtgacagagccagactccttctcaaaagaagagtaaagtatcacttctcacatcatggcactgagagattccgatgcattaggcttctaaaagtggtactgaagaaatttccttagaaccccttttagtgagagtgatagtagttccgtgggggatttaatagctgttatttgaaaaacagttctcatgcttaaattaatggggaaatgmggagctgaacaaaattaaacagatttatttgctgagagttttctcagagcctttgctagctaaggaacattttgaatctctctgtgggagatgtaatgtgccgcattccccaaatt

SEQ ID NO: 859292 - DNA, 608 bp, Homo sapiens
tcatctagatgagtatcactttggccgggtgcggtgactcatgcctgtaatcccagcacttttgcaggccaaggtgggggggatcatctgaggtcaggagttcgagaccagcctgaccaatatagtgaaaccctgtctctgctaaaaatacaaaaattagctgtgtgcggtggcgtgtgactgtagtcccagccacttgggaggctgagacaggagaattgcttgaacccaggaggcagaggttgcagtgagccaagattgcaccactgcgctccagcgtgggtgacagagccagactccttctcaaaagaagagtaaagtatcacttctcacatcatggcactgagagattccgatgcattaggcttctaaaagtggtactgaagaaatttccttagaaccccttttagtgagagtgatagtagttccgtgggggatttaatagctgttatttgaaaaacagttctcatgcttaaattaatggggaaatgargagctgaacaaaattaaacagatttatttgctgagagttttctcagagcctttgctagctaaggaacattttgaatctctctgtgggagatgtaatgtgccgcattccccaaatt

SEQ ID NO: 859293 - DNA, 608 bp, Homo sapiens
aacacggcctatcactctaagagcagaaagaggattcaagaatttaaagatttcaacaacaaagggggaatttaagagttccaagattttctcctcagatactcaaaaattccaattagscagaatacgccattctctgagtacatcattaatcagtttgaacgtgttttccattatttccaactttacagtgctggtttaaagcaggtattatttcagagcaaagattatttcattgttttgggaacatcataaaacatgctatttacatggaagataacatgggggtaggcccagtagcatgatttattctaacataaaacacacacgtgtgcacacacaaacacacacacactgacatatcttccattcaagaaaagtttaatttatagttttttaaggttttagcagttcaggtttccttttatgatagcatggttaccaaatatgctttgttttttcatttctaaaaaaaagtcacagatttattatgttcagctccttactaaatgagctgaagggagatttataaagcaaataaatggaaagatttacagtttcttcctcacagcagctaaaaattatggaaaagctcattgacctttcaa

SEQ ID NO: 859294 - DNA, 608 bp, Homo sapiens
aacacggcctatcactctaagagcagaaagaggattcaagaatttaaagatttcaacaacaaagggggaatttaagagttccaagattttctcctcagatactcaaaaattccaattaggcagaatacgccattctctgagtacatcattaatcagtttgaacgtgttttccattatttccaactttacagtgctggtttaaagcaggtattatttcagagcaaagattatttcattgttttgggaacatcataaaacatgctatttacatggaagataacatgggggtaggcccagtagcatgatttattctaacataaaacacacacgtgtgcacacacaaacacacacacactgacatatcttccattcaagaaaagtttaatttatagttttttaaggttttagcagttcaggtttccttttatgatagcatggttaccaaatatgctttgttttttcatttctaaaaaaaagtcacagatttattatgttcagctccttactaaatgagctgaagggagatttataaagcaaatraatggaaagatttacagtttcttcctcacagcagctaaaaattatggaaaagctcattgacctttcaa

SEQ ID NO: 859295 - DNA, 515 bp, Homo sapiens
cctataactatctgatctttcacaaacgtgacaaaaacaagcaatggaggaaggattcccacttcaataaatggtgctggataactgggaagccatgggcagaagaatgaagctagatyccctccttacaccatatataaaaattaactcaagattaattaaagacttaaatgtaaaacccaaatctataaaaacccgcaaggcaacgtaggcaacaccattctggacataggaatgggcaaaggtttcataatgaagacaccaaaagcaactgcaataaaaacaaaaattgacaaactgaatctaataaaactaaagtgctcaacatcactgatcattaaagaaatgcaaatcaaaaccacaatgagataccatctcatgtcagtcaaaatggctatcattaaaaagtccaaaaaacaacagatgctggcgaggttgtggagaaaaaggaatgcttatacagggttagtagaagttaaatcagtttcaccattgtggaagacagtatggtgatt

SEQ ID NO: 859296 - DNA, 537 bp, Homo sapiens
ggagaggcagtcatctaactgggcagaatgggaagaggaaccaggtgtatacctagtttttaaggagactttcatcctatatttagctgccattgtcagaagtatmtggtggtgttaattcctgagcctcttaaatcccatggtgcaaaacaaattgtttcttggcttttctcactgagtgtttgaattcagctttttcagatctgagaaagcagtcatcactccttcatctgcttctaagttttcaaaattttgttgagttacaattctcacagcctttataggtatataatccttaaaaaatggaaaaaaagctcttaaatatataactttaatgaaatttcaagaaggagcagatgaaattatgtgcatttagccaaccatgtttatttggaaacttgtttatagagaatttttttgttttgcctaattaccagcttctctgttagatgtctgaaagtctacaatggggtgtgtgtgtgtgtgtgtgtgtgtgtttgtgtgtctgtctgtctcatccttccctccttaggaata

SEQ ID NO: 859297 - DNA, 625 bp, Homo sapiens
gcaaggcatgattgtattttgaaatgagaaggcatgagatttgggagaagtcaggagcagaatgatatggtttggctgttttcccacccaaatctcaccctgaattgtagttyccataatgcctatgtgttgtaggagggacccagtgggaagtaatttagtcatgagggtagttacctccatgctgctcttgtgatagtgagtgagttcccacgagatctgatggtttcataaggggctattcccccctccttcaccctgtacttcttacaaccaccatataaagaaggacatgtttgcttccccttctccatgactgtaagtttcctgaggcctcctgagccacgtttaactgtgagtcaataaaactactttactttatcaattatgcagtctgagatatgtctttatcagcagtgtgagaacgagataatacattggggaaaggtaggcaaagggtacattgggggaagctaggggaaaggtacattgtgggaagctgagtgaaaggtacattgggggaagctgggtgaagggtacataggagtcttctttcttcttttgcaacttcctgtgaatctgtaatttttttaagtaaaaaattacctacactgtggccaacatt

SEQ ID NO: 859298 - DNA, 580 bp, Homo sapiens
ctagatgcccatcaatgatgcactggataaagaaaatgcagtggatatacaccatggaacactatgcagccattaaaaaaagaatgaaatcatgtctttgcagcaacatggagttggagggcatttattctaaggaattaacacaggaacagataatcaaacactgcatgttctcacttataagtgggagctaaacattgagtacacagaaacaaacaaaaaaacgagagacgctggggcctacttgagggtggggcatcagaggagactgaagataaaaaaactacctatcaggtactatgcttaccacctaggtaacaaaataatttgtataccaaactccaatgacacacaattcacccacgtaataaacctgcaaatgtacccccaaacttaaattaaaaactgaaagggaaaaaaatacaaggaggtggtaagtcgtagttccatatgggcacagggcaaaatcagaggttattcatgcagatgcaggamccacagatttatcaatcaatgaaacttatgcctaacaaaaggagtacaaagttttgatttcacaaatcttgtcaacaaaaatgga

SEQ ID NO: 859299 - DNA, 498 bp, Homo sapiens
tcactatcagtatgcaaggtttcccttcttttcatatcacccctggcacttgttatcgctttttttttkggaaacagagtcttgctctgtctcccaggctagagtgatcttggctcactgcaatctccacctcctgggttcaagcaattttttttttgtatttttaatagagactggagtttcaccatatcggccaggctggtctcgaactcctgaccttgtgatcttcctgcctcagtctcccaaagtgctgggattacaggcgtgagccaccgcactcggcccttatcccttgtctttctgagagtagccttgttaacaggtgtgaggttatatctcattgaggtattgacctgcatttctctgatgattagtgatgttagacaccttttcttacatctgttgaccatttgtatgtcttccttggaaacatgtgtattcaggttctttgaccaatttattattgtgttgttaggttttttgctgttgaattacatg

SEQ ID NO: 859300 - DNA, 435 bp, Homo sapiens; identical to SEQ ID NO: 815744

SEQ ID NO: 859301 - DNA, 638 bp, Homo sapiens
ctgtaattgcaccttctccaacaagggctgaatcctagtggcccttgcactgggaacttccaaatagttaaaagacttttctgacgcaatctgaggcgatatggacaaatgtggatttccaatattgcatcatgaaatgtatcaacatttgcaagatctgtataactcagtgaaccaatatttccagatgatcaatccatgatgcaaaaattccatttcaagtgtaagatagatcaatggattttaatgtaacattatatgaaaaggtttctcattccaagctgtaacctttaagaaagcaccattttttgagttttaatgtaatttccataaatacccacaattatcagaaaagattattaagctattcctcccctttccaaatacatatctgtgtgaggctgtatttttttttatgaacttcaacaaaacagcctatcacaacagggtgcgtccagaagcagatacgtgaatctagctggtttctattaaggctgccattaaagagatttgtgaatataaaacaargccactgttctcactaattttgttttggaaaattaaaaaactattgtatatattcacgtatgatagatgttatttttaaatgaattaacaaatattttgtaattttctct

SEQ ID NO: 859302 - DNA, 651 bp, Homo sapiens
cgtttcttatttgagtaattctttgctggttataaatgtgccactctagagtactttatttagaagttaaaaaaaaaatgcattctccaagaragagctcagcattacccaggggagtaaggttcactctcctgtggccctcctgaagccctgcctcagacattcatatattctcccataatctgatctaggttataaaaattaaaaaaaaagaggagagaggagagacagctggttttcccacacatatgacattttcctttatgcctggcttaacttttttatgacaggctgggttcactccattggagaatttctcccttcaaatgaactttgtgttttatgtttgaaaatttttctttagacaaacctggtaatttttcaagttaaaatgtgtacactttaagcacttaggaagtttaaggatccatctgatcggcacataaatctgaggttattcatgctaagctccccatgtctaactgcactcttaaaaaataataaaaagcaagtgacatattttaacttctttttaagtgaaaacccccagactgtcagtttcctcagtaattgattagtatctcggtacactcccctctctgtccctggtgacattcagtgtgcaactgcacttgctgtgcttgaggtagc

SEQ ID NO: 859303 - DNA, 600 bp, Homo sapiens
aggcccacacggagctgacccctcccagccagtcgggctragggtacagcactgagccagaagctgatgacctgtctgccttgacttgtgacctgccagatccctaggccttgccgggcctggctctgtctgtctgtacaatgatggttctgggctgactggtctctgaggcttgccagctcagcccacccatggctttttcctaccccttatctacctctaaacctctgtgccagccactcctgcattaccctgggggtactcctgagccaaggatcttagaccctccccttcaccctagtcagaccctttgctgacccttctctgggacccaagtcctggtcctatctgtcttggggaccataggcagttggtgccaaagactgtccccaggatacttgggatactttaaagtcatccagtaaaatgtcattcagggaaaatctgtccacatttacctggctccagccctctaatcaatcctcctttgggacgcctgctcccctgacatgtccaaagctgatgaactctttatctttccccagacctgctcttcctgtcacaacctcagcaagagcatcaccaaccagccggtcacct

SEQ ID NO: 859304 - DNA, 553 bp, Homo sapiens
cctaaatatgagattttgagaaaggcttgaccctaagggccaatagktagcaatttcaggaaggccgatttagagagaattgaatggccttgtaaggtagtgagctccccaagaatggaggagttcaagcgcagtcttgatgactgtggcaacactgtagacagcaattgttgttttggctgtccagtatctaagcactcttcttatttaggggaatcccaatatgagcgaagggggagccccactaaagaaactgatggggcagatgttctgtctttcagcttcctgacagatgatgcccagcatatgacttagacgaaggcaatcaactactcccattaaagactttggaacctaaggtgaccaagagtggaggggtcacggcaagtgtctgcagcagtgtccttgactcctgcctgtttccagagtctgattatccatgcccctgatagttctgtgagccacctaaactcgtttcctgcttaagttatccagaggtggtttctaacctggatataaacatctgatggaaggctgcactggatgaggtcac

SEQ ID NO: 859305 - DNA, 553 bp, Homo sapiens
cctaaatatgagattttgagaaaggcttgaccctaagggccaataggtagcaatttcaggaaggccgatttagagagaattgaatggccttgtaaggtagtgagctccccaagaatggaggagttcaagcgcagtcttgatgactgtggcaacactgtagacagcaattgttgttttggctgtccagtatctaagcactcttcttatttaggggaatcccaatatgagcgaagggggagccccactaaagaaactgatggggcagatgttctgtctttcagcttcctgacagatgatgcccagcatatgacttagacgaaggcaatcaactactcccattaaagactttggaacctaaggtgaccaagagtggaggggtcacggcaagtgtctgcagcagtgtccttgactcctgcctgtttccagagtctgattatccatgcccctgatagttctgtgagccacctaaactcgtttcctgcttaagttatccagaggtggtttctaacctggatataaacatctsatggaaggctgcactggatgaggtcac

SEQ ID NO: 859306 - DNA, 608 bp, Homo sapiens
tccatatacaaacagactgctttaagaaatcaaagttgacttatagggccaagaaaacccctggtaaacactggccttaaaccttttctatgcagtccctgtccagggttctcgatctgtggtaagtgaasaatatcactttctgacaagcccaggagccccaagttatcttggaacctcaaggagaggaattcacccaagggtcatactgatatttgcaggcacagataaatccatggctgggctcaaggctttgaaaaatctaagctgaaattccttatggaataaagttccattaaagtcaattttcaaaaaagcctatatggcaaataattattcttgctgactttatgcaaatattcatgccaagtatgataagactaacacttattttgcaagcaaatttgtttttaataaaaatggggactggagagagacaaactgtatttcagagaaagctatagtacctctgttgttagattctagtcttgtccactgcttttgagtttttattattttctgcaatttagactgattcctgaattctttctgggttacaggtcccaaaactaatgttttcaaatctttctttcatttttctgacttga

SEQ ID NO: 859307 - DNA, 445 bp, Homo sapiens
gacagccaaagccccaagggatccgatctgagtactttcgatgtgtcagcagaaggctcttcctctcacagtgatgatgcacatactgctatgtgtagtatggggcacacagtgtgctgggacctctccaggtcccggagaacataaagctgtcgtggactgtcttggccatgaaacattctccatgtaggcgtagccaaagttgagggttctggcagaggtgatgtgttctttaaaaaataaaaattaatttaaaaaaaagaaagaaaaaacaagggctctctttccttccgtgtactcactcttttgctgacatccaagggacttgttaagtggcaaatcagtattaagcacaagcgtgtgcaagagacccagggactgtgacacagtttggggttggtaggygcttagagttgggtgggcagcaggccttgcatttagcctc

SEQ ID NO: 859308 - DNA, 615 bp, Homo sapiens
ccttgtttggaaaatgaagatacttctttttaaattctctgctactagtatgtcccaacattatcacaaacaaactctaaataackttcctcaaaaatatctttatctttgtattagttttctattgttttgtagcaaattactacaaacttaatacaacacaaatctatcaccttacagtaggtcagaattctaaaatagattggcaggcctgtgatacttctcggggctctatagcacaattggtttccttgctttttccagctttgaaagcctgcctgcattccttggttcactaccctttctagcaaaggcatcactcagacctttgcttctgtgttcacattttctctgactccagtgctcttgtgtctcacttataatgaccctaaaattacattaggtccaccctgataattcagaaaaactgtctcatctcaaggtcctgaattaattcaaagttatttttgctaaggaaggtaatatagtcacaggtttgaggacatttggggaagaacattagcctccaaccattttcataactgattgatacctacctaggtatggaactgtatttttttttggctattcacagtaccttgaaattctatatga

SEQ ID NO: 859309 - DNA, 615 bp, Homo sapiens
ccttgtttggaaaatgaagatacttctttttaaattctctgctactagtatgtcccaacattatcacaaacaaactctaaataacgtycctcaaaaatatctttatctttgtattagttttctattgttttgtagcaaattactacaaacttaatacaacacaaatctatcaccttacagtaggtcagaattctaaaatagattggcaggcctgtgatacttctcggggctctatagcacaattggtttccttgctttttccagctttgaaagcctgcctgcattccttggttcactaccctttctagcaaaggcatcactcagacctttgcttctgtgttcacattttctctgactccagtgctcttgtgtctcacttataatgaccctaaaattacattaggtccaccctgataattcagaaaaactgtctcatctcaaggtcctgaattaattcaaagttatttttgctaaggaaggtaatatagtcacaggtttgaggacatttggggaagaacattagcctccaaccattttcataactgattgatacctacctaggtatggaactgtatttttttttggctattcacagtaccttgaaattctatatga

SEQ ID NO: 859310 - DNA, 503 bp, Homo sapiens
taatatggaagatatttcaaaacataaaagttgaaatgttttaaaatagcattttaaatgcctgaatcacttaaaagtgttctgaattttattcattctattttaattctatcctgagatatttcctatagatatttctaaatattttttgcagttacatcaagagctagaaaaggacaaatatccttatgcaatcaatttgactttaactatttcctctctctctctctatttttctcactttcctattacttgtgtcagtacctgagttttttcttatcctattttatttagagtgggaaaaagctatgactgaggaaaatgccaaagatctaatcaaggaattgtcaataataatcgtgtggctcaagccataaatcactttggattaagcatcacccttcatctgggtgtgaaatttccaatgccttttatttgttatctgccaatggarattaaaacattcccttcacaggggatctttcagaagcagatggatcccc

SEQ ID NO: 859311 - DNA, 478 bp, Homo sapiens
caaagctttttacctcatccttcccttccttccccagggccccagttcaggttcaaggaattctgctcaccctcttccaataaatagccagttgagtggtcttctctgcctccttttcctcttcctactcactcacagctgtgtcattaatctttctaaatacaagcccaacatcttactgtgttctagtagctcccacattaaagtcccaaatcctcaaaatggaatctaaagttctctgctaaaagtaaatgacacctctatgctttttctctccttatatgctcttaaagggcttgcatattccacacctatacacgttccccccattccccttaaaaacatgctctttttcctgcctccaaactcccatacgacgcactacttgagcctaaagagcccctgccctctgcatctccctgctggagtcctgctctttyttttttttttttttttttttaattctgttcattcttca

SEQ ID NO: 859312 - DNA, 593 bp, Homo sapiens
tgcaccactgcactccagcctggcaacagtgagaccatgtctcaaaaataaaataaaatgttggtcaaaatgacagctgtgaaattatattttatagttgtttcacatgtttacaggctatttgggtttctrcttctgaaatttgttcatctgctttccagttcttctgagatctttgtctttttctcattgattttcctttgatgctttcatgttttgacaatttctcccaatctcttgtttgtctaggaattttgcttatggagtcttctaatgaacagctgattctttacatataatgtgatcaaaattatttttcctcttggatttgtgccttttgtattttatttgggaaatcctctctattgcatggtgataaagagagtctcttatattcccttaatggaattttcaagtttgacattttactttgtgtttaaatcccctcataatttattttggtttagtatgagagatggggaatctaattttgttttgtgtttttctttgtttctatatagattaggaattttccctagaccacttactgggcagttcattcttccttcaatcactgtaacgtcatctctctc

SEQ ID NO: 859313 - DNA, 556 bp, Homo sapiens
tatcctgagtgctccattccaagtgagactctaaaaagctgattggagtctcaggaataatcggtgtggcttgtcaaatcrttgccttcctggtatggcgatggggctcagaaccagttgtcttattgtgggtgttataaatgtcattttggggtgtgtttttctttaggatttttccatttctccagagaaagagtgtcccaccttttgcctgaggggaattgtttggcagtcagtattcttgagaccatagagtggaagaaggctgggtgcacaaaattgattatctagacttccatggaatccccctccttttgacacaatgcctcttccctgttctctactctaccggatcctgtctgaagactcttcacttggtttttccagataattacctagttcttaataccactgagaaggggagtcacctgccttctccaactgggagagaacctgagggactaactgcccattatacagactttcaacctaatcctcccttttctgtctacccctcttcccacctttgtatcttggtgcttccagtttctaaggc

SEQ ID NO: 859314 - DNA, 431 bp, Homo sapiens
caggcaaagcatgagatgctaactttatttatttatttatttactttttgagatagggtcttgctstgtcatccaggctggaatgcagtcgagcaatcacggctaactgcagcctagacttcccaggttcaagcgatccttctgcctcagcctctcaagtagctgggactacaggcgtgcaacatcatgcctggctaatttttttattttttgtggagataaggtctcaactatgatggccaggctagtctcaaactcctgtgctcaagcgatcttcctgcctcagcaccccccaaagtgctggaattacaggtgtcagccagcatgcacggcccaagacgctaactttaaatcacttgttgctcaagtccaatatccctgtgattctgcagaaaaatgtaaaacagctacaggtagttttagtatcaaat

SEQ ID NO: 859315 - DNA, 616 bp, Homo sapiens
tctcctgcagtgtggaactttgaccaaacaactgaatacaatgctgagaaacctcttagaacatggccatgggtaatagtgctatttgtaatcaaagacttaaaatagaaggacaaaggatctatggccatcccttgaagagttttaggattagtattcaataatttaggctctcaagtgtgctagttaccatacaggctataaaaataatatatctactttagtttgctattcatgtagtttatccatttataccttattagaaaacttggccaaggacagttgtgtaatacaattaatgtgcccctcagttagatggccacatttctcctgtattgacatttttacatctgcttttgaggcaggagaggtatccaaggaagtaaccatgttcttgggatgcagcaaccttggtgatcatacaatcaacaacacaaatctcagcatttacatcgtaactgagctcattcaagcaaagctattttcaatagggaattttccccatagagagcatgtgcattttgattttacctgtcctcacagtgaccctttgctcattatgatagtaaaaaacacascccttgggggagatttaagatgctaatgagacacgtaa

SEQ ID NO: 859316 - DNA, 641 bp, Homo sapiens
acacatttacccaattttaatattggactgtaaggtaagatgtttatggaccctttttaaccctttataatttttgttaaagagcaggttagtgctttaagagaaacctgttgtgctcttactttaatratcaatttacagaaaaactggatgatgccccttcaactttagccaatatgtttatacccagcatttcctttacaattaaccttccaaaatgttcttaaactttcatttttattttattcaacttagaacaattctttaaacttttaatctaggtaaaaagtcacactcttatgcctctttataatctttttgccaaaagtatatgcaaactgttttctcaataatcttacatgcatgttacactgttaacttttagcaagctttacttttgttggtaagtttgggattttaattatgtactaggtatagagcctaggacctagacagaagtgcagataaggtctgactcattccagcatttaactccatgtgtcctgggtcttacctagctgtaaaccaggcaagttgtacagctaagggttatagtggcattttataacgcattcaggaggcctaatcacttttaaattgtttaacatgtcttgcataaattcccttttataaaatgtttc

SEQ ID NO: 859317 - DNA, 641 bp, Homo sapiens
acacatttacccaattttaatattggactgtaaggtaagatgtttatggaccctttttaaccctttataatttttgttaaagagcaggttagtgctttaagagaaacctgttgtgctcttactttaataatcaatttacagaaaaactggatgatgccccttcaactttagccaatatgtttatacccagcatttcctttacaattaaccttccaaaatgttcttaaactttcatttttattttattcaacttagaacaattctttaaacttttaatctaggtaaaaagtcacactcttatgcctctttataatctttttgccaaaagtatatgcaaactgttttctcaataatcttacatgcatgttacactgttaacttttagcaagctttacttttgttggtaagtttgggattttaattatgtactaggtatagagcctaggacctagacagaagtgcagataaggtctgactcattccagcatttaactccatgtgtcctgggtcttacctagctgyaaaccaggcaagttgtacagctaagggttatagtggcattttataacgcattcaggaggcctaatcacttttaaattgtttaacatgtcttgcataaattcccttttataaaatgtttc

SEQ ID NO: 859318 - DNA, 620 bp, Homo sapiens
ttttatgttgcttttgtaattgactacctcattaaattctcctrttgtgtctgttggttagtctgttgatttttgtagtttttcttttaagttgaacttatataatatacaatgaattttccttttcctttccagtatttgcacctcttggttcattttcttaacttttgttggccagcatttctagaacaatgttctagatcatttctggagcaaaattctttgctaatgggcaatttcgtctttttcctgactttccttggaaagctcttcatgtttctgcatttgatttggggcttatatctatctctagctagtcttacttcaggtttttaaaaattgagaatggatgtcgagtttatcccatgtctttttagcatatgttgaggtgaagataaagtaaatctttgctttctaatgtctccagaaaaaaaaagcgccatcttttgatctcctaggctgagcacctacactcagccacttggactttcacttaacatgcccccatcctcagcctctagacctcaagaccacccctttccctgtcccctgtctcctgggcctagtgttctggtgcccagggtctgtctggtgcactctggttcccagtgggatgatgt

SEQ ID NO: 859319 - DNA, 620 bp, Homo sapiens
ttttatgttgcttttgtaattgactacctcattaaattctcctgttgtgtctgttggttagtctgttgatttttgtagtttttcttttaagttgaacttatataatatacaatgaattttccttttcctttccagtatttgcacctcttggttcattttcttaacttttgttggccagcatttctagaacaatgttctagatcatttctggagcaaaattctttgctaatgggcaatttcgtctttttcctgactttccttggaaagctcttcatgtttctgcatttgatttggggcttatatctatctctagctagtcttacttcaggtttttaaaaattgagaatggatgtcgagtttatcccatgtctttttagcatatgttgaggtgaagataaagtaaatctttgctttctaatgtctccagaaaaaaaaagcgccatcttttgatctcctaggctgagcacctacactcagccacttggactttcacttaacatgcccccatcctcagcctctagacctcaagaccacccctttccctgtcccctgtctccygggcctagtgttctggtgcccagggtctgtctggtgcactctggttcccagtgggatgatgt

SEQ ID NO: 859320 - DNA, 620 bp, Homo sapiens
ttttatgttgcttttgtaattgactacctcattaaattctcctgttgtgtctgttggttagtctgttgatttttgtagtttttcttttaagttgaacttatataatatacaatgaattttccttttcctttccagtatttgcacctcttggttcattttcttaacttttgttggccagcatttctagaacaatgttctagatcatttctggagcaaaattctttgctaatgggcaatttcgtctttttcctgactttccttggaaagctcttcatgtttctgcatttgatttggggcttatatctatctctagctagtcttacttcaggtttttaaaaattgagaatggatgtcgagtttatcccatgtctttttagcatatgttgaggtgaagataaagtaaatctttgctttctaatgtctccagaaaaaaaaagcgccatcttttgatctcctaggctgagcacctacactcagccacttggactttcacttaacatgcccccatcctcagcctctagacctcaagaccacccctttccctgtcccctgtctcctrggcctagtgttctggtgcccagggtctgtctggtgcactctggttcccagtgggatgatgt

SEQ ID NO: 859321 - DNA, 595 bp, Homo sapiens
ctcagcctcccgagtagctgggattgcaagtgcragccaccacacccagtcacttttttctatttttagtagagatggggtttagccatgttgaccagcctggtctcgaactcctgacctcaggtgatctgcccgcctcaacctcccaaagtgccaggattacaggcatgagtcaccatgcccagcctgttttcaacctacttttatgcactgtataggtttttaaaaaatcaactaccctcaaaaatgaatgagtccattttctttttcgaatattgcattgtgattaaatatttattatcacaaatgttttcttcgttttataagtgacttttggatcttttttcgataaagaaagaatacaggctcattgtagaaaatagagaaaactgtgaagaaaaacaaaaccttttccaaatcctgctaatcggaagtaacctttgccaatattcagctctctaccctgacagtcgtcacagaaaacagaggggtctctgttcatctagtgcctctgtgaacagctgtgtgaggtgcaactcagtggggcatgagggcgtctctcactaagttgctaggtatacacactacacatatt

SEQ ID NO: 859322 - DNA, 595 bp, Homo sapiens
ctcagcctcccgagtagctgggattgcaagtgcaagccaccacacccagtcacttttttctatttttagtagagatggggtttagccatgttgaccagcctggtctcgaactcctgacctcaggtgatctgcccgcctcaacctcccaaagtgccaggattacaggcatgagtcaccatgcccagcctgttttcaacctacttttatgcactgtataggtttttaaaaaatcaactaccctcaaaaatgaatgagtccattttctttttcgaatattgcattgtgattaaatatttattatcacaaatgttttcttcgttttataagtgacttttggatcttttttcgataaagaaagaatacaggctcattgtagaaaatagagaaaactgtgaagaaaaacaaaaccttttccaaatcctgctaatcggaagtaacctttgccaatattcagctctctaccctgacagtcgtcacagaaaacagaggggtctctgttcatctagtgcctctgtgaacagctgtgtgaggtgmaactcagtggggcatgagggcgtctctcactaagttgctaggtatacacactacacatatt

SEQ ID NO: 859323 - DNA, 506 bp, Homo sapiens
tctctcttaaaatagaaatggaaagaaatatacactttataggtgtggtcatgaaaagaggagcctagcaatagagagaggaaatcttgaaagctccccatcacaatctagaaggaatttctccagggggtttaatgactggtgattggttgattttgcttatctgtattttcgaatttttctacaaaatacctacctatgccttaggcaccgtcattctatatggataaaatgtgttgcatgttttaaaatgccaagggtacgagtcctctgtgctcttattcattttatctaattgtttaaagctacaggccgggcatggtggctcacacctgtaatctcagcactttgggaggccgaggcaggaggattgcttgaggccatgaatttgagaccagcgtgggcaaygtagcaagacctcatctctacaaaaaaaattaaaatattagccaggtgtggtagtgcgcacctgtggacccagctacttgggagtctgaggctggagg

SEQ ID NO: 859324 - DNA, 654 bp, Homo sapiens
tagagaagacagaaatatcctgggtcccagacagccatggaaccaccagtctagtcccgcctgtctatttgctgaattatttttcatgagagataaataaaatrtcatgcagttcaaaccactggtattttagtttttctattgacaaagtcaaagcttatcatacattaggtaataactaacattcattgatggcctattttgtgccaggcactgttctaagaacttgacatgtagtgactcttgtagtctatgtcgatattattttttaacatctaacttattttaatatatttatacccattttaaagatgaaaaagttgaggagcagagatattaagaaacttgcccaagatcacacagtggcagagcctaggctcccaaccatgacattaaaacaagctgctcagaagctagagacttctctttttaaaatcttattatctctgttctcttttgattttaaacaaattactatggggtcttgcaataaaacttactaggggaacttatataaaaatcataacttctggctgatacttctgaaagcactattttttctttgttcttaaccttcttaaattttctctttaaagacctggattgatctcctcttaccctggagtttgcaatgcatggagcagaccccaggct

SEQ ID NO: 859325 - DNA, 629 bp, Homo sapiens
ttcagttaaacctatgatgcctttagtgttatctctttcctagaaatgagatgtttggttattttatgtctgtgtgtgtgtatgtgtggctgtgatagcactggtatttatagtttcctgctaaattacgtatttctgaaccttggtaaactgaacagattgaacgtttgggtcccatttattggccatacgcttagtgaagacacttgttttcatccttttattactgctgtcatgtctagaaacatgagtttcaaagaatggcaatgtgcttgttttctgattaatacaattatgaaagtttcaaatttgtaaaacatttacatttttaaacatattattttctttacttattaaaggaccaaattggcttccaagtcaatactaaataagtattttcaaaaagcagaaataaaatatccaccttttaaaagcaaatgtcattgtatttagctctattattggtactttaaaaaaattttaacctgggaatattttaactctcagcattgagatgtataaggaaaagctctctgtgatatttacacaggtccatttacatttttaatgttgactttggagttggcayactggaaaagaattagaggtaagatgacttgataaagaag

SEQ ID NO: 859326 - DNA, 576 bp, Homo sapiens
tttcaagagatccatgacttaatcgctattttcacaatgatagtaagttattatttgactttgccacccatattctctcacaaatgcagtttttcagagactacaagatatgataaattgcaacagattgaatgcagaagcagagaatccagttatcttctattaagtcagacattaatgatatcttcaagaatataaaagtgccactcatcatttttttgttttataacatagttttttaaaggatgtatttcatgttaatatgtaatgtatttctttttgtaatttttaaataagtgaataaataacaattcctcagttttaatttaaaatccaataaatatttatagatatcacccacataaacaaaatctctttgagatcttcaataatttctaagatgtcctggatcataaatgttgaaaactggccatgcgtggtggctcacatctgtaatcccagcactttgggaggccaaggcaggtggatcacttgaggtcaggagtttgagaccagcctgaccaacatggcgaaaccccgtctctactaaaaatrcaaaaattagccaggcatggt

SEQ ID NO: 859327 - DNA, 615 bp, Homo sapiens
atttatatagttcaggtggagattgtgagaaaggaattataagatggagaaatacaaagaatctttgtgttttgttggagagccagaagagcttcaagcagatgtaagatgcatgccttacacatctgtgaatgtgggtgattattatgtggaaaagtgactctcttggtagccaagcagaagaactctatttttttctacctctatattaatattattacgactgttattacaattatcagaatgagattaacataccagaccagaccagtatagatacagaaggagttgtgttttattaccagagtctaaggacatatccattcctattggcactcaaaatccaagttactagtactgtgtcagctaatgtgaaataagaacagggcatattatgccaggagccattatcaggagcaggcacaagtaagatgtcagccatgaaagcatagaagaaactagaggtggcatttgggcctggggagcrttttcctacttgtttctgcatttctaattcttgagtgatgagagaattaacaaagaagaggatgcctcttctttgaggtccacttctcattactctgcttcctttcatggagtaactgtgttaaaatg

SEQ ID NO: 859328 - DNA, 524 bp, Homo sapiens
aaaatatttgacaatgaataacaatgaaagtactttatatcaaacattagggaatgccaccaaattatattgagagggaaatatgtaactgtacatgcagctattaaatagcagtgaaaattaagactaaatgtgctaggtgtccaagtcaagaataggaagagaatagcacagtaaacctggaaaaagtagaattcaagaaatcacaaatggaaaagatactaataggaggtaaaacaaagaaacaatagagatgatcaacagaataaaacctaactcttagagcacactgaaagtgggcaacgttctagtacatttgatcaaggggaaaagaaaatacagaagcgattaattttcaaaatgaaaaagggtatatcacatctgacaccaggaagattttttaaagattatttggggaataaaacaggatacacatctgaattggtgttctcatgaaagaacmctagagtaactttatgccaacacatttgcaaagtttgacacagaggacatatttttgtggt

SEQ ID NO: 859329 - DNA, 612 bp, Homo sapiens
atagaaaacaatcaacagaatgaaaaggcaaccaacagtatgggaagaaataattgcaaatattatatctgataaggtattaatatccagaatatgtaaaaaaacaaatagatttaaaaattggcaaagaagttgaatagatatttcttcacaaaagatatacaagtggccaataaacacataaaaagatgttcaatatcactaatcattagggaactgcaaatcaaaattacaatgaggtatcacctcacatccatcaggatggccgctatcaacagaacacaaaacagcaagtgtttgtgaggatgtgaagaagttggaacctttgtgcactgtgagtgggaatgtaaaatagtgcaaccatacataccgaaaaacagtacggaggttcctcacaaattaaaagtagaattgccatacaatccaacaatcccactgtggctagatattcacaaagcaaagtgaattatttccaaataattcaaggagatacttgcacacccatgttcatcacaagactatttccaatagccaagaggtgaagcamctcaaatgtccatcaacaggtgaatagataatgaaaatgtggcatatacatacagtgaaaaacca

SEQ ID NO: 859330 - DNA, 583 bp, Homo sapiens
aattccatttttgttgacaagatttgtgaaatcaaaactttgtactccttttgttaggcataagtttcattgattgataaatctgtggktcctgcatctgcatgaataacctctgattttgccctgtgcccatatggaactacgacttaccacctccttgtatttttttccctttcagtttttaatttaagtttgggggtacatttgcaggtttattacgtgggtgaattgtgtgtcattggagtttggtatacaaattattttgttacctaggtggtaagcatagtacctgataggtagtttttttatcttcagtctcctctgatgccccaccctcaagtaggccccagcgtctctcgtttttttgtttgtttctgtgtactcaatgtttagctcccacttataagtgagaacatgcagtgtttgattatctgttcctgtgttaattccttagaataaatgccctccaactccatgttgctgcaaagacatgatttcattctttttttaatggctgcatagtgttccatggtgtatatccactgcattttctttatccagtgcatcattgatgggcatctag

SEQ ID NO: 859331 - DNA, 307 bp, Homo sapiens
catccccttggtcataagtgagttctcattcarttcacctgagatctggttgtttaaaagcctgggacttctcccactcactttcttgcaccatgtatcacactggttcccacttgccttttgctaggattgtaagcttcctgaggtcctcaccagaagcagacgctggcaccatgcttcctgtacagcctgcagaactgtgagccaaattaaacctttctttataaattactcagtttcagttattcctttatagcaacacaaaattagattgacagagggtgagaaatttgattcaggataagca

SEQ ID NO: 859332 - DNA, 630 bp, Homo sapiens; identical to SEQ ID NO: 858091

SEQ ID NO: 859333 - DNA, 617 bp, Homo sapiens
tgttatattctccattagagcagcactgtgcttgtttgtttccttaagaacctttgtttttttataatcatgtactttttcacagcatcacacagacataaactatgaaactatgtttcattccaagtagtcccctgtatgtggcattgtacacagactcgtcactcaaatgcattactcaggtgaattattctttcagagttgaatgtaatttgctttccgataatccttttagtaaaataaaagagtattttattgtttgtggaaaataagatttaagttcgaaacaaacttatttataagctgtttgcccttggctagtttagtaaagacctcagggactcaatttttctttataaagcgtagctaattatttacatatttttattattagaataaattatacaaaatgttattcatgctcaagtatttacataaaattttattattgatattgaattatgcactgagattattatggacaaggactgctcccaggggtggaagttaaaaagaagatgaatgaagagtgtcagtttaaaattttaataaataaatgtggtacmaattgagctctgaacttatgtagataagatctgccaaatgccaaaattacc

SEQ ID NO: 859334 - DNA, 594 bp, Homo sapiens
caatagataggttagttggcagacgtgaaacatatatatatatagggaattagcagattattagtcaataactataaaggctttactatgtgccaagcagtgttctgagcacataatacattgattatttaatcatcacaacaaatccccaatatcccctttctgcaaataaggagattgaaggacatacaagttaagcaatgttccccaaaatacttgataattttcaattaagagatgatacctatattctgaccaaggtattctggttccagagtccaagtcttaactgcatgtctgtatttattgctctgcatttcaaagactataactgagaaattcaccaacaacacagtgatgaggcattattcatcttttcatttaacaaatataaattgagtacctgcagtgagtcagccactgttctaggcatttgggatgcattagttgttggggtgggggagggagaaaactgacaaatatctccatttatatggatcttatatcgtttgctagaaagtataaaagatataaaaagggattgaatcattmtgttaggtaagaaatcataacttagctgttgtaccaatagtc

SEQ ID NO: 859335 - DNA, 632 bp, Homo sapiens
gccaatgtctagaagagtttttccaatgctattttctagaatttttataggttcagatcttagatttaagtctgagatcttgagttgatttttgtgtgagagatgaggatcmaatttcattcttctacatgtggcttgcaaattatcccagcaccatttgttaaatagggtattatttctccaattaatgtttttgttcactttgtgaagattcattggctgtatttagctctatttctgggttccctattctgttccattggtctacatgccaatttttataccagtaccatgctgttttagttgctatatccttgaggtatagttggaactcaggtaatgcaattttttttttggcaggtgttacaaaaagggttgtgttcttgatttgattctcagcttggtaattgttggtatatagcagctttactgatttttgtataccacttttgtatcctgaaactttactgagtttgtttctcagatttaggagctttttggatgagtctttagggttttctatgtatacaatcatatcatcagtgaacaggaacagtttgacttctttactgatttggataccctttatttctttcccttggctggtttctctggctaggacttctagtagt

SEQ ID NO: 859336 - DNA, 490 bp, Homo sapiens
ttgctgaggtttttaatcataaagggatgctgaattttgccaaattatttktctgagagttttcagagtttatttagataatcataagatttttctttttaattctgtttaagtgatgtatcacaattgttaaattgtgtatgttaaaccatccctgcatccttggcatgaaacccacttgatcatggtggattatctttctgatttgctgttgaattcggttagctagtattatgtggagggtttttgcatctatgttcatcagggatactggtctgtagttttcttttttgttatgttgtttcctcattttggtattaggatgatattggtttcatagaatgatttagggaggattccctttttctctatctttttgaatagtttcagcaggattggtaccaattgttttttgaatgtctcgtataattcatctgtaaatccatctggttctggaattttggggcaatttttttattactatttcaat

SEQ ID NO: 859337 - DNA, 628 bp, Homo sapiens
gcatatactttttgctcagattcctgttaatattttccatttcctttgccactactcccatgtacatgtatattatcacacatacaaaagcatttaaatgtaggttacatgtattatatttattatggttgtttatccctaaatactttcttatgtatttcctaagaaaaggaatattttcttacataaccatagtgtagttatcaactttaggttatcatttaatgctttaaaaaatttaatggctacacagtgtaaatttttttatgttttgtggagttatgtaaaggtatatattcccttgataactttataatatgtttttatctcttcaagtggttaatcatgcattttttaactttatcagttaattccaggctaagaaaaatgttcaaaaaggatacttatgtgtctttttgttgtcattctagaattttttaggttgtattattcttgttggttctagtggttaatttttttccttttcaaaatatacatggaatgctgtcaactttaaatactttctgatagaaatttcctatgagatgagaagatgggtggatgtattcsatctgccaaattctttcttattctgtttttcacttttgatagcttttggttgttgtca

SEQ ID NO: 859338 - DNA, 606 bp, Homo sapiens
aagacggatgcagcaggaggccattttcctaaagaaaataatagaaaaacaaatactgttatgttctcacttgtaagtgcgacctaaacattgggtacacactgacaygaagacgggaaaaatagacactggaaaatacaagaaggaggaggaagggagggggtcaagggctgaaaaattacctattgggtactgtcttcacttcttggttatgttagtccatttttgcaccactataaatacccgaggctaggcaagttataaacaaaaaaagaggtttaattgtgtcacagttctgcaggctgtacaagaagcatggcaccagcatctgattgtagtgaggactcaggagctcacaatcacggcagaaggtaaagggaaagtagtcaatgtcacatagcataagtaggagtaggagatgtgggggaagagtcacacacttttaaacaatagatattgtgaaaattcactctttaactatcatgaggacagaacccagccattcatgatggatcaaccctgcagtatcttctgcaaggccccacctccaacatggggaatcatattcaccatcagatttggaggagacagacacccaaattatat

SEQ ID NO: 859339 - DNA, 659 bp, Homo sapiens
tcaggggtcagggacccacttgaggaggcagtctgcccattctcaggtctccagctgcgtgctgggagaatcactgctctcttcaaagctgtcagacagggacatttaagtctgcagaggttactgctgtctttttgtttgtctgtgccctgcccccagaggtggagcctacagaggcaggcaggcctccttgagctgtggtggtctccacacagttggagctttccggctgctttgtttacctaagcaagcctgggcaagggcaggcgcccctcccccggcctcactgccaccttgcagtttgatctcagactgctgtgctagcagtcagtgagactctgtgggcgtaggaccctccaaaccaggtgcgggatataatctcctggtgcaccatttttttaagcccatcggagaagtgcagtattcgggtgggagtgacctgattttccaggtgccgtctgtcaccactttctttgactaggaaagggaactccctgaccccttgcacttcccgagtgaggtgatgcctcgccctgctttggctcscacatggtgcgctgcacccactgacctgcgcccactgtctggcactccctagtgagatgaacccggtacctcagatggaaatgcagaattcacccatcttctgcatcgctcat

SEQ ID NO: 859340 - DNA, 566 bp, Homo sapiens
ggtcagcacaattataggaaagaagggatatgaacaggtttccataaaggggaaaggggagccgtacctaagctgactgagatgggctgagccattgtggtcaagaacaaacagcaatcaatatttcctgggcaagaaaagcagcagggagaagagggttcattcaatatttaaagacagtgataagcaagggacaactttgatgtcatcaggccagaacagacgatgactatgaagacaagaggtaagcccatacatatctggcagttaagaaagacagactggcactgatgtaagatcaaaatgaggaaacaggccaggaacagtggctcactcccagcactttgggaggtggaggcagcccaattgcttgagctcaagaatttgagaacagcctggaaaatatggcaaaaccctgtctctactaaaaatacaaaaattakctgggcatggtggcatgtgcctgtagttccagttactggggaggctgaggcaggagaatcgcttgaacccatgaggcggaggttgcagtgagctgagatcgcatgccactgcactccaacctg

SEQ ID NO: 859341 - DNA, 626 bp, Homo sapiens
cttgatgttttatattttccccgactgctgtttcctgggactccaataccagtttccttttactggaaacacagaggcaaatgacaacatcatccttactgaaacaccctgcctccaccatacccatgcaagctgtaagtcaaggccaacccggtttcccatttgcctgggggtggaggctgtttccacaaaagaaaggagtgaaactcttggacacttgtcctgtgggtttcattgttataagccctaatagttctgtctttggggatgacattatctggggcagagctgacagggcctgaagaggattctgttaaaatatgctgaaaaaccccagtttgcattgttctaagcattcagggtgagagcaaggggcacctatactgacctgttttctttcaggtagaaatatttaggacaaaaccacactgttatctagattttgatttatcaatggcagacaggggtcaaggaacatatgtgtatatctayacacatttatatagcccctgtgtgtatgcattttgcatgaagttggtacctgtcatcctgtcatacctttaatttttcattccattgctaagtgtgtgtattcagtttaggtgcataaaaaaaggtggctcttc

SEQ ID NO: 859342 - DNA, 515 bp, Homo sapiens
aaaaaagcaaactagtagccaagaattctgtatacagcaagaattaagctttaggagaaatactcttttccagataagcaaatsctgatagaatttgccacgactagattggaaatagaagaaatgatcaaaggattcctaaacttgaaagtgaaagaatggtattcaccatcatgaaaacacacaaacataaaactcattgttaatgcaataatacaaaaggggaagtgaaaggaacacaatgacaccactacagaattccacaaaaccaaaaatgaacaatgagaaaaacagagaaaagagaatgtataaaataactagacaacaattaataatatgacaggaacaaaacctcacctatcaatactaaccttgaacataaaagaattaaacactgcttttaaaaggtatacattggtaagatgggttaaaaaacatgacttaaccataagctgtctacaacaaactcatcttatctgtaaaggcacatacagactgaaagtaaagcagtggaa

SEQ ID NO: 859343 - DNA, 495 bp, Homo sapiens
tggatcccaaaaaagagggaatcagcccatctcccatggragtcttatttctcagtgggggtagggatatttctataccttttaggtgaccaagagcatgcttctctaatccaaacatgcaaagagttgagtatctctcccataactgccattagacatccctaaaattacatttcctacttagttattacacatcaatgttctctcataatgcaaagtaatacctgatactcccaaaagtaaaaaaaagtcaggtaacagaatgtaaaatcaaactgagccttagattttgagagacctctatctgctttcaattcccagggttccatgaggaaaacagaggttttttttctcagaatggaaactgttagcaattatctcaagctctctcatgtgagcatcaagaacagcaagaaggcaaaatgtagaaataattaagtcaactgagaagaaaaaagctatttttccaggaaaataagattcaaaaagagaaaa

SEQ ID NO: 859344 - DNA, 603 bp, Homo sapiens
caaagcctaattgggcataagtatcagagaaactattggagcctgtgagctgagyctgagtaattagaatgccattagtccaatttagctgagcctgtagaccggcctcctctgcccaccaggctgagatggggtcagaacagctttttgccaaaagatcctagtctaaaggaagcaaagtgacctgtgtacaaaaagtttgtaataccattttaacataaggagaagtaggaccatactgagtacaagcatccttaagttcttttaaaaagataagattacaaggtacataatgacacagacgggaatgacggtgtgagaaaggggcattgaaggagcagaagaggcagagattactggcatccatgtgtgaagaagggtacagagaagcaggctgggtggatggccaagtgactggttgaggaaccgaaatgacaggagggtgaggggctgcagtggttgggggagggcctggagaattataggtaaattataggttggtcctggagccattagctgatgccagaggtttgaagagagaagaattagcatatctatggtcctgggctgtgtgagtcaaggctgggagcttcaagtacctgc

SEQ ID NO: 859345 - DNA, 603 bp, Homo sapiens
caaagcctaattgggcataagtatcagagaaactattggagcctgtgagctgagcctgagtaattagaatgccattagtccaatttagctgagcctgtagaccggcctcctctgcccaccaggctgagatggggtcagaacagctttttgccaaaagatcctagtctaaaggaagcaaagtgacctgtgtacaaaaagtttgtaataccattttaacataaggagaagtaggaccatactgagtacaagcatccttaagttcttttaaaaagataagattacaaggtacataatgacacagacgggaatgacggtgtgagaaaggggcattgaaggagcagaagaggcagagattactggcatccatgtgtgaagaagggtacagagaagcaggctgggtggatggccaagtgactggttgaggaaccgaaatgacaggagggtgaggggctgcagtggttgggggaggscctggagaattataggtaaattataggttggtcctggagccattagctgatgccagaggtttgaagagagaagaattagcatatctatggtcctgggctgtgtgagtcaaggctgggagcttcaagtacctgc

SEQ ID NO: 859346 - DNA, 305 bp, Homo sapiens
ctcaacttggccctccaaactatgtatgatatgtatgattccagacttcctttccagtctgatcttattacttctaagagttggagaggtccctgtagagagaaggtatgacagtaacagataaagtggtgrccccctggttggctattggcttgattgactcctgagggggacatgccccatgcctaccatagacatacccttggtagtagagagggagacaggagggcccactttttgtgatccgccttactcatgctcatgttctcttcagatagatacctccagttgctgggtctttcatc

SEQ ID NO: 859347 - DNA, 649 bp, Homo sapiens
tgttaggagcatgggcccactggtgttccactaagatgagcagagggtagaggtggtgagtaactactagctaacttttctctctcttcttaggcactggtgagaaaaattgatgcctcagacaatatctacaccacagagtccaccacagggaacctgttcagcctgacccaggagggggctcccttgtgccgcatcatagccaaggtgagcttcatggttagggaccaaaatggcaggcctggggaagtatgaggaagctcacttgttcaatgggaatagctggctcacgaggtctgtcttggcccctgcattagctgctgagtctccttgggagagtcacttatcctatctgggacttggtgtgtgcatttttttttttttttttttgagacgggagtctcactctgtcacccaggctggagtgcagtggcgcgatctcggctcactgcaagctctgcctcccgggttcacgccattctcactgcctcagcctcccgagtagctgggactacaggygcctgccaccacgtccggctaatttttgtatttttagtagagacggggtttcaccgtgttagccaggatggtctcgatctcctgatcttgtgatccgcctgcctcggcctcccaaagtgctgggattaca

SEQ ID NO: 859348 - DNA, 562 bp, Homo sapiens
accatcctatgaagaaagtaccatgttgttaccatcaacagytgaggaaatggtttaaggagcttattcaggatcatgcagctgacaaggagttgagacagaattgaaccccagcctctttaagtttaattcagagttcatggtcctaaaccccacagtggtgacttctggttcaatctttggcccttcaggtccttgagccaaagtgtgactcaggagttctcaatcctggatacacaatcgaactactagggagctttaaaatttttaggattctgacttaattggtctggagtaggtcctgggatgaatattttagctttccaagtgattctactgtgctgcgtgggttgaggacctctactctcttttgggagtcatttaaatgtatttaacctgaagagcttgtagtggtgttggagcaaaggggatggaggagatagcattggatctgttttctccaaggattctgtgactcaaacatttaacttggtcaagagggctgactggagatttttgtcttggtgctgtgggggaacagccaacagctccaacctctgag

SEQ ID NO: 859349 - DNA, 608 bp, Homo sapiens
cgggagcgaatcagatgcatagggcctgaagtgaacccccagcaaactgcagcagctccacagaagagggacctgactatcgcaggagaaacaaacaagcagaaagtgacaacaacagcatcaacaacaacatcaaaaaggcctccacaaaaaccccatccaagggtcagcagcctcaaaggccaacactagacgaactcatgaagatgagaaagaaacaacgtaaaagtattgaaaacccaaaaggtcagagtgcctcttctcctccagatgatctcaacgtctctccatcaagggcaaaaaaaccgggcagaggatcttatggacatattgacagaagcaggcttcagaagatgggtaacaaaaactatgataagctaaaggaacatgttctaacccaatgaaaagaagctaagaaccttgataaaaggttagaggaatcgttaactagaataacctgtttagagaggaagataaacgacctgatagagctggaaaaygcagtacaagaacctggtgaagaataaacaagtatcaacagcagaatcaaccaagcagaagaaaggatgttggagtttgaagaccaccttactgaaataagacatgcg

SEQ ID NO: 859350 - DNA, 595 bp, Homo sapiens
aatttcagcagatacttgaaaatataggtcagtgaatcagaggagattttgtrctaaacacagtagattgtgagttatttgtgtatggaatgaaaagtactgtggctctaagattgagggttgagtaacgccaacactaataattctgcgacagagttttagaagtagcagacagagtgggaagaaagttaaaagggcatgttacctaggaggccagtggaaaagtaactcaaaaaggaagacctgagtaaggtaagtacagaaatatgttccttggattgaagcctacagctgtcatcggtaattactttgacaaccgttttagtgaaacaagagaaagaaataaaggtcacccaagtagaaagacaggaagtcaaagtacccctgtttgcagatggcaagatctatatctagacaatgccatagtctcagccccaaagctccttaagctgacaaaaaactttagcaaaatcccaggatacaaaatcaatgtaccaaaattactagcattcttatactccaacaacagtcaaactgagagccaaatccagaatgcaatcccattcactattgccacaaagaataacatacctag

SEQ ID NO: 859351 - DNA, 595 bp, Homo sapiens
aatttcagcagatacttgaaaatataggtcagtgaatcagaggagattttgtactaaacacagtagattgtgagttatttgtgtatggaatgaaaagtactgtggctctaagattgagggttgagtaacgccaacactaataattctgcgacagagttttagaagtagcagacagagtgggaagaaagttaaaagggcatgttacctaggaggccagtggaaaagtaactcaaaaaggaagacctgagtaaggtaagtacagaaatatgttccttggattgaagcctacagctgtcatcggtaattactttgacaaccgttttagtgaaacaagagaaagaaataaaggtcacccaagtagaaagacaggaagtcaaagtacccctgtttgcagatggcaagatctatatctagacaatgccatagtctcagccccaaagctccttaagctgacaaaaaactttagcaaaatcccasgatacaaaatcaatgtaccaaaattactagcattcttatactccaacaacagtcaaactgagagccaaatccagaatgcaatcccattcactattgccacaaagaataacatacctag

SEQ ID NO: 859352 - DNA, 620 bp, Homo sapiens
caattttagtttttatcttcattttttcttcagtgtacttctatttggttcactttttgttactagttttatgagttaaaattttaacatatttatgcttattattttattagtgtaggcatgtaaaattagatctaattgctactttaaatgtagtccatgaattttgatatgtagctttttcaatattaattataagagttcttaatttctatatatttttttaaattttagattcaggagatacatgcatgtgcacatttattacaagggtatattgtgttatgcagaggcttgggcttctgttcatccagtcagtcaaacagtgaacatggtacccaatacacagtttttggcccttgcctctctccctccatccccctgtttggagtccccattgtctattgcactcatctttatgtccctgggtactcaatgcttagctcccacttataagtaagaatatatgatatctggttttctatttctgcattgaattttttaggataatttcctccagctgcacccacattgctgcaaaggacattatttcattccttgttatggctgagttgtatttcatattgtatacgtrccacattttcttcatgaaatctgcc

SEQ ID NO: 859353 - DNA, 595 bp, Homo sapiens
gcatgcaaactccgtaataattttagaccttaaggataataggaagataggtccaagatgtataagtattaatgtattttcttgtgtaaaggaaggcttaatatagttaatataatatgcaagtgtcccttattgtgttgtgattagcatacataggaagtaaagggctgtaattagtatattaagtcctataagcataaaagtgatgtttggtcaggagaatgaagccatagtcacaaagatttctcctactagattaatggtaaggcaaggttagtgagatttgctaggagtcatcaagaggccattagtggaagcagtgtttgaaggactcgggtaagtaatatgattcggctatggactcatttgtagtttgaatttgctaggcagaacggtaaggatgaagtgagtctgtgagaaattataagggtgactgcacctgtaaagcttcaaggggtttgaatgaggacagccatgataacaagtgctatgtggctaacgcaggmataagcaataagtgattttagattggcttgtcgcagacaagtagagcttgttataactatccctcataggaatagtatgaagaaggggt

SEQ ID NO: 859354 - DNA, 565 bp, Homo sapiens
ttgtttagaggacatccgaggaaatatgtttgaagaccactggtgaagcacgcgagtggatatcaagaagcttcaactccattcttttctaaggctgccttgcacatggatgaacactatcctccttcgcatgatcttggctcttaaaactgtgctacctcccacactgaggagccaccatctctcttgataaacttgttcccacatcagaagaaaaagcatctctgtttcctccattgtcattacactttcccaagcgtctcatcctgagcagtcaaccccatcttgctcacccacaggaatgagctctttttatcatactcataggtgtgtttatgtatgctgttgtatgttgggtatagcagcattttacagggtctcatttttagtaattacccctccagctagagggttttcataagcatgaatacctcagctgacaggtaaacgatcagttataaattcagcagttcatattctcagcgagctggaactggggtgaggcaagttaggtgcaaggawgcaaatttttattttattttattttatttatttattttttatt

SEQ ID NO: 859355 - DNA, 625 bp, Homo sapiens
acatttctatacaccaataacatttacgctgagagccaaatcaagaacacaatcccatttataatagccacacaaaaaataaaatacccaggaatacctctaaccaaggaagtgaaagatctctacaagaaaaaactataaaacaatgctaaaagaaatcacagatgacacaaacaaatggaaaaacattccatgctcatagattggaagaattaatgtggccataccactcaaagcaatctacagatttaatgttattcctatcacactacaaatgtcattttctcacaaaactagaaaaaactattctaaaattcataaggacccaaaatagtgaccaaataaccaaagcaatcctaagcaaagagaacaaagccctaggcatcacattatccaacttcaaactaactataaagctactggtacaaaaacagacacataaacaactggaacaaaatagagaacccagaaataaagctgtgtacttacagccatcttatcttyaacaaagttgacaaaaataggcagtggggaaatgactccctatttaataaatggttctgtgatagctgtctagccatatgcagaagagtgaaattggatccctttcacttatacaaaaatt

SEQ ID NO: 859356 - DNA, 589 bp, Homo sapiens
tgggaatgcaaaatggtgcagctattatgaaaaacaggaasggggttccttaaaaattgaaaatagaattatcacatgatccagcaatcccatttttttagtatatatccataataattcaaagccggatctcaaagagatacttgcacacccatgttcattgtagcattatttgcaatagccaagaggtgcaaggaacccaaatgtccactactgaatgcatagatgaagaaaatgtggtatatatacacaatggaatattatccagcctaaaaaatgaaggaaattctatcacatactacaacatgagtgaatatctagggcatgctaggagaaagaagccagtcacaaaataacaaacactatatgatttcacttatatgaagtatagtagacaaaatcagacgagagagtgacaccagcaagatggcagagtagaagttccttcagcatcattctcctaccaaagtacaactaaaaactactcaaagagaagaatactaccctaaattcaccatatattggggaggggagtggaaaagccacctggacccacagaatcaagaaatgcttcaactagtaaggggaa

SEQ ID NO: 859357 - DNA, 589 bp, Homo sapiens
tgggaatgcaaaatggtgcagctattatgaaaaacaggaagggggttccttaaaaattgaaaatagaattatcacatgatccagcaatcccatttttttagtatatatccataataattcaaagcmggatctcaaagagatacttgcacacccatgttcattgtagcattatttgcaatagccaagaggtgcaaggaacccaaatgtccactactgaatgcatagatgaagaaaatgtggtatatatacacaatggaatattatccagcctaaaaaatgaaggaaattctatcacatactacaacatgagtgaatatctagggcatgctaggagaaagaagccagtcacaaaataacaaacactatatgatttcacttatatgaagtatagtagacaaaatcagacgagagagtgacaccagcaagatggcagagtagaagttccttcagcatcattctcctaccaaagtacaactaaaaactactcaaagagaagaatactaccctaaattcaccatatattggggaggggagtggaaaagccacctggacccacagaatcaagaaatgcttcaactagtaaggggaa

SEQ ID NO: 859358 - DNA, 511 bp, Homo sapiens
ccaactctgccatcacagtcaactttttaaaatgtttttatttccataggttattggggagcaggtagtatttggtttggttacctgaataagttttttttttttttttggtkggagtcttgctcttgtcacccaggctggagtgcagttctgtgatctcggctcactgcaatctctgcctcccaggttcaagcgattctcctgtctcagcatcctgagtagctgggattacaggcacccgccaccgcgcctggctaatttttgtatttttagtagagacggtgcttcaccacgttggccaggatggtctcgaactcctgacctcaggtgaccctctgtcctcgacctcccaaagtgctgggattacaggcatgagccaccgcacctgcccatgagtaaattctttagtggtttgtgagattttggtgcacccatcacccaagcagtatacactgcacccaatttgtagtcttttatccctcacctccttcccaccctttcccgtgaggcc

SEQ ID NO: 859359 - DNA, 666 bp, Homo sapiens
gaaacgtagtaagtgctaaaaaatgttacatgagagtattatcattayggctcagtgagcaggtcccttctatctttgggaatcatagaatattagagctggacagaaacttaagaggggtgttttttaagcctcttgaccaaaatctttattaagaaaaacactttattgtataacctagtacagaaaaatatattacttgccagcaaaatggaaagttaatgtttttcagaaattgttaaaaactggggcttgtttgtgattgcttccggcatttacctctttatatttttttcatttttaaaagttaataagcatgttatagaggaacaaaacaatttcaatacacacacgtattgaaacagaaatttcctaaaacaaggcctattttcgctacttgtaatacactctgatattttctctttggttggattctgttttgttttcttctaaaatattggtatgacccactaaattgtctttaaaacctcttaatgagtcactgctaatggtttgacaaagcatttcttttcatagataaaaggctaaggctcaatgtggtttgtccaatatctcttatatgactaggcgcagaagttggtcttggaccaaggtctctgggcttccaatcttgagagacctagagtcactaaagggcaccaagat

SEQ ID NO: 859360 - DNA, 654 bp, Homo sapiens
atggaattctaatggaacataagaaaagaagggaaaaacagaaacaaaaacaagatgagcactctgcaatggraaaagctccacgtaggaggtgaaacttgagctggacctaaacgtgtggacaggctttgaagaaaaggaaaaggacttggaaagaagaagtgaattaggtaaggcatagagatggaaaaaaacattcaccttgaggatcaaaaaggagctcagcttgatgtcagaaaaggacatgtttgggagatcggtagaaagcatgcagggagaattgcatgaatagctgtagtaggcagaataatggcccgtaaaggagtgtgtgtcctaatctccaggatctatgaatatgttagaatacaagacaaagaggaattaagattgctaaccaaatgaccttaaaatagagggattatcctagtttatgctgttgggcccaatgtgtcacaagggttctataagtagaagaggaggcaaaagagaagcttgcagcgacatgctttgaagctttgctttgcagctctggctttgaggatggaggaatggcaccacaaaatgagaaatgtgagcagcttctaaaatagaaacagggcaggaaatggattcttacttccctgtagcctccgtagggaacacctctctgcccaa

SEQ ID NO: 859361 - DNA, 460 bp, Homo sapiens
tcattatagtttcccactttgggtagttagtatgcatttaatccattcatatttgtattggaatccacagctctatccagacccaaaggagtgctactaaacagttttcacagctcagcatttttttgcactaaggaggaaagctggacaagtttataaaatgctgacagaaatacacaataatttagcgagcttccattcgcagtcttcaagaataactgccctacatctcccattattgtttcaactcatccttctgaaatggctcaccaagtagagagatgccgtaaaggtatggtcagcaatgaattattagtaagcagtataagcatggtgataaaccttttaaaacttgcatcwatacggcaggcacttcagaaggtaaataggtataataacacatctatggggttccccctctctccccactgtcacatgtatttcttttcaaagagaagaa

SEQ ID NO: 859362 - DNA, 564 bp, Homo sapiens
cctctgagatgtttacttttttaaaaaaacaagccctggtcttttgccttctgcaggtaagagcctaacattgatcgcacatggagcaagattaaaagggtgcctcatcatatgttttcttgcctccatattcaacgaggattctgccattaaccacattaccagaactgaattaaaaagcaaaactggccaagtgtggtggctcgtgcctgtaaccccagcactttgggagggtgaggtgggtggatcacttgaggtcagaagttcgagaccagcctggccaacatggtgaaaccctatctatgctaaaaatagaaaaattagccagacatgggggcatggtagcacatgtctgtaattccagctacttgggaagatgaggcaggagaacaggagaatcacttgaacccaggaggcagaggttgcagttagccaagatcactagagacactgtctcaacaacaacaaaaaagcagagctaccatcctaccctaactctaatgcctttgtttgttatctgtagtccacatccagccttaycttcctggccttgcttccttctcc

SEQ ID NO: 859363 - DNA, 513 bp, Homo sapiens
attgtctggtgttctcaaaggcatcagcactcaccaccacggcaggcctggatgatgatcaccttcggtttgtccttcaaacttgggcagttcttggtattcaacatgttaaagattgcattgagttgtartatatctgggacttgctcagagtgtttcttcccacaaatgccttcccgaataccatgagacatgaacaccaggaacgtgctgtcagaggtcttgtgctctgggcggtgtgcaaatgcctccagctctgtagtcatgtcctgaaagacaccatatcactgattttcgactatgtaattaactatcatggtaccttggaaagtcaataaataaatacttaaggagtttcttaaggaattccgtgacaaacaacagggtgccaaaaaaaaatttagtcttagtttcaagaaaggtgaaggaaagtgttataggaagtcatccagagttatcttgtagagagacagtggcattactgagtcaataaaacatttcccaattcagtta

SEQ ID NO: 859364 - DNA, 643 bp, Homo sapiens
ttataatggctataaaaaaatttcatgaaataataaggaataaatgtaaccaaaaagttaaagatgtatatactcataactataaaacattgacagaagaaaatgcctgagattcacaaaaatcaaaagatatcccgtgttcatgaattggaaaatattacattattatgtctatactacccaagaaatctatgaattcaatacaattcctattaagcctccaatggcattttttacagaaataggaaaatcaaccttaaaattcatatggaattatttaaaaattcaaatagccaaagcatccttgagtaaagaacaaaactggaggcagcacacaacctgactttaaaacatactgcaaagttataataatcaaacatagtactggcataaaagcaaacacagagatcaatggaataaaacaaaaaggccagaaataaacccagttatttacagtaaatttatttttgacaaagtttcaagaacagacaataggctaaggacactttcttcgataaatgatgttgggaaaattaaatatccaagagcagaagaatgaaaacgggcccttatctgycaccatatacaaaaatcaactcaaaatggattaaaaacataagcctaataactgaaactttgaaac

SEQ ID NO: 859365 - DNA, 607 bp, Homo sapiens
acttctaagagatcatctcgggtggcataagtctggactataatttgttggtggtcatgctcaattggttccctatcctctgggagaaaagtggcaggrttgagggccacacacgtacgtatttgaagcaccggtccctcaaggagtagcacttggtatctaagtaggcagttgtctgatagccataaacttcctttggcacctagtatgccatttacatcatgaatggtccagacagtgagatcctttccttgtattatttttatagcctctgacactgagatggccactgccacaactacacataaacagtgaggccagccttttgctactacatcaatttccttacttaggtatgccactggttgtggggatgtcccatgagtctgagtaaagactgcaagagctatcccagctcctctgttacgtataaagagaagttttgtcctgtggaaggcttaaagctggagcttgtactagtgcctgctttaaggttttgaaggctgttcctgcccctggttcccattctactagatgagtatttgccctctgggtctccttgattagagtatagaggggcctggatatctcactgtatccagggatg

SEQ ID NO: 859366 - DNA, 525 bp, Homo sapiens
tcatctccactcctggctggcttgccaagaaatgttgcaggaaactgaggaatggcgagaccaatatgagagtacaggaagatatttatttttaggtacgcactggctgagtggatttatatccaaaaacctgagcattaaacaaagacagagcagggtttttataagtggacttacaaaagtaaaacaaaagcagttaatcatatagtgcataacttgtggccttgcatagctggtggccttggagctgtgtcaaaagaaaatcaagaactggctaaatacagacatttgtaaaacataatcatgcttaagaagccagggaaagaagtaacagtaaaggaatttgtctttctctttttttttttccttcaaccttgttctggaggggagggatgtctgcagcccattcctttggccttggcttctcaaacagcattatcttataactgtcyttgaagtgagcttgctaggccgaggaaaacttgttcttttctttttaacccttgccttgcctgttacttttct

SEQ ID NO: 859367 - DNA, 579 bp, Homo sapiens
gaagctttggtacctaggaatcatctaggacattcgtggaaaggatttagactaggtgacttctgagatcgcctgttaagattccatggtatcatgcttctttcttttaatgtgaataaattccaaatcatttcttgaaaaatgatttgggccaggcacagtggctcacacctgtaatcccagcactttgggaggctaaggtgggcggatcacttgacgtcaggagttcaagaccagcttggccaacagggcgaaacctcgtctctactaaaaatacaaaaatcagccaggtgtggttgcacattttcacatgcctgtaatcccagctactcaagagcctgaggcaggagaattgcttgaacctgggagatggaggttgcattgagccgagattgtgccactgcactccagcctgggagacagagtgagagtccatctcaaaaaataataataataataataatgatttagatagtgaattggagcatctgtaatctgaggaaggaggaacagaaacagagcagaactgtaaggaaaatgcaaactaagtatggrtccctcacctaagcctgggcctcc

SEQ ID NO: 859368 - DNA, 505 bp, Homo sapiens
taaaggttattaaaaaacagattgagtgccccactaattctttttaatttttaacttctaagtgttttacacttttttaagggaaaatcttgtgaaccagagctctttgctttgctggctttggagggcagagccagacaactctaagagcaacagaggaaatctctgctcccctgttttctgccccagtgggactgtgcttttctgctagttggagtctggcttctaattctaggtttacataatcaagctgagtgtttctataaaacttggattccattatatgtgtagttgtcacaaactatacatgtccataatcagcaactttatggaacacttaatatctagcagtattctgactggaacctattttctagagtttaataacaattattaactaaagctgcaaagtgtagacccacaactttaacagtgattgcagattttttttwaaaaaaagtgttagcaaatgacttcaattaaaacagaaaatgaatttgccaga

SEQ ID NO: 859369 - DNA, 588 bp, Homo sapiens
acaaataatagaattactggatcaaatggtagcagtttaagccaaactgctttgaacactggctaattcagatttctaccagcagatataaatattcccttttctttacaacttcaccagcacctgttattttttgactttttaataataaccattctgactgctgtgagatggcatctcattctgtttttgatttacgtttctcttatgatcagtgatgttgagcatttttttgtaggcttgccggccatgtgtatgttttctttttaaaactgtttgtttatgtcctttgcccactttttaatggagttgtttaattcttgcttggttaatttgtttaaattccttacagattctggatattagaccttttttggatgcagagtttgcaaatattttctcctattctaaatattatctgtttactttgttaatagtttcttttgctggcagaagctcgttaatttaattaatcccatttgttgatttttgttcatatagcaatttcttttgaatctttgtcatgaaatctttgctagagcctatatcaggaatatttgtaggttwtcttctagcatttttatagtt

SEQ ID NO: 859370 - DNA, 511 bp, Homo sapiens
agagattctggtatgttgtatctttgttttcattaatttcaaaaaaattattgatttctcccttaattttaattttattgtttattaaaatgccactcaggagtaggttgtttaatttccttgtaattttactgttctgagtgatcttcttagtatcgatttctatttttatagtgctgtagtccaaggatgggtcagtatgatttctctttttttttgttagtttgctgagcattgtttaatggccaattgcgtggcagactttagagtatgtgccatgtacagatgagaagaatatataatctgttgtttgaagtagagagttctgtagatacctgttagacaaatttgttccaatgtcaagttcaggtctcaaatatctygttagtcttcatctaatactgtcagtggggtgttgaagtgtcctactattattgtgtgattatccaagtctcttcagaagtctctaagaacttgttttatgaatctgagtgctttggtgttgtgtaca

SEQ ID NO: 859371 - DNA, 568 bp, Homo sapiens
aattttctcccattctgtaggttgcctgttcactctgatggtagtttcttttgctgtacagaagctctttaggttaattagatcccrtttgtcaattttggcttttgttgccattgctgaacaaagctggaggcatcacactacctgacttcaaactatactacaaggcacagtaaccaaaacagcatggtagtggtaccaaaacagagatatagatcaatggaacagaagagagccctcagaaataatgccacatatctacaactatctgatctttgacaaacctgacaaaaacaagaaatggggaaaggattccctatttaataaatggtgctgggaaaactggctagccgtatgtagaaagctgaaactggatcccttccttacaccttatataaaaattaattcaagatggattaaagacttaaatgttagacctaaaaccataaaaaccctagaagaaaacctaggcaataccattcaggacataggcatgggcaaggacttcatgtctaaaacactgaataatatttcattgtatgaatgcagcacagtttatttattcatt

SEQ ID NO: 859372 - DNA, 659 bp, Homo sapiens
ccagggactagggactagtgctgacccccagcacagtgcagctgccccacagaagagtggccagactgttctccatgcaggtccctgtcctcacttctcctcctaggcaaaacctcctgacctgggacttcagcatgactaacacgcccctggttaatatttcaatcagaggcagcaagacatttctcaggggaggaaatcccagaatcaattgacaatgcttctgcctttgtagctgcacttgtaccaccctaactgcccttgggctgggaaagaacaaaaggcctagtcactatcctggcacccccatgcagcagccaccaaatggagaggaatccaactcctcttccctggaacccccaccccccaactcgtcaccaggcagggcaacaagctcaggaccacagaacagctgccccacccacggatgaacacaacaactggtagaggctctgagtttccctggagagaggctcccagaggcaataaacagcccctcagccactgccacaggagtggttctgcccctgatgcactcagcctgggaaagaaacaaggcaccggagggcttcatccaagcgaacagcatgccwcagccacctaccaacaggatcccagtctctcctctctgtgagcccttaacccctgcttcccaacaa

SEQ ID NO: 859373 - DNA, 613 bp, Homo sapiens
cttatccatgtaaccaaaaaccacctgttccccaaaaactattgaaagaaattttaatatgaatgtctttttctcacaccatgaatttaagttatcyaaattaatccttaaaaatatcttctaccttggacattatcattattattcaatgtctgaagaggcaacacatttaagagatgaagcaatttgcccaaggttaatttgttcagatgaaattggcccatatagctaaatagtttctaaaataattcttatgattttgcattctctgctgtctctctccatctctgctttccttaatgtactatttgatggcagaaggagcatgactgagagaagagattttagtgcagacggtagaagtggacagatttggagaataaacacagtttatttgctctacgataatcacaaagccatttaatgattttccagaataagccagtgcaggtgttaatttgccccagagagagatttgaaaaaccactccactctcacggctagcttgagcttttatttggcaagagcaaaaacacttctatttgggagacactggtatgtgaattgaatcactcggctaattgattaaatgcaaagttatactaaatcactc

SEQ ID NO: 859374 - DNA, 582 bp, Homo sapiens
tggtgctcctgaggagaaagaaaaatctaaaagtttggaacacatatttgagggaataattgaggaaaacctcactggccttactaaagatctagacagctagacaagaagctcaaagaactaaagatctagacatctagatctaggcatcttactaaagatctagaaatttagacaagaagctcaaagaacacttgggaaattcattgcaaaatgatcttcacctacgcacacagtcatcaggttatctaaagtcaagatgaagtaaagaattttaagagctgtgagacaaaagcatcaagtaacctataaaggaaaacctatcagattaacagctgatttcttagcagaaacttttcaagccaaaaggggttggggtcctatctttagtctcctgaaaaaaaataattatcagccaagaattttccagcaaaactaagcttcataaatgaagaagagataaagtctttttcagacaaaaaaaaaatkgcttagagaattggccagtaccaagccagcactacaagaaatgctaaaaggagttctaaatcttgaaataaaacctcaaaatacaccaaaata

SEQ ID NO: 859375 - DNA, 582 bp, Homo sapiens
tggtgctcctgaggagaaagaaaaatctaaaagtttggaacacatatttgagggaataattgaggaaaacctcactggccttactaaagatctagacagctagacaagaagctcaaagaactaaagatctagacatctagatctaggcatcttactaaagatctagaaatttagacaagaagctcaaagaacacttgggaaattcattgcaaaatgatcttcacctacgcacacagtcatcaggttatctaaagtcaagatgaagtaaagaattttaagagctgtgagacaaaagcatcaagtaacctataaaggaaaacctatcagattaacagctgatttcttagcagaaacttttcaagccaaaaggggttggggtcctatctttagtctcctgaaaaaaaataattatcagccaagaattttccagcaaaactaagcttcataaatgaagaagagataaagtctttttcagacaaaaaaaaaatggcttagagaattkgccagtaccaagccagcactacaagaaatgctaaaaggagttctaaatcttgaaataaaacctcaaaatacaccaaaata

SEQ ID NO: 859376 - DNA, 576 bp, Homo sapiens
tcccagcatcacttattaaatagggaatcctttccccactgtttgtttttgtcaggyttgtcaaagatcagatggttgtagatgtgctgtcttatttctgagttctctattttgctcaattgctctatgtgtctgactttgtatcagtacaatgctgttttggttactgtagccttgttgtatagtttgaagtcgggtagtatgatgcttctagctttgttccttttgcttaggattgccttggctatatgggctcctttttggttccatatgaattttaaagttgttgtttctaattctgtgaagaatggaggtgaccatcctttctatccctcaatgctttcctgtctctaacatgctccccacccaagccaccttcatcctgctgcatgctctggagggaccctcagcaatgtcatctgaccatatctctctccttatgttggacaatacagtctcatctaatggtattccggttcctgcctacctgttcagcctcatctcttgactctttcctcctggcactttgaagcaaggccaagctccttgtcaccctctgcacttgctgtgttctgc

SEQ ID NO: 859377 - DNA, 639 bp, Homo sapiens
aaattgttactgcagtctcatctgttcattcctcccatgccacaggtgctttgcatcaacccstccatctaaaattcctctcttccctattcagttaaataaattctatcactccttaagattttgcttaagtctcacttcctctataatgtgttccctggccagcttagctctctctgagcatccagataactcactaccaggacaactcacctcacttttatttgtaacttgcagttacttctctactcttgtgaacccagcttcttcctctgcattttattgctttagatatccttgcatccctcatgtcatcttgcactttgtgctttcatatatcacattaaacattgattgaatatagtttaatctttcctatttcagaaggcacttcagaattctagaaggctcctaagacaattttgaatgctaattctcattattctgtttatggagaaatactagtcaatagagaatgttgatatcagagtctttcacatatggttcacacaaattctttagacagggttcaagtgcatccgtttggtagaataatgagtgaaagtatgaatgaatgaatgaatgaatgaataaaatgtacaattaaagaaacaaatgatgttttattgatcacaaaga

SEQ ID NO: 859378 - DNA, 582 bp, Homo sapiens
tctcattaaaaatagtacttytttataacattaattctggcagcatcttctttgtagtgtcaatataaaataggatgggttgtccatagagtctttgcctgattaaaatagactgtgatccttattttttattaatagaggaaactttacagaaagaagaaaatatattgaaataaaccatgtcaagcacctaaatcaggatgtgtctcatggtagtgaacaataaatgctgtccttcttccttctaccattaaagctaaattcagcaagactaagcctagagctttcagcatggcaagtaagtccctacagatttgatccctgcccacatctgaaatctgcaactctctctgtgaaactttacattgcagcaatataatctgccagtagttcttggataaatggttttatgctgtttctcatttatttgtctttactcatctgattcccctgctgggaatgctcttggctcatctaactccttcccgtcctgcctgactcagagcgggtgtcaccttctctggaaacacctccaatccttctcagcttggatcagctgttccaccttggaactcccacagg

SEQ ID NO: 859379 - DNA, 636 bp, Homo sapiens
taaatgtatgtcctggaatcattttggtagtgtttcagtagtgtcaactgtattttcctacctgttcagattattaccgtgaaccttttcctgcagttcattttatttatttatttttctgaaagtcgcctataaaatacactaaaacttattctgactccctcagcagttctttttaaacacaaattaataaattccaaaaaaattaccacctaaaaaaagaaagaaaatatatacaacatgagagacacagtcactttctacaaaaacaagtattgctgccattaccttaataagtactaactgcagttttaaaccctaagagaaaagacagaagagcagacaatggcaagcctccatttcttgtaacaggaaagcagtcaggatctacctatgttccccaaaagtcatatgtaagaatgctcatggcagtaccagaaacaacccaaatgctctttatacaatgggtaaaaacatggaggtagagttgtacaatgaaatgtgacacagcaatagaacatacacaayaacaagcgtattgttgagtacaaaaaagccagaaacaatgttcagtttccattacacatgaataaaaaaacaggctaaacaaatatatagtgtcggaagtcagagtgg

SEQ ID NO: 859380 - DNA, 611 bp, Homo sapiens
agggactcttctgggctgtgggtaattttctgtttcttcatcttagagctgattacacaggtgtgtttgtgaaaattcaagttgcacactcatggtttgtgctgttctctgcatgcatgttatacrtcagtaaaaagtttattaaaacaaaccaatagaatcactaggaaatgtctgaggtctgagctctaacttcttagaatcctgctcatagcttctccgtggaatctagagaaggcaggatctagagcttctctgtccagtatggtagccactggccacatgtggtttagagcactggaaatgtacctagtctgaactgagatgtgctgtaagtataaaatgtaaaggctcagtatgaaaaaagaatataaaatatctactttgcaaccgtgatgtgctgaaaaattttttaaataataaaaatgattttttaaaaaatcttgataattttacattggttacatattgaaatgataatattttagctatattatgttaaagaacacatactagtaaaattaaaattaactttgtttctttttacttttttaatgtgactactaaacttttatatatgtggctgacatttgtggttctagagcctccac

SEQ ID NO: 859381 - DNA, 611 bp, Homo sapiens
agggactcttctgggctgtgggtaattttctgtttcttcatcttagagctgattacacaggtgtgtttgtgaaaattcaagttgcacactcatggtttgtgctgttctctgcatgcatgttatacgtcagtaaaaagtttattaaaacaaaccaatagaatcactaggaaatgtctgaggtctgagctctaacttcttagaatcctgctcatagcttctccgtggaatctagagaaggcaggatctagagcttctctgtccagtatggtagccactggccacatgtggtttagagcactggaaatgtacctagtctgaactgagatgtgctgtaagtataaaatgtaaaggctcagtatgaaaaaagaatataaaatatctactttgcaaccgtgatgtgctgaaaaattttttaaataataaaaatgattttttaaaaaatcttgataattttacattggttacatattgaaatgataatattttagctatattatgttaaagaacacataytagtaaaattaaaattaactttgtttctttttacttttttaatgtgactactaaacttttatatatgtggctgacatttgtggttctagagcctccac

SEQ ID NO: 859382 - DNA, 531 bp, Homo sapiens
acagtccagttactatgtttcaaattcactttaaaaacctgtctctggttggccaggcatggtggctcacgcctgtaatcccagcactttgggaggccgargggggtagatcatgaggtcaggagttcgagacctgcctggccaacatagtgaaaccctgtctctactaaaaatacaaaaaattagctgggagtggcggcgcacgcctatagtcccagctacttgggaggctgaggcaggagaatcgcttgaactcgggaggcagaggctgcagtgagccgagatcgtgccactgcactccagcctgggcagcagagcaagactccatcaaaaaataaaaaacaaaactatctcttgttatgccaccccctcaatgcacaatcagattcacttgttttactttgctttgtatgaaaatagctttataaatctttaattttgttttataatttttctacagtttacatggtttcaaagtcaaaactgtgtcacaagatatattcaggaagggctaacctctatcatagttac

SEQ ID NO: 859383 - DNA, 634 bp, Homo sapiens
tttttacagtgtgtagtatyccattgaatggatctactatagtttattcaactagtcctgttttgattaacttacttggaggttttacagaccttttatattatagatagtgctacaatgaataatttcaatgtaaaatcaagatttactaactcctagtctgttgctccttttatactattggtgtagttctgaaaataaggcatatactaatttatattttatttgtcctttcatttacttaataaacatttattaagtacagattatgtgtcaggaagtggtaataattttgggggaacacagagatgcataaagtcagttcctatcctcaagaaattcataatcttacagacaatgcagactcatcttcaatagaatgcaaagccttaaaaaataaggtgtgaatgaatcattgtgggttcaacagaaagagaaattcactcagatcaaggaaattgggaaggagacatggataatgtgacatttgaattcaactctcaggaagagaagaatttcccaaagtatataacataaataagacatataggccacatggaggcttagaaatgatatatgtccttaggatttttaaaaatttcttacaaagagaatcatttcatatattacttat

SEQ ID NO: 859384 - DNA, 578 bp, Homo sapiens
gccaggtgtgctcactactattgggctactgctgtttccagactctcttagtggacaggaccagggaacacgcatttatgtctatatttcyacatatgtctgcctgtattgaaaaccaaaagttcatagcaaagcctccaattctaatccaatatagcagggactattttagtttctttcccctacatttcaatatttatacctgtcttctctgaaagggagaatcttggctctttttatccttaatatgtttaatttttgatccatctccctgtataaagccaacttcccatctctgtctcctacatgaatgacctcttccacattcttcaacactgcatgctgggcctcccctctccatggatgcctgccttacttgcttggacaaatcatgtcattcctcattcctcattgtgctctggctctgacactccacagtgagctccagtccaatgaacttccttcttgccaacatcaggctgcctcccaggcttaatacctctcaccctgcttgggctctgacacctgaccgtggaccactacagctccccttcttcatcctgacccattgttgcact

SEQ ID NO: 859385 - DNA, 627 bp, Homo sapiens
gtatttattatatacctacaatgtgtccaaaattgtgccacttgctagcggatacaacagtcttcaaaacatagtccctattttgatagagcttacagcttagatggtgggaatataggcagaaagaagacagctaaactcacaggggtcaaggaggcagggagctgggtaactgcttcagtcaccactattttatttgtacacatatgcatttttgatgttgtgatgttctggtacctatgcaaggtcccggagatgctctgggagcatcaggtgtggtccccgcccactctcatgcagctgtcagcctatgggggacacactcattaatccaatgatcacagaaatatttaattttgatctgtaataaatgctgtaaatgttacttaaaactgaagagaggcgaatgactgaatttcagctattatgaaaggctagcttgagagagttaattgcagacagaagcttttgggacctattgaatcacttccaagtaggcagcttctctttctgctacacaatattcagtgtgcaaatgtttagacaaatggcattgyggatggaactcacttttgaagtcaggtagattgggattcaaattttgattctgtttctcactagttggat

SEQ ID NO: 859386 - DNA, 640 bp, Homo sapiens
aaaagaggcgtaggcagtattatcaccttgttatagtttaggaaacagaggggttacacaacttgctcgagctcacactcagtkgtaagtggcagccagaattcaaataaaaatctatgtgatcagaacacttgttcttttaaaaatccaaatgaaggccaggcgcggtggctcacgcctgtaattccagcactttgggaggccaaggcgggtgaatcacttgaggtcaggagatcgagatgagcctggacaatatggtggaaccctgtctctactaaaaataaaaaaaattagccagggaatggtggttcatgcctgtaatcccagctgcttaggaggatgaggcccgagaattgcttgaacctgggaggcagaggtggaagtgagccaagatcatgccactgcactccagcctgggcgacagagtgagactgtctccaaaacaaacaaacaaacaaaaaggcaaatgtagtaattggaacgtaaatactcattcattcattcattcattcattcattcatgtaagcaggcagtatctaaccaccaggtatggaagcagctacttttacttaagattagttctatctaaatattctttagtccttcaggttcgtacttgtataatccatcctagcacag

SEQ ID NO: 859387 - DNA, 640 bp, Homo sapiens
aaaagaggcgtaggcagtattatcaccttgttatagtttaggaaacagaggggttacacaacttgctcgagctcacactcagtggtaagtggcagccagaattcaaataaaaatctatgtgatcagaacacttgttcttttaaaaatccaaatgaaggccaggcgcggtggctcacgcctgtaattccagcactttgggaggccaaggcgggtgaatcacttgaggtcaggagatcgagatgagcctggacaatatggtggaaccctgtctctactaaaaataaaaaaaattagccagggaatggtggttcatgcctgtaatcccagctgcttaggaggatgaggcccgagaattgcttgaacctgggaggcagaggtggaagtgagccaagatcatgccactgcactccagcctgggcgacagagtgagactgtctccaaaacaaacaaacaaacaaaaaggcaaatgtagtaattggaacgtaaatactcattcattcattcattcattcattcattcatgtaagcaggcagtatctaaccaccaggtatggaagcagctacttttacttaagattagttctatctaaatattctttagtccttcaggttcrtacttgtataatccatcctagcacag

SEQ ID NO: 859388 - DNA, 448 bp, Homo sapiens
tacagtcaaataggcttcatccctggggtaaaagattggttcaacatacacaaaccaataaatgtgattcatcacataaacagaacaaaagacaaaaaccacatgattatctcaatagaggtggaaaagtgtttgataaaattcaacatccctacatgttaaaaactctcaataaactgggtattgaaggaacatacctcaaaataataagagccatatgtgacaaacccacaaccaatatcatactgaatgagcaaaagctggaagcattcctattgaaaacaggcacaagacaaggatgccctctctcagcacttctattcaacatggtattagaagttctgccagggaaatcaggcaagagaaagaaataaaagrtattcaagtagaaagagaggaagtcaaaccatcttgtttgcaaaaaaagtgaacctatatttagaaaacc

SEQ ID NO: 859389 - DNA, 576 bp, Homo sapiens
aaatcagtgataatggcagaacaacattgttccatttttgaatagaaaaatagcatgaaaatgactgcatcatctgagaaataccttttctttagtggctcaagctcaggtaaatcatccccatcatccttttattatctttattggaaagccctggaccatataaccatacctatgtacctcagtagcagtaagaaatgagcaaagtaagacacattttgaaatgcttagtgacgaattgtttcaaccatccaaccaatccttgtattgatttgaatttacagagagaaatacattttaaatacagccaggcaccttagatttccacaaatgtgcacagaggccatatgaaaagttggtttaaaataatctaacaaatattcctttctcattttcatctatctcagaattcttctcaaccaggcaaaacctctaagcaagaaaattctcaaatcggttgtttcttatttytgatacgtgtcttggcaacatcattggaatttaggaatcagccagaaggactacattttaactataaagccatactttttataggattctaacttacatttactt

SEQ ID NO: 859390 - DNA, 607 bp, Homo sapiens
aatattttcaagaattggtttttctgagcagtttataaattgtgtcattatttagaaaggtctaataatgtggtaagctttgcacargcatcaagccacttcaaattagcttaacaattaaatgaccaaatcataaagatgttagagctactgtcacagaaaatcaaagctgggcagtagttaaattggtagaaacagattttattcagggactgttgcagtagaggaaaagagacctcactataaaaataagctcaatttcagatacaatatgaacaaatggggatttacagccaaggagcagggtggagatcagtggacagaaaattactaggaggaaacatcaagagtaagggggcattcttgatcaattgaacttactgaaagtgggccagagtgatcagatatcaatggtgagggattctctttaaactatatcccagaaaatgtacaatcattatgtatcaatagaataaattaacaaaaaaggtaagttaacagaattcctactaaaactgagaagtacaggcctgagaaggacagacactgaaacccaaggtcaaagcccagttgagaagagagcttagaggagcctgactaaagtttg

SEQ ID NO: 859391 - DNA, 250 bp, Homo sapiens
atgcatatatatgattatatataagtgatcatacatatgtgtgtatatataagcacatatataatcatatgcattattcctattattattttgaacaaactgttatctgttagattaagaaaaataaaacttttatwttgttttattttcatatattctttctccagagctctttctttctttatgtagatcaatgtttctgacctttatgatttttcttctctccgaagtacttactgcaatatttctc

SEQ ID NO: 859392 - DNA, 250 bp, Homo sapiens
atgcatatatatgattatatataagtgatcatacatatgtgtgtatatataagcacatatataatcatatgcattattcctattattattttgaacaaactgttatctgttagattaagaaaaataaaacttttattttgtyttattttcatatattctttctccagagctctttctttctttatgtagatcaatgtttctgacctttatgatttttcttctctccgaagtacttactgcaatatttctc

SEQ ID NO: 859393 - DNA, 613 bp, Homo sapiens
atataagaaccctaagctatttttcttaatttcttctgatggaaatactgataaaaattattataattttatagctaaaaagccgctaattacaaaaaaacgtgtgctttctaattaaaattttaaaaacatagtagttattaagtctgtgattatttttctagacccaaagttgcgtgtgttataaatacttcataacaaaggcagataattttttaaaaaaaaagttatttaagggccttgcacagtggctcacacctgtaatcccagcactttgggaggccaaggcggttggatcacctgaggtaggagttcaagaccagcctggccaacatggcaaaacctcatctctactaaaaatacaaaaattagctgcgcatggtggcgggtgcctgtaatcacagctacttgggaggctgaggcaggagaattggttgaactcgggaggtggaggttgcagtgagccgagattgcaccactgcactccagcctgggcaacagagcaagactccacctyaaataaataaataaataaataaataaataaataaataaataagaatggaaaaaattatagtatactgattttttctttatgtggtagaagctatga

SEQ ID NO: 859394 - DNA, 538 bp, Homo sapiens
agaattattagtattaaatataattcagactttttgcctaggtctactcatcagacatatttataccgtctctgctagatgttttaaggtaataacattcctactttcataatttttttgatacttgcttrgtttgtccttaagccaaagctataagagctggctgctgggttcccccaaagctttgcacacaccttactgtgagcttgtgtctttggtttggagcttctggattctgaggtctggacaggtggccatgatgatgtcaggaatatatgggattcatagtgcttgggccaccatttgcaaagcaaatgcaagctcaatatggccccatcctttctgacctagctgcctcctgaccatgttgagaggcatcaattcctctgggcatcgcctgcacaactctgtcttctgtcctgagctttacatttggtgtgtaaatttagggcccagacaggccatgttcttcatatccttccttgggtgcctcatgggtacttgagaaccaggacaactggggaagatataaggaaga

SEQ ID NO: 859395 - DNA, 550 bp, Homo sapiens
catcctagatttggacagtttcctcaagatcacaaatcaatacttctctgccatcacratacttttagctctcttaattgtttcccttgctatgaacaatagaactggaaaagggggcttgtgtttacccacttctttttgtgaaggattttgcagccaatcttatacatgggcagtcttgtgccttgatgaatgaaagatgaaagtccaatgtgggttagaaattttaatggtacctttgttacttcatagttagaacattggtcagctcctcttaacctacatcataggttaaagagaacagtgtcaggaggacttgagctttctggctgggcatcagttttaggtcactttttccatggcttggagtaaatgaggcaataatcaaaaatttatcccgcataataagctctgtagcaggattccactgtgaggttattgttgcacaatagaatttcaaaaattatctcgctaaaattgtactagattatagaattgctcaagattacctactagatgacaaaggaaaaatttgtgcagttgctgatat

SEQ ID NO: 859396 - DNA, 341 bp, Homo sapiens
cagagagaaagagaaaatatccagttgtcttkgtttctgccagcttttctgttcctggctttgaccattggtttgtctggctgttctaattatagtctctgtgaaatctatactatattcttgagaggtaaaggttaacttgtccaagactgatttcttgcaggttggacacagaaagaagctggcctcctgcaaacctccatggaaaccttttatgacctagggcttgaagcaaattaaccttagccaagagcaaggcttggacccagccctggtcacaccaggagtgggcctcccaattagtcaccaacacggttgtgtaaaaccttgctgctgggatg

SEQ ID NO: 859397 - DNA, 441 bp, Homo sapiens
aagtaaaatatagttaataaaaattgaatatatcccacaatgtactcatcttaattaactggaactctgtcagcctatatttctgcttaaaccctatgtagtgttattggaaatttattaaatarccttgaagcacttaaataaatgaaaaaaagtggaatcagtcacaaatttttaaaggtaaaacctgcatttatttgataaacttttaggtctgaatacatttgaacaattgtaaactggtaatttttttagtgatgtgtatagacattttctgttaactgaaatatttgattaaatcctgatatatcaaaacaagagtgatggtcaaaatattcaacaacttgtatggtacagacaacttcatcggcatgggcattagtcataaacaaccagtttgacccatactactgagtctctattataagtctttttgggagt

SEQ ID NO: 859398 - DNA, 619 bp, Homo sapiens
gtgaagcattgtctgggtaagagacaattgcatctgccatatccatgacagcaagaacyactatattttggttgaggatggaaaagaagttatctgaggcagaaatttcaggatttgatgatagcaaacaggtattatgtcttacatttaattatgtgatagattgcttttgtgtgaccttatctctaaaaactcagtaacatttggaatttaaatcctctctctaaagtttaaacagatcttttggggaggacatctcttccacaaactctgttaaattcatcacctgggctttgaaacaacactgcttgttgtctaggtagcatgtgagtctttagcagaacaacttttacagctttggcttttggggttccttcctataagagtccctggggccaggttggggagcaaatactgtattctcgtttctgaatttttctgtttttccccttagagcccacctataactcctcctttcctttagcatatgaataaatatcttcaggttaatcaaatcatgcccataaacaaccatgcttattcatccaattacttcttaaacttagctaggacgctctgtagcccatttttttccttttaacttttttgccacataata

SEQ ID NO: 859399 - DNA, 542 bp, Homo sapiens
taaatctattttgtgctgctataacaaaatactgaagactaggtaatttataaagaacaaatccttatttcttgcagttctggaggatggaagtctgtgatcaagrggccaacatccagtgagagccttcttgctgcatcatcacatggcagaagacagaagggtaagagagagcaagagacagcaggagggaagagggctgaatatatccttttattagacacccactcccataataactaacccagtcttgagatatgacattaatccattaagaggacctaatcacctcttacatgtcccagctgtcaacactgttgcattgggaattaagtttcccacattaactctgggagatacatttaaaccatagtactgactgatgtgtcaattatctttgtacacttcactgaaggtggcatggtgctttgcctacagtagaccctcaatatgttttagttctactgaaactgaggtggagcttacattgcagtgaaggaggaagtggaaaatggatttttagggagccagttctattggtt

SEQ ID NO: 859400 - DNA, 542 bp, Homo sapiens
taaatctattttgtgctgctataacaaaatactgaagactaggtaatttataaagaacaaatccttatttcttgcagttctggaggatggaagtctgtgatcaagaggccaacatccagtgagrgccttcttgctgcatcatcacatggcagaagacagaagggtaagagagagcaagagacagcaggagggaagagggctgaatatatccttttattagacacccactcccataataactaacccagtcttgagatatgacattaatccattaagaggacctaatcacctcttacatgtcccagctgtcaacactgttgcattgggaattaagtttcccacattaactctgggagatacatttaaaccatagtactgactgatgtgtcaattatctttgtacacttcactgaaggtggcatggtgctttgcctacagtagaccctcaatatgttttagttctactgaaactgaggtggagcttacattgcagtgaaggaggaagtggaaaatggatttttagggagccagttctattggtt

SEQ ID NO: 859401 - DNA, 508 bp, Homo sapiens
ttatcatcgagctctccagaaagcaccacagcagtcacagagcactgcagaagaaggttggtggcaatgagcttacccctttctgtgactgttagctctgtcatgggaatattatgrtgcacatctgggggattcttcacagcacagctgaatgtcccattgtcctttatggtagggttgcttatacttatagatgcatcccctttgtatacatttccaacccaggaaatccgatcccgaaatgtgcctgctgtggttgggtactggaaagactgataatgaaatatctaagaaagcaacaccatgagagaaaaggttaacttggaaaatgcaatgaaaatataaagctcagtaggtccaaaataaaatacaactgtataatggtgtgttttttttcagttgggcaactttttatgcttttttaacctccatcctataggttaataaaactgatcagaaaaaggcccgatgagagacttctgggatcctaacccttgaatctcttcta

SEQ ID NO: 859402 - DNA, 588 bp, Homo sapiens
cagcaaaggtgctgagttagctaaggtatttcagcctttctaccttcccctccatttcccattgaggcctgaagcttcaagagaacaagcaggttggacttgtcagagttgagaagcctttctgagtagaaagggcagccagctgcttgtccaggcaaacaggatgtgagtcttctcaggtgagtcagagctaaagaggaaagcytttcctgcctagctcagtgagggggtccacccttagctttggaaaggggaaaactcaggggaaagtcccagcaacatcgctcttttcttgcagtttgttccaatgttatatgctgtcttgagtgtcaatatctgctgagctacattagcaataaccaagaggaaaagaagcttttaaagccaaagaaaaattgtcatttaaagttgtcaccttggggacaagcttttattctaatgatgctgacgttattccagatatttctagaacatttttagaattgccttaggagtttgaatcataacatttttcgatttaaaaaaaaaaaaccagggtctcgctctgttgcgcaggctgtagtgcagtgatgcaatctcggctcactg

SEQ ID NO: 859403 - DNA, 588 bp, Homo sapiens
cagcaaaggtgctgagttagctaaggtatttcagcctttctaccttcccctccatttcccattgaggcctgaagcttcaagagaacaagcaggttggacttgtcagagttgagaagcctttctgagtagaaagggcagccagctgcttgtccaggcaaacaggatgtgagtcttctcaggtgagtcagagctaaagaggaaagcctttcctgcctagctcagtgagggggtccacccttagctttggaaaggggaaaactcagggraaagtcccagcaacatcgctcttttcttgcagtttgttccaatgttatatgctgtcttgagtgtcaatatctgctgagctacattagcaataaccaagaggaaaagaagcttttaaagccaaagaaaaattgtcatttaaagttgtcaccttggggacaagcttttattctaatgatgctgacgttattccagatatttctagaacatttttagaattgccttaggagtttgaatcataacatttttcgatttaaaaaaaaaaaaccagggtctcgctctgttgcgcaggctgtagtgcagtgatgcaatctcggctcactg

SEQ ID NO: 859404 - DNA, 600 bp, Homo sapiens
acacagagcaagagtccccttgggtacacccctctgcccacagcctcagcatttcttggagcagcaaagggcctcaattcctrtaagagaccctcgcagcccagaggcgcccagaggaagtcagcagccctagctcggccacacttggtgctcccagcatcccagggagagacacagcccactgaacaaggtctcaggggtattgctaagccaagaaggaactttcccacactactgaatggaagcaggctgtcttgtaaaagcccagatcactgtgggctggagaggagaaggaaagggtctgcgccagccctgtccgtcttcacccatccccaagcctactagagcaagaaaccagttgtaatataaaatgcactgccctactgttggtatgactaccgttacctactgttgtcattgttattacagctatggccactattattaaagagctgtgtaacatctctggcataggctagctggaatgcttgataagaactgagctgggatgattgaactttcattctttggcttggggagaaaagaagtcctggggaagcaattgagtctcaaagtagaggcaggggaaaaaagagttag

SEQ ID NO: 859405 - DNA, 622 bp, Homo sapiens
atcttattaattgtaggacttgatggaatagtcaagagcccaaattattattaagaccagctataaaaagtctcttttgattatatgggataagatatgtttttctacatataagtcttctctttctctgaagagggagataattaaccttttaggatgtttaaatttttttttatcagaaaatggtaatgcaggaagaaaaatatttaactacgagtttaggtaatgacctttgttcttaaactactgaataaaaaaactagacacttagagttttagatattaattcaagactctttaaaaatctggtttataaatatagaaatttatacattatattaaaagagttcatattaatttcctgatgctaattaaatctgtgaatcaattgggatgatttaatttagttaagaaaccaacataaaaaattaggtttgcagagtattttagttaatacattacttaagtttaatttttcatgacttaaaggtrgtaattgatataagtagttaaaccaaaactctatagaatagtccctaaatatacaagattttgactattacgagcctaatattttatcaagagaatggttattaaaatggtaaattcaatataacatata

SEQ ID NO: 859406 - DNA, 622 bp, Homo sapiens
atcttattaattgtaggacttgatggaatagtcaagagcccaaattattattaagaccagctataaaaagtctcttttgattatatgggataagatatgtttttctacatataagtcttctctttctctgaagagggagataattaaccttttaggatgtttaaatttttttttatcagaaaatggtaatgcaggaagaaaaatatttaactacgagtttaggtaatgacctttgttcttaaactactgaataaaaaaactagacacttagagttttagatattaattcaagactctttaaaaatctggtttataaatatagaaatttatacattatattaaaagagttcatattaatttcctgatgctaattaaatctgtgaatcaattgggatgatttaatttagttaagaaaccaacataaaaaattaggtttgcagagtattttagttaatacattacttaagtttaatttttcatgacttaaaggtagtaattgatataagtagttaaaccaaaactctatagaatagtccctaaatatacaagattttgactattacgagcctaatwttttatcaagagaatggttattaaaatggtaaattcaatataacatata

SEQ ID NO: 859407 - DNA, 164 bp, Homo sapiens
tttaattcttatccattatatttttccaatctttatatttagccctatgttctacatcatatctccgtatttctttctcaaaaaatcccgattttcgttcttttttttttgggtctgtaatctataattttcttttattkgcataaatgtatggggcacaagtc

SEQ ID NO: 859408 - DNA, 538 bp, Homo sapiens
aataaatggtttggccaagtttcaagcttggacattttttatttgagatgaatttctacttaaccaaggcgtactactttgaaatatgtgaattttcagaaaatagtctacaaaagagagcttcataggatgcatatagggagaatggatattaggaaacaacataagggtatttcaaaagtagttttccctacccttggaatttatttaacaagtattgtggctatatatttatgtctttatataacttcaatatactacccaaaaactcagtagcttaaacaataatagccatttattatttctcatgactggggttgactgagctcagctggaagttctgtttaatgtggtgttggctagggctgcagttgtctggaaggctcccagggctgggtcttccaagatggctcgcttatgtggctggcagttggtgctgcttggtaggtggcaccattaactagagcactttaattctcttccaggggaccttcctacmtcgtctaagctttttatagcttagaagctggattccaag

SEQ ID NO: 859409 - DNA, 625 bp, Homo sapiens
ttaatacacctacatcattcttttctgcaagagctctgcatttcaatacttaaataaaatttacttactactttttatgtgaaaagtatttccttttttcctttaaatctgtactgtcggccgggcacagtggctcacgcctgtaatcccactacttcgggaggccgaggcgggcggatcacctgaggtcaggagttcgagaacagcctgaccaacatgaagaaccctcatcgttactaaaaatacaaaaaattagccaggcgtggtggcacatacctgtaaccccagctacttgggaggctgaggtaggagaattgcttggacctgggaggtggaagttgcagtgagccgagatcgcactactgcactccagcctgggcaacaagagcggaactccctttccaaaaaaaaaaaaaaagaaatctgtactgtctagtacagtagtccatagccccatggaatttttttttaatttaaatttaagttaattgaaattatattaaaaatacaactcctcaattatactagttacatttttaagtgtcccattagctacatgtgsatagtggctaccatattaggagtccagtttataaagcagcccatcttccacagaaagttctat

SEQ ID NO: 859410 - DNA, 428 bp, Homo sapiens
gtaatcagtatatcggttgggatcctggaaaagaagaaaaaaaaagacgttaggcaaatactaaggacatctcaataaagtatggacttcaggtactaataatatagtaatactggttcactaattgttaaaaattcatcatactaatataagatattagtaatagggaaaactgggtataggagctcttatagtatctttacaatttttcagtacattttacattgttctaaaataaagtttatttgaaaaaataattagaaactaagaaatttaacatgaaataatagtacattcaattgcaataaagaatgaacaaatacacattttgcaaacctgacaaartaatcttaaatatatacatacatgtttataactacagatacatgtatattatatataaattattattacataggtactaaata

SEQ ID NO: 859411 - DNA, 434 bp, Homo sapiens
gctttttttagagttctagtatccttataataactgtaaaataataggaccgtagcaacsttttgtcctacctcagtgacttgatgtatacactgggaacagccctcagtctgaggaaggtcagttgaagttcttactgtacaagcccaaattttaaggaaaatgagtcccgcgatgagttttctcatgctttggccatgtatggaccagtcagcttccgggtgtgactggagcaaggcttgtctttttcagagtcactttgcaggggttggcgaagctgcttccttccatgtacagctcccagtctactgatgtttaaggatggtctcggaggttgggcctactagaataaactgagtctaatacttctacacagttatgtttaactgggctctctgataccaggagcaaggtggcggggtttagggtgttgc

SEQ ID NO: 859412 - DNA, 587 bp, Homo sapiens
tgtgaagttgtaagagctttccctgtaaatttatgaaaactcaatctagattcttttctgctttggaagcaatatstgttttagagttggatctaactctggcactcattaggtgacattcgcttaatcagtggcgtattttcaggtgctggctgggcagtgtcatttcaccagaagtgttcatgtgtgcagattgttatggtctcatgaagcttggcttctgtgggctctgtgtctccacacatagacatgtagtttgtgggaagcttttgttaaaacatgagtttctgctgattgttggcaactttggggagaaagggtggattgacttaactttaacacattgtgtcatcatgaacatatattcttacagatgaaattgttggatacctggaccagaaagattagacacatttgggcttaggtctcagtccactttttgaataactatgtgaacttgggcaagtcaataaaaattttagaacctcagtttcctcatttgttatatgcacacagtatatgcaagtaactatgcaagaatcttgcatagttatttgaggtttaattaagaacatgcataaaacatc

SEQ ID NO: 859413 - DNA, 448 bp, Homo sapiens
cagttaacctttaactttttttttccttttagaagacgtttttaytagaccaggcaacccaactatcactgtttgtactctctgtaaagttttggtcatgaaaaaggatttgtggggctagtctttggctatggcccatctggtgtgctttgcctgtctgcatggtttgtgctccaagcctccatcttgctttacatcctgggggcatagctggtaagtgcttggcaaggctttgtttagcaaccctgccttaggggatgagctctctctggttcaatatctgcaggttttcctagccctgtctcttaaaggacaccacaaccactgggttttcttctgcctgtctgtgtgtgtactgtgatgtctgtacaaggagctctgattcatgtggcctaaagaaagggtcttggatcaagtattttttaaaaagggaagataaaagctgtgg

SEQ ID NO: 859414 - DNA, 623 bp, Homo sapiens
ccataaaaaaaggatgacttcaggtcctttgcagggacatggatgaatctggaaaccatcactgtcagaaaactaacacaggaacagaaaaccgaacaccacatattctcactcataagtgggagttgaacaatgagaacatatgggcacaggaatgggacatcacgtacgggggcctgttgtggggtggggggcaaggggagggatagcatcagaagaaatacataatgtaaatgaccagttgatgggtgcggcaaaccaccatggcacatgtatacctatgtaataaacttgcacgttctgcccatgtatcccagaacttaaagtataataaaaaataaaaaatgcaaatactcctggaagggtgtttaactagcagtcaaatagcaatgcctcaaatttgtataatgtttttgcagttgacaaaatgctttctatcacatatattatctcatctaaccccacagcagaacctcaggcccagaatgcaaagtgatttgcccaaggccagaaggctaattgatactagagtgacttcaatgcaaaattgatcgctycagggcactttcccatagacctagccccatttttacctgtgggtataaactattttctctcaagat

SEQ ID NO: 859415 - DNA, 582 bp, Homo sapiens
agaggttttgatattttgtgttttgatttttatttgttccaagaatttttttgactttttccttaactttatttgttaagtaatggtcattcagaarcatgttgtttaatttcatgtgtctgtacagtttccaaagttcctcatgttattgacttctagttttatttcatcatggtctgagaagatgctttatacgatttcagtttttaaaaatttgttgagaattgttttatgtcctaacatatagtctatcctggagaatgtttcatgtcctgatgagaagaaagtgtattttgtagcaattagataaaatgttctgtgaatgtatgttaggtctatttggtctaatgtgcaatttaaatcagtttctttgttaattttctgtctagatgatctatctaatgctgatagtggggtgttcaagtccttaactattattgtattacagtctctttctttagataaaataatatttgctttacatatctgggtgctataattttgggtgcatatagatttagaattgttatatcctcttgctgaactgacccctttatatttatatgatgaccttctttgtct

SEQ ID NO: 859416 - DNA, 497 bp, Homo sapiens
ccgtgctggtgccagccagagctggcaggcagggtaggggcctagacattcccccgagccctgcctgtttacttgaagttcatcggaggagcactctgacgcactcgttcctcggcctggtgccaaggacccgtggtgaccctttcctccttccctctccgagtccctttcctccagatctcagcttggctgatgcttcctccaggcagcccacccagattatgccctcatccactgtcacagtggccccttgactctgttccccagcgttctgagttgtgccatgtgataaatgtctggttacactctacccacctcccaaccctgtccacatctcccttatttccccctcattagactgggaggcaggcccctctgtgcctacttatttgagacctagtgcttgaagcctctcatgttaccggtgtaatgatggcacctgccagctartgatgagaccacacagtcggttctgagcccagggcccagcatcggtg

SEQ ID NO: 859417 - DNA, 445 bp, Homo sapiens
tctgttgagctgtccactgtatgacccttcccttgaagcatgtaactactgaggcatgggctcaggcaggatagaatatttacatttcagtccccctttgccttattttattttggattgggaatgagaactcaaaagtatattcagttattagggactgtcatatgtagtccaacctgcagaaattttccacatgtgcagatgttccttgtggaaattttaggtgtaatcatggcagacattgttgcttacatactcaatagctatttccaccatccataacactaacaacctgcttcctttatgagagaagccactttcctctaaagaagctcgaataccataaactcattttctgagacaccctgkaagccaggctgggcatagccaggccatcaaatcttaattagtaggatccagggggaagtccgagggcagctatctg

SEQ ID NO: 859418 - DNA, 524 bp, Homo sapiens
aatttaagggttatcatgaagataaatgaaacagtaaagsactacaaagggccaagcaaatatgaattatttatgcagtggagaaacaggctcctggggagaatatatgatctatggttctgtagtttatgacctaaccaggcccagaatttaggttttcaaatcctagtaatgagttttttctgttgtgccaaaaagtagcacacctcaggagagggaaaatgtgtgtactgtgggtatattggggttatcagtgcttctgaaggaagacaggcatcactacttcccagagatgcccctggaaatgatatagaagatgctgaagaattcaacatgatgacggaaggaggcatttgtagtaatgctaagaacagaaaaatggactaagtggaaaatttgtaagcatgtctttgaatgtagatttgttatatgaacaaactatatacctagtttatttttggtttaacataataattcttttgagaaaacatgaaataactactcaatataaaatgcattttaaa

SEQ ID NO: 859419 - DNA, 610 bp, Homo sapiens
tgttatgtatgttatttccttcagtctcaaagttcatctattagcaccycaactcggaaaactaaaaattgagcacattagctagcaatatttgactggagtctttagttaatagtattgcattactgtttatttcctggttttgatattggcactgtggttatatacaatgttacatacaattagagaaagctggatgaagggcataagggaattctctgtataatatttccaatttttctgcaagtctaattattccaaaataaaaagttaaaaaataacaaaacaaaatattagaacaagaaagttaaaaaaaaaacacatggcaaatcaatgtagatacagattctgttccttaaatactaaactttattgctaatacaataaaatatggacagaggcaaaatcatccttatttgcagacaaatttctccctataaagacaaagataaccgaaattttgttataattgaaaggagaaggtctagatgtaaaatgaacaacccacatcaagagctttcttgtacaccagtaataaattggaggattatgagaaaagatctgattcacattggaaacagattaaaatgtctatgaataaccttaacaa

SEQ ID NO: 859420 - DNA, 605 bp, Homo sapiens
gagctgcctgccagtcccatgttgtgcacctgcacttctcagcccttgggtgatcaatgggaccgggagcctagaaggagtgggcggcacccgtcagggaggctcaggcygcactggagcgcaccacggggggacttgggcatggcaggctgcaggtcctgagccctgccccatggagaggcagctgaggcctggcaagaatttgagcacgacatgggtgggccagcagtgctgggggggactcggcaccccctctgcagctgctggcccgggtgctaagcccctcattgcccagggccggcggcgccagccgttgcctctaagcagggcctgccgagcccacgcccacctggaactcgccctggcccacgagtgccatgctgcagcccaggttcccgcccacgcctctccttctacacctccccgcaagcagagggagcaggctccagccttggccagcccagagaggggctcccacagtgcactggcgggctgaagggctcctcaagcgtggccagagcggatgcccaggccgaggaggcgctgagagcgagtgtgggccgccagcatgttgtcacctctcacaaggattaaagtgaagagtg

SEQ ID NO: 859421 - DNA, 506 bp, Homo sapiens
aatcccagcattttgggaggccaaggcaggtggatcaactgaggtcaggagttctagaccagcctggccaacatggtgaaaccccatctctactaaaaatacagaattagtcaagcatagtggtgcatgcctgtaatcccagctgcttgggaggctgaggcaggagaatcgcttgaacctgggaggcagaggttacagtgagccaagatcatgccactgcactccagcctgggtgacagagcaagattccatctcaaaaaaaaaaaaaaaaatcaagcataatagaagcaatcaacacacaaataaatcaacaatagctaaaactccacacagtaaaattgttgaaagtgaaacattgggcaaagaatcaccttatgattaaacagacaaaaaataaatttgatagaaatcattttagatagactgaaaataagcaaaattatacacagtaaatattgatracaataatatttgttaaaatatcaaaatattctcagaaatttagg

SEQ ID NO: 859422 - DNA, 622 bp, Homo sapiens
ggcacttagtgatttattctcctcttaaggctccatcagcaggtggaatggaagacacctcccaccctgaccccttgggcaaccaaggcattatactccttcactgcctgctctgtctggaggacccgcayatcaatgccatgtttcttgaggtactccacagttgatgaaggcacctgggaaggtggaaaagagatgagtaagtagggggaaaggccccccaggggttcctttactgccatgaggcaggtgtactctacagaattagacagtgacaatcgtcacttcacgatcactcagtgtatcaccagtccaaaatttggcagtgagccccaatgagtcaaaaaggcctctttgtcagaggtatcataatacccatgcataaagctcaagtgaaatggaaatgaaagaacatgggatttgcagttagccttggatttacatccttactagcactgtaaccttgggtaagtaaattaaattctctgagtctttgttttcatgtctgtaaattagggacattaacacctagggttggtatgacaactaactgagctaagggtatgtgaaacatctaccttggtgtgcaaactccataaatgttaaatgtttgagttagtct

SEQ ID NO: 859423 - DNA, 640 bp, Homo sapiens
ataactctgcaagggcctgtggatccatgggattggagcwtgagactattattgaggcatcctcaacctgccactagcaattcctgtgctgcttccaatccctcagggcaaatcactaaggctcttcttcctattgagtgtctgattctgttcctctactttaagaggctttctgtcacacgatctaaggtggtaaaagcttattgttttttctgcgggggaagctattaattgtggaaaaatgtccagctaatatccattatgccagctaaacaacaagatggcatcctgtctgtcttgaacatttctccctatttcatgctaactttaaaaagaaaacattcctaaactactcttccaaagaagtatttccttctgccaaaattaagtgagcataaatgggtagtagcaatgctatcatctggctgtattgctgataaaagcagattctgtgagtgaagtttaaaggatctctggaatctatcccctgtggacactgcctgagtcacattctcattattgcttgtctgaattaacaggctgttaaataatcttgctgcctctgccagggcagaggcctgtttttgtgctacaggcccctctggcagtctattgaggccgatggtccccttctcagaat

SEQ ID NO: 859424 - DNA, 595 bp, Homo sapiens
aaagacaacccacagtatgggaaaaaatatttgtaaatcatacatataatgaggtaattgtatttttgttttttttgtttttttgagtcggagtctcactttgtcatccaggctggagtgcagtggtggcttgacctcggctcactgcaacctctgcctcccaggttcaagtggttctcctgcttcagcctccttagtagctgggattacaggcgtgtgcccagctgattttttgtatttttggtagagacggggtttcactgtgttggtcaggctgacctcaaactcctgacctcaagtgatccatgcaccttggcttcccaaagtgctgggattacagcgtgagccacttcgcccagctggtaattgtatttagactatctaaggaactcttacaacccaataataaaaatacaaacaacccaattaaaaacatgacagaggagggaaagtggcaaattaaaaaaaaagtattaaactaacatgggcaaaakatctgaataggtgttacaaaaaatctaataatccagtgccaaatagatatagaaaaaagataaacatacaacacaaaagcttaacatcacctgtcactagg

SEQ ID NO: 859425 - DNA, 536 bp, Homo sapiens
tgggataaagttccccaggagattgtgggggatagaacccacatctcaggtgagaagatayttcactggtgagaacacctcttccaatgctactggaagggaggagaaaaggatggacgtgtgtttcttcaggcctcgtgcaggcagggaggaagggagttaagggagttcccatgacagggctgctattttctcgttgaagaaagaggcaagacctgctgaaagagaatgaggtgggttcgaaaatggtggagggggctgggtgcgagcgccatgccaggtgagcatggggtttctggcagcgcagaaggcctggttgcgggaaaaagccacgggtctccctcagcacccacccaggggcaggcatgaaggtgggcatctggattcatccggcggggtggggttgccaaggggagtgtgggaaggacaaggacgtggaagacactctattggcaagagaatgacttacttgttgggtgcagctgcagcccaggagcaggtgcggtgggagtctcgaggcgggatagctggaagat

SEQ ID NO: 859426 - DNA, 562 bp, Homo sapiens
tgaaaaatatttattaacaaacaaccggaaaacatgcagaatatctaggaatacattttataagaaatagcaggatatcatgaaaaaaactgtaaaattctgttgatgcattgaaaaaggcttgaatacatgaaaagctatattgtgctcttggataggaagacctaagagtctaagagtctcaatccttcagaatttttttttttttttcacagagtgtcactctgtcacccaggctggagtacagtggcacgatctctgctcattggcaacctccacctcctggattcaagcgattctcctgcctcagcctcccaagtaactgggattataggtgcacgccacgacccccggctaatttttgtattattattattatttttttttgagatggagtctcactctgtcgcccaggctggagtgcagtggcgcgatcttggctcactgcaagctccgcctcctgggttcacaccattctcytgcctcagcctcctaagtagctgagaccacaggcgcccaccaccacgcctggctaattttttgtatttttaggagagacggg

SEQ ID NO: 859427 - DNA, 414 bp, Homo sapiens
ataaatctgtaacaggtgtttgacaccagtaggtctctttatttctgggaaatgtgtacctgtactttctgatatacagtgttcctaagtaaaaatcaattcaggggatttgtwtagtgtctataggaaagtagcccatgtcttgaaatatgaaaaggaatctgaaggtcatgaaaagtccagtggagaaaatctcaatgcttactgttactactaattgattcctactagtttccaggtttggggggatattgtttcaatgacgctccttaagactgttgattgcccataggttccaaatagaaattaagactcatgaacatttttagaaagtagattgttttctcctggttctctaaggaactacttctgcagtcttacatagtctcatccttgtttgttgtggtgcagtcg

SEQ ID NO: 859428 - DNA, 633 bp, Homo sapiens
tttcctctgtattctcaacatcatttgtcagctatttggaaattagccattttaatagatgtgtgaagctatttcaatgttgactaaatttgcaattctctcatgatcaaagatgttgacygagcatctttacatatgcttattgacatctgtttatattttttggtgagacatctgttcaaatcttttgactatttcttaagtggattttcgtttccttatttttcagtgttctttatatattttgggtgcaaatcttttgttagatgtgtaacttgtaaatattttctccagcatatagcttttcttttgattttctcgtgtctctactacagcagaagttttaaattttaatagtctaatttatcaaattttttcttttatagcttgtgattttgctgttgtatatagtgtcggtaaatatataatcaattaaattttctcctacgttttcttctagaaattttacactactgcctttatacttaggtcattgatgaattttgatataatttttgtgaaaggtataaggtctgtttagaaattcattttttggtacatgtacaactaaattttctagcactatttagactgatttaatgaatttttgatcatagatttgttcatattatg

SEQ ID NO: 859429 - DNA, 558 bp, Homo sapiens
ggagggtacatcagctgaatcttggctctcccttcaccaccccttcttccccagctggctccagagcacacgctcatgtccttccggaaggccctcgagcagaagctgtacgggctccaggctgacattaccatcaggtaggtgtagcggaggggagatagttcctctacccctcccacacgcttcggcatccacctgggtctctgctgggggaacctctggtctcagagcctctgagatgggaggaggaagacttagattatccacagcagggcaggcaccctgttcctgcagactccaggatgtaaaatagaggaaagaacaaatgctcttggtgcaagcaggagcactgccacagagccacttgaagggaaaaatagatgatagagctacaacactctcatgagggaaataaagcaagttgcagagtgatacattcactgtgactccagttaygttttaaaataccacaaaaaagtgacatatacactttctccatgtacatatataagtagatattagtataaatggcaggaagaatccatactaatctcataa

SEQ ID NO: 859430 - DNA, 493 bp, Homo sapiens
cccacaaaccagccccaggcccagacccagataacctgtttcctgaaccactcctgcccytccaggacccacggatccaggatccaaagcccagccaccctgggggcagaggccctttcacgctgcccagggtcctgcttctctgaggtagctgccaaaccagcttgttcttctaaagcagccgctaagggaaggacggtagcccggaggtgggatctggggcaccacaattacatgcctgagctctgactcacgcaccacctcccccattgccagctcctgcagccagcagggcaaccccccacccaggaattgggaaaagagatggtaccaacaggccacgggaagcagaggggccaggagaggtgaggaggagactgcagaccagcattgcaggcttcagaggatgctgacaccttgtctactagggacactgaggctgcaaggacggaggcctacctacatcacatagaggcagagccagggctgggac

SEQ ID NO: 859431 - DNA, 524 bp, Homo sapiens
tctgtctttgaataggagatgcccaaacttgtttacattcacccagtatttctcagatcagtccagaaatttagataccatcttaatttttctttttttttttaatcacatgctgtatctaatctttaactcatttgactctaccttcaaaatgtatctgcctttgaattacttctctccccctattgccaatcatctaagccaccattagttttcacctggattattgcaataactccctaatggtctctccacttctgcattgttcccctgcagcctgttctcctctgctgctagagtggtctgtttaaaaacataaatcagatcagtgctcaaaacccttcagtgtctttccacacttgctgaaaagccaaatttattgtggcctataaagttycacactgtctgacctctggttacatctctgatcccagtcgcttaccatatttctctttgtttactcaactttagtcttgccagtctttttgctgtcctacatgcccagtgtattctcatctaagaca

SEQ ID NO: 859432 - DNA, 474 bp, Homo sapiens
tacatattcattcccacttcccccaacctctacttkgccctgctctgtctctgtggatcttgtaactttttccatgttaattaaagattcctgggacttcactctttttttcccttctctgggagccacctaagaacacaaatattgaaacagtagcagtcagctaattttgcattattctaaattaaggaaaatattctaatttaaggaaaacttctagatcacctaggagtttaatggttcaagctccccctttatctgtggaatctagaaaaaagcagtgactgtctgttgacacaactagtttgtaacaaagctgtggtggatcataggtctaagaccagtacagttgtcccccaatcccccatgctaccctttcatcccaaattaaaataagacagtttccctcgtaactcaccagtgcagtaaatcccatgctatggcatagagtgagacagcttcaaccatgacatg

SEQ ID NO: 859433 - DNA, 463 bp, Homo sapiens
tctggggcttaagccaggatttgggactcttaattcattcatcgtattctcttttttcacaaatgtgtaacattgttctttgcatactcacatatcaacagtttttttatattgctaaatcatgcatttaatttctatgtattagatataaaattttaatttgggaaaaaacatttaacaggatagttaatgaatacagaaaagtggttttaaaggtagtgcctgttgggcttggctgtaaaatctgagattgtatatcagctgtcagcctttcatgtcttcagcatgcaaagcatgcctgccattctctttggattgtattccatagttaagcaagagcaggaaactttaaagacctaattgagataccacaatgggatctgttttcsatgaaatcatatctgtcatccacttattctgactattcagtctttttcttccataattttgaaacttatgtccc

SEQ ID NO: 859434 - DNA, 528 bp, Homo sapiens
ctgataatcacttttcattcaaggttacacaaggggtaatctatcattccttattccaagcaggaatatatctataaagagaaacttccacttatcaatttttttattaccatgaggtgcagttcatataagaaaaactagataaatgcctatttccctttatgtgttttcaaaacagtgaatgtttcctagcacactccaaaggtgatcaatgaccaccccttctttttaaaaaatggtattatgaactggtgggtttaaacatatatgatgtgctttaatgcaatgcaatcgctactgcattggtgttcaaattgtcagtcttcgctcaggggaactttttaagttggctcctgagttttgatacgtccccagttgtctcttcagtagtttcactgcctttctagtatgacargtattattatacaagttcatcttttatatttcctgccctggaaattagtcattaatctgatgattcctagtttctttcaagagaaatggtattagagaccataatttgggtgc

SEQ ID NO: 859435 - DNA, 603 bp, Homo sapiens
tttgtttatctttttataatgaaacatccacgcttgggtgctctatccaacaaccagcttgttttcctatcatggatgaggcaaaggcatctagtccagcttggatgaaaatgctcagagcccaggtgcactgcctggcaggcacagagtgggatgtttctgttcccacaacctctgtccttctgctcgcctccaggacagacacgcttaggctcctcgtacttatctgtgtgcaaacaccacacagacactcggcgagacagccagtggtctgcattttctaatgtgagcttatgctgtgcaaacagctttattgtcagcccgcatgcacagaaaggcccacagcaaacagatgctcagccccaccccttcttactggggtcctcgtgagacattcggagcacaaggtattaacattccccacccacaataagtacatttcatgcctcatattcacctcctataccctgctccatacaactttgcccagcgtatagcactcttaattctttccaatcattcctatagccgaccatactctctctctgtgtgtgtgtgtgtgtgtgtgtgtgtgtgtgtgtgygcgcgcgcgcgcgcgtacat

SEQ ID NO: 859436 - DNA, 625 bp, Homo sapiens
aaggcaatggtagaaaatgcatctgaaaagtggaacatcagtgtgctttgtactttgcacagcagagtcctgagamagctgggagcagggatcttacttaaatggattcaagtttctgagtccttaacagttccaaagcctgcaaagatgctatcgcaatgtaccagtaaacataataataagaaagctgttcaaacctgatgaggggcaaagccaatgattatttttcaatataatataaactgaatgattcgccagtggggcaagataattatcccatgagctttcctgaaagaacagaataaatgtgcattctacaaaccacagtctcagatgaagcaaagcaagaaaataaatcttaatgtctggataataacagatacagtaaaatcaatattgattatttggagaaaaaggcagtaaaaatgttaagttctaacgctaaaattatactaaaaagctagagtttaaacacagagtatgggtctggaatgcatataaagcattttctgagcaccagtacagatattttatttctagtgtcaacacactctgctttatgggaggatacggctgcgtgtttagaggcctcagaagcagaaggcggtgatagtaccaacggttt

SEQ ID NO: 859437 - DNA, 631 bp, Homo sapiens
aggggatggtttagcaatatcctcaggcttctaccttcccatttctcccaccaatcaggcattagcatccccagtcctctggtgtcctatggttggaacccctgctcggtactccctgtcccatgcccagaaggggatgccttgctttctcatccttccagcctatgtggctgcaaaatgacacttgtaaaatgacatgcagaagagcaatgagaccaatgccagatcccagaggggtcagggagctccaccgagcttccctaacttgttcacatcctgtcacgctagctaatgatagcatttgtagggcagctggaataaacatgtgatggacccatatctagaggtgactctggcactctggctgtcccaaccccaccctgatctgaaggctgagggggtcattatgtggacccactacaacccacgggtgggaagctctagatcttggcaccccgtcctcttggctctggctgagccactcagctcttgaatcagaggcttcagcaggaggagaggctcaaatgagcccaagctgattaaggaagtggccrtgctccacagaaggacagatcaatcttgattagagtattaggaacgtttcgaggatgcctcgacttagcagacaact

SEQ ID NO: 859438 - DNA, 649 bp, Homo sapiens
ctcaaaaagaatatttagtgaggatccacttgtagcagatattgcgatgattacttgtgcagccttttaaccagtggtcactctkgcccccctaagatctcacattccaaaatcatcgtaactctcttaacaaatggctggatgtgtagaaaatcatctctccctgtgacgaatgctaaaagaatcaagtgtattgggctagcagaagagaaacttgagcagtgtttttaaaacagctttcaagttcataacagagatattgaaaccttcccagctgttctccttagccagcaagaatggaacagaaggaaaagtggttcgctcaaagcaatagacattctgcttaggcataagaactttctggctgtgaagaattgtgagacaaggagatggtgcatccaggaaggttgtccttgaagacctttcagaataagacagcttgcttccttttagacctagaggagtggattgaatgagctgagggggaagttcatccagcctgagtcctgtggcgctacaggatgcattccgacagtgtgtctatactgttgacatgaagtttcatcaattctctggtaaattccacagcattgacataagataaaatacatttggtccaaatcatttaaattgattttcctgtccaaat

SEQ ID NO: 859439 - DNA, 605 bp, Homo sapiens
ttgataaatctcattctggacttcctagcttcagcaggcagcctgaacatgttgagggtccggttatgaaaatgatcacagcagtcactttcaccttcctcacctccaccccttaatatttgtctcctttcccctgtaaagactgggtggacttttgtattttcttctcggaagatgaatggctgactttttttttttaagagggactttttgctggggtggggagaacgaattgaaacagaagactttggtaaagaagtcacttgaaaaatgatcctatttcctttagagatgctcttgtaatataattatgagccatctgttaacctcctctccccttgcacgatctttctggttctcagcagatgatgtccccaggagcaaaccggcgaggatggggagatgaggctcttttgattgagcaccgaggaatggggtaacttgaaccacgcaagtcggagcaatttagaaaaggtgtagaaaatccaagcaagacataaataccaacaaatgttctagggattagcagataagtcgtatcgggagaaagcgagagagtcaaatttatatagwtgagaaaggatccggctcagcgggaacacaat

SEQ ID NO: 859440 - DNA, 535 bp, Homo sapiens
tcccttcaggggagtcattagcaaaagagaatacttatttgaaaattaaatgtcttcacttcttttccaggaggctccatgacctgtttttggcaagctacaatgggggtgcagctttcaaggagtcatttcagcaatttagtccttgctccagggctaactccccctcccctgcccaatgtggtgggagggctctgctaagatgtagagcagttattaaggccttaagataaaggcagtttttcatggggtctgtttttttcccagtgacctcctgaggcagcagactccacaggcttactgcagggctatacaaaaaggtattttatgtccttagccttataaatcaattttaattgtaacaacagaaacatcagcagcaaaatggagccaaatgggckggggcctttttctgcgctttttaaccatctcagattaaatgctgaattgtattttggggtctgagttttgtcatgcaaacgaagaaaaacaacttgctttccaatttccacatgcatatatagaatgaattgtt

SEQ ID NO: 859441 - DNA, 456 bp, Homo sapiens
tacccttgagcccccagtaatgctgaacaggtagcagactgtcccrgggagagccagggacacagagctgagtgcccttactaaaggcagcaagcagtggtctcgtgagccgtggaattcacccttctgaattcagtcttctgaattcctctcctatcatcagctcttgatgacctgcatcaccccacacccactgtggttcagagatgcttctaggaaagcctacagcgaggaagctgtggggtcccctggggagcctccttgctttgtttcataaagggatatatatatttcctgactatatacttactgaaataagagggggacaccaaaaccagtgggttgtggggggagataggcggaggcttttggtttaaaatctttgtagaaaatccagagtggaaaaattatatgtaaataattgactgattcctgtagcctgtctgaaaagcttaa

SEQ ID NO: 859442 - DNA, 597 bp, Homo sapiens
gcataaaaaccttaatccctaccaccccggccacttgtccatgagctcatttgatgatgataggggtgactggggaaacaaattgcctggaatccatacagtggatcatcctatccatttgattattaaaatcttcctctgctcagctcatcgtttagtgagcattcacatgagacataagtatcttcacggcttttgcccactcagagaggtctatctgtatacctcttctctagacctccttgtcaccaatttttcaatcatatttcttccaagaccctgaccatctaaccacactattggccaccgcccatcgactggtatataatcacatgtctggccatttttcctcccaagcaaagtgaaaaaccagctgcacaggtcaaaattctgcccacttgaaggatttcccttcaccattgtccttcagggatgtgccacagaagagctgtggtgccacagcgtccacttttgggtgaggcctgcatacttgyacagaatgatctgtaaaccagtcctgagttttctcttcctctgccaactgatcacagggaactccccataaggaaatacatgtggactgggagagagaaggca

SEQ ID NO: 859443 - DNA, 571 bp, Homo sapiens
ccctcgaaggcccagcccaaggatccccacattttgattgcctgaccrtggatgatgtctgatccctcttctgagtttccggtcacccaaaaacatgagccatatacatttatagggcatctactaagtaccagtactgtgttcagttctaatactaaaatcatgagcaaaactaacacgggcactgcatttataaaatctacagtccagaggtggaaatagaaagtcagtaaatagtcaccccaataaatgtgctgcccaacactctctgcacacctcctctccataccagaggactcacacctttattttattcttgagttttgttcaagggtctcctgtagggcaggcattggcaaacttttttttttgatccggtgttctcatttcttaaaaactcttgagcatgtgaccagaatctaagttcctcagcgctgtacaccaggccactcccaatggcccgccctcctttcatctccttcccttcctctgcaccctctgtcctgctatgctcccggccacaccacatggtgtaaactgccttccttcaccccctcattcttttggtaag

SEQ ID NO: 859444 - DNA, 622 bp, Homo sapiens
tgcttctcatttttactgactgagccagtaagtaaaacataacattcacatacaacctaatgatgtttaaatacttgaatgtctattatttctctgatcttctcaatgcacaagtgcattacttagtgaatgatgaaatcgggtcagagacagaaggcaacattccccagctcactcccaagctcttggatagttaagtggcggggatgtgggggaatctgcttgttttgactgtctaacatttcctccaatatcatgatcaataccttaatttagatgttccatgggtacatcataattctaatgttcattcccatttctctaaaattatttcttgctcccagatgatccccactccttaatttcttataaccattaatgaaataaaaaatgtggaattcagcctggatccttcttcttcatgatgctcatggctacccaatcattagtcatcatttctaggctcacttttcattcataagcctttttcttcttcttcttactaagcatgtgtytcccatttacattcctgcctgtcatcaggtttgtcccctcacatctatcctccatagagtgcatttccactgaaaactgtgcagtggcttgccacatccttcaacag

SEQ ID NO: 859445 - DNA, 579 bp, Homo sapiens
caaagaaggtcatcatataaatataaaggggtcagttcagcaagaggatataacaattctaaatctatatgcacccaaaattatagcacccagatatgtaaagcaaatattattttatctaaagaaagagactgtaatacaataatagttaaggacttgaacaccccactatcagcattagatagatcatctagacagaaaattaacaaagaaactgatttaaattgcacattagaccaaatagacctaacatacattcacagaacattttatctaattgctacaaaatacactttcttctcatcaggacatgaaacattctccaggatagactatatgttaggacataaaacaattctcaacaaatttttaaaaactgaaatcgtataaagcatcttctcagaccatgatgaaataaaactagaagtcaataacatgaggaactttggaaactgtacagacacatgaaattaaacaacatgyttctgaatgaccattacttaacaaataaagttaaggaaaaagtcaaaaaaattcttggaacaaataaaaatcaaaacacaaaatatcaaaacctct

SEQ ID NO: 859446 - DNA, 625 bp, Homo sapiens
atagcaacttattactatgtaaaagcatataattgtcccaatcatgcccatgtggggttcagcaggtgcatgttaccaagcttccccaccttcctctgctcactggaagagaaaagacaatagccatgtgraagaattctcagaactgcagtcaccatggagtacggatcatgccctccagggcccttgctctgggggcttgacccattagtaggaggtcctgcaagatgacgggaactgggagcgagatgaatatggacttttatcttccaagcaagatggagacgatgacatgggatggtttgtgtgaaagaaacaaccttggaggaaggaaatctagaagctcccaagggtcactgagtgctcaagcaccttgggctctgttgaagatctggcaaagacctggaattccagtttggactgtactgctttaaatgtgacacagctctctggtccaggtttttgttttattatgcagaaggatttaattcctttttgtctcaatcctccactgcagactgggctttggagcctaacccaaaggcctattaattgcctttcctaaacaaaagagtcatcttccctgagataaaacctctactcccttataatgcacaagtggatg

SEQ ID NO: 859447 - DNA, 606 bp, Homo sapiens
aataaggggttggggtgcagagataagaggtggggcatggaaataagggatcagggcacagagataagaggtcagggcatggaaatgagggatggggcacagagataagaggttagggcatggaaataagggattggggcacagagataagaggccggggtgtggaaataagggatcggggggttcttgccccctagaaaagcggtacttgccgctaagggtgaaggagaaggggttggggggttcttgcctcccagaaaagtggagaaggagtagagacatggagagaaggagttgaggggttcttgcttcccagaaaagcagtacttgctgctaagggtgaaggaccaagactggcatccccgtgtggtcagatacctctgaaacgtgggtgaataatcagagaggcatcccttcaatgattaaacaccaagggaagtctgcctttccgagtccgtgactggcaccagagttttgggtccacggataaaacgtgtctcctttgtctctaccagaaaatgaaagraattgaaattaagagaagggagagattgaaggatggtgccaagattgaaaggagaaagtggttgagggatagtgagagag

SEQ ID NO: 859448 - DNA, 564 bp, Homo sapiens
atgaagccatcagttaacctgatggtggtgatggtttcctgtaattttatgcttccatttttcacatttagatctgacttttctggaatttatctaagtgcacgatgtgaaagatagatacarcttatttttctttccagatggctataccttgttctaggacaatttattaaatagtccatctttttctttctgatctgagatgctatctttattatatgctaaatttctgtacatgtttaaatttatttgctccttttgtttgtctctttgtacaccagtatctacctcattgttctaattattcgagcttcaggatacattttaatacttctgggtaggaacagaaccttctcgttactcttacaaaattttcttctttattctggtttatttttcctaagaactttaaaagttggcactgaattccaaaatagaacacccaaaaacctgttgatttttccactgggattatgttaaattttcgggttaacttaggggaaaaccattatttcatgatgttaaatcttactccatgagagagcatggtacgtcttttcatct

SEQ ID NO: 859449 - DNA, 623 bp, Homo sapiens
atatattaataataaaaatactattatggcatctaactggaattacttaaaagtctgattaattacttgaaataacagtccaaccctgtggaaaataagataaaaatgttggaacaacttaattttagttataacattaggtattattaaattttgtttgttttctattataaatcgtagcacttgggctgatacactgtagtgttatttttgttaaacattttatgtacatttaacttatggctagtctgtaaaaactcatatggtttctttatgttgagcttcataatgctgttatttgagtgttcactgatttttccccccattttttagtttagttcaaccaaggtgaaaaacaaaagcaagaaaaagaagccaaaggattcaaaggtatggagtattttctgtattaattcttgtctaaactctccaaaatagttagttggacatatacattagaattgagcaattcttgggatattttgaaacatttgtagagaaagactttctaggacttaaagatgttttggcagtcttctacattttgaagaaattccaggttcatattatrtaatagcaagtcttgacactcgtattctttattgtcttttttatttttctag

SEQ ID NO: 859450 - DNA, 510 bp, Homo sapiens
tcatgggctgtggtcactcatttttggctcagaataaatctctttaaatatgttactgmgtttgactcttttcattgacagtgtggaattctgatgtagtaagagggttcaagtgctggagtgtgaggggtggggaaaagtgacaaattttaattcttggagcagtgatccaggacgagaactttatctagtacccagtaggcacgaagagtggctgaatgaaccagtgactaataaataacatatttccacccattcccttgaggataggtttacatcaagtttttgtctatcccagtttatagtctagattattggagtggcattctgtaatgatgaaatgattattcaaacatcttccctcagcatgactcttactaggattaaaactcccaggtttgtaagatatcagaggttctgggtccacacgatgttttatattaatatttatattttcttgtgtgtggaaatgtctctggggagagaatctctaacatttattagttttta

SEQ ID NO: 859451 - DNA, 561 bp, Homo sapiens
ttcttgtgaatttttctttgtatagtaagcaatstatgtatagtaattgtctatgtatagtgatggctttatttcttctttttcttctgtgtcacttcagactttcttggcagaaaggtgaatagaaacagtaaaaactggtatccttgtcttgactttggaagtactttctattcctagtagctagattaaaaagattaaaaaagaaatagacaggttctcactatacagtggttattcacagcctcaatcatagagcactacagcctcaaactcccaggttcaacgaaccttaccaccttagcctcccaagtagctgggactacaggcacaagccaccacacctggctaatttttaaatattttgtagttcactacagcactattcacaatagcaaagacatggcgtcaacccaaatgcctatcaatgaaagactaggtaaagaaaatgtagtatgcagccaggcgtggtggctcacacttgtaatcccagcacttaggaagcctgaggcaggtggatcaggagttcgagaccagcctgaccgacatagtgaaaccctg

SEQ ID NO: 859452 - DNA, 561 bp, Homo sapiens
ttcttgtgaatttttctttgtatagtaagcaatgtatgtatagtaattgtctatgtatagtgatggctttatttcttctttttcttctgtgtcacttcagactttcttggcagaaaggtgaatagaaacagtaaaaactggtatccttgtcttgactttggaagtactttctattcctagtagctagattaaaaagattaaaaaagaaatagacaggttctcactatacagtggttattcacagcctcaatcatagagcactacagcctcaaactcccaggttcaacgaaccttaccaccttagcctcccaagtagctgggactacaggcacaagccaccacacctggctaatttttaaatattttgtagttcactacagcactattcacaatagcaaagacatggcgtcaacccaaatgcctatcaatgaaagactagrtaaagaaaatgtagtatgcagccaggcgtggtggctcacacttgtaatcccagcacttaggaagcctgaggcaggtggatcaggagttcgagaccagcctgaccgacatagtgaaaccctg

SEQ ID NO: 859453 - DNA, 462 bp, Homo sapiens
atccctccccacaaacctctccacagacaccaaccaccagtcccctagaaaatccccaaactttggggatctcttyattcaggcccccttcccagggaccccactacattcagtgctcaccctcaggtcccccaagtgtcccatcgggatcatttcagtaatctgtaaggaaatactcatgtgggtgaaagcttcttttatggatttttttgaagactgagtctgtgaacccttttttgtcttcatttctcatacattcattgaatatttaatgtttgccaggaactgtgcccagtattctctctctctctctctctctctctctctctgtgaagcccagagagattgagtctctgaatgattctgccctccacccacagcctcctaccttgtccaccactttctgtggcactttctgtgtcatgggtgttgcaatgaaccctgggaggacagagttacagc

SEQ ID NO: 859454 - DNA, 604 bp, Homo sapiens
aggtcccttcttccagtcggcagttcagcctccctgactttctctgggttccagtcagtgcatgaggatgatggtgacatttattcaggggcagcacagcagcctcagtcaccaccaacagtcactgtcatatgagaaaattagatagaaattggccttccaactcttctgtcagatccatctttgccctttttctgcctgcttgagtgaatacgaccaagaccagctcaggtttttgctgatgctatcacacgtgctcctaaaaccagaaggcttaatggtattttctgtttatctttacggattcaatgaaaagacaccttttcttactggtctcccaatgaaaacataatcactatgtccacagtaacaaagatagccctcgttgttgtctgctgggatgagaagagcagcagaagtttggcaggtatggccctcatgggcttcacatgtccctacatctggccctggctttgctgatcaccctttgggctctgaacccacagrgaagttaggtttctctttcttttgagattgcctctggaagagctgctctgttcccaggtgcagggcagcccctccgcagtaaggacccagctctcag

SEQ ID NO: 859455 - DNA, 589 bp, Homo sapiens
ccacagacgcttctctgcttctctggcaaggctgcaccccctggctaggtgggcagggccaggggctccttgagacagtctgcagccactgasctctccagcctccagggcagaggtacagtcccatggagcgtggctgatctgaaggcagttctggcctaaaaggggtcttgtcccttcctcgtcctcattgctcccaaggccaggttggcagcagtagcagcggggttggatgctattggatgggagaaggtgaatggactcggagtgcagaatcaagctgcggaagccaagggccttgaaggagggtcacacacaagggacaactgcagaggaaaataaaggaacactttgtgattagccctgcctgtggctgaaagcgcagtgcagaagcatagtaaggaaggactgggtggtctgggtttaagacctaggaaccgtctctgctcctccaagcctgaatgagccctataacctaagggtcctggaggtcttgaaaccttctgcggagaaggctccaggtccactgggccctgtgggtggaagagcagagtcacagccccgcactggggacctaacaggtgtggcc

SEQ ID NO: 859456 - DNA, 589 bp, Homo sapiens
ccacagacgcttctctgcttctctggcaaggctgcaccccctggctaggtgggcagggccaggggctccttgagacagtctgcagccactgagctctccagcctccagggcagaggtacagtcccatggagcgtggctgatctgaaggcagttctggcctaaaaggggtcttgtcccttcctcgtcctcattgctcccaaggccaggttggcagcagtagcagcggggttggatgctattggatgggagaaggtgaatggactcggagtgcagaatcaagctgcggaagccaagggccttgaaggagggtcacacacaagggacaactgcagaggaaaataaaggaacactttgtgattagccctgcctgtggctgaaagcgcagtgcagaagcatagtaaggaaggactgggtggtctgggtttaagacctaggaaccgtctctgctcctccaagcctgaatgagccctataacctaagggtcctggaggtcttgaaaccttctgcggagaaggctccaggtccactgggccctgtgggtggaagagcagagtcacagcccygcactggggacctaacaggtgtggcc

SEQ ID NO: 859457 - DNA, 589 bp, Homo sapiens
ctttgctgccagcttgttactggtaatgccacatgaccctcatgtcactgggccacatgggaccaccctgtcagctactctggcggcagcaggagggcagggatggggtctcactcccsgggcagcctgggtgcagactgaggcctgagggggctttctgcagagcacacggtgaatgtgggcagatgcctcactcccgctgattcctggtctggctcggtgctctgtcctgcctgcctggacatgcgctccctcctccagtaatgaggacgaggatgaggatggaggacagtggtggacgctgactgggggtgcccgctcaccgggtgggtcccccgactgctgcatcctcttgctgactcagctccagagggagcactgcacacctgcgcccaggtcctgagggtggactagggttgcctgctcgattctgacacagagagagggtggcaccactggctgaggcctaagcagtgccccagctacatccagggtctctcgtctcagtgccaatgagtgcaggaaaggccagggtgaggggtcccctcagagtccagcctggtgcaaggcaggggttggcactgaacag

SEQ ID NO: 859458 - DNA, 589 bp, Homo sapiens
ctttgctgccagcttgttactggtaatgccacatgaccctcatgtcactgggccacatgggaccaccctgtcagctactctggcggcagcaggagggcagggatggggtctcactcccgsggcagcctgggtgcagactgaggcctgagggggctttctgcagagcacacggtgaatgtgggcagatgcctcactcccgctgattcctggtctggctcggtgctctgtcctgcctgcctggacatgcgctccctcctccagtaatgaggacgaggatgaggatggaggacagtggtggacgctgactgggggtgcccgctcaccgggtgggtcccccgactgctgcatcctcttgctgactcagctccagagggagcactgcacacctgcgcccaggtcctgagggtggactagggttgcctgctcgattctgacacagagagagggtggcaccactggctgaggcctaagcagtgccccagctacatccagggtctctcgtctcagtgccaatgagtgcaggaaaggccagggtgaggggtcccctcagagtccagcctggtgcaaggcaggggttggcactgaacag

SEQ ID NO: 859459 - DNA, 654 bp, Homo sapiens
gaatgaggctgattctttcgctcatcttgagacccaaggatccatgattaggcagtgctgcaggccagtgggtagctgggaggaaaaccttctgtctccccagtaatrtgtcttccctcttcagcctccaccccttcagcacaagtttctggggaggagggtctgaagcccgggtgagaaaaagggtcaaggctggccttaggacctggatgggcacagtgaccccctgctgagagggccttcatgagcaagaaggctgggggaggtcctgagttgatttttacaatggaaacagacaccagctccccatccttgttcaaaagcatctcaggaccttttcctctgcagatggcaagggggagaatctccctctgagatacatgagaattcccttcccatgacctgtcctgtcacctggatgaattcgtatttggaaaccaaatgactccccagtgccaggcattacatcctcacagaaaacctgccagaatgagcaagatcttccctccctgacccactggccaggaatctcggacatcaggatggctggactagatcactcatgccatctcccctgacatcatcatggttaccggggggactctctgattaatttgggccacacagtgcctgtccctggcattgcagttgggg

SEQ ID NO: 859460 - DNA, 642 bp, Homo sapiens; identical to SEQ ID NO: 809720

SEQ ID NO: 859461 - DNA, 624 bp, Homo sapiens
tggatacctgaggcctcaatgtcaactccatcacgagtcagggtctccttctgccccgtgttgcctcccccactcccttctgaatctyctgtgcatggacatctctattgcagagttagcttccagagaaccccatctaagatggccagctgtccccaacatgggtcatcagggacctgagtaggccactataaactgaaaactctggtttctgtccaaatttgcagagtaaatgttgaaatgcccaatctgatggttccttgaatttttatggaatgaaaagggagcctgacatgccaggtgctctgggttgagggattgttggagtcagatctccctgcaggaaagcccggggcagggggagcagcctcacccctcacaggaaccacagatacacccacaaggtgagctgcaggatggatgctgcccacctccaccctccacatcctctgtaaatgttgctcctttctacaactccaaccagatatgtagatgtggcgaactacgtaaaatacggatcattcatcacatcaaaacccactgcaggacaccctggtcaacaaagaacccaatcacatccccatcaactacatagtttccaaattttccatctccagaaaaata

SEQ ID NO: 859462 - DNA, 564 bp, Homo sapiens
ttcaaagtcctttctgaggccagatcagaaggtcccactccttttaagccccttattgcccaatcatttttccagtcacgtgtctgaagcagtttatcctgattggattttcagttgttgtccagcttgattgccaaaagttttcctccaattgctactcaaaggaaagaatgagggtggggcttcagggctgctttccaggttgattgagctgctgatgggcatcctccctcctctctctcttgttcagagtctaccactttctctgcagtgtgcctgggccctcagctattggggatgagaagggatgcggagtgggaggcagtccacatgtctgttccaacaaagctcagaggtgagcgagttaaaaagcagatgtctttccagtaggagccccaggggacagggtgggtctcacagcccttgaagaccgagctcccgtaggagtttccasgtgtccaaacagggtcctcactgtgagtcttcaacagctttctccaagcagcagcccactcccttcttaatccatttccaggggtcaaaggtctatcctggttccctccc

SEQ ID NO: 859463 - DNA, 639 bp, Homo sapiens
ttcttttcagatatggactttctggggagtaatactgtagggcttttcttgttgttgcctttaactgtctcaaatgttctcccaaagatgctactgaacacagcctctcctttgagcaagttaaaagtctgggtacgactgtgagaggctcctgcctgccaacactctttctccactttcagtgactgctcttcttctgagggccgtaaaccaacaactgctcatcccaagatccactaagccctctgggaaattggtgctgtactgcataccctgcctgctgggacttgttacattgatgtattttctaaggagtgaataatcttgtccaagtaactaacttatttaaagacattttcttcggtgggcactgactccatggcacccgttttccaaggagttggtgagcttgtttctgagaatgccagaaatcaatgtacattccaaatcattctaaaagtgatttcttttcggtgtgggtttggttttgttattaattttgaaatatatctttgaatactgagatctctgaaactactagatctctagaagtgtaattgggaaagaaggttgcttgcagctttaacaaaatgagaaactcttcccaaatamaacctgttttgaagttaaaaaaaaatg

SEQ ID NO: 859464 - DNA, 580 bp, Homo sapiens
acagtttccacggcaatacagtagggaaggagtggtctttttagtaagtggtgctgattgattttgggtatgtatatgaaaaaattagtcttcatgccttatcacaccattaacaaaaaatcagtttgagatgtctcatcaaaacagtaaagcttctagaacatagaaggaatatctttatgtcgtttgtagacaatttcttaaataagactcatgaaagataaaccataaaaccacgatttagatccaaatatgggacatttccagtgccccagcacccttcccagtcgacagcccagtttttaaaaaggtaggagggggcaaaacttgaatagacatttaataaaaagaaatactcacgtggccgataactatataatctcaaggtccattaatcctcagggaaatgcaaattaaagccacaataaggtaccactacaatttcaagagaagggcacttactaaaaggactgacagtaccaagtgctggatcagtagcartggaattcgcagtatcggtggtgggaatgtaaatcgtttcaatcactctggaaatgtatttggcagtatctacactaga

SEQ ID NO: 859465 - DNA, 645 bp, Homo sapiens
ttcttttcagatatggactttctggggagtaatactgtagggcttttcttgttgttgcctttaactgtctcaaatgttctcccaaagatgctactgaacacagcctctcctttgagcaagttaaaagtctgggtacgactgcgagaggctcctgcctgccaacactctttctccactttcagtgactgctcttcttctgagggccgtaaaccaacaactgctcatcccaagatccactaagccctctgggaaattggtgctgtactgcataccctgcctgctgggacttgttacattgatgtattttctaaggagtgaataatcttgtccaagtaactaacttatttaaagacattttcttcggtgggcactgactccatggcacccgttttccaaggagttggtgagcttgtttctgagaatgccagaaatcaatgtacattccaaatcattctaaaagtgatttctttttggtgtgggtttggttttgttattaattttgaaatatatctttgaatactgagatctctgaaactactagatctctagaagtgtaattgggaaagaaggttgcttgcagctttaacaaaatgagaaactcttcccaaatamaacctgttttgaagttaaaaaaaaatgtgacat

SEQ ID NO: 859466 - DNA, 587 bp, Homo sapiens
gggtcacaaaagacgcagcccatgtgctgcgtctcatcgcccgggagtggggacttggccttgttgaagtccacatcaagcaaggcggcctcacagacactgcaggtgtcggcggacacccgcacgcggtgggcgttctcgaagcagtgcgctaccacgttgcacttgttgcaggccaccttccacttggggcccgaggtggggtccagcaccagcaccccgctctcacattccacgcactggccgatgcccagcatgctcagcgagtgctggcaggaggggtgcgtacactcgttgcagcccatgcctggcgggagaagggagccctgtaaaggcacgcccactgtgcccacctgccctctgctgcctgctcccaatgcctcaagctcctggatccctcgtcccagcagaaggaactcttcttggccttgctcttggggacagccttgctcatgtttcggctcctggctgccattacccctgttttctgcttacctgaaacctcctcaactttcaaggcccctcgctggcrccatcccagtgggtttcagctgactccatcccccctttgctttgctgccagcttg

SEQ ID NO: 859467 - DNA, 596 bp, Homo sapiens
ccctttgctttgctgccagcttgttactggtaatgccacatgaccctcatgtcactgggccacatggaaccaccctgtcagctactctggcggcagcaggagggcagggatggggtctcactcccsgggcagcctgggtgcagactgaggcctgagggagctttctgcagagcacacggtgaatgtgggcagatgcctcactcccgctgattcctggtctggctcggtgctctgtcctgcctgcctggacatgcgctccctcctccagtaatgaggacgaggatgaggatggaggacggtggtggacgctgactgggggtgcccgctcaccgggtgggtcccccgactgctgcatcctcttgctcactcagctccagagggagcactgcacacctgtgcccaggtcctgagggtggactagggttgcctgctcgattctgacacagagagagggtggcaccactggctgaggcctaagcagtgccccagctacatccagggtctctcgtctcagtgccaatgagtgcaggaaaggccagggtgaggggtcccctcagagtccagcctggtgcaaggcaggggttggcactgaaaag

SEQ ID NO: 859468 - DNA, 596 bp, Homo sapiens
ccctttgctttgctgccagcttgttactggtaatgccacatgaccctcatgtcactgggccacatggaaccaccctgtcagctactctggcggcagcaggagggcagggatggggtctcactcccgsggcagcctgggtgcagactgaggcctgagggagctttctgcagagcacacggtgaatgtgggcagatgcctcactcccgctgattcctggtctggctcggtgctctgtcctgcctgcctggacatgcgctccctcctccagtaatgaggacgaggatgaggatggaggacggtggtggacgctgactgggggtgcccgctcaccgggtgggtcccccgactgctgcatcctcttgctcactcagctccagagggagcactgcacacctgtgcccaggtcctgagggtggactagggttgcctgctcgattctgacacagagagagggtggcaccactggctgaggcctaagcagtgccccagctacatccagggtctctcgtctcagtgccaatgagtgcaggaaaggccagggtgaggggtcccctcagagtccagcctggtgcaaggcaggggttggcactgaaaag

SEQ ID NO: 859469 - DNA, 594 bp, Homo sapiens
ccacagacgcttctctgcttctctggcaaggctgcacccctggctaggtgggcagggccaggggctccttgagacagtctgcagccactgacctctccagcctccagggcagaggtacagtcccatggagcgtggctgatctgaaggcagttctggcctaaaaggggtcttgtcccttccttgtcctcattgctcccaaggccaggttggcagcagtagcagcggggttggatgctattggatgggagaaggtgaatggactcggagtgcagaatcaagctgcggaagccaagggccttgaaggagggtcacacacaagggacaactgcagaggaaaataaaggaacactttgtgattagccctgcctgtggctgaaagcgcagtgcagaagcatagtaaggaaggactgggtggtctgggtttaagacctaggaaccgtctctgctcctccaagcctgaatgagccctataacctaagggtcctggaggtcttgaaaccttctgcggagaaggctccaggtccactgggccctgtgggtggaagagcagagtcacagcccygcactggggacctaacaggtgtggccttgcta

SEQ ID NO: 859470 - DNA, 587 bp, Homo sapiens
gggtcacaaaagacgcagcccatgtgctgcgtctcatcgcccgggagtggggacttggccttgttgaagtccacatcaagcaaggcggcctcacagacactgcaggtgtcggcggrcacccgcacgcggtgggcgttctcgaagcagtgcgctaccacgttgcacttgttgcaggccaccttccacttggggcccgaggtggggtccagcaccagcaccccgctctcacattccacgcactggccgatgcccagcatgctcagcgagtgctggcaggaggggtgcgtacactcgttgcagcccatgcctggcgggagaagggagccctgtaaaggcacgcccactgtgcccacctgccctctgctgcctgctcccaatgcctcaagctcctggatccctcgtcccagcagaaggaactcttcttggccttgctcttggggacagccttgctcatgtttcggctcctggctgccattacccctgttttctgcttacctgaaacctcctcaactttcaaggcccctcgctggcaccatcccagtgggtttcagctgactccatcccccctttgctttgctgccagcttg

SEQ ID NO: 859471 - DNA, 526 bp, Homo sapiens; identical to SEQ ID NO: 809500

SEQ ID NO: 859472 - DNA, 600 bp, Homo sapiens
gcctcggtctcccaagtgttgggattacaggtgtgagcctttttatttctgagaaatctgttgtaatagctccttttttcattttggattttatttgagtcttctctcttttttcacagtgtagctaaggatttgtcaacttcgtttaatttttcagaaaaccatctcttagttttgtttttttctattatctgtttgatttatttctgctgtaatctttattatttcatttttttctgctaagtttgggcttagtttgttcctctttttctagttcgttgagttataattttaggttgcttatttgagatctttcttcttttttaatgtttgcttatctccataaacttcccacttagcactgcttttactgcatcctataggtttggtgtgctgtgttttaattttcatttgaagatatttttaaaattccctttggttttcctctttgacccaatgcttgttcaacatgtgatgtttgatttctgcctatttgtgawtttttccatttttttttactgttattaatttccagattcatttcttgttgtaaaaaaagatttttggaatgatttaattctccttacatttcttaagact

SEQ ID NO: 859473 - DNA, 578 bp, Homo sapiens
cacagccaccctgaccatcactggggctcaggttgaacatgaagctgactattaccgtcactcatgggacaacagtggtactcatctcacagtgacacagacagattggaaagtgagatctaaagaccttcactgtctgtatcaccctctttctccagccatagcaggactgagcagggctggcccgggtcacctggatcgaagcccttcaggctgcccttccctccagccctcccggcagactgcagagagtaggtcaggataggatttggggctggcagaaccaggctgtcctgctgttatttggaatggatgtaccttggctcaagatgacctgagtggaaggacagtaagagggagacagctactgagtgctcatggtcactgaatttcctcctgtgtgttgactgaacccaagacagtgcctctactctgtggcccaaataccctggattatttctctgaactgcccatgtttaactgagaccctcaagycccagctttgtgcatcctgatgttctgaacatggaagcctttcataatgtgcactgtgacatccttcagattcccatttcagg

SEQ ID NO: 859474 - DNA, 588 bp, Homo sapiens
actgtagaggttcttttggttttggagtgaatcaggaaacagccatcagctgagtgaaggtgagggtggtggtgggtgtttgaagacaagggaaaagtgtgaaagaattgtttggagaggaaggaaagaagrtgtggactggggatgtttccaatgttcgagcacgcagggctccacagttatctacatttgctgtcccttggagcaggagagaagaaaacggttgggacatattctgagcagactgtagaggtaaaatacgtagtttttttttgttttttgagatggaatctcgctctattgcccaggctggagtgcagtggcacgatcttgactcactgcaacctccatctcccaggttcaagcgattctctcacctctgcctcctgagtagttgggactacaggcacgcaccaccacacccagctgattttggtatttttagtagagccagggtttcaccatgttggcgaggctggtttcaaactcctgacctcatgtgatctgcccgccttggcctcccaaagtgctgggattacaggcatgagccactgtacctggccaaatatgtagtatttttaataggat

SEQ ID NO: 859475 - DNA, 573 bp, Homo sapiens
ctattttttattctttgctgagacatcctaggcatagagcactgccccattcattcaaargttgtagagtattctatggtagaattttagccaactcacttttaatggttattatcactattttgatcttataaataacactgcagcgaacatccttatgtagactcctttgattttatatgtagacatgaccatagaataaatttctagaagtcaaattgctgagtcaaaaggatgtgtgcttgtaattttcactcactgtcctcagattctcctctagaggggttatctacaaattcgcaatgtcagccataaatattcgaacagagtacactggggaaagtttaaatgtttttcaacctagcagatttaaaaatgttatctttttttagttttgatttctcctgttctgcttgaagttgagcattttctctaatacttcagtgctatttatttttataatttggtaaacattttcttaaatgtccagataagaaggattttggtctgtggttcccaagagtcaactttgaggatattctgtaggtatttttagcaccatttatagtgtaa

SEQ ID NO: 859476 - DNA, 641 bp, Homo sapiens
gcatgatctttgaagttctggggattataaataaataaatgaagtttaaggtttaaatgtgttgcaaatttacataaagcatgtagattttaaaactcagaatgyagcaatgaaatatggaagcttgagattttaagctgttaaggccctacaacaaattgccaggaacagaacaggaacttgatagtcataatgtcttatgctggaaattatcattttctctaaatgaaatttttttcccttttttcttagacataaggaaacatctcattgaacacccttcttttccactgtcaaacacccttacccagaaaggaactgtaacattaagtaggaaacaactgctttttttcataactattgagagatttctttatttgcacatcaaaatgttgattgtcaatgctaaaattggaattagtagtttaatatgcacacaagagattaattttgtttggattatcccatttctgtctattatttgtcttagttaactcagacatattctgcttttggtattttttgttttattttctttgccaactacatgtaaaccaaaaataaaattctaatgctcccccaacaaccccaccatctgagtggactctcttctcttggtgggggcactccaaagttaatct

SEQ ID NO: 859477 - DNA, 424 bp, Homo sapiens
ttttctatttcatgaatgtttggctgtgatccctattattaccctctattcacttagaatttgaatgttcaccttttttaggtttatgaggtagaagcttagattattttctttaattctttcttctttccaatactaagcatttaatgccatagtttttcttcaaagcagacttagctgcattccttaaattttaatatgttgtgtttttatgtttaaaaaggttcagtatcttctaatttatgttgtgatttttctttgattcatggattacttaacagtctgttctttcactttcaaataattgaagatttcctatkgttcttccggtattaattcaagttaattagttaattctgcattaaattatatcttctatgattttcatcctttcaaatttatcaatatttgatttatagcctaa

SEQ ID NO: 859478 - DNA, 616 bp, Homo sapiens
ttgtcaaatcctttcctttagtctgagtcatttctcaccttgaccattatctggtctccttcccatccatcctcctgctgcatgcagtctatacccaccactcctcatctttgttgctcctagatccagccttgcatgcattcctcctctctaaccctttattgtctcccacactctaaagaacatatgcaagccacatctgtaatttccaattttctagtggctacattatttttaaacagtaaaaacaaatagatgaaatgattttttaatgatatattctatttaacataataaatccccaatattaccaattcaacctataatcaatataaaaattagttactagatagtttaaacttgtttttcttttgtattcacacttcaaaatctggtatgtattttatattcatgtcttggataatttgctcaagtggataatctggtcagccaagtggtcaagagctacatatgccttgtgaagagaccactttggttgaggggatgcaattcagcctccttcccatgacacagcctttgaaggctggctcargcttggtcccaagtcccatttcttgtgcaccctctctccctgtttctgccatgttaagccaac

SEQ ID NO: 859479 - DNA, 631 bp, Homo sapiens
ctttgtcctcctctttctgcctgtagagcaatttcctcctgtcyactttgcagggccgatagctcaaatacagtgctatggtgatgacacccgactccaagggcaacggtaataatgacaaagagggtagagctgattccttcatccagtcctgcccaagcacagaagatagagttaggaaagtctgagagtacaaagatcacccaccccagcccacaggcccacttctgagtctcattcttcccaacctagtagaatctttcttattttcatgcttggataagaatcccaaacccctgaggtttccatcctgggcctggcagcagggcagcaaaggttaccttgaacaatgacagcaatgtctttgctgacagagcccagctggttagtggctgtgcgagcagtaggttccagtgtggttctgggttgccttctgtggcacttcaaggtcaaagacaccccattccaggtacacaccaaggctggagctgggtttccctttggacgcaggcgagcgtgtgttccatcccttccagccaggtctgtttggcagagcaactggattcctctaaccatggcttgtctgcaaaaacagtttcccaaagagctgaagttcagtgcaccacactcc

SEQ ID NO: 859480 - DNA, 631 bp, Homo sapiens
ctttgtcctcctctttctgcctgtagagcaatttcctcctgtctactttgcagggccgatagctcaaatacagtgctatggtgatgacacccgactccaagggcaacggtaataatgacaaagagggtagagctkattccttcatccagtcctgcccaagcacagaagatagagttaggaaagtctgagagtacaaagatcacccaccccagcccacaggcccacttctgagtctcattcttcccaacctagtagaatctttcttattttcatgcttggataagaatcccaaacccctgaggtttccatcctgggcctggcagcagggcagcaaaggttaccttgaacaatgacagcaatgtctttgctgacagagcccagctggttagtggctgtgcgagcagtaggttccagtgtggttctgggttgccttctgtggcacttcaaggtcaaagacaccccattccaggtacacaccaaggctggagctgggtttccctttggacgcaggcgagcgtgtgttccatcccttccagccaggtctgtttggcagagcaactggattcctctaaccatggcttgtctgcaaaaacagtttcccaaagagctgaagttcagtgcaccacactcc

SEQ ID NO: 859481 - DNA, 631 bp, Homo sapiens
ctttgtcctcctctttctgcctgtagagcaatttcctcctgtctactttgcagggccgatagctcaaatacagtgctatggtgatgacacccgactccaagggcaacggtaataatgacaaagagggtagagctgattccttcatccagtcctgcccaagcacagaagatagagttaggaaagtctgagagtacaaagatcacccaccccagcccacaggcccacttctgagtctcattcttcccaacctagtagaatctttcttattttcatgcttggataagaatcccaaacccctgaggtttccatcctgggcctggcagcagggcagcaaaggttaccttgaacaatgacagcaatgtctttgctgacagagcccagctggttagtggctgtgcgagcagtaggttccagtgtggttctgggttgccttctgtggcacttcaaggtcaaagacaccccattccaggtacacaccaaggctggagctgggtttccctttggacgcaggcgagcgtgtgttccatcccttccagccaggtctgtttggcagagcaactggattcctctaaccatggcttgyctgcaaaaacagtttcccaaagagctgaagttcagtgcaccacactcc

SEQ ID NO: 859482 - DNA, 636 bp, Homo sapiens
aagccaccttatctctttgggcctcagtatcctcactcacatccccatggtcagtagagtgccaagcacatggtggacacgcagaagtattgatcatcttcctcacctcccctaggagagcccttggaatccccatataatattctctgaagacctcaatccaatgagccgagtaattgactcggtagcaaactcatggaaaggacattagaagccaaaaggaggtagagtatgtcccagtacaataaccagcctctgatctcaaggaagaaagaacagagctgcaggtgagaagtgtgcgcctcaaatcaccaaagtgagagtggaaggagcacccaccagtcccttggaggcgatccctaagaccggtgagaatggcttcgaaaaatgtgatcgtcctcaaccccacagtcttgaacctaacaggagatcttgaagcctgaaagacaccactttaggatcaacagcagatctgtgactttccacagcaggcacacagaaccctagagttagtcgaggttggacataggaagggcttccaaacacacagagaaattcatggatcctaaattataaaggsaggttctttaaaagaaccaagatgattctgagatttatcctgagcttttttttttt

SEQ ID NO: 859483 - DNA, 612 bp, Homo sapiens
ctttgtcctcctctttctgcctatagagcaatttgcctcctgtccactttgcagggccgatagctcaaatacagtgctatggtgatgacacccactccaagggcaacggtaataatgacaaagagggtagagctkattccttcatccagtcctgcccaagcacagaagatagagttaggaaagtctgagagtacaaggatcacccaccccagcccacaggcccacttctgagtctcattcttcccaacctagtagaatctttcttattttcatgcttggataagaatcccaaacccctgaggtttccatcctgggcctggcagcagggcagcaaaggttaccttgaacaatgacagcaatgtctttgctgacagagcccagctggttagtggctgtgtagcggtaggttccagtgtggttctaggttgccttctgtggcacttcaaggtcaaagacaccccattccaggtacacaccaaggctggagctgggtttccctttgggacgcaggcgagcgtgtgttccatcccttccagccaggtctgtttggcagagcaactggattcctctaaccgtggttggtctgcagaaacagtatcccaaggagctgag

SEQ ID NO: 859484 - DNA, 428 bp, Homo sapiens
gtcaccgtgtttggccagtattcattatcttgttgtcttccagttgtgtctcttcaataagggagtatgcaatggagtctatagaaagcaagtgagggagttttctcagtaggtgcaagggtagtgaggcatttcattttgagtcatactctgatgaggctggcctgtcttttctcatagtgatctgcagagatgaaaaaacgcagatgatataccagcaacatcagtcatggctgcgccctgtgctcagaagcaaccgggtggaatattgctggtgcaacagtggcagggcacagtgccactcagtgcctgtcaaaagtatgtrctgaggctggaaggtggtgcatgcctgtgatcccagcactttaggaggccaaggtgggagggtcgctggagcccgggagttcaagaccaatctgggcaaacat

SEQ ID NO: 859485 - DNA, 428 bp, Homo sapiens
gtcaccgtgtttggccagtattcattatcttgttgtcttccagttgtgtctcttcaataagggagtatgcaatggagtctatagaaagcaagtgagggagttttctcagtaggtgcaagggtagtgaggcatttcattttgagtcatactctgatgaggctggcctgtcttttctcatagtgatctgcagagatgaaaaaacgcagatgatataccagcaacatcagtcatggctgcgccctgtgctcagaagcaaccgggtggaatattgctggtgcaacagtggcagggcacagtgccactcagtgcctgtcaaaagtatgtgctgaggctggraggtggtgcatgcctgtgatcccagcactttaggaggccaaggtgggagggtcgctggagcccgggagttcaagaccaatctgggcaaacat

SEQ ID NO: 859486 - DNA, 531 bp, Homo sapiens
ctgaggtcaggagttcgagaccagcctggccaccatggtgaaaccctgcctctactaaaaacacaaaaattagccaggtgtggtggtgcgtgcccataagcacgagaattgcttgaaccccggaggtggagggtgcagtgagctgagattgcgccactgcactccagcctgggtgggtgacagagtgagactctgtctcaaaacaaaaaaacaaaaaaaaacaaaaaaagaagagtgaagttcttgtggcaatatttctagtcataaaaacatcagcaaacttctaaataaagacccaaaacacttctaacattcaatattgaaataaatgtgagctatacaacatttaagaaaggttaataaaaacaaacatggtatttatttacccaatttttggagaataagtgratgatggcggccataatagtggtgggttaattcagggaataaatgtttgcaaggcaggaatggtaaggaacacctcttactaccatgaagttcaaaaacaatcacaaatagggcaggctccct

SEQ ID NO: 859487 - DNA, 638 bp, Homo sapiens
tctgacaaagggctaatatccagaatctacaatgaactcaaacaaatttacaagaaaaaaacaaacaaccccatcaaaaagtgggtgaaggacatgaacagacaccttttgagactattttctagatgttgtaggcatgtttcattgttttcttttttcttttgtctcctctgaccattttaaatggtattaaatgtattttaaaatagcctatcttcaaggtcactaattgtttattctacttgatcaatctactattaaaaaactctgatgcattcttcagtatgtcagttgcatatttaactccagaatttctgcctgattatttttaattatttcaacctcttttttcagtttgtctgatataattatgcattccttgtctgagttctattgaatttctttgtgtttcctcaaaacagctattttgaattctttgtttgaaagataatatgtctttgtttctccaggattagtttctggtgccttatttagttcatttggtgatttcacattttcctggatggtgttgatgcttgtraacatttgtctgtgtctgggcattgaagagttaggtattcattgtactgttcactatctgggcttgtttgtacctgtctttcttcggacagctttcc

SEQ ID NO: 859488 - DNA, 649 bp, Homo sapiens
cttgtcttctaagtttgctaagaggctttcttttttttttttcaaatcacaactgaaagtagaattttattaaatatcttttctgcatctagtgaggtgatcatatgattttctgtccttttttcctgttaatatagtaaattataagttaaatgaattaattttccataagcttcatgtggttgtgatatattagcattgttaaatatcactaagttagatttacacacacacacacacacacattattaatgtgatttttatttcttggaatgtcctttacaagttttggttttggtggcttcataaaacaagatgagaagtgttccatgttttctctctctttttttttttttggaagtattcgtgtaagattaatgttatttactctccaagtgttggaaacactttgtcagtgaagccatttaagcctggagttttactttgtggtgaggtttttaataacaggtttcagttctttcatagatctaggactatttatttttgtttcaattttattgagttgtgtttcttaaagaatttgtccactttctctaaggctgcttctaccctaactcccttgctcttcttttcttaggtcccccaactacacttayattagtctttcccactattatatatatatata

SEQ ID NO: 859489 - DNA, 606 bp, Homo sapiens
cagggtatggtaccatttgtttttgtgggaacaaaggacagcatcsctaatgccactgttcttttggattatcacctgaactatttaaaggtgagaacagaaagaactttaacttctaatccttttgtactaaaatatacaaactttatagtagatctttcagcagttaggactcattctagcctgtgcaaaacactgtatgacttgtcaaaggtaatagagaaaatacgttgtttggcttataatttttttaaaaatggaagtctttataaatttaagtaccaatataccagttttcaataaaattttatacttccctttattcttctcttaaacccttacactcagtttaggcaatcctgtacatagcctgttaatccatttgatcctttctagcattttggttttttccagacaaaaatctgtgtctataactcttgcctttattgttccttttatgtcatttatcaaggaaatctaagcatttcatgaagttctttgtttaaatgtttaccctatttttctctttactgttattcaaaatacaaactatttgtgtcttctcataaatgttcagtttagttagtgtgatgcggttatgcctcc

SEQ ID NO: 859490 - DNA, 532 bp, Homo sapiens
ttgccacactgtgttgagttccacccagtccttagcacagtcaggggaaagccgcctactcaagyctcagtaatggtggatgtccctccccacaccaagctcaattgtcccaggtcgacttcagactgctgtgctggcagggagaaattcaagccagtcattcttagcttcctgggctctgtgggagttggacccactggcttggctccctggcttcagccccctttccaggggagtgaacagttctgtctcactggggttccaggtgccactgggctaagaaaaaaaaaaaaaaaacaaaagctcctgcagctagctccgtgtctgtctgaacagctgccagttttgtgcttgaaacccagggccctggtggtgtaggcacatgagggaatctcctggtctgtggactgcaaaaaccatagaaaaagcatagtatctgggccagatagcacagtctgtcacagcttcgcttggctgggaaagggatgcctctgctccttgcacttcccaggtaaggcgacaccccaccctg

SEQ ID NO: 859491 - DNA, 547 bp, Homo sapiens
cagctcctcatctgttcaagttggatcctaagattgcagcaattcagccccttcttcaggctccacttctaattctagttctcctgctgtttcccccacatctgcagtgactttctccactgaagtcctgaacccccaaagttatccatgagggttggaatccacttcttccaaattcctgttaatatatggatattttccttatatactggtgtctttacttgtttccaacttcttattgatacatgatagttgtgcatattaattgggcatatgtaatattttgatacatatacacatgtgggatgatcaaatcagggtaattacgatatccgtcacctcaagcatttatcatttctttgtgttgggaacatttcaaatcttctcctttagctattttgaaatgcacaataatttattgttttttttgagatggagtctctctgttgcccaggctggagtgctgtggtgcratctcggctcactgcaacctcccgggttcaagcgattctcctgcctcagcctcccaagtagctgggactacagg

SEQ ID NO: 859492 - DNA, 575 bp, Homo sapiens
ccctttgggaggctgagacaggaagattacttgaggccaggagtttgaaaccagcctgggcaacatagtgagactctgtctccacaaaatttttttttaattagccgggcatggcagtgtgcttctgtagtcttagctactgaggaagctaagccagaagaatcacttgagcccaggagttcaaggctgcagtgagctatgatcataccattgcactcttgcacttgcacagagcaagaccctgtctcttaaaaaaaaaaaagtgtgtgtgtgcatatgcatatatacatatatatacatgcaaatgtatctgtttataattcagattgcttcaaaaagatgttgcactttatgatactgagaacagtgagaagtaaataagatagagtgtaggaggaggaataatttcagaacagccatctgagaacttctgtgacaacagatcaggcaaaatgaaatgtgaaagtaattttataggccaggcrtggtggctcatgcctataatcccagcactttgagtggccaaggcaggtggatcacttgaggtcaggagttcgagaccagcctggtcaaca

SEQ ID NO: 859493 - DNA, 573 bp, Homo sapiens
ttccaccccgcaatctctagccctctctgggcacagcagcaattgggaactagttcctgtactgcctttatctcattttacaaaacaaacttctacaaagaagctggaaaggaaggaggagaaaggattatcatgcaggcacagggagggggcctagagaagagctctggcagattatgtccctcttaaaaaatgcaaccagaatcatcaacaaagtatcacctcaaaaatatgcaggagaaaaagaaaggaatcaatgttggggtggttggagcagaaggagccaaactgcccagaaggtgtcctctgaaggctgcgaggagcagactaggtcagccccagaggcagatggcacacacagaatggcaggattaccggtagctgcagatttattgacagaagccctagagactgggcctgctgcccagggaatgtgggggctcacttatcaaagactactggaaaatggctgagccggcaaccccttccactacagtgatgcctggttttcttgmacagcctgtaactctgcctgtaacaaggagaaaattaaagcaacgaatctggccaaat

SEQ ID NO: 859494 - DNA, 497 bp, Homo sapiens
atgagcttctcgtgaacacgtggaagtcagggacacccgagtcccgaggagaagtgagttgacagggcttacctgcttggccattttctrggttaggcagtgtgcagggagggtggagatgcgagcgaaaggagggcttgatggggtgggacggccgaggagggtctggaggaaataagcaggggtgccagtggtcgtagtggcggggcttttcggggctgtggttagagaaaacttctcgaggggctttggggtggctcgtcccgcactgggggcttgttgctcctgagttccctgaaaggcgtggtgacttggccgagatggagcagtgaaggtggagggaaatgcgtggttcgggataggcttctgaaggcaggacctgtgagacttgctgatgggttggggatgggaggcgtgaaaggaaaaaaaaaaatcggacccaacttcactgtgccaaaaggaaaaaattatgctgagcgcggaatcatgcaagaaac

SEQ ID NO: 859495 - DNA, 592 bp, Homo sapiens
tattcaactgcagcctccaatcttacggacaaaccgtatttatttaactgcagcctccaatcttacggacaaaccgtatttatttaactgcagcctccaatcttayggacaaaccgtatttatttaactgcagcctccaatcttacggacaagccgtatttatttaactgcagcctccaatcttacagacaaaccgtattcaagtgcagcctccaatcttatggacaaaccatgtttaactgcagcctccaatcttacagacaaaccgtattcaagtgcagcctccaatcttatggacaaaccgtattcaactgcagcctccagtcttacggacaaaccgtatttaactgcagtctggtgtctaaggttcaggcttcacatttcattatcaaggggttctgggccgggcgcgggggctcacgcgtgcaatcccagcactttgggaggccgaggcaggtggatcacttgaggtcagagtttgagaccagcctggccaacatggtgaaaccccgttgccactaaaagtacaaaaattagctggatgtggtggtacatgcttgtaatcccagctactcgggaggctgagcaggag

SEQ ID NO: 859496 - DNA, 638 bp, Homo sapiens
taagatttatttatttatttattattttttgagatggagttttgctcttgttgcctaggctggagtgcartggagcaatctaggctcactgcaacctccgccacccacattcaagcagttctcctgcctcagcctcccaagtagctgggattacaggctaacttttgtatttttagtagagacggagtttcaccatgttggccctgctggtctcgaactcttgacctcaagtgatctgcccacctcagcctcccaaagtgctgggattacaagcatgagccacggtgcctggccaagatttatttttgaaagtgcaccgaggtcgttgtttatgagtgatgtaaccaattgtctcaagttgaccaaaggtagatcttttctccactgttctgaaattctacctttatcacataccaaattcccatacacacacgtctatttctgacatttctgttatgttcattgatctttttatttattcttgcctgcatgtacatgacatccctctgtttctttgttcacatcagtctttcatctatgggtgtctatctgtgtctacattttcccattttacttaattttttttttctgggcatggtggctaatgtctgtaatcctagcactttgggaggcctagg

SEQ ID NO: 859497 - DNA, 602 bp, Homo sapiens
ctttggctaggtccctccctcatcacagctcagcatagtccgagctcttatctatatccacacacagtttctgacgctgcccagctatcaccatcccaagtctaaagaaaaaaataatgggtttgcccatctctgttgattagaaaacaaaacaaaataaaataagcccctaagctcccagaaaacatgactaaaccagcaagaagaagaaaatacaataggtatatgaggagactggtgacactagtgtctgaatgaggcttgagtacagaaaagaggctctagcagcatagtggtttagaggagatgtttctttccttcacagatgccttagcctcaataagcttgcggttgtggaagtttactttcagaacaaactcctgtggggctagaattattgatggctaaaagaagcccgggggagggaaaaatcattcagcatcctcacccttagtgacacaaaacagagggggcctggttttccatatttcctcatgatggatgatctygttaatgaaggtggtctgacgagatcattgcttcttccatttaagccttgctcacttgccaatcctcagttttaaccttctccagagaaatac

SEQ ID NO: 859498 - DNA, 608 bp, Homo sapiens
tcttttaacgtcttcagcctacaacatacagggttcatggtggsaagaagatagcaagatttaaattatggccagtgactagtgcttgaaggggaacaactacctgcatttaatgggaaggcaaaatctcaggctttgagggaagttaacataggcttgattctgggtggaagctgggtgtgtagttatctggaggccaggctggagctctcagctcactatgggttcatctttattgtctcctttcatctcaacagctcctgggaaatgtgctggtgaccgttttggcaatccatttcggcaaagaattcacccctgaggtgcaggcttcctggcagaagatggtgactgcagtggccagtgccctgtcctccagataccactgagcctcttgcccatgattcagagctttcaaggataggctttattctgcaagcaatacaaataataaatctattctgctgagagatcacacatgattttcttcagctcttttttttacatctttttaaatatatgagccacaaagggtttatattgagggaagtgtgtatgtgtatttctgcatgcctgtttgtgtttgtggtgtgtgcatgctcctcatttat

SEQ ID NO: 859499 - DNA, 601 bp, Homo sapiens
ctcttacttgccccagaacatctctgtaaagaatttcctcttatcttcccatatttcagtcaagattcattgctcacgtattacttgtgacctctcttgaccccagccacaataaacttctctatactacccaaaaaatctttccaaaccctccccgacaccatatttttatatttttcttatttatttcatgcacacacacacactccgtgctttataagcaattctgcctattctctaccttcttacaatgcctactgtgcctcatattaaattcatcaatgggcagaaagaaaatatttattcaagaaaacagtgaatgaatgaacgaatgagtaaatgagtaaatgaaggaatgattattccttgctttagaacttctggaattagaggacaatattaataataccatcgcacagtgtttctttgttgttaatgctacaacatacaaagaggaagcatgcagtaaacaaccgaacagttatttcctttctgatcataggagtaatatttttttccttgagcacatttttgccataggtaaaattagaaggatttttaraactttctcagttgtatacatttttaaaaatctgtatta

SEQ ID NO: 859500 - DNA, 563 bp, Homo sapiens
tgggcataaaagtcagggcagagccatctattgcttacatttgcttctgacacaactgtgttcactagcaacctcaaacagacaccatggtgcayctgactcctgaggagaagtctgccgttactgccctgtggggcaaggtgaacgtggatgaagttggtggtgaggccctgggcaggttggtatcaaggttacaagacaggtttaaggagaccaatagaaactgggcatgtggagacagagaagactcttgggtttctgataggcactgactctctctgcctattggtctattttcccacccttaggctgctggtggtctacccttggacccagaggttctttgagtcctttggggatctgtccactcctgatgctgttatgggcaaccctaaggtgaaggctcatggcaagaaagtgctcggtgcctttagtgatggcctggctcacctggacaacctcaagggcacctttgccacactgagtgagctgcactgtgacaagctgcacgtggatcctgagaacttcagggtgagtctatgggacccttgatgttttctttc

SEQ ID NO: 859501 - DNA, 510 bp, Homo sapiens
ggaaaaataaagaagtgaggctacatcaaactaaaaaatttccacacaaaaaasaaaacaatgaacaaatgaaaggtgaaccatgaaatggcatatttgcaaaccaaatatttcttaaatattttggttaatatccaaaatatataagaaacacagatgattcaataacaaacaaaaaattaaaaataggaaaataaaaaaattaaaaagaagaaaatcctgccatttatgcgagaattgatgaacctggaggatgtaaaactaagaaaaataagcctgacacaaaaagacaaatactacacaaccttgctcatatgtgaaacataaaaaagtcactctcatggaaacagacagtagaggtatggtttccaggggttgggggtgggagaatcaggaaactattactcaaagggtataaaatttcagttatgtgggatgaataaattctagatatctaatgtacagcatcgtgactgtagttaattgtactgtaagtatatttaaaatttg

SEQ ID NO: 859502 - DNA, 539 bp, Homo sapiens
agacagacactgaggaccgcagagctgaatgagacccgcacaggcgttttcctcccgacttctcagaggactgtacctggtaccacctggagrgctgaaacgtactcaggtaaaagttactcactcctccagtcctcagctcttcctgtgtgagtcccatgctggccttgtctaggcacatggggtggaggggaggagtgtcagatttgcaaaaaagaaaggctaggaggccaggcaaggtggctcacgcctgtaatcccagcactttgggaggccgaggcgggcccatcacctgagatggggagttcctgaccaacatggagaaactccatctccactgaaaatacaaaattagcagggcatggtggtgcatgcctgtaatcccagctactcgggaggctgagacaggagaattgctttaaactgggaggcagaggtttcggtgagctgagatcgcaccattgcactctagcctaggcaacaagagccaaactctgtctcaaataaaaaaaaaaaaaaaaaaagaagaagaagggcta

SEQ ID NO: 859503 - DNA, 582 bp, Homo sapiens
ccctccagtgaagaacctgatcctacctcatgaaaggagaaaatggttagaacagatcgagtcctaattaagtcacaaagatgccaaggcaccttgtggccatatttaaakgcctactgtgtgccacagtttaaaaacacaacccatcttgagtgttgggtggttggaagtgtaaacggtgggggcagaggtgggggcactgctcagtgcaggccacagcttcgaggtgggaaacaggtctggcatgctccagcaacaacttggtcagcacagagacggcaaaaggcaaggagtagatgaatgcagagtaatgggctgcgctgtgtgaggcctgtgctggctgaagcctctggagacccaggcagaatccgatccttgttgcctgctctcctcggcctgtggctgcatcactcctccctcctgtctgaaatcaaggacccttgtgattgcactgagggactttctggacaacccaagataacctccccatctcacaatccttacatcatagattccaggatcaggaagggggcacttcggagagtgccaaccttagccaaccatagccactgaggactgggg

SEQ ID NO: 859504 - DNA, 571 bp, Homo sapiens
acatgaggaatcttcctgccccacactctaacgtccccagcctgctgcgtgctagctcttgtgcctagtttcatagtttctgcaagttctttgccccctatgtcaccgctactggtccttgctgtcagctgctgacacctaatttgtcacttatgggatggggtggggtgggtagaaacctgttaggcttgttggaatactgtgcaaaaatggagtgaataggccacgacaaagatcccaagggatttactgaggaacaggcactgtgcttcccaggctcgggctttgtgagagttctctggaccactggattcagtcaacttgcctgaagccacacagctgatggggaggggagctgggactggaagcaggtgtgtctggacccctccaccagcattcctagaattctactttcctgcccctcctattttgcagctgttaacgaaacaatcttgactgctttctgaaagccagtgactactgactacttcargtaacagctgacttcacctctcctttcttcacctgtgcctgctagaagagtctcatcaagtctccaggactggcgcca

SEQ ID NO: 859505 - DNA, 599 bp, Homo sapiens
ccgatcagcctggtatgacagagcatgactctgtctcaaaaaaaaaaggaaaaaaattaaactatactgataaatatttctaaagtaattgatgaaaacatatatatgacacttagcaggtrttgatcaattccagtgcgtgcatgagctgctttgcactgtggctacagcactcagcagtttgcttagtgagtagatggccatagctcactttaggtatctggagaataatgctcattcctgtctccagctttgtaaaattgcctaatagacggaaggcattaaaatatgaagatgggattatatcttatgaagctgcttggaatgggttttccctcttaacaaataatttctgatcatccatatcccttaagaacaccggatttctgggggccagggaggtaagattctatctgacaaagccttcctggtgtcaaccacttgccatctgttggtcagtgctggccctgctgggtctatagaatgagcttctttgtctgacgctcctgttgccatccctttctccatcagccttgtagcagtacctgggaacctgcatcctgtggaaagatggaggagcagatgacatcttccagtca

SEQ ID NO: 859506 - DNA, 535 bp, Homo sapiens
tgccacgcctcagagctgcatatgcaggctgccctgggacctgaggacagcactatgggtcagccagggacatggtgtgggcccctcggaacaggctccacaaggaagcctcagagattcatgaagaggaggttctggctgggccggcagctggagggggtgttccgcacagagacccccaaaatgctcagagaattgagttgggggagagcatgtattacgtgaggctctcccatgagacccacatggctgcttcgtgacagggggaggccgaagcagagactgtgggggagccgcgtcctggaggatccatgtgatagcaagccactggaagtggggtgcacaagccaaaggggggaaggcaggtggcagggagcccacttggtctatatgggatggtggtggycccaagggttgtgagagagaggcttaggaggcgacatctacaggctctttcatgggtggagtccagctctgcaggctgaagacttcttgaggttggctacctgaaaacgtgaaagtgcctcaccctgct

SEQ ID NO: 859507 - DNA, 536 bp, Homo sapiens
tgagccttattgggctaatcgccaatttgggtgttcacctgccctgcatcagttgtgcctgtgaaaaactactgcactccagctgtkaccggttgagggtaattgtccaggttcttggtgttttgcacaaagaattcgacaaaacacacaaacaaagcaaggcaatgaaagcagagattttttttgtttgtttttttaattaccgtgcccgcgagacggagtcttgctgtgtcgcccaggctggagtgcagtggcacgatctcggctcctgggttcaagcaattctcctgcctcagcctcctgagtagctgggattacaggcttgcaccaccacgccccgctaatttttgtattcttagtagagatggggtttcaccatgttggccaggctgatctccaactcttgacctcttgatccaccaaaagcagagatttattttaaaggaaagtacagtccacagagtgggagcaagctccagcaagtggctcaagagcattggtgacagaattttctggggtttaaatacaatctagag

SEQ ID NO: 859508 - DNA, 536 bp, Homo sapiens
tgagccttattgggctaatcgccaatttgggtgttcacctgccctgcatcagttgtgcctgtgaaaaactactgcactccagctgtgaccggttgagggtaattgtccaggttcttggtgttttgcacaaagaattcgacaaaacacacaaacaaagcaaggcaatgaaagcagagattttttttgtttgtttttttaattaccgtgcccgcgagacggagtcttgctgtgtcgcccaggctggagtgcagtggcacgatctcggctcctgggttcaagcaattctcctgcctcagcctcctgagtagctgggattacaggcttgcaccaccacgccccgctaatttttgtattcttagtagagatggggtttcaccatgttggccaggctgatctccaactcttgacctcttgatccaccaaaagcagagatttattttaaaggaaagtacartccacagagtgggagcaagctccagcaagtggctcaagagcattggtgacagaattttctggggtttaaatacaatctagag

SEQ ID NO: 859509 - DNA, 594 bp, Homo sapiens
ggaaataagacagatgcttgcattaagcaaagacctcaattccgacccctgcaattcagcagctacttaacatggaacacatgcagattagggcaggggtgcagcaatgagtaacacatggtttctgctcgcacttagggatccagagcgctgagcagcagctatgattagaacaaaaggtcagggaacccagaggaatcattcttgacaggaggagtatcggagaagccaattttttatttatttatttttgagacggagtcttgctctgttgctcaggctggagtgcagtggcatgatctcagctcactgcaacttccgcctcctgggttcaagtgattctcctgcctcagcctcctgcgtagctgggaatatagctaaacgccaccacagcgggctcattatcttttgtatttttagtagagatggggtttcaccatgttggccaggctggtctcgaactcctgacctcaggtgatccacccaccttggcctcccaaagtgcggggattacatgcgtgagccaccgcgccggccagagaagccaatctgagtagaaaccsgaacaagcaaggttcgaattccctcacctca

SEQ ID NO: 859510 - DNA, 647 bp, Homo sapiens
ctttagataaatatgtcatttaagaaacggattcgaaaagaattggtggtaggggtctcatgaggccgggagagttacagaaggatgtgcagcccctcctgggcctggcagggtgtgagggagagtgaggactcactgtccctcctgaagggaagccctgtgccatctcagcctttccgccctcagacctttccagcccctgagacctcatggccttgaagccgtgctatccccagtgtcctctgctttcccctcataggcttcttctgggagagaggtttcctggggtacgttctgatccctcaaaacggaaaggccctgttctcaataattcaaagatttcactctgagtgggatagtgcttcctgaatgccctgctcttgtggtggacatttttatcggggcaaggctaagagcagggcctgatgggggaagtcactgctacttcacattttgaccaataattccttgtgctgtatcagatgctgtaggctgatacaaaatggccgccgccctyaaagtcagatgaaagagcccctgaggacagcgttagagacactcgggagatgatttccctctttcaatgtgggaggacttacataggagaggtctatatctagataaaaactcctcccaccactggtgct

SEQ ID NO: 859511 - DNA, 647 bp, Homo sapiens
ctttagataaatatgtcatttaagaaacggattcgaaaagaattggtggtaggggtctcatgaggccgggagagttacagaaggatgtgcagcccctcctgggcctggcagggtgtgagggagagtgaggactcactgtccctcctgaagggaagccctgtgccatctcagcctttccgccctcagacctttccagcccctgagacctcatggccttgaagccgtgctatccccagtgtcctctgctttcccctcataggcttcttctgggagagaggtttcctggggtacgttctgatccctcaaaacggaaaggccctgttctcaataattcaaagatttcactctgagtgggatagtgcttcctgaatgccctgctcttgtggtggacatttttatcggggcaaggctaagagcagggcctgatgggggaagtcactgctacttcacattttgaccaataattccttgtgctgtatcagatgctgtaggctgatacaaaatggccgccgcccttaaagtcagatgaaagagcccctgaggacagcgttagagacactcgggagatgatttccctctttcaatgtgggagsacttacataggagaggtctatatctagataaaaactcctcccaccactggtgct

SEQ ID NO: 859512 - DNA, 636 bp, Homo sapiens
tgttatttaaatattcctcactctccttcgtcttcttcctgttggacatttgggttgtttctgatgttttgctgttaggaagggtgttatctggagccttcacgtacatttatgcaggtgctcacaggcaagatttctctaaggcttttacaaaggagtacaattattgcatcattgggtgtggtgtgtgcctgttgtaccttcaagataatgtccacaagcttcccagacggccgctaccaaataaactgtcctctgcagcgtgtgagtgttccctccgcacgccgcacatccttgccagttcttcatgctgtgggacttcctgtttttgttgctctggtggatattcctgttgcagtcctcacgtttgtttctctggttactcacggagttaagcatctctttgtatatttacggatgtcttctgtctttcccccttctgcgaaatgttcctcctgccttttgcccatttttcttttggtttgtcgattcgctcctttattagttgttgatctttacatggtaagaattctgattctttgtcagtttgtatgttgyaaagatcttctgccctctgcagcttttctcttccttttttcttggtggatcttgatgatcagaagttgttagctctag

SEQ ID NO: 859513 - DNA, 544 bp, Homo sapiens
gccaataatacatgatagacaaaagacagtcttgtcaataaatggtgttgggaaaattggatattcacttgcagtagaatgaaattagacccttatctcacacaatgcacaaagatcaactcaaaacggactgaagattcaaatgtgagacctgaaattagaaaactactagaagaaacttacgtgaaaagctgcttggcactggtctgggcaataagtttttcaatatgacaccaaaagcacaggcaacaaaacaaaaacagacaaatgagtttgcatcaaactaaaaagcttctgcacagcagaggaagcaatcaacagagtgaaggagacagcctatggaatggaagaacatagttgtaaaccatccatctgatacaaggttaatacacagaacacacaaggaactcawacaactcaatagcaagcaaatgtattttctaacccagttaaaataacccagttacacctactatgtactcctaaaaattaaaaattgaaaattgaaaaaataaataacccaatttaaatgggcaaggacctg

SEQ ID NO: 859514 - DNA, 519 bp, Homo sapiens
aagaaagaacatccacaccccacatcttatgcctgctgaggcttctgtctttggcatatttctgttggaccatgtgtcaatggtggmtgcatgttttcctatggcgtccaaatcagtgggattcaagacctggggttcctctgtaagggttctcacacccaggacggtcagtctcagggcaaggcactgcccagctacccaccgttcactgtcccctactcccaccccaacgcacacacaggcacacacacaggggaggtcagggaggaggcacacatgtcttcaccaagagcctacaggagcccagttgctggagccatcagagcctctggaaagccactatatactgccgtcctttcagcagcaaggtgggagaagtcagcatcgtcaagagaatttcattaggcacaagcagtctcccccagaggtcagaaggagaaaacatggcaagtagagatgtccctggggagtggccgcaaagtcacggagttctggaaggtcagagttgacaggatcctt

SEQ ID NO: 859515 - DNA, 519 bp, Homo sapiens
aagaaagaacatccacaccccacatcttatgcctgctgaggcttctgtctttggcatatttctgttggaccatgtgtcaatggtggctgcatgttttcctatggcgtccaaatcagtgggattcaagacstggggttcctctgtaagggttctcacacccaggacggtcagtctcagggcaaggcactgcccagctacccaccgttcactgtcccctactcccaccccaacgcacacacaggcacacacacaggggaggtcagggaggaggcacacatgtcttcaccaagagcctacaggagcccagttgctggagccatcagagcctctggaaagccactatatactgccgtcctttcagcagcaaggtgggagaagtcagcatcgtcaagagaatttcattaggcacaagcagtctcccccagaggtcagaaggagaaaacatggcaagtagagatgtccctggggagtggccgcaaagtcacggagttctggaaggtcagagttgacaggatcctt

SEQ ID NO: 859516 - DNA, 610 bp, Homo sapiens
ttgcattcagagctcactgcctagcgggaaaaaagacatatgcactcataactctaatttaacacggcgtcctaraaattccatatccatcttcaaagttctctggaagcaaaaagacaggaggaaagacatttttagaaggaggcttcctggaaggagtgacttcagtttcaggccttaaaggagatgtgagtttccacatgcaaggagggaggaaaagcatgttgcagacagacgaagcaagtgtgtgagcaaaggcctgcggggtgacagggaggggtgttgggaggtgtgtatctggatgaaggcaggtatggaaagtgctgggaaaaaaggtctgggaaagggccttgggggccaggtgataaggaagttgaatgcctctttgaagagtggggttttattttatgtgcctttggtggggagttgtgaaggtttttattcaaaagagcagtggggctgggcacagtgactcacacctgtaatcccagcactttgggaggccaaggtgagcagatcacgtgaggccaggagtttgagaccagcctggccaacatggcgaaaccccatctctactaaaaaatacataagtaacaaaaattagctgagc

SEQ ID NO: 859517 - DNA, 645 bp, Homo sapiens
atttttagtagagacggggttttactgtgttggtcacactggtctcgaactcctgacctcgtaatccgcctgcttgggcctcccaaagtgctakgattacaggcgtgagccactgtctggcgggaatcagttgatacgttgcagttaagtggttgttggggtcactgtgacctgtttctgttttttttgtatttgtattttagaattcctttgtttctggttgctccttggttttgtaggcttctgggagaaaggttctagtcatgttgttggtttcttgggaaggtaacacacctagagcattcttcccctgatgttcttccaccatacccatctcaacctctaattcccagataagctgggtggatgtgaatcctgtgagaccaagtgtaaatccttgagacacacctaattctgaacctttgctgtggacagatgcactgagatagaggaatcccgttatttccctctttagagagaatgctaatttgtattgtgttttttttcttgattcccgcactacattgatgtactaatttgtattcttttagttacttcagacttttagaagttctagactcatggatgaatttaaaattggagaattatttagtaaattctatggagaacttgcattgaaaaaaa

SEQ ID NO: 859518 - DNA, 601 bp, Homo sapiens
tgtagtaattccacccctggttaggaatgcatacttaataactaatcagaagcaggcaagttttattcacacagacattaatcatcaagtaatttatgatagtaaaaaaattggaaaaaaaagagagaaatgattaaacacccagaattatggtacatccataaaattgaacattatactgccattaaacagtgtgtttccaaaggatttttagtgatctgtaataatgctcatgttatttgtgaaaaagctggatagaaaactgaaaatataccaagatcttaaattatgtaaagggaaaaaaacctcacacataaatagagaaaaaagaaaggaacatattaaaacaaactcttcagtgattgtatcttgagtgccttttttgttttttataatttttggtattttccaaattttctacaataagcatcttttacagtcagaaatataataaaatattttcaagttcgagattttagctgtgttagttgtatttgtgtggcattattactctttcttctgttgatggtgcatcartttttctttggggatgcacccttccccatctcaggcctctggtgtgaagtggatccctgacccc

SEQ ID NO: 859519 - DNA, 506 bp, Homo sapiens
tgagccagatttggatggtacccccaggctgcatggattcacccttcctcctcctcagtcagtccatcagctaacagctctttagtgggtgcctactgtatgccaacatgagycagctgctgggtggcctctgaggctctgccctaatagcgtttactgtctagtgcgagagacaggtgctaatcaaatagccattaaagcaagggcacacctgtaatcccagctacttgggaggttgaggcagggggattgcttgaggccaggagttagggaccagcctgggtgatacagccagatcccagctcaaaaaacaaacaaaaagccgtgaaagcaagagcatggattatagagtgagaggctatgaggagaggaatggcattctgaggcagcgcagccctgggatcctgtctcagcccaggggtgtcctggcacccagcacggggcagaggaaatggatatacaagcgtggtgtcccctgggccaggcctgagccctgccctaagaag

SEQ ID NO: 859520 - DNA, 551 bp, Homo sapiens
tctccagccagggtgtggacacctatgtggagatgaggcctgtctccacttcttcaaatgactccttctctgagcaaggtgaggaggtcccagggccaggccccatttgcttgataacaagggaaaaggagaaggggctgctggggtgaggggtggggagtgtggcagggctgccctgacgcctcttcccaccctagacctggacaaggaggatggacggcccctggagctccgggacctgcttcacttctccagccaagtagcccagggcatggccttcctcgcttccaagaatgtgagtaggaacctggccctggctcatagccacccaggtctgtgctccggggaggctggatgagtgacgatggggaggaggaaacgggagcctgtgagggggtaggggaggagacagagtatgagagagtcatttgggcagcagctgcaaggatgagtgggagmaagctgtgcccagggctggagctctggggctgggcacctgtgtccccagcgtgaagatgaggaagggtaccaggctttcttcattcgttttt

SEQ ID NO: 859521 - DNA, 644 bp, Homo sapiens
tgaatttattggcataatattaatctttcattggagttctaatttgcatttctctaaggattaatgatgttgaggacattttaatgtttttattaccatttgcagatatgtctttttcatatacctattaatgcttttgcccagttttaaaggttaaattatatatcttttatattgatttataggaatcctttataaaatataaaggatttttatattatatagaatcctttatataatctggatacaatattctagtctgatatatgtattgtgaaactttttcctcagtctgaaaattttcctttccactttcttggtagtacctgggcacaacccctatgaaatgagagtacccttctgtctcctttaattttgtctctctaccttcacccttatcagtatttggcaggcaattaattcagtcagattgagagagtgcaaaggcttctagctagccctcacaacactggcttgggtacacctctaatctccaatcacacgaaacaatttgccagcccagaagctacccctgctatgtattctaccatgagtagaccttaaatgtgcacctcccactctctccatagtayatatggtagaatggtgatggatccttcttttggcagactttccacaatgca

SEQ ID NO: 859522 - DNA, 654 bp, Homo sapiens
cctttgaaggagacctttgtttttcttttactyataccgctacccattcgtttaaaaagtcttatgatgacatatataaactaatctcttccagattcatttggaattattcctgaattctcagcagcctcaggatggctctctgttcccttaaagctctgaacccaatttgaactgaatagacttgggttctctttacagaagcagagtttgcctggacccaggtaatcattcattccatttttcttccattcaacaaatctttaatgagctataggtgcagagtagattcaaattttgtggggcacaaagctgatacaattttaaggagctccttgcaaagaagaatgcaaaatgacaaagtgttggaaaggtcctgtgtgagtgagaaggcccgaggttattcttcattgatttcatggcaactacataggtactgtccaggtacttgggaaacaccagtggagaaaccagacagagcttcaagttgaggtagacacttccaaaaaattgttataacttattatactgaataataattaaaaagtaaaaggatatattccccatagatgcttatgtctccagagaagttagagtgctgttgaaagtactgacattctgggtagctcacacctcatttagggaaggatcctt

SEQ ID NO: 859523 - DNA, 438 bp, Homo sapiens
actgactttcaacctatgcttgaaggttactccaccctatacattttggtagaggaagataccttcaacattggaaatctaaatgtctcttttagaaacaatgcatctgacacaaaccatttgaataacatctttcatgtgggaggctgcacgctaaagaggaagatcctcagagatgaggagacctcagtagttcatcttctgatcccttgggtcagtgactttgaaaacatttggctaaactgaggccaatcatatatgtcttacagagattttatacatgtaaataaaacagagtctaatacatagtataggctcaataagtcttaggtccctatgaattttctgacaaatctctagtcaagcagttatttactttggcaatctggtaacaaaggcayacacgaattacttttgtctgattcacctatgattcag

SEQ ID NO: 859524 - DNA, 599 bp, Homo sapiens
ctggagaaacggtatatatatatatatatatatatatatatatatactctccctgtatatatagtatatatatatatatatacwctctctctctatatatagtatatatatatatactctctatatatatactctcctatatatagtatatatacactctcctatatatatagtatatatatatatacactctcctatatatatagtatatatatatacactctcctatatatatagtatatatatatacactctcctgtatatatagtatatatatatactctcctatatatatatatatatatatatatatatacacacactatatatatatatgggaagagagagagagaaaaagaaagaagagaagagaagagaagagaagagaagagaagagaagagaagagaagagaagggaagagaagagaaggaaagagattagggaaattggctcacgtgattatgaaggctgaaaagtcccccagtatgccagccatctgcaagctggagatgaagcaaagccagtagcatgactcagtccaagtttgaagccctcagaccacagaagccaatgttgtgtctctcagcctgagaccaaa

SEQ ID NO: 859525 - DNA, 629 bp, Homo sapiens
cagttgtttcagagtctgtctgatcattttcacctctaagatcttcataggatatttttgtgattttctttttgtgctgcttctcagttatggtgcttgagttttcatggcatttgtatttctccttaccaatctgatgatgtttgacactttgccaaacactatagttgtagaaataattttgggggtaggatggatatttttctgcagagatcatttttctgtgcttctgaaagtgcatgtagatataaacagtcaggctccctgaatcacagtttaaggcttgaggtgtcctggagcatctggagaacaggtttgtctctggcttattgttactagtggaatttggcaatgacacgttcggtatgttctgggctttgctttacccccgtggcctgtgagtcagcttcctgagtgctgagtcaggatctgcaaatgcccgctagggcaaatggactgctgtgctcacctcccggagctcttgccctcaccaacattccagccmaattattattatttttttaggactttaactaaaatttttaatgttgtttttgatattttttttccaactatgtagataacaacagaaagagtgagtgccattatccttaattattgggattaag

SEQ ID NO: 859526 - DNA, 589 bp, Homo sapiens
tttacacattccagcctcaggatccccagcaaggcaggaaatctgtccacatataaccctaggaagggagctraatccagggagccaagcagcatcattctgcaggccccacttccatagcacctcacaagttaagacgcactggcttggaattccagatagccaatagcaacagcctagaatctgcctgagataagtatgaattcctggggaaagggggtggccaccatctctgcagtccagtagacttagctgtttaagcctgccagctttggagaatacaaatggtctggatgaggaaaggttccccataatcagcacagctgccttgccagatcatggccagactgcttctttaagcaggaccttgatccatcccttctcagtgggcaggacctccctgtggaggcttcagccattctagccagtgttctacattgagagctctgatctctccctaggatggagctcctggcagggaggggcagcctccatctctgcagttcagtcaactcagtccttctagcctgttggctttgcagaatcccaaaatggtctggacgagaaagcctcctcataatgcagcaca

SEQ ID NO: 859527 - DNA, 605 bp, Homo sapiens
acagagctgcatggagtcttagcagagcagctgctcaggcacacacagagacccaggagttttacacattccagcctcaggatccccagcaaggcaggaaatctgtccacatataaccctaggaagggagctgaatccagggagccaagcagcatcattctgcaggccccacttccatagcacctcacaagttaagacgcactggcttggaattccagatagccaatagcaacagcctagaatctgcctgagataagtatgaattcctggggaaagggggtggccaccatctctgcagtccagtagacttagctgtttaagcctgccagctttggagaatacaaatggtctggatgaggaaaggttccccataatcagcacagctgccttgccagatcatggccagactgcttctttaagcaggaccttgatccatcccttctcagtgggcaggacctccctgtggaggcttcagccattctagccagtgttctacattgagagctctgatctctccctrggatggagctcctggcagggaggggcagcctccatctctgcagttcagtcaactcagtccttctagcctgttggctttgcagaat

SEQ ID NO: 859528 - DNA, 637 bp, Homo sapiens
tgataacattttctttgtttttgttttatttggccatctcaccaattaggacagcaatccctttacagttatattgttcttggcacttgggaaggtttttgtggttaagtcacattaagaaattgtgcctttttttcctgttcagatataacccaaggcagtgaaagaaacaacaataattttgaaagcagttacttatgcatcctatgataaaggtgttaagtttcattgcccacatctaactttcagtctagtggaaatgaaaagtcacagttagggggcatgtgagcatgccctgagagaggccgatgccaattgagaagtctgtgccaatccccaatactgtgagattgaaggggagggagagatgacctctctttcagaccatgctcaacaaggagggagagggattttcatccatgggaagctgaggaggagcaaatcccagggtcctctaactcagggtgcgggaacaaatccttggagaggaaaatggtccagttcagctgtcacaggagacaggagaaagcamagtcatctaatccacagtcccctggctgatttgcttccttatgatgctattttgtaccagcatgtcctcatctcccgctgctcctctgcctgtttcagaatcatc

SEQ ID NO: 859529 - DNA, 645 bp, Homo sapiens
aatctaacaaaggcacctgaaaaaaaccaacagcttatgtcacacttaatgacagaaatattaaacrtcttcccatttttatttcttaaatattaaacatgttcaagatcataaacaagtcaataatgttcacccttaccacttctattccatattgtactgatgcataaagacaagaaaaatactaaaaagctaggtatcaaaagataaagaaaacctttttcagagatgaaaggactacttacatgcaaatattaaaagaaatctatatattaactactcaaattagtaagttcatacattaatttattattacaacatataaaaattatattttgtatactaatgataaacaattggataattgaattttaaaacctgaatttatattaaaaaacataaaatatttaaatttagcaaaagacatgcaagacttgtgtacagaaaactaaaaacagttgctaaaggaaatgaaagacagttttaaaatatagaaatagaaataatgtcctgttgcagcctctgcctcaggagtcccctgcagcctggaacacctagcaaaagaaatgcaggtgcagtgccagggattggagctggatccccacaagtcctagaagcaaaccttgtgagggggccatctgtctc

SEQ ID NO: 859530 - DNA, 614 bp, Homo sapiens
acttactataaacccacaataatcaaagtaatgtggtactggcaaaagggcagacaaataaaagatacacattaaaaccacaatgagatacygctaaccatccacatacccactcaagttaaaccacctggcaacaccaaatgctggcaaaaatttggagtcccagaactcacatatattgttgatgaaagtggataatagtacaaccaatgtggaaaatgttctaatagtttcttataaaactaaacccctctgatcatctacccctatgagccagcaattatactcctaagtatttacttaagagaaataaaggcataaatctacaaaaaaagacttaaactggaatgtttacagaaagtgaattcatcattgccaaaacctggagatatcttgaacgtccatctacaggaggctggctaaacaaacggtagtatatctatatggttacatattccactgccacaaaaaggaatgaagtactgatacacacaacttgaacaaatcttaaaaatattattctgggtgaaagaagtaaacaaatcttaaaaccattattctgggtgaaagaaactttgcacagaagagcgtatgatgttattccatttatataa

SEQ ID NO: 859531 - DNA, 614 bp, Homo sapiens
acttactataaacccacaataatcaaagtaatgtggtactggcaaaagggcagacaaataaaagatacacattaaaaccacaatgagatactrctaaccatccacatacccactcaagttaaaccacctggcaacaccaaatgctggcaaaaatttggagtcccagaactcacatatattgttgatgaaagtggataatagtacaaccaatgtggaaaatgttctaatagtttcttataaaactaaacccctctgatcatctacccctatgagccagcaattatactcctaagtatttacttaagagaaataaaggcataaatctacaaaaaaagacttaaactggaatgtttacagaaagtgaattcatcattgccaaaacctggagatatcttgaacgtccatctacaggaggctggctaaacaaacggtagtatatctatatggttacatattccactgccacaaaaaggaatgaagtactgatacacacaacttgaacaaatcttaaaaatattattctgggtgaaagaagtaaacaaatcttaaaaccattattctgggtgaaagaaactttgcacagaagagcgtatgatgttattccatttatataa

SEQ ID NO: 859532 - DNA, 600 bp, Homo sapiens
agttcatctgatcttgtggcccccactcaggaaccgactcagcacaagaaagcagctggggtttcrtctccaacccaacggatcagcactcccgactcactgctttcccctccgcccaccaaattatcctctaaaactcggatcctcgaattcccggggagacggcaagatttgatttgagtaatagtaaaactccagtctcccacacagtctgctctgggtgaattactctttctctatgtcaattcccctgtcttgataaatcggttctgtctatacagcaggcaaggtgaacctattgggcagttacgatatctctctgaaaacaagtcactattttttgtttgtttttgtttttgttttgtttttcagacagagtctctctctgtcgccaggctggagtgcaatggtgcgatctcggctcactgcaacctccgcctcccgggttcaagctattctcctgcctcagcctcccaagtagctgggattacaggcaagcgccaccacgcccggctaattttttgtatttttagtagagacagggtttcaccatgttagccaggctggtctcgaactcctgacctcaggtgatccacccgc

SEQ ID NO: 859533 - DNA, 558 bp, Homo sapiens
aaatctgagactgatctattactcaagggttgaaaaggatattcagagaggagatctaactgaaggctacgtgtctgccaagaggagaaggggctatttcttctcagggtgaagttggcccacaccagccaaacagctttgtacttctgtcctgggagcgcaccacaatggaagcacaaccattgtctctctgtgcggaaatgtgtcctcaccctacagcccccaccacatcctctagcttaattttttcatttttaatattttcttgagattttactatgtcctgttacttttgcaaacacaaaagatacaaaactgaaaagaaaatagatcctttatccaaggagctaagagtctagcaataaagtagttataacagaatggaaaatataatgtataatactaaaatcagaagtcatttgggagctttagggaggacatgcccaattctgtctgattgaatcagagaaaacaaagaggaagtcacattagaacttcaccagctagacctggttctgagtagggcawtctgggcaaagagaacagcttttgcaaagg

SEQ ID NO: 859534 - DNA, 543 bp, Homo sapiens
tctttgtcttgtgctggttttctttttatactggctcttcacaaggctatatatattctttagttaaaagtagacatctcgatggaccagtgactatcaccctattaatcagtcatgggagcactgcygtgcatttggtattttaactttcgggtatgctatcacatcacagaaggcctggtcccctccccatcacctgcagccggacctgtctttgattcctaccaatcacctatattaattgtgcctaaattcaatattccgacagggcataactaccctaaggtgctaattaattcatgcttgaaggacataacagtaattaacagacaaacacatacaaccgctccccttattggacttttaaaatgaaaatctgcaacacccccctgccccatctctgacttcatcaacccaggaaaaaagacaccttgccaaacttcaaaaacaagtaagccttaattcaactctgccagagcccaaaatatttgtattttagctttgggtatccccaacagctacccctcaactaatgcaaatttt

SEQ ID NO: 859535 - DNA, 606 bp, Homo sapiens
gattcaaaagttaatcaaaattcatactacaaatgctgttactaatcgycacagcagcaaactagaacccctccttgcccaccacttttacactccacccccagagaataacagacaacatgctgtttcttccagtaattcttaggatgttattgatgtattgtttatttttcatagagtccatgcacttaggaggaaacagggcataatatatatgcactttcagaaaactgttttaatgttataaataatatccaaaaccattaatgagttttagaggtggctgccttgcagcagggaattacttaagcactggaaagccaatcaacaaatatttattttgcaacttctgtgtgcatgcctaaaaaatcttattccattagtaaaataagtccatctagaaaaatacattaattcaacgcatatttactccacactcacatgttgcaccacagctccaagtgtgaatgaggcagagaccctgcactcgagttaggaagacacagccaactgaactgatgacttaaacgcaaagggacagagcacaggctatggcaggattacagaaaaagggctcctcatcaagccttgagggaatcagggaag

SEQ ID NO: 859536 - DNA, 606 bp, Homo sapiens
gattcaaaagttaatcaaaattcatactacaaatgctgttactaatcgccacagcagcaaactagaacccctccttgccyaccacttttacactccacccccagagaataacagacaacatgctgtttcttccagtaattcttaggatgttattgatgtattgtttatttttcatagagtccatgcacttaggaggaaacagggcataatatatatgcactttcagaaaactgttttaatgttataaataatatccaaaaccattaatgagttttagaggtggctgccttgcagcagggaattacttaagcactggaaagccaatcaacaaatatttattttgcaacttctgtgtgcatgcctaaaaaatcttattccattagtaaaataagtccatctagaaaaatacattaattcaacgcatatttactccacactcacatgttgcaccacagctccaagtgtgaatgaggcagagaccctgcactcgagttaggaagacacagccaactgaactgatgacttaaacgcaaagggacagagcacaggctatggcaggattacagaaaaagggctcctcatcaagccttgagggaatcagggaag

SEQ ID NO: 859537 - DNA, 638 bp, Homo sapiens
caccatgttagtctttttttttttttatacttggctcctgtaaattgcagtgagccatgtattaaagggaaagaacatggaggatcaccaagcatttctgycctaaatatatacatatacatataaatatgtatatatgtgtgtgtgtgtatatatatatggacacacacacatatatatatatgtgtgtgtatatatggacatatgtgtatatatatatacgcacatacgtatgtgtatatacgtgtagatatatgtgtgtatatatatatgtgtgtgtgtgtgtatagtgtgtgtatgtgtgtattttaagagactaggtgtcactcctgttgccagtgccgtcgtgcagttatagctcactgaagcctcaaactcctgggctcaagttattctcctacttcagcctcctaagtagctgtaactacaggcatgcaccgccatgcctggctaatttttttttaagagatggggtcttgctgtgttgcccaggctggtcttgaactcctggccttaagagatcctcccacagcacgggaattataggtgtgagccaccatgcctggtcccataatatattttcctttgcaatacagtctatagttaacatccaaatcccatgcaaagtataataaaac

SEQ ID NO: 859538 - DNA, 651 bp, Homo sapiens
ggtggaattgctgaatcatatggcaattcgtttttcaaccttttggggaaatgatagactgttttccaaagtggctataccaygttacattctcaccagcaatgtatgttcaagttcctctatgtcttcttttcaattatagccatcctatgaggtgatgtggtatctcactatggttttgatttgtattttcttgatgactagtgatgctgagtatctttttatgggcttattggtcatctgtatatcttctttggataaatatctattcagactttttatccattttttaaattgggtttatacaaatatttatatattctagatacaagtctcttatcagatatatgatatgtaagtattttatcccattctgtggagtttcttttcagcttctggatgttatccatggaaacacaaaagtttttaatgcttgtgtctttttccatttgttgcttgtgttgtctttttccatatgttgttaagacatcatatctaaaatattttgcctaatccaaggccatttgttatgcttatgtttccttctaagagttttatagttttagcttttacatttgaggccaagattcattttgagataatctttgtatatggggtcaggtaaggatccaaattcattcttttgcatgt

SEQ ID NO: 859539 - DNA, 545 bp, Homo sapiens
ccagaaataacttatcatcattagaatcatctgatatttttgggatctggaatctatgttctgtatttgtgagggtaactatgagacttgaacagtccaccagggatcttaaaggcatgttttcaaaacacagcccccatcaaaacagtgtgctgttaccaaatatgtttgggcaatgccactgtgaaatttacaacatacactaacagagagtttgagaaatcccatggctggtagagcttggcaaagggaaatgtgtttccctcacatatgtaactaggaaaccgtcatttcaaataattcgtgttactatcctgaaggccatattttaggaaatgctgcactggaggaaagatgttctagaatagacaggtactacaagactgaaaaagagaaaatttaacatgctttcctgctactgaatctattctatatatcctgtttttcttcataggtgtttgccccacaatatttttgttttstcattatctctaatattaaaatgggagaaaacagtaatacaagcatgttgaaaaactgatacc

SEQ ID NO: 859540 - DNA, 610 bp, Homo sapiens
attcaacgtgcattaaaatcccattgcatttccctgccttgcatgaattcccaggtacacacaatgattgcagataaaccccagctgctcatgaatttaaagaacacggattgctttaaaaatattcttttttgttctactaactacttcagggggaacattaaattgtaccctgccttgcctgtagcatttgacaaccattttgtacgcatccgatttccattccaaaggtttgtggttcttgtttccttttctctcaactgaaaagcactgcaatattatagtttgtttttctggaaaaagccttcagacaaactgagtagggtcataatctttattcctagtaactaacatttaggtgggaaaaacatgtgtgagatggaagtcttattttaggcaatctcctctgtaccaataatgaaaagcaagagtctaactgaattaggtgacagatcaaaggagtgggactgctcaaagscaccctacactggggtcatgtggatcctctcccagtggcttggaacacagggacactaggtatgcctgcacatacaaactcggagtaatcagacaaaataaatatgtcccttgaaagttcagttactgagaa

SEQ ID NO: 859541 - DNA, 610 bp, Homo sapiens
attcaacgtgcattaaaatcccattgcatttccctgccttgcatgaattcccaggtacacacaatgattgcagataaaccccagctgctcatgaatttaaagaacacggattgctttaaaaatattcttttttgttctactaactacttcagggggaacattaaattgtaccctgccttgcctgtagcatttgacaaccattttgtacgcatccgatttccattccaaaggtttgtggttcttgtttccttttctctcaactgaaaagcactgcaatattatagtttgtttttctggaaaaagccttcagacaaactgagtagggtcataatctttattcctagtaactaacatttaggtgggaaaaacatgtgtgagatggaagtcttattttaggcaatctcctctgtaccaataatgaaaagcaagagtctaactgaattaggtgacagatcaaaggagtgggactgctcaaagccaccctacactggggtcatgtggatcctctcccagtggcttggaacasagggacactaggtatgcctgcacatacaaactcggagtaatcagacaaaataaatatgtcccttgaaagttcagttactgagaa

SEQ ID NO: 859542 - DNA, 560 bp, Homo sapiens
ccttcatttctttctcttccctgatttccctggygagaacttccaacactatgttgaataggagtggtgagagagggcatccctgtcttatgccagttttcaaagggaatgctttcagtttttgcccgttgagtatgatgttagctgtgggtttgtcataaatagctcttattattttgagatacttcccttcaatacctaatttattgagagtttttagcatgaagggctgttgaattttgtcaaaggccttttctgcatctattgagataatcatgtggtttttgttgttggttctgtttatatgctggattatgtttgttgatttgcatatgttgaacaagcattgcatcccagggatgaagcccacttgatcatggtggataagcttttgatgtgttgctggattctttttgccagtattttattgaggatttttgcatcgatgttcatcagggatattggtctaaaattctctttttttgttgtgtctctgccaggccttggtatcaggatgatgctggcctcataaaatgagttatgtaggattccctcttttt

SEQ ID NO: 859543 - DNA, 453 bp, Homo sapiens
caccgcgggagcaggctccccgcagtccggattggggtcaagagttctgtttatcttaccaaaaacatccctggaatgcctcctggggaacaaagggagctggggcctccccgctcaggctggggggctggcccctgagagcccagaagagggactgcctgccggagaggggaacactgggcaggcctgggctgggggtctccggagactccttcctgaggcccagaggaggagcaggcctcagaggagatggggacggagggggacctttagatttgggttggattctcctggtccagcctgggggcaggaggtggctaggatgaggtgaaaggctgccccyccttgggcaggtttgtgcctccctgcccaggcctctagtaggtggctgaccaacggccctcccacctagggtaggtggggggcagcccccgggcttggctcaggacgggg

SEQ ID NO: 859544 - DNA, 576 bp, Homo sapiens
tccctttgctgaagtccatttgggatccattttagtgttatmtaaaaatcaaatctacatggtaatccttttaatgtactcctgactttagaaaaaaatggctttgcgctccttcaggaaaggttttaaagcattacccagtaattactactcacccatgaaaacactgatatttcacaatggatgatgtttgcgccgacacgcacgcctgggcacacactcagatgcatgcgctgggcccagcagaataaaccagtccactcaacccagggtcacccctaagtctcaggatgtggggggaacaacattggaggggaaacaggctgaactccaacccctacctctagcagggggtggaggcagggctgctggtggaaggaggcagccaggctgggagagaagcctcccagtctgactcatctggctgccagacactcaccctccactctttaatctgggggaaagccagacagtccaggtgacggggacgcactgccagaggtcatcccgcccctcccactctctccctccagcccggaggagaaatgccctcatcttcacatggaccccagagca

SEQ ID NO: 859545 - DNA, 576 bp, Homo sapiens
tccctttgctgaagtccatttgggatccattttagtgttatctaaaaatcaaatctamatggtaatccttttaatgtactcctgactttagaaaaaaatggctttgcgctccttcaggaaaggttttaaagcattacccagtaattactactcacccatgaaaacactgatatttcacaatggatgatgtttgcgccgacacgcacgcctgggcacacactcagatgcatgcgctgggcccagcagaataaaccagtccactcaacccagggtcacccctaagtctcaggatgtggggggaacaacattggaggggaaacaggctgaactccaacccctacctctagcagggggtggaggcagggctgctggtggaaggaggcagccaggctgggagagaagcctcccagtctgactcatctggctgccagacactcaccctccactctttaatctgggggaaagccagacagtccaggtgacggggacgcactgccagaggtcatcccgcccctcccactctctccctccagcccggaggagaaatgccctcatcttcacatggaccccagagca

SEQ ID NO: 859546 - DNA, 615 bp, Homo sapiens
caacatgaacgggtattattatgattgcattttacatatgaggaaactgaggcccagggcctggagtggcccccaaggacccacagccccgtgtggtgctcagggccgggacccacactggcagccccatctgcccacggcaggtcagcagaagaggcccggtggccttgccaggctctccctgccacacgctgtctggcaagtggactgagggcaccgcctgctcaggatgagtgatacctggcaacacccctgcccagagctcttcctggtagccagagaactgaccaactccccagtcccaccctcctgctgggattctcattatttatttatttatatgtattttttgagatggaatcttgctctgtcaccaggctggagtgcagtggtgcaatcttggctcactgcaacctccgcctcctgggtttaagcgattctcctgcctcagcatccccagtagctaggattacaggcccacgccaccacgcctggctaatacttgtatttttagtagagacrgggtttcaccaagttggccaggatggcctcgatttcctgatctcgtaatccgcccacctcagcctcccaaagtgctgggattacaggtgtgag

SEQ ID NO: 859547 - DNA, 624 bp, Homo sapiens
ctttagagtcctctgatgaagcctcccgagtcctgccttcgagccagtggggagggggagaggaggatgattacagggcggcccccccaggggcatctcaagacactcccaggacagcatggacaggcatggaccctcctgccctgtggctcctgccaggacccctcccctgagctgcccagtgggtgaaagtgggcagtggagaaagaaagtccagggtcaaacgggaaggtcgcaccccctaccagcagaagcccagaaacacgagcagagccaggggcccctgcagggctgctgtgccccttctctcttcccaaataggagtgagcacacctggacctctgagagggcaggagggtggctcctctccactccacggacaaacaggagtggcctggctacataaatttgtgccatcctcactgctacctttggaatagcaactttgaaagggaaccaccctttgggaaagaccaagggtcccaggcctgccccgcctatcactccaaagctcctccttggcagtacccgccccccacccctctgctacagtgggggtgacckcccactgtcagacagtggaaggggctgcttgtcagaaggacaggccttccgtctccactc

SEQ ID NO: 859548 - DNA, 642 bp, Homo sapiens
gtctcgaactcctgacctaaagtgatccgcctaccctggcctcccaaaatgctgggattacaggtctgagcgactayacctagcctgatgactattttgttgttgttgttgtttgtttttttgagacggagtctcactctgttgccaggctgaagtgcagtggtgcaatctgggctcacggcaacctccgcctcccaggttcaagctattctcctatctcagcctcccaagttgctgggactacaggcatgtgccaccatgcctaatttttgtatttttagtagagacggggtttcaccatgtttgctaggatggtcttgatctcttgacctcgtgatccgcgcacctcggcctcccaaagtcagactgttttaagagtaatttgtaaaaggaagctggaagtttggggtgaatgggtggttacacaaatgctgtgtgatttagggtgcagtttacaaaagagtggctgcgtcctaggctgcaaattctgaggtgtgggcaagtggggaccttggccacccctgcacagggagatctggcccaaaggcagaccagggtcatgaggctaggcccttcttaagagggtggagggcttttggaggtgctgagggcatgaggtcagagtggtgcctgctgctggcc

SEQ ID NO: 859549 - DNA, 589 bp, Homo sapiens
cacttgacacgctgcacatcagagggagacaggcagttggtaacagggaaagaaaaagagactaggcggtctggcccctatctcccatcgccagaacaatggcctcttcaaacccctggcatctgaactggcagtcagccaccaggaaagaaaagagctcgctgtccctttaaggacgtcctctctacacaaaggtcagaaatgccagctcagcctatccagaggctgcctttttggcactttggggcccgggggccctggtggcaatgccctttccagctggttctctgtgcacctgctggcttctgaagaaggcagggcacctggatgacaaccgccgctgtgggcaatgctcagtgacagggcaggaatggctgatgtggagggaacccaggacctcctgtgcatctcaagttttcctcccagggagagttagcaagaaatgggtgttggagcaaggttggaaagccacctacaggaggaggggtggggtcaaaaagaaaactggccaaggagtgaatgctccaagagagacatatatgaactaaaagagcaaaggctaacygacaattggcccagaaatcacaaa

SEQ ID NO: 859550 - DNA, 565 bp, Homo sapiens
gaatgagtcaaaagaccacccccaatggcactcatcaccctgagaacagctcagctttaatggggtgatgcagtgctcctgggtctcaccccactgatcccagtgaagaacatcccactgatgaagtcatcccccctgagtcatttcctgggaagtggcttggagaacaagctccctttggcttgcttagccttccaggacttggcttagggcgccacctagtggcagacctaggaaaggctctcctgctcactccactcactccacccactccaccatgctggccagcctgaatcccccaggctagaacaaccgcaaaccagggccccatgacagctaagtcaaccctcctgcaagtcctcgtcccccatgactatattcccactgtgtggctttggccctgagcatcctcttgaggaaagatgtcaccatatgtcagcttcttagatgtmcttagggcatcctgctctcagagcgatccagcccatgtatgggcagagctaggggcactctccaaaccttaaggattccggaggggtcttaaagtttcccagttttacctcta

SEQ ID NO: 859551 - DNA, 477 bp, Homo sapiens
aagaccttttcagttgacaagagcaaggagatatatatttgcattctaacgtgtgtatatgcacatagctataaatatatataaccatctgtatctatattaaactaaatgtgtttatacctacgtctccaactctaatcattgccacatggatcattatagtctcacctccttgcttatctgttacctcccatttctacagtgagaaacctggcttggttgggaaatttttctgttaatattacggtagtgagtgtttgacatttgcttctatggttaagtttagggagagtttagctgtagggtattcttgaaactagaaatgacccttctgccctaaatgtttctgccagttttgaaacgtaaaataggttgcagaaacaaactttatcttaagaaccagaatttacttcaatccacattttgacattgatyttcagattaaattattctgatatcgccaggtaagctgttcct

SEQ ID NO: 859552 - DNA, 522 bp, Homo sapiens
ataaaataaaaatatcttcaaaaatgtaaacatttggtctaaattagtcaggtcagatattaagtttgctaactactttaaggtcataaactgcttccttgacttttgaaaattattcaatgtacctaccttggagacattagattctagataaggtctggggacatgtggagagccaggcaccctagctgtactggaaagagtcagaccttatctgcacttctgcttgatgtgtcctaggctaggctccacactagtacataaataaaatctctttgggcctggattgggacctctttcctgtaacaattctagaactttgggaggccaaggcaggaggattgcttggggccaggagttcaagaccagtttgagcaacatagtgagaccctgtgtctatgaaaataaaaaaaaattaaaaactagctgtgtgtagtggcacacacctgtagtcctaactactcrggaggccgaaatggaaggatcccttgagccctggagttcaaggttatagtgagctat

SEQ ID NO: 859553 - DNA, 583 bp, Homo sapiens
aggtgcatcgggcctgttgacagcagagtttgttggactgctcccacctattgctttttgtcttctgaagtttttataatttcaattccagtttagaggtctgtttttagaacatttctccratcttattatacccatagtggcaagaatgaattgatttgtacaagatagctggacaggttcctaccttcaggctttctacccaactgggcacttggaaggatagtttttcatagtcttcatgggctaagtgattgcatgtaatatacaatagctggagtctaactgtaattaaaacaggttagccaagctacaggagaagtatcccccccatccccacccccatggcccttccccactgcctgtaatctcttggtaacaaaagaagtcaaacaaaaatttcatgcaagggtataaacatactttgagtcatcagaacctacctagtggtccatcgaaccttggctcttcatgaagggcttaccaggaagacatagtcgttgttcatatgcagtttctattctgaactgtaaaatgtgagcgattactttggaaaattagaagaaaaaatgaatttactcag

SEQ ID NO: 859554 - DNA, 583 bp, Homo sapiens
aggtgcatcgggcctgttgacagcagagtttgttggactgctcccacctattgctttttgtcttctgaagtttttataatttcaattccagtttagaggtctgtttttagaacatttctccaatcttattatacccatagtggcaagaatgaattgatttgtacaagatagctggacaggttcctaccttcaggctttctacccaactgggcacttggaaggatagtttttcatagtcttcatgggctaagtgattgcatgtaatatacaatagctggagtctaactgtaattaaaacaggttagccaagctacaggagaagtatcccccccatccccacccccatggcccttccccactgcctgtaatctcttggtaacaaaagaagtcaaacaaaaatttcatgcaagggtataaacatactttgagtcatcagaacctacctagtggtccatmgaaccttggctcttcatgaagggcttaccaggaagacatagtcgttgttcatatgcagtttctattctgaactgtaaaatgtgagcgattactttggaaaattagaagaaaaaatgaatttactcag

SEQ ID NO: 859555 - DNA, 638 bp, Homo sapiens
gcagtgattgttcattttataccgacatgagtaatttctttagtggcgactggtgagattttgtgacacccatcacctgagcagtatacaccaaacccaatttgtagtcttttatccctcacccccttcccactctttcccccaagaccccaaagtccattgcatccttgttttgttttgttttgttttgagatggacactcaatctgttgcccaggctggaatgcaatggtgcgatcttggctcactgcaagtccccaaagtccattgcatcattcttttgttgttgagacagagtctcgctctgtcgcccaggctggagtgcagtggtgcaatcttggctcattgcaacctccacctgccaggttcaagtgattctcctgcctcagcctcccgagtagctgggattacaggtgcccaccaccatgcccggctaattttttgtatttttagtagagacagggtttcaccatgttagccaggatggtctccatctcctgaccccataatccrtccaccttggcctcccaaagcactgagatgacaggcatgagccactgcacccggcccagtccattgtatcattcttatgctttgcccacttatgagtgaaaacgtacaatgtttggttttccattc

SEQ ID NO: 859556 - DNA, 516 bp, Homo sapiens
agtgttgttctgctccgtgcatttccagggtgggtacccrgtgttgccccccagccttagatcgggaggtaccattgacttttgcttgtatcccatccccttcctttactgaaacctacctccccgcttctcagccaacgtccccccagaaggtggcaaaaaaaacagaggaaaaagccctgatttgaatcaagtcagagctgctaattctccactttctttaattaattaatttatttttttttttgagactgagtctcgctctgtcgcccaggccggaggagtgcaggggcgcgatctcggctcaccgcgacctccgcctcccgggttcaagcgactctcctgcctcagcctcccgagtagctgggatgacagtcacctgcaccaccgcgcccggctcatttttgtatttttagtagcaatggggtttcaccgtgttggtcaggctggtctcgaactcctgacctcgtgatccacccgcgtctgggcccggccggtgatgtgtgtgcttttaac

SEQ ID NO: 859557 - DNA, 534 bp, Homo sapiens
catgctcagactccctcttcctcctctctcaaagctgcttcacgcagggatgggaagaaaaagcgaactcttgcactgaccttgatcacatactcaaggactttcacatagctggtttcagcgagggcccttggaccccacaggaactcatagcgtgcgggatcactgtccggcacctgccggtactccaggtacttttcctgcaccaaatcttgggtgagcagcttcctgggctccccataggcactgtgctccctcccatcatacacctccatcacactcagctcctcccagatttcctcctcaggagcatggccgccctccattgcaatcatgaccaggacaattatcaggaagcctgtcttgggcatgatctgattatcacccagcaggccatcataggagagacctaggcaggtgacaaggacatargagtggccggtggggtctgcttccttcacgtcaatgccaaagaccagctgcaaggactcagaggctttgccgaagatctcaggaaaacagtgcttgtaattt

SEQ ID NO: 859558 - DNA, 601 bp, Homo sapiens
aacatcacacacacaacacatataaatacacagasagaagaataaccagtagttgttaagatttttcatttgccagtttcttaagtttcttttaaaagatgcagtttgtagggcctattaagcaggcacagctgaaaggcaaaaacagattccccaaaattaaggtcccatttttataccagatcctggatcccaaaaagaggcaattagcccatctcccatgggacccttatctctcagtgggggaatatctccataccttccaggtggccaggagcatgcttttctaatccaaacatgcaaagagccacatattgcctcatgactgccattagccatccataaaagtatatttcctaccttgttattacacagcaaagctctcttataatgtgaagtaatttctgatacctcaaaaagtaaaaaacgtcagataatgcaatgcaaaacagaacagaaccttagatttggaaagggatctatctgctttcaattccttgggttttacaaagaaaacagaggaggttttttcccaaaacagggtctgtggcacctcctctgtttttcctcaagaagtccaggctattagagcttgaatatc

SEQ ID NO: 859559 - DNA, 619 bp, Homo sapiens
ctttctgttacagaagagactttctaaatctcatgaaggaacaggtgtcagcggtggcagagatccgcgttaccccgagttactggtggcgaatctgtacgcgtctgcagtaactgcaattctcgcctcctcagaagaaagcattcaactgaggggtatagggcagaaagggggaccgaggtgagttccagagcaggagtgtaagtttattaaaaaaaggttttagaataggaaagaacccttggaagagatccaagtgggcacctgaaggtcaaagagaaagagaaaaaagggcctttccccttgaccctgggactttataggctcacatctttccgatgattcttcccttagggtgggctttctgcacgcaccgtgtcctccttacccttgagaactgcacctgcccagtgtgttgtgggatttgtacgcatgcccacctcaggctttttccctttttccagtggcgtgtgtccgcgagatcataaaatacttcagcatttttgtctcttaatgtgcgtgcccaggaagttgcttctcccttggggcctgcctttaatcaacactttaatgttaacaggtrcggaccgtcaggaactggcctctgtctggcgccggc

SEQ ID NO: 859560 - DNA, 661 bp, Homo sapiens
gtctggcgccggcactacttttagagaggcgatgcgataactgctgaaccatcacccgacatttccagtgggtagggggaagagccctcacctgccccactcatggctagctacctgtataacacagggacttgatcctaaaggcagtggagggctgacacggaggtgttttcagcaaggaagtgacccggtcatgggtccatgttatttatgaagctcattctggctacagggtggtggagggactggaaagggactgaaatggccccaaagagaccagctggtggccaggaccagggtgtggaagttgcggcgggccaagaagcatttctgagtggagctatgtgatggggagagggtgccgtccaggagcaggccaggctttgggcttgtccagctgggtcactgtgtggatgtccatgatgaagccatggaatgtagaaagaagagcacggcttccttttccttccttcttttattggggtgcaggggagacaatgagttctgcatcctacagggacccttttcttaaaccccacaaggagctgagtgccacacctctgtgctccagggcaatggcctgtgcagtgcctgtttccctcaagagcytcccccaggggcagggacgatgctttagccgtaatgtggatccctagtgcct

SEQ ID NO: 859561 - DNA, 554 bp, Homo sapiens
cccagaacgaagtgcataagacgtggaagggcaggcaggggacagcaggctggggcggaggcctgggttgaagctctagcatagacatctttttaactgttcctcagttcctcatgtttatcctgtgtgtggagctttcaccatctctttggaaagacagaagagatggataaggaaaaggagtagaacagagcggcaccccttgccttccccagagtctgggtagcgggcgcaggacgtgtcgcctgtccaaatgcgcaactttcaccagtgtacgctacgcgtgcgcgcctgtgcaccttgacgagcacgcagccgtcatgagtgcgcctgggcacgccgccatttcctgcagccgcgacagcacggtcgtatatttccggttgtcattttattctttttgagaaatggtctcgctctgttgcctagggtggagtgtagtggcgctgtcatagctcactgcaacccmgacctcctgggctcaagcgattctcccgcctcagcctcccgactagctgggaccacaggcgtgcaaccaccatacccggaaccac

SEQ ID NO: 859562 - DNA, 586 bp, Homo sapiens
aatctaagcggaggctgtcaagccttcttcacccttatactctgtrcacctgcaggcttaacaccatgttgaaactgccaaggcttatggcttgtgccctctggagtggaggcccaaactgtacttgggcccatttgagctggagctagagccagagcagctgggatgcaaggagcagtgtcacaaggctgagcagggcagtggcatcccaggcctgacccttgaaaccattcttacctcctaagccttttggcctgtgatgggaggggctgcctcagagatctccgaaatgccttcaaggtctttcccccattgtcttggctatcaggacattgtttgcttttaatcaggctaatatctctagaaagtggttacaccacagccttcttggattcttcccctgaaaaagctttttctttctttgccagatggctaggctgcaaattttccaaactttatgctctgcttcttctataaatataattcccaactttaagttatttctttgttcctgcatctgcgcataggctgttacaagcagttagaccacctcttgaacactttgatgcgtaagaattttctctgt

SEQ ID NO: 859563 - DNA, 639 bp, Homo sapiens
acggaatcaaaaggtggaagcagcttggatccctgggtcatgtgagagtggagagcccctgccaaaccgcatcagaacttatttgcacataaaataaacttctgttgtgtcaagccattcatggttgttctgttgcatcagctagcaattacttaaactgacacggctagtatttctgttgtcagtattaaatattttttatttaaaatgtagtttggtatatattcttatttcaaaaatgatagaaatgtagataattcacaattttttttttacaaagctcctccacagttaacaacaccccccgcccccccgcagaggtcaccacaattaacaatgttgtgtattattttactgctgactctaggcttttcactgacaaactataacaatatattatttttattcaatatacaagaacaatgacatacatactgatctgcttttatcactttataaaatgcatgtaggatctttcgacaacagtatagatgatagatagatagatagatagatagatagatagayagatagatagagacaggtagatctttctcacttttgaaaccactttctataattctaaagtagacatgcaccaaaattaattaaactctttcttcctaatggacatataag

SEQ ID NO: 859564 - DNA, 641 bp, Homo sapiens
gggaaacaacttatatgtccattaggaagaaagagtttaattaattttggtgcatgtctactttagaattatagaaagtggtttcaaaagtgagaaagatctacctgtctctatctatctrtctatctatctatctatctatctatctatctatcatctatactgttgtcgaaagatcctacatgcattttataaagtgataaaagtagatcagtatgtatgtcattgttcttgtatattgaataaaaataatatattgttatagtttgtcagtgaaaagcctagagtcagcagtaaaataatacacaacattgttaattgtggtgacctctgcgggggggcggggggtgttgttaactgtggaggagctttgtaaaaaaaaaattgtgaattatctacatttctatcatttttgaaataagaatatataccaaactacattttaaataaaaaatatttaatactgacaacagaaatactagccgtgtcagtttaagtaattgctagctgatgcaacagaacaaccatgaatggcttgacacaacagaagtttattttatgtgcaaataagttctgatgcggtttggcaggggctctccactctcacatgacccagggatccaagctgcttccaccttttg

SEQ ID NO: 859565 - DNA, 474 bp, Homo sapiens; identical to SEQ ID NO: 842710

SEQ ID NO: 859566 - DNA, 562 bp, Homo sapiens
gcagaagacccaactaattacttttggctggatcaaagtaaagggtcaaactatggaaacttaatttattatttgcctgcttatttgtagagatatctgcttccagcttccttatgaactggaggaggagctgtggctcttactgaagataactgttaaggttggtctctcctgtgttctactacttcttctatttccctcagagtcagtttttatgtgtgagacctttagcttggggaatattgtaatagcactcctgtgataggcaagaccaatatccatagtttgtttcctaggagactctctgggtttctagctttttccaattttgtaacagcaggtgcgacaaagtctgtggggcttaacaggtctcgttgaaatcttcagatctgtggttttctttctgttccaaagcaaatttggaaaaaaagagaagaaaaagctaacatggttgttacttggcaagagatgtgttcttattggtgcattcacattttaagaaattcacactttgaattactaaggtgctaacatagaycttcacagactagaagaaacagaa

SEQ ID NO: 859567 - DNA, 630 bp, Homo sapiens
actgccttgatggcacattctgtattggcttccttccttccctgatttacctcttacccatgtyttgccaacaaaaaagagttaaactctgtaaaatagttaaagaggttgattctgagccaaatatgagtgaccatggcccatgacacagccctcaggaggttccgagaacatgtgcccaaggtggtcgcagtgcagcttggcttatacattttagggaggcatgggacttcaatcaaatacatttaaaaaatacattggtttgatccaggaaggtgggacaactcaaagcaaggggcaagggggtcagtgggagtgaggagcttccagcttataagtagatttaatatttttctggttgacaattggttgagtttatctaaagacctggaattaataggaaacgtctgtattgcgataagaggttataaagaccagagtttgatcaggcagatgaagcttccaagtagcaggtttcagagagaatggattgtaaatgcttcttatcagacttcaggtctgtgttgatgttaatgccagagaggtatgatgaagcatgtctgacccccacttcccattctggcctgaaccaatctctcaagttgaattttaagagagccctggccaaga

SEQ ID NO: 859568 - DNA, 630 bp, Homo sapiens
actgccttgatggcacattctgtattggcttccttccttccctgatttacctcttacccatgttttgcmaacaaaaaagagttaaactctgtaaaatagttaaagaggttgattctgagccaaatatgagtgaccatggcccatgacacagccctcaggaggttccgagaacatgtgcccaaggtggtcgcagtgcagcttggcttatacattttagggaggcatgggacttcaatcaaatacatttaaaaaatacattggtttgatccaggaaggtgggacaactcaaagcaaggggcaagggggtcagtgggagtgaggagcttccagcttataagtagatttaatatttttctggttgacaattggttgagtttatctaaagacctggaattaataggaaacgtctgtattgcgataagaggttataaagaccagagtttgatcaggcagatgaagcttccaagtagcaggtttcagagagaatggattgtaaatgcttcttatcagacttcaggtctgtgttgatgttaatgccagagaggtatgatgaagcatgtctgacccccacttcccattctggcctgaaccaatctctcaagttgaattttaagagagccctggccaaga

SEQ ID NO: 859569 - DNA, 568 bp, Homo sapiens
attttgtgagaatatggagcaacaggaacccttattcattgctrgtaggaatgccactttggaagatagtttggcagttactcataaaactaaacattctcttaccatatgattcagcaatcatgctccttagttttaactcaagtgagttgaaaacttctgtccccataaaaatctgcatgaaaatgtttgaagtacctttatttataattgctaaatcttgaaatcaaccaagatgtccttcaacaggtgaatctatcgacaaagtatggtacatccatacaatgaaatattattcaatgataaaaagacatgaccaggccgggcgcagtggctcatgtctgtaatcccagcacttcaggaggccgaggcaggcagatcacctgcagtcaggagttcgagatcaccctgggcaatacggtgaaactctgtctctaccaaaaatacaaaattagctgggtgtggtggcacatgcctgtaatcctagctactcaggaggctgaggcaggagaatcgcttgaacgaggatgtggtgagccgagatcatgccattgcactccagcctggg

SEQ ID NO: 859570 - DNA, 617 bp, Homo sapiens
cagacacacagacagaagcagatcttgtagaactatatgattttttatttaccaaatttaagtagttgtttttattcacagtttcaattacctattttattgctctaggcaactgttaggcgaccctaaatttgcatttctgaagtgataactctcaggtgaaacaagataaaggatttgcatctcaaaatacagacagagacagggaatttaagctctttaaatttggttgtgttagaggaagattgaaaacatggatgccaagtaacacaaaattatataaatttatcacgggcttttataaggtgaccaatttcatttagataggtgcttttaatttagtctcttttttatctggaccattgaattcaaagcataactcacactaaatcttgggtcccccaaaagaggtaaacaccatggggattaggacacgccatgttttcactgtacatttcactgcaaatacatttcccctgaggctggtgggcaacccattgccaatcagcccactctgcgatcagcccaktccttagccattatacacaccaaaggcaagcttttcacaataaaaagaaatttctagtaactccagaagcaaaaatttctggtagtgc

SEQ ID NO: 859571 - DNA, 623 bp, Homo sapiens
tagcgatacatgagatgtatgaaaaggttaagaaggttaagaaatctcatcatctccatagtatttgagagttgtgaactatgttaaaacatataggctatcactgtatatatttttcataattggacatagcaaagagagagccacaaattcagttactttaatttgttttgcttcttctaaggaattagattttataatggagtctggagcagtaaatgcattataaaccttgtgttatttcttttcagttttgaagataagacattaaaaacaaaattaattcagaattaggtatgagactgtccaaaatatctgttctgggatggacacttcttgagttacagaaatgcaatcataagattcattgattgagaagtgtaatggagttaaacgctatgaggagaaattaataatattgtatagttagtccaccaactggtaaaaaaatggttgtttttacagagtagatcatttgtgctgtatgtggcatcataagayttaatggtgatttcagtgaaagatctggagatgcttcaacaaatttagacatagctgaaatcattttaagacaaggaggataggttgtaatcattataataagaaataggctataataggca

SEQ ID NO: 859572 - DNA, 623 bp, Homo sapiens
tagcgatacatgagatgtatgaaaaggttaagaaggttaagaaatctcatcatctccatagtatttgagagttgtgaactatgttaaaacatataggctatcactgtatatatttttcataattggacatagcaaagagagagccacaaattcagttactttaatttgttttgcttcttctaaggaattagattttataatggagtctggagcagtaaatgcattataaaccttgtgttatttcttttcagttttgaagataagacattaaaaacaaaattaattcagaattaggtatgagactgtccaaaatatctgttctgggatggacacttcttgagttacagaaatgcaatcataagattcattgattgagaagtgtaatggagttaaacgctatgaggagaaattaataatattgtatagttagtccaccaactggtaaaaaaatggttgtttttacagagtagatcatttgtgctgtatgtggcatcataagacttaatggtgatttcagtgaaagatctggagatgcttcaacaaatttagacatagctgaaatcattttaagacaaggaggataggttgtaatcattatawtaagaaataggctataataggca

SEQ ID NO: 859573 - DNA, 727 bp, Homo sapiens
cccgagggccagtttgaccacttcctggtccagtacaggaatggggatgggcagcccaaggcggtgcgggtgccggggcacgaggacggggtcaccatctcaggcctggagccagaccataaatacaagatgaacctgtacggcttccacggtggccagcgcgtgggccccatctctgtcattggggtgacgggtgagtggatgatggcagccccagggtgggagccgtgggagggtcaccctcttgctctttggtgatgactggtggggaatgggccaggggtccggtcagcaccacagacctgcttgtggctggggctccccttgggccttcctctgaggctgacccctggctcctcctgagcagggaggggccatcaggagttctgctgtgctggtgactgtcccaggtcccccacagctgaccctggaacttgtcatgtgtgttagctgtcagttgagcaggaccacccagccccaagaatgggcttttctgaaatgacctcacatacccagtagtggccatggtttctccctccttcccttgaagacctgagcacatcccccaggcacctggcatcctctctatatctccttttctcagctgcagaggaagagacccccagccccacggaactcagcactgaggcccsggagccccctgaggagccgctcctgggggagctgacagtgacaggatcctcccctgactcgctgagcctctcct

SEQ ID NO: 859574 - DNA, 632 bp, Homo sapiens
gtggccctgtctgggcataacagaaggctcacactgtcttctggtcactcctcactatgtcccctcagctcctatctctgtatggcctggtttttcctaggttatgattatagagggaggattattatagtattggagtaaagagtaattgttacaaactaatgattaatgatattcatatataatcatatctaagatctatatctgatataactattcttattttatattttattatactggaacagctcgtgtcctcggtcccttgccttggcacctgggtggcttgccgcccacatttatcttcttttatagtttattaatgctctgataatttttcttaatattgatacaagacttttctaatcttctgggtgcttctttctgtggccttgggtaattttctcacacatatgtgctaatcatcacttggtcaagtatttgaggaggcactccacaaatgcagttttttttcttttgccatcactctcctctctagtaatctatctcctgtgaactctttcagttcayggctggagctgtgactccagctatgttttctcaacacaaaaagactgcctgtctctacctcatttccttctcactgtgttgtagcctggacactttcttta

SEQ ID NO: 859575 - DNA, 463 bp, Homo sapiens
gaactatggatgggtgaagtaagcctggcttggtgatgggcttgaggtgatgggcaggtggtgaggaagcgggtgtatcggaaatgaccccagaacttctgacttgtgccactgaaaggatgggtgacactgaaaggacaggggccttcagtagagtgggctataaaatgatggaggctgtggagaggaggtgggggcaggtgactggaatgtgggtctggctgggttggagagacatttggggggtcagggcctcacaggtggtctggaagcccttggtgctgagggaacagcttagggaaatggtttgcatagagaaaggcactggcatttagtggccatgccagaagggaraacctgccaaggagactgaggatagagccagaaagatggcaagaaagccaggagaactggagggatggaaaagaggacctaggggtcatggtcctggcagaggtcacat

SEQ ID NO: 859576 - DNA, 441 bp, Homo sapiens
aggtcaagctttacaaaagcgaaaacctcgacaatccaatccagacagtttcccttggccagtccctgttcttccatttccccccactgctcagagayggcgaggtaatgcctgtggccggattctaccttctgcctttgttttaataattctgctgtttagtttaaggaagcacagttctctccttttctccctaaataccactctgcagaaatgcgctctctgaatcaaaagaggttgggttctgtagggattattttttcttcattgtttttctgtttacaaaaagaatacatattcatggcaggagattttgggaaaaagaagacataagcccatcatccagaaatagccactgctaacacggtgattggtatcctttgggtcttttttcaggcacgtgtgcgcatgcatgtataaatataaatagacatttatttt

SEQ ID NO: 859577 - DNA, 441 bp, Homo sapiens
aggtcaagctttacaaaagcgaaaacctcgacaatccaatccagacagtttcccttggccagtccctgttcttccatttccccccactgctcagagatggcgaggtaatgcctgtggccggattctaccttctgcctttgttttaataattctgctgtttagtttaaggaagcacagttctctccttttctccctaaataccactctgcagaaatgcgctctctgaatcaaaagaggttgggttctgtagggattattttttcttcattgtttttctgtttacaaaaagaatacatattcatggcaggagattttgggaaaaagaagacataagcccatcatccagaaatagccactgcyaacacggtgattggtatcctttgggtcttttttcaggcacgtgtgcgcatgcatgtataaatataaatagacatttatttt

SEQ ID NO: 859578 - DNA, 523 bp, Homo sapiens
tcgcccaggctggagtgcagtggcgcaatctgggctcactgcaagctccgcctcctgggttcacaccattctcctgcctcagcctccgaagtagctgggactacaggcgtgcgccaccacacccggctaattttttttttttgtatttttagtagagacggggtttcaccatgttagccaggatggtcttgatctcctgacctcgtgatccacctgcctcggcctcccaaagtgctgagattacaggcgtgagcccccgtgcctggccaaatctttcatactatgatttttatggacagtagtccataaactaggaaacgccatgatttatttaaccaaggcctactgttgggcatgatcgactcttgcactttgaacatatcaccccatgctttcctgctaagaagtccacttttaaaaatgccttgtaatttttaaaaattcctctattttaacattcygctattgagtttagggaaatacagtttcctcatgatgggggatcccttgaatgagatgagtt

SEQ ID NO: 859579 - DNA, 551 bp, Homo sapiens
ggattacaggcgtgagccactgcacctggcctgaattaaacttttaagtaagtgtttacttcagtggaaaaatgggttgggttctaagagatgtccaragatacaggagtaggcagttgttgatggaaatctgttcctgcccttattctttcatttatgaaagggcatcccaggtacagcggcgcccacagtcactctctagcccagcagttcttggatgggttggttgcaggacccctttatactgttaaaaattattgaggattttaaagagtttgagtttgcatggattatctctgtgtatatttatcatattagtaattaaaaccgagatgttgaaaacgcaagaactcacaagctacacattccgttagctgtgggcgtgatgacatcagggtgcgtagtctctggaaaagtccactgtgcgcttgcgaatgaaagagggcggaaaaggcacatcacatcttactattggctgaaaatagctgtggcctcgggaacctctgcgagaggagtcccggtatcctacactgagaacactgctctggctc

SEQ ID NO: 859580 - DNA, 551 bp, Homo sapiens
ggattacaggcgtgagccactgcacctggcctgaattaaacttttaagtaagtgtttacttcagtggaaaaatgggttgggttctaagagatgtccaaagatacaggagtaggcagttgttgatggaaatctgttcctgcccttattctttcatttatgaaagggcatcccaggtacagcggcgcccacagtcactctctagcccagcagttcttggatgggttggttgcaggacccctttatactgttaaaaattattgaggattttaaagagtttgagtttgcatggattatctctgtgtatatttatcatattagtaattaaaaccgagatgttgaaaacgcaagaactcacaagctacacattccgttagctgtgggcgtgatgacatcagggtgcgtagtctctggaaaagtccactgtgygcttgcgaatgaaagagggcggaaaaggcacatcacatcttactattggctgaaaatagctgtggcctcgggaacctctgcgagaggagtcccggtatcctacactgagaacactgctctggctc

SEQ ID NO: 859581 - DNA, 549 bp, Homo sapiens
tgaccagtgcagagatagtctggtagctccaaggcgtcaggggacccaggccccttctgtctcattgygctgttccagtgcattgcttttctccaaaatggggcaattggccaaatgctgtctgcccagcaaaagggagggcacaccacttccctagggtccagccagggtgtggcacttaccgcttctgttcctgtaccattggccaaaatttagttccagggctgcgcctgctgcagggaaggctggaaaaggtgatctatattgtcggtggcccagataaaagttgggggttctattgggagaaagggagaatggccacagggatgctagtagcagtgcctgctttgcttcctcactagaccgtactggctgggaatagctgcccatcactgtgtgccctgggtctagaactgtaggttcttgatacatccttgtaggactaagtccctgcatgttgctgggactcaacaaactgagacccagttgcttttcaaccaccaagactctctgatagctgcatctcttcatttcctcagttgggaggag

SEQ ID NO: 859582 - DNA, 609 bp, Homo sapiens
caaacatttggtgccctatctatataatggagctttttttttacaactcagattgttacccatcccatctttcagtaggctgggaagaaaaatgaggaaatactcctttctttctaatgcaaaagaagattaaaattgtatgtatttaccatgtagaacatgatgttttgaagtatatatacattgtggaatgactaaatccagctaattaacatatgtattgtcacatattttgatcatttttgtggttaaaacacttaacacctactctcttagcatttctcaacagtacaataagttattaagtgtaattcaccatgtagtaggttagatctactgaatttattccttctgactgaaattttatatcctttgattaacatatatgcagccttcccagatctcaaccaccccagcctctggtcaccatgattctactctctgtttaagttctatcattttagcttccacatataagtgagaatatgtggtatttgtgcgtctggcttatttcacttagcataacggyctgcaggttcatccctgttgtcacgaatgacaggatttccctcattctatggctgaatagtactcctttctgtatattta

SEQ ID NO: 859583 - DNA, 494 bp, Homo sapiens
tgagagcacgtctctacatctatacctgcattctggaatcagggaggaagccaaaacggatgacaagacactaggtcagccgcgtccaaccctttgactacaaggacttttccacctatctgtggtggtgggtatcatgaaaattatgcacaaacctttttttttttttaagctcatcagctatcgttagcattagtgtattttatatgtggcccaggagcattcttcttccaatgtgaccctgagaagccaaaagacacctgtgcactagatcaaaaggctactccttctggaagcaattgtaaagaatttctgacattatcttcacatgacaaccaatgggtagtgggacagaatgcaaaaatcttcaagtatttttcttgttggtttttttttttttgagtcagggtcttgctctgtggcccaggctggagtacactgstgagatcacagctcagtgcaggctcaagtgctcctcccacctcagccacagt

SEQ ID NO: 859584 - DNA, 623 bp, Homo sapiens
tacaaataatggaatattatccagttttttaaaagcaggagatctgattatttttacactaaggataaatctggaggacattatgtaaataaaataaatgagtcataaaaggacactgtgtgattccagttaaatatctaaaatagttaaactcttagaaacagaaagtagaatagtatcagtcagagcctcaggggaggagataaaagggtagttgttgtttcatggctattgaattttagttttgcaacataaaaacattctagagatatgttgcataacaatgtgaatatatttaatattatttaactatgtacttaaaatatttaagatggtaaattttatgtggttttgactacattaatagtgaaaaactttctaaagagatacatatttatcaatcttttcaaaaattaccttcaaatcctaaaaatatcagaaaaacaataaagaggccaggtgcagtggctcatccatgtaattgaaacacatcaggaggctgaggagggagaatagcttaagcccaaaagttggagaccagcatgggcagcgtaaaaagacctcagctgcaaatcacaagmagaaggaaactggcaaatgaaaaaatatgtgaaacttaaaac

SEQ ID NO: 859585 - DNA, 633 bp, Homo sapiens
atttgattttgggaaattcactggatccctgcagcccatcagttttggttataaaaccctgagctaatcattaatagccgtacattacacaatccatatatcccaagtacttggtgactttatttggcccaatcagttgacccagtaactccatgaagcaggtgctataaagactgtgaactattcttagacccgctaatttcccatcatgaagcatcatgccaactttatgagcaaaaacttgggagttgggaagcctaggttcaaatccttactatgccacttacctacaggatgatcttgggcgagttactcaacctgccttagcctcagtttccctatatttccttggcatacagggaaactataacaaatgctcaatgaatgctgttcactactttattacttcatgagttcagccaaccactatagtggcttgaaggcaaagattccactaaagggtgaccttcacccacccctgagtggatggctacaaaagggaccccaatgatcatctagtttgaaggtcaagatgggaaagmatgagccagcatctcacggcaggtcagatacagagctgggggtaggacccaggctctcaaccccagtctaacagattccacccctgcccac

SEQ ID NO: 859586 - DNA, 630 bp, Homo sapiens
acttgaggtcaggagtttgagaccggcctgaccaacatggtgaaaccctgtctctactaaaaataaaaaaaaaaaattagctgggcgtggtggcaggcacctataatcccagctactccagaggctgaggcgggaaaatcgctggaacccgagaggcggaggttgcagtgagccgagatcatgccattccactccagtctaggagataaagcaagactctgtcaaaaaaaaaaaaaaaaaaaaaaaaaagagtatctgtggaatgaatgaatggaatcactctccctaaaaaacaaaacatgttcaatatttctatggcggagacttggccttaatctctcatcccttaacttctataaaatggtgaggggctcacaaattgtgccaaatatgtgacaagacccagaatctgcattcttcctccgtgacgtggctgcttgtttttttctttttcagcaacaaggctttttgcatttgggggaacatgatggcagtcttggtgagtaattaaactgggacagaataagacactaatttatttctggtgaaatatcctaagacaagtgtaagaattgctcatgtgtccrttactttttcagttgcaaattggatccaaactggcttaaacaa

SEQ ID NO: 859587 - DNA, 630 bp, Homo sapiens
acttgaggtcaggagtttgagaccggcctgaccaacatggtgaaaccctgtctctactaaaaataaaaaaaaaaaattagctgggcgtggtggcaggcacctataatcccagctactccagaggctgaggcgggaaaatcgctggaacccgagaggcggaggttgcagtgagccgagatcatgccattccactccagtctaggagataaagcaagactctgtcaaaaaaaaaaaaaaaaaaaaaaaaaagagtatctgtggaatgaatgaatggaatcactctccctaaaaaacaaaacatgttcaatatttctatggcggagacttggccttaatctctcatcccttaacttctataaaatggtgaggggctcacaaattgtgccaaatatgtgacaagacccagaatctgcattcttcctccgtgacgtggctgcttgtttttttctttttcagcaacaaggctttttgcatttgggggaacatgatggcagtcttggtgagtaattaaactgggacagaataagacactaatttatttctggtgaaatatcctaagacaagtgtaagaattgctcatgtgtccattactttttsagttgcaaattggatccaaactggcttaaacaa

SEQ ID NO: 859588 - DNA, 496 bp, Homo sapiens
atcagatcatgcctcccagcatcacctcattgcaagatccaatcagattatgcctcattaccctatgcttctaaaacctgacccagtgcccagctcaggaagacagatttgaccatgtcctcctctctccttgccagtcaacttgcaggaaagcttttctctctctttctttctgtccactctgtgtccatgtgttctcatcatttagttcccacttataagagaatatgtggtatttgattttctgttcctgcattagtttgctaagaataattgactccagctccattcatgtccctgcaaaggacatgatctcattattttttatagctgcatgatattccatgtggtatatgtaccacattttctttatccagtctatcattgatgggcatttaggttgattccatgtttttgctattgtaaatccccaaaggaagmttttcttttccccaaagccattgccatggtattggcttcatgagcatccagccgt

SEQ ID NO: 859589 - DNA, 309 bp, Homo sapiens
ctcttcataggtattttttgaatgaaaggatgaatgaatgagagtgagtcctaggttattcctccttgccaccacagccatggctagtgaccacttaatataagtatttgcagcacttgacacaagtatagaaaggtttgggtctcctctactgggaaaagtccagtgctaacagttattgggaggatgacctcaagtccttttcagcaccacgctgacamtacttggaattatgctactgaggggaggatcttgttcttgctacacattgtacctactctttcttctgagcagcaatgtcaggaggag

SEQ ID NO: 859590 - DNA, 618 bp, Homo sapiens
agttgattgattataaggaagatgcttatcaactagcctggactgctaaatacaagaatttatttaattaaagagaagcttgaccatgtaaaaattrctgaaacactggaatagatcttataggaataagataaatgagatacagttccagctcgcaaagattataaaatttacgaagatggggtaaggggtttcggaaatatgaaaagtatacagacaagtgttgatgttgagagaaagtataaaaggttagacacatccagcctttctcagcccagagaattaaaccctacaaatgtgatttctgtgactgttttctcagttctcccaagaatgacatagcaaataccattttagattcttaggagagaagtgaatttattatatacagtgaatgcctttgagtattagggcttaatttcctcacagaacccattgaacaaagctagactgaaatcatactaagttaaaaaatctgctgttctgcttcttaaaagctgtgtagctggacaagtgacttaacctctcattgcctcactgtaaaatggagatagtagtagagagagctattgagtggaataaactgagttaatacatgtaaaacacttaacaccatgc

SEQ ID NO: 859591 - DNA, 619 bp, Homo sapiens
ccttgtacttagtagcacttatatgacaaaactgaaacactttgcatattaattatagaaatccacaatgctaatgaaattaaaataaatattaacttactgtgacatgatgcatttttacataaatgtgattgctgcttgacacctgacagtggtcctcactgctctagcactggtttatgccatcatgactcatagatcccattccttttctctgttgaaactattacagtctggctatcattttgccttctctaggcttaaacatattctcacagtgtctggctttgttactgtgtggcaacactttataaaatactcatccaggtgatcaaggagatttttttttccaggttaacaaaatgaaaacaaattgcatacatttccgtaaggagttcatgaacacccaagaatacatcttcggactcgggaaatttatgtcctagtgcttgttctaccaaatcctgagactctgtgattgactgcttgactaaaattagtcatttgtgggcaggggataagcaaggggcaatggcagaatatcaagacattgaaatwctttagtggttgaaatagtttatcctagacttaacgataactaaggaagagaatgcaggta

SEQ ID NO: 859592 - DNA, 477 bp, Homo sapiens
cacccttgcagcagtgagcatacctagcattcagaccttgggttctaaacaaagcagggaaaaagtacaacatgagtctgggacatcttgtgccgggaagtaagaaggtaataaactgctcaaagaatgatagaatcatgacaataagaaactgggagttcacactagccaaatctgggacaatttgggcattaaaataaataatgaaagtcacagattataagctattgcatgaaataggagactgtaagtaggtaacataaaccatgtaaagagaatttttttttcttatagtaggatgtgccactaataaatgtagaaggaatgatggagttttcaaattcaccatttggcagccatcatagtgataaataatttagccaaayacaccaatggattgttctcaaagcaccttcccacagaataattatatacaaaaagaataatttcgccatggagaaatctggccagtaccaa

SEQ ID NO: 859593 - DNA, 601 bp, Homo sapiens
aattcaaattaagggaataactgaaatgaagaattaactttatacacaaaaattgcaccacagcattatttatagttaaaaaattggaaacaacctaagtgataaacagggactatttagtaaactatgccatatccacctaacagagtattttatgtagccactaaaataataagaatatttatcattgtagttacagagtgatcggagtatgtagaagcagagaatcaaaatctatgcttaaagacagaggaaatacatggtaactctagttgtgtctctctggatgatgatattatcggtgattttcttttttagtttttttatcctactgttttctatttccatattttgtgtaatgaacatatttggctcctatcatgtgtgaaaagattttttttaataaaaatgcctgggacccaggctagttaggaaagatgggatacatacagtaagtaaatggatttataacctcatctccctccatccgtgagggtgctttgcctgcctcttgtgagttttgtcatctggaaatatacagctsttgtagaattgtcaacttggggtaaatgttttgcacagagaatacaatgctacctgt

SEQ ID NO: 859594 - DNA, 644 bp, Homo sapiens
atgtcaggcaaaatttactaaaagtttattggttagtacarttgttcttttgagaacaagaacatgacagtttagaggcaagctgaaatttatttatttatttatttatttatttatttatttatttatttgagacaagtctcgctctgtcttccaggctgcagtgcagtggcgcgatcttggcccactgcaacctccgcctcctgggttcaagtaattctgcctcagccttccgggtagctgggattacaggcatgtccaccacgcccagctaatttttgtatttctagtagagacagggttttaccatgttggccaagctggtctcaaactcctgacctcaagtgatctgcctgcttcggcctcccaaagtgttggattacaggtgtgactcactgtgcctggccggcaacctgagatttagaaaaggaataactatttctaaggaattctgaagcacgtgtcaccagcagttagctctaacaagagatttttattgattatatgtccagtgtaggagttcattggattcttttagagaaaaagtctaaaaaagaagtactattgcaggggagaaaagataataaaaggttttcaaatggatgccctcgagtagctgtaaaatagcctacatattgtggcaa

SEQ ID NO: 859595 - DNA, 604 bp, Homo sapiens
tgcccctatggagccgatcttttggtaggagtttacagagtaggcacaatacttaagcaaaatattacgtgtattagaaggcagtaagtgctactgggggtgtagatgggggacagagatttgctagtggagggaaagaacgggatgcctgaggtgacacctgaacaaagtttgaaggtgagggacatagtaggtaggagaaacagcaagtgcaaaggccctgaggcagggacaggcctggccacaagtgtggctggaggagagtgagacagaaagcagccagagaagaggtcagggaggccaaggggacagatgctgcccagccttcgaggccactgtaagccctttggcttgtaccctcaaggaactactgcagggttttagtagaagagggacagctgggccaagactagactgtaggggtcaagggcagagtaggcacagcagcgaacaggtggctgttttctttttttttgagacrgagtctcactgtcacccaggctggagcgcagtggcgaactctcggctcactgcaacctccaaccccactgggctcaagcgattctcctgcctcagcctcccaagtagctgggattacaggcgc

SEQ ID NO: 859596 - DNA, 623 bp, Homo sapiens
ccatatcatgacccaaggagagtaatccaggttggtgggcagctctactccgagtggtcactccaggasccaggttcctccaaccttgttgcactatgactcttaccatcttgtcctcatctgcattgttatagttggttgctgtcactgtgtaattctggcctgggggaagagggaagagaggagacctagaacaaggatttctttttttaaagcaagtcaggtaaagcagaaataggacacatcacttttgctattatttcactggtgcgatatcagtctcatggccaaatgtggcttccaggaaggctggtaaatctagttctgagttgagtgaccatgtgtccaagaaaaagaaggtagactaaatctgatctgggagataagaagcaggcagccacagcatcttctctgatgggaatgtacatttcaggagatgtaccatgcactatgcataatgttctgagttttcgcaagccttgtctcgtttacttctacactgcactccacaaggtgtgtgtgtatgtatatatatatatatatatacatacacacaccacaaggtgtatatccacaaggtatatataacattatcctaattttataatctttatattttctga

SEQ ID NO: 859597 - DNA, 454 bp, Homo sapiens
cattctcttcgcagttctttctcttcactgaccttgctgtttctggaatggaccaagcatttccagcatcagcacctttatatctattctttctccctagaagggtcttgtcctggatatctgaatggctctagatctcatttcattcaagcctctcctcaaataccaaccttacgaaagagacctcccataatcatcccttgtaaaataagcttttctgctcatttagcatatatatatatagttgactatcctcaatagcatatatatataacatttccccacctagaattatatatgtaataatatatttaacaaaraatacatataactagatatattttattttgtgtttgttctctctcccccaactggaatatattttttgaaggtagggactttgttttgtcccagaagtatccctagcaccttgaacagggctgacgtttaacag

SEQ ID NO: 859598 - DNA, 552 bp, Homo sapiens
tgaagagcagtattgctgccagcatgtcccacctccagccctaaggcagttttcccctatctcagtagatggaatatacaatcgggttttacactgagacattccattgcccagggacgagcaggagacagatgccttcctcttgtctcaactgcaaagaggcgttccttcctcttttactaatcctcctcagcacagaccctttacgggtgtcgggctgggggacggtcaggtctttcccttcccacgaggccacatttcagactatcacatggggagaaaccttggacaatacctggctttcctaggcagaggtccctgtggccttcctcagtgttttgtgtccctgagtacttgagattagggagtggagatgactcttaacgagcatgctgccttcaagcatttctttaacaaagcacatcttgcacagcccttaatccatttaaccctgagttgacacagcatatgtctcagggagcacagggttggggstagggttagattaacagcatctcaaggcagaagaatttttcttagtacagaacaaaa

SEQ ID NO: 859599 - DNA, 638 bp, Homo sapiens
ccccaggaactggaagtggatagatccttcgcaaaatctaaggctctgtttggctttgcattatgttatctgatgtttttgacttttgggggtatcagaaattactttgcattatgagggagatctggtgtgtaataaccaggtaggaaatatacttctggggatagctaaaggcaaatataggtgaatacttggctatttgcacttttggatcacaagaagcattctcttgactacctagaaggtatggaaatgtctccatccccaccgagagataagattcccaggggagatggctgatcccccaaaagagggctgattccctcttttgggatccaggatctggtataaaaatgggaccctggccaggcacagtggctcacgcctgtaatctcaacactttgggaagcctcagagttatgaatgtctcaccatactgacactttgtgactgagctcctctctaccctggacacaagagaccctaataattagacaggaatatcattgcccctatttagtctgaagaagttatagaagayggatctttatcccactgcaatccttaggattaagggttccctggtaaaagggagtgggaaaatatgtcagaggcatttgaatcagagtgactccatc

SEQ ID NO: 859600 - DNA, 556 bp, Homo sapiens
cttcttgtgtgagatccaataacccttttgtgtgtgaaagaatgtatkgctgctgttcaggctggagcaagctggagctcatgctgctgctcagactggagcatgcgtgatctgtgatcccagtaagaggatcatggtcactccagcctgaacgacagcatgatatctcatctgtaagaaaaaaaaattactagagggctttaacagcaaatttgagcagcaaaaagaagtaatcagtgaactcaaagataggtcaattgaaatgatctactctgaaaaacagaaagaagacagaatgaagaaaaagaaatagagccttagagacaggggataccatcaagcatactaatatatgcataatgggactcctagaaggagaaaagtgagaggacagggagagagaatgtttggagaaataatttctcaaagcttcccatgtttggcaaaaaagcattaacttgcatacatattttaggagctcaatgaattccaagtaggatacactcaaagagatccatacctagacacatcataatcagattatcaaaagatgaag

SEQ ID NO: 859601 - DNA, 617 bp, Homo sapiens
cccgggttcatgccattctcctgcctcagcctccccagtagctgggactacaggcacctgccaccatgcccggctaattttttgtattttttagtagagacggggtttcaccatgttagccaggatggtctcgatctcctgacctcgtgatccgcccacctgagcctcccaaagtgctgggattacaggtgtgagccaccgcgcccggcccctggtcctctgctttcatgttcttcttggtcctgttcctcctcctcttttgttggaacttccagtatcagagcaggaaggaaggcaatgggtcaatcgatgctgtcagcttttggatcaaactgcaagttctcaaacagcaaaattaatgagctcaggctttgaagaaaccatgaccctgaaagcatcagttgcttccaattgcatcagttgccacgggtgataagaacaatgatgactcagaatgcctaggttttcccagcagcttctctgaggttttcccrgcagcttctctgattgattcctgacagatgacttcggtgtgtcagactttcagggtatctttccttatgtgatggtttgaggaagagttaccattcacattcctaatggcttcagaatagatg

SEQ ID NO: 859602 - DNA, 636 bp, Homo sapiens
catgttttcactatttacaaagcttagctacatgccaattttatttgattatttgtgaggtgacacatatgaggcagctgagagtaartgaggaccatgtggtaaaatgattgttgaaggcattcagcctgctggactcctttacccactccccacctgtgccagttcccacgtggaaatgttagtaagtctgagagaaagaaaagggcatctttcttaatatctatagagtatataattgatggaatcatttaccccaagcgctactacaggagacatccgaaaagcttcaaaagttgttcagggaaatttgagaatgatacttcacaaatttttaataataaaaaattatccattgatggaaacctcactaatttttgaggcaatcatgatggaatgacatagagacctccaggctatagtcactgaatacaatataaacagaatagcatccttagtgaacgccaacagcatagataacaaaaagagtaggttgggactctggtttcctgaaggaggaacagccataatttttaaatctcttaatactgaagggacccttaggaaatctctacaatttctctgcaaatcgctttctctcttttgcttcaatttcctctcttccagctccagaga

SEQ ID NO: 859603 - DNA, 518 bp, Homo sapiens
tggtatcgggcataccactctcagtgaggggactgagcatactaggtcaggtctttcttcctccttttataaagctatcagtcccactcttatgataacccattaatccattaactgattagccaattaatccatgaatggattaattcattcatgagggcagagccttcctgacccaaacacctcttaaagactccacctctcaatactgccacatgggggattaaatttcagcatgagtttttgatgagacaaatattccaatgatagcagttattaaaagtacatgcttgagagaaggggattggagtcagcctcagtgcttaaactcaaaagctaggatgaggctctaacactcctgaaagaaggagttgctgctggctccttaccagggctatatcttttacagagcagsagacctaaagaggcaggaggacccggacatcgtttggaaaccaagcactaaaacaggccatctgttatacccccaatatcctctcaggacaagtgttttgaac

SEQ ID NO: 859604 - DNA, 518 bp, Homo sapiens
tggtatcgggcataccactctcagtgaggggactgagcatactaggtcaggtctttcttcctccttttataaagctatcagtcccactcttatgataacccattaatccattaactgattagccaattaatccatgaatggattaattcattcatgagggcagagccttcctgacccaaacacctcttaaagactccacctctcaatactgccacatgggggattaaatttcagcatgagtttttgatgagacaaatattccaatgatagcagttattaaaagtacatgcttgagagaaggggattggagtcagcctcagtgcttaaactcaaaagctaggatgaggctctaacactcctgaaagaaggagttgctgctggctccttaccagggctatatcttttacagagcaggagacctaaagaggcaggaggacccggacatcgtttggaaaccaagcactaaaacaggccayctgttatacccccaatatcctctcaggacaagtgttttgaac

SEQ ID NO: 859605 - DNA, 604 bp, Homo sapiens
tgctcagtctcaaatatgtctttatcagcaacgtgaaaacagactatctgattttctgtgggatgtggattatgaccatggacagagcataactgggacagagctggaaaaaatattaattaggtgcttaaaaatatttgttagaactatcttcatgaatgagaatcaatcctgtttccatggtgattcaccaggcatcaattccaagcatccatgaatcagaaaagtcctatcttctcttagttatcatccaggactccaaggaaccataattagccaacctgttcacatttccttttcattcactagcctcgaagtttccaggggacagggactctgtcctattcatttctgtaaccttaccacctgacccagaatagctgttccctgaagatttggtggattataaatgtggatgtcttatttctttgaaagtgtgagcttcaggtactgatcacgttattccaattatcaatttagtatctttcttcaccattaaactgtgaaattcttgagggaagaacctatgactgatttatctctgtaaactcatgccaccagtattcaaaatcacacckagcacatagtaaacactcaatgtttg

SEQ ID NO: 859606 - DNA, 528 bp, Homo sapiens
tgattctgtcatgttttggggacttatttttgtttctctgggtggtcactagtttttttaaagcattcatggaagagtgtgaatcttttacaagctaggaagccatggcaagccttgggtcatactgcccccgcgaggccacattggcaaaccagcaagggtgttcaacttccagacttggccatggagaagacatacgaggaggcttttcacattcagctctttaatgtttgtctctgccggcaccatcccagttgtgaataagaggtatttccacagcggctcagggtaggtagtgcacagctcacattcatcatttctgaaaaccgagaggagtctccattcggggtacaggttgatgcctgtcgtggaatgaaggttccaacacccagaccaatctctgcagtgtgctgctctcatgagcttgcaacaagatcagaaaatgttttgtgactaarcatttttcatattgcataaaatgcttcaagctcctcccttgtttctctctataatcctgtatatctgatg

SEQ ID NO: 859607 - DNA, 595 bp, Homo sapiens
agaccaaagggaagtgactcagagaaggggcaggaggaatcacaagctccctgcctgaccaggcctggactatggcagagacagtgagatggtgagaaagcaagggtagacagccagccaaatccagaatatagaaagttctacaggaaaaggtggggccaaggtgggacagggggaaaggaattgttgcacattaacagtgcaatgcagagcactggtcttgtttatgtccaggttagaacaaaccaatgagaaagcacatctttgagacaactggagaaatttgaacactgactagatataatattatgttaattatgctttaatttggggtacaataatgcttttgtagctatttctaaagagtccttatctcttaaggatacactctaaaatactagtggattaagttatatgatgtttagactctttttaaaataatccagtggggtgagaggcagagggaagggagaggagcatagaggaaacagtgttggycatatgtttgtaattgttaaaactgagtgatgggaatatggagatttaacatattaatactattttctgcccatgtaatatttgaatattttcataa

SEQ ID NO: 859608 - DNA, 547 bp, Homo sapiens
agcccagtactcaataggtatcttttctgctcctctccctcctcccrccctccagtctcaagtagacctcggtgtctgttgttcccttctttgagttcatgtgttctcatcatttagctcccacttataagtgagaatacaaggtatttggttttctgttcctgtgttagtttgctaagggtaatagcctccagctccattcgtgtttccacaaaaaaacatgatctcgttcttttcatggctgcatagtattccatggtgtatatgtaccacactttctttatctaatctgtcattgatgggcatttaggtttattccatgtctttgctactgtgaatagtgctgcaatgaacattcacatgcgtgtgtcttcatggtagaatgatttatattcctctgggtgtatacccagtaatgggatttctgtttttagctctttgatctaatacctatttctcaagatcaagttagatctctaaaaaaggcatcatcctagcatttccccatcccttccctgaactaaatttaatgttgtgtgtatcaatc

SEQ ID NO: 859609 - DNA, 547 bp, Homo sapiens
agcccagtactcaataggtatcttttctgctcctctccctcctcccaccctccagtctcaagtagaccycggtgtctgttgttcccttctttgagttcatgtgttctcatcatttagctcccacttataagtgagaatacaaggtatttggttttctgttcctgtgttagtttgctaagggtaatagcctccagctccattcgtgtttccacaaaaaaacatgatctcgttcttttcatggctgcatagtattccatggtgtatatgtaccacactttctttatctaatctgtcattgatgggcatttaggtttattccatgtctttgctactgtgaatagtgctgcaatgaacattcacatgcgtgtgtcttcatggtagaatgatttatattcctctgggtgtatacccagtaatgggatttctgtttttagctctttgatctaatacctatttctcaagatcaagttagatctctaaaaaaggcatcatcctagcatttccccatcccttccctgaactaaatttaatgttgtgtgtatcaatc

SEQ ID NO: 859610 - DNA, 581 bp, Homo sapiens
agctccaacaccaggcctcagggcagcgcggcctctgcggttctgactgaggtcttcataagagtgtgggctccatgagaaagggtccattggagtaatcgtcgggctagagatgtctgctcagtgcccaagcaccgccggcacacctgccgtctttctccgtgtgggagacgtgctcctaatgagggcctctgtgcccagccaaatgtcctggtctttggagaggtttcctgcacctctgacaccttctctgtggcagcttcttttgcttcttgtcctctgtgtagccagcggctgcactcggttgcctgtagaaagaacgcagattagggaggctttggtttttgttttcggggtttgttttgcttttagcagctcagcaagaaaagtgggtctttggagggcagttgtgtcagttcagggacattggtcacaggttattagggttgaaaaagaagtctggtattstcacctgttaaattcaaaaagcaaattccattcatgggtaaaattcacctgaaggagttccctgcagacgggctgtcggaggacctttgattctgcttttcttggcgttgcca

SEQ ID NO: 859611 - DNA, 501 bp, Homo sapiens
tgagagtattgaaggtatttctaactctaaacaccgagaattctatacctaggattataacagctccaatatcattgtattattgggaaagtgaaatgaaatcaatccaggatgcataaatatttgtatttttcctatccacccttttgtttctgttaatacgttttcttttcttgctccctgccccaaactcactccaggcatctatgggttttggtggcctagtacacttttattcttttactgataaaactgccctctccccaactctcagtctacatggggttaagctcactcatgggatagaccctgattgacatattccaggcctctatcttttctggtgattcagggatggggctgtggttcttagagccagtggcctagaacttttgatcaaccatgaggaaaasaagttctcttttctgctgagtgccagtccagatggaaaccatctcaccactaggaagggggacttgagatggctttgcatggtagaga

SEQ ID NO: 859612 - DNA, 582 bp, Homo sapiens
aatttgagctagaaagccacttaccagataaggtagagggtggggtgtagggggagggaggggggcatcacacagaactataccgagacaaggcctgaccctctgagggagctgagagggtctcagagatcccttagttaatatctcttattctaagatgtgcagaccaaactcagagaagccaagtggcttgtcctgtgtcacacagtgactcagaagcagggtgaggcccagaacccaatccccgtacttctccttggccataatattccccaaaggtcagctctgcatcctgtccagaccctcccacccctcacttttccacttccctgagattctccagagttagtcctgtggccacagccccacagcatgtcctgaagtctctgagaccttgccccactgggctccctagctcttctccaagtgccatcccttcttccatcacagcaagccctccagggtgagtgccatggggacctgctaggacttgggggcctccttctgagctgggctctgaactcrggctctgtgccttttctcccatctcagggatgccctgcttcacccccagtcaggatc

SEQ ID NO: 859613 - DNA, 588 bp, Homo sapiens
agagtgtgttaaactgagttgaaagataaaggaggtgctgtcactaggaacaggtaaaattttaccttccaccttcctcaaatctgtcttctctcattgctatggatgtgttctctgattctatgtggtttccaaatggatcttgactctggaattctgtttcctgagtcttagtcctggtttcctgtcttggtccatttgtgcagctatttttaaaagcctgagactaggtgatttataagcaatagaaatttattcctcatagttttggaggctggaagtccatgatcaatgtgccggtaggttcagtgtctgtgagggcccactctttgttcccaacatggctctttgctgctgtgtcctcacacagaaaagcagagggcaaagatggccccagctacttccctccagcccttttatgggtcacttatccattctcaaagagtaccacctcttgataacaccaaaatggagattaaggttccaacatgaattytggaggaaacacattcaaaccattgcgcttcctctcccagctcccacacattcctattggttcagccaacttgctgcatctgctctgtcagg

SEQ ID NO: 859614 - DNA, 479 bp, Homo sapiens
ccactggaggagagatttagagaccagatcccaaaatgtgkagcgggccacctgccagctcatgttccttcctttttattaagcactgactgtgcactgggtgctgaacatgcttatttcagtcaatcctcacacaaccctgtgggaaggtggagactcgccccctttacagatgaggagaccaaggtcctgagaagggaagtgatttgtccaaggtcacaggggtgtaggatacccacgtgtatcatttgtcaacttactgcccctcagctccaaatccttcaccacctgcttgtgatactgaaacatgctccctcgccaactgctatgaggttaagttttgtcagtaatagggattggagggacccaggatgaaaaaaggggcttttttcctggttgtggcatgttcttctccacctgttcctgaggtgtgcagtggccatcggtgtggacaccctgtaatgtgcaccacccccgtg

SEQ ID NO: 859615 - DNA, 299 bp, Homo sapiens
aaataaataaataaataaataaataaatccacacgtgagtggccacctgtccagccacactgcttctcaccaggttctctgtttttttaacttcatttttatttttttttagagatggggtcttgctatattgcccaggctggtctggaactgctgggctctagcaatcctcctgcctcagcctccctcttgagkagctggaatgacaggtgcacgccaccacaccaggttacggctctttggtttgtttgtttgtttgtttgtttgagatggagtcttactctgttgcccaggctgga

SEQ ID NO: 859616 - DNA, 489 bp, Homo sapiens
ctgaaagcagaaggagtgtttctacctgggaaagtaggaagcagatcaggaagtcaaaacctaaagctaatatcccaggtgacatctttggagacgtgcacctgcttatcccacagcctgacatgggatgctcaatttccctctctggtgctatagcacatagctcccatcctcccccatcccattacaggcttccaaattcaccctgatacccaagccagaaattgagttgtcaatcctggcttctcgcttcccttaactccaggcatcaaatccatccgcaggtaccatctactcacctccaaaatatatcctgagggctggacgtgggggctcatgcctataatctcaacactttgggaggctaaggcaggagcaccttttaagcccaggagctcaactgaacaacatagcgaayaacacagtgagaccctgtctgcaaaaaagaatttttttaaatcagccaaacgtggtggcatgcaatggcaa

SEQ ID NO: 859617 - DNA, 574 bp, Homo sapiens
gctggtcaggcatgaggccccaggcaactgcctgcaggcccgtgaggctggtcctgcctgctgtcatcccatgctgaaatctgatctctagatctgatctctagaaagcattttgttgcgccccttatggctcccagacttctctgaaatggcctttttttttttttttttttttgagacaaagtcttaccctgtcacccaggctggagtgcagtggcccaatctcagctcactgcaacccccacctcccgggttcaagcaattctcctgcctcagcctctcgagtagctgggatttcaggtgtgtgccaccgtgcccagctaatttttatatttttggtagatacggggtttcaccatgttgaccaggctggtctcgaactcctgacctcaggtgatccacccaccttggcctctcatagtgctgggattacaggcgtgatccwctgtgggcctggcctgaaatatacttttctcttttgtgggggaggggaatgaataatgtatatactcactggctggagatttggttactttgtctagaggttttaacttgattctcaggaaatcagcca

SEQ ID NO: 859618 - DNA, 534 bp, Homo sapiens
gcattattaactaccaaatctggggtgacttcaaagttagagtttgtacacacttcatctgttcccaagtaggataataatggtcataattgctaatatttactggactcttgaggccaaatatcaagctaagcacttagtttgcatcatctcatcgatttttatgatatttaatttaatttaattatatatttttttgagacagtgtctcgctgtgttgcccaggctggagtgcaatggcacaatctcagctcactgcaacctccacctcccaagctcaagtgattctcctgcctcagcctgccggttacctgggattacaggtgtgtgccaccacacctggctaatttttgtatttttagtagagatggggttttgccatgttggccaggctggcctcraactcctgacctcaagtaagccacccatctcagcctcctaaagtgctgggattacaggcattagccaccgtgcccagcctctttaggatatttatactcaatgaattagaccctcttactattactagccaat

SEQ ID NO: 859619 - DNA, 533 bp, Homo sapiens
gtcagaaaacaccacacagagtaacagagaagtcgagcaatttgctcaagaccacacagccggtaagcatctccgctgggacacagaccctggcgcaggcaaagtctgtgactgtaactgctasgtgtgctgcctcttgctgcgcctgacctcctcacaccagccaccaggtgcaacatccttatcgccttgcaggcaagaaggaaaagtgtggctcagggtagcaaagccagtgtttcctgaacatcagtcacttgcacgttaccatggcaacagttgctatgcctcaagccctctctattattattattatttgagacagggtctcactctgtcacccaggctggagtgcagtggcacaatctcagctcactgcaacctccacctctcaggttcaagtgattctcatgcttcagcctcctgagtagcttggattataggtgcatgccaccgagagccgctaatttttgtatttttagtagagacggggttttgccatgttagacaggctggtcttgaactcctggcctcaa

SEQ ID NO: 859620 - DNA, 571 bp, Homo sapiens
tagataacctcaaggagcatggtgccagggagtgattgccctcagaataccttctggtggcaggygcagatgtgagtttaccctcatcctgcattcatgatcaacagttttctgtttgaccaaatagcctccagtggaatgctgagttggtcacgaccctcagcctttcagctcccaacaaacaagcaaaaaataaccccattaaaatatgagcaaagaacatgaacagacacttctcagaaaatatttattatgcacctactaagttcccagcactgtgctgtaatatggggaagaaaaacaatggtgaatagatatatattaagttcctgctgtcatggattttatcttctaaagacagaagcagacagagccaataaagcacaagactaaatgtaagtgcagtgaaacagagatacattcaaacatgaaagcctataacagataatttaacttggaccagggggttaggaaattctttccctgaagaaggcctgattgactcaagatctgaaggttgagtaggtttttcttatgcaaaagggagggcagggtgttccaaacagaaggt

SEQ ID NO: 859621 - DNA, 602 bp, Homo sapiens
gcatgcacccccatgcccagttaatttttgtatttttagtagagataaggttttaccatgttggccaggatggtcttaaactcctgacctcaagtgatccacccacctcggcctcccaaagtgctgggattacaggcataagccaccgtgcccggcctgagattttaatgtataaatattccacattgtaaaaaatatatcattatgttgatggatatttaatttggttcaccgtctgagctaccataaacaatggtgttccaaacttttgtgcataagtatgctgaggcataaatgtatgcagctctctgggataaatatttaagactctagttgctgggttattgaataagtatattaccaactccgctaaatcatgccaaacactcacagcagaagtgtttaaaaggtcctgtggctccaagtacttgtgccttggatggtgattcctcttggccaccttctcacaaaaacctgcagattagaaaaagacccattagctttmcctgccttgaagtcaaaaacctgctcttccttagccctgcaagaaagagatgaatgctgagcagtggaaattacaggggtggtttaatgatgaactt

SEQ ID NO: 859622 - DNA, 679 bp, Homo sapiens
taacgaactattttgaaattattatctcattttgacaagtaataagacttacttgcctagacaacattgttgcaatttttttttcttttctatagtacctacatttacatttacttgttattttatttttaaatttacttggctgggcatggtggctcatatctgtaatcctagcattttgggaggccaaggcggaaggatcatttgagcccaggcttcaagaagagccaggacaatatagtgagaccctcatttctataaaaaataaaaataaaactatatttattttaagagacagggtctcgctgtgttgcccaggccggagggtagtggctatttataggggggaggatgatagcgcactatagcttcaaattcctgtgctcaactgatcctcctacctcagcctcccaagtagctgggactacacgcttgcaccaccatgcccaccttatatttacttaaaaaaaacaaacaaaaacaaaaaacaaaacctactatattctgaaataattttagatttacggaatggttgcaaaaacagtacrggaagttcccttcattcatcctgccctgatgttgacatcttataaccatagtcattcatcaaaacttccttattactggtgaaattagtcatgattacttggttaaggtgtcatctgtcaagattgtccac

SEQ ID NO: 859623 - DNA, 605 bp, Homo sapiens
tatcgcccaggctggagtgcagtgcagtggtgtgatcttggctcactgcaacctccgcctcctgggttcaaatgattctcctgcctcagcctcccaagtagctgggattacaggcatgcaccaccacgtctggctaatttttttgtatttttagtagagatgaggtttcaccatgttggtcaggctggtcttgaactcctgaccttgtgatccgcctgctttggcctcgcaaagtgctgggattataggcctgagccaccgtgcccggccattttttattttttgttttttttgttttttttttttttttgagaaagggtctccctgttgtttaggctggagggcagttgtgtaatcatggctcactgcagcctcaacctcatggactcaggcagtcctcccaactcagcttcccaaagtgctgagattacaggcatgagccatcacacctggcctgattttttgttttttttagagacagggtcttgctcttaaacacaggctagagtgcagtggtggaatcayagcttactgtaacctcacactcctgggctcaggtgatcctctcacttcagcctcccaagtagctaggaatacaggcatgc

SEQ ID NO: 859624 - DNA, 578 bp, Homo sapiens
tagataacctcaaggagcatggtgccagggagtgattgccctcagaataccttctggtggcaggygcagatgtgagtttaccctcatcctgcattcatgatcaacagttttctgtttgaccaaatagcctccagtggaatgctgagttggtcacgaccctcagcctttcagctcccaacaaacaagcaaaaaataaccccattaaaatatgagcaaagaacatgaacagacacttctcagaaaatatttattatgcacctactaagttcccagcactgtgctgtaatatggggaagaaaaacaatggtgaatagatatatattaagttcctgctgtcatggattttatcttctaaagacagaagcagacagagccaataaagcacaagactaaatgtaagtgcagtgaaacagagatacattcaaacatgaaagcctataacagataatttaacttggaccagggggttaggaaattctttccctgaagaaggcctgattgactcaagatctgaaggttgagtaggtttttcttatgcaaaagggagggcagggtgttccaaacagaaggtacaacat

SEQ ID NO: 859625 - DNA, 609 bp, Homo sapiens
gcatgcacccccatgcccagttaatttttgtatttttagtagagataaggttttaccatgttggccaggatggtcttaaactcctgacctcaagtgatccacccacctcggcctcccaaagtgctgggattacaggcataagccaccgtgcccggcctgagattttaatgtataaatattccacattgtaaaaaatatatcattatgttgatggatatttaatttggttcaccgtctgagctaccataaacaatggtgttccaaacttttgtgcataagtatgctgaggcataaatgtatgcagctctctgggataaatatttaagactctagttgctgggttattgaataagtatattaccaactccgctaaatcatgccaaacactcacagcagaagtgtttaaaaggtcctgtggctccaagtacttgtgccttggatggtgattcctcttggccaccttctcacaaaaacctgcagattagaaaaagacccattagctttmcctgccttgaagtcaaaaacctgctcttccttagccctgcaagaaagagatgaatgctgagcagtggaaattacaggggtggtttaatgatgaacttgctccgg

SEQ ID NO: 859626 - DNA, 604 bp, Homo sapiens
gactcaggaatggaaaaccaaattccatatgttctcattcataagtggaagctaagctgtagggtacatggaggmatacagagtaatataatggacattggagactcagaaatggggagggtggaaaagggatgagggatcaaaaaccatatttgggtacaatgtagactacttgggtgatgagtacactaaaatctcagacttcaccactatacaattcatccatgtaaccagaaaccgcttgtacccctaaagctattgaaattttttaaaaaatggacattgagcttatactgagtggtcttaggagtgattttttaaaagcttgtgcaaaataacccccagtacttcagtagtgaccttggaggatgtgggaaggtgataagaacaggttctgatgatagcagcccgggagggatgcttctgattgagccacagttgtggatgaaactgtgaggggaactcatctcactttttagataaccattgagatccaacgtgataccttttagggcacattcctgaagatggaaccccagcagtagtccaatatggtcctcatgtatctcaaagaagaacacataggccattgcaataccctgac

SEQ ID NO: 859627 - DNA, 562 bp, Homo sapiens
ctgtgctaggaggattctacccttgtcatgaactctttggctgcaacctaatttttccatcttataatggacgaagaactatcctctatgaatgctcctgcctaaaatgtgtaataaaaacacatgtcatatgtgtcaattgcatacaagagaagaatttgcacttgtttttagtagaagtttcagtggaagggaaaatgaagcacagagcaaagaagccaccatataagcagaatggtaaccaccacagatgtaaaatctcaaggtcatttgtcagatcttgaaaacacaacagtctctacccactcccatttctggtgtctgaagttccaccactaaaaatcctatttgtttaatttagaagaataaaaatgaatactaattgaatttctactgcatgccagatgtttttctaatcctcaaaacaattcagcgatgagtacttttmattctcattttgcatatgaggaagctaaggttatctgacttgcttaaggttgtgtggctggtaaacacctgaatcaggatttgaactgagaaactgagttccagacttcagtcc

SEQ ID NO: 859628 - DNA, 562 bp, Homo sapiens
ctgtgctaggaggattctacccttgtcatgaactctttggctgcaacctaatttttccatcttataatggacgaagaactatcctctatgaatgctcctgcctaaaatgtgtaataaaaacacatgtcatatgtgtcaattgcatacaagagaagaatttgcacttgtttttagtagaagtttcagtggaagggaaaatgaagcacagagcaaagaagccaccatataagcagaatggtaaccaccacagatgtaaaatctcaaggtcatttgtcagatcttgaaaacacaacagtctctacccactcccatttctggtgtctgaagttccaccactaaaaatcctatttgtttaatttagaagaataaaaatgaatactaattgaatttctactgcatgccagatgtttttctaatcctcaaaacaattcagcgatgagtacttttcattctcattttgcatatgaggaagctaaggttatctgacttgcttaaggttgtgtrgctggtaaacacctgaatcaggatttgaactgagaaactgagttccagacttcagtcc

SEQ ID NO: 859629 - DNA, 610 bp, Homo sapiens
aaccatgtaaaatcatttgttttgttcacaactgcattcccagcacttagygcagtactcaggttatattaggcgctcaataaatgcttcttaagttaaatgaatatgtgaatggcaccactagaaaataaccagtattcagatcttagtgtatgccatttctagaccttaatcatatttaattgtaatattgttgtttctttaataactctagggcttagaatctagtacaaaaaaatacataggcacttaaaaagtatgtatgggcagagtgcagtggctcacgcctgtaatcccaacactttgggagaccgaggcaggcagatcacttgaggtcaggagttttagatcagcctggtcaacatggtgaaactccgtctctactaaaaatacaaaaatgaactgggcatggtggggtgcacctgtaatcccagctacttgggaggcagaggcaagagaattgcttgaacccgggaggcagaggttgcaatgggctgagattgtgccaccgcactccagcctgtgtgacacagtgagaccctgtgtcaaaaaaaattttttaattatgtatgattcaggtctcaactcaaatgtcatctccccagggaga

SEQ ID NO: 859630 - DNA, 610 bp, Homo sapiens
aaccatgtaaaatcatttgttttgttcacaactgcattcccagcacttagtgcagtactcaggttatattaggcgctcaataaatgcttcttaagttaaatgaatatgtgaatggcaccactagaaaataaccagtattcagatcttagtgtatgccatttctagaccttaatcatatttaattgtaatattgttgtttctttaataactctagggcttagaatctagtacaaaaaaatacataggcacttaaaaagtatgtatgggcagagtgcagtggctcacgcctgtaatcccaacactttgggagaccgaggcaggcagatcacttgaggtcaggagttttagatcagcctggtcaacatggtgaaactccgtctctactaaaaatacaaaaatgaactgggcatggtggggtgcacctgtaatcccagctacttgggaggcagaggcaagagaattgcttgaacccgggaggcagaggttgcaatgggctgagattgtgccaccgcactccagcctgtgygacacagtgagaccctgtgtcaaaaaaaattttttaattatgtatgattcaggtctcaactcaaatgtcatctccccagggaga

SEQ ID NO: 859631 - DNA, 610 bp, Homo sapiens
aaccatgtaaaatcatttgttttgttcacaactgcattcccagcacttagtgcagtactcaggttatattaggcgctcaataaatgcttcttaagttaaatgaatatgtgaatggcaccactagaaaataaccagtattcagatcttagtgtatgccatttctagaccttaatcatatttaattgtaatattgttgtttctttaataactctagggcttagaatctagtacaaaaaaatacataggcacttaaaaagtatgtatgggcagagtgcagtggctcacgcctgtaatcccaacactttgggagaccgaggcaggcagatcacttgaggtcaggagttttagatcagcctggtcaacatggtgaaactccgtctctactaaaaatacaaaaatgaactgggcatggtggggtgcacctgtaatcccagctacttgggaggcagaggcaagagaattgcttgaacccgggaggcagaggttgcaatgggctgagattgtgccaccgcactccagcctgtgtgacacagtgagaccctgtgtcaaaaaaaawtttttaattatgtatgattcaggtctcaactcaaatgtcatctccccagggaga

SEQ ID NO: 859632 - DNA, 623 bp, Homo sapiens
tacttacctgtctcctctggctagaatgtaagttctgtgaaaccagggaccaagtttctattgtttgatgctgaatgcccagtgcctaacagttgccagcraagagtaagcactcaataaatgtttgctgaatgacgaatgaatatctgaagtttctctacccagaaagtgttctaagccagacgtaaactgtcaggtggacttaggaggaacctcaaactgcacttagcattttaaagccatcgccagttgcacagagacactgacatgctaaagatgggttctgtccaaagctgtcacacacactcgctccagccctgccagaatgcagaacggcactcgtgcagatgcttgttgaaaacttggcctttccaggctgaaaatggggccatgtctcatctgtccaggagaacagcacccagttcccctatctgctaatcaggctggcagcaaacttcagccgcagtcactgcatttgatgctgtgatgccagtaccacaagactgaaaaatgagagaagtagaacgaggggaaggctgagactgtctcaagccaaaggtagggcagggagagaggagagagaccaaaaacttaaataccaaaaagttcaagttttttttttt

SEQ ID NO: 859633 - DNA, 650 bp, Homo sapiens
ttgcccaggctagtctcgaattcttcagctcaagcaatcctcctgcctcagtctcccaaactgctgggattacaggcgtgagccaccacaccctgctaagtgtcacttttcatgtgcctttttacagaatactaacttgtaagttacattgtcaacctggaatgtgtcttagggtttaaaagctagaagtttgaaaactaagcatgaaaccagtgaaaacaagcacagttatgacagaaatttaaaataacctggaattatcttttcccacaagagtttgacagtgagacaaagagaggaggctcctgtgcaaacgccttaactggtggtaggtcacacaatagggattgcagttcaatgcctacttaaaaggaaggttttagataaatacccataatgctcaggttttgatctctaaatactattccctgataaaaggactaggctttttgcagaaatggctgacctaaggtctggggcataaaatgtacaagatgagccaaaatcaaggaagctatcaaagtttaatgggggtccattaaaaagtgggcaaaggatatgaacagatacatttctttctttatttttatttatttatttwttttgagacagagttttgctcttttccccaggcttgagtgtaatggcgc

SEQ ID NO: 859634 - DNA, 606 bp, Homo sapiens
tgagcgggagagagaaacaaatactgagtcttggtcttatgctcatcagaasaatctccatcttcagagcctaagtgcctaccaagttccaagtgctcacagtaaaattgcaagaagcacaaattcaatggaaaaaaaacatccctgccttagtttgtgttccatctagcaagatggagcacacgcctcagaattatttggcaatcctaggactgcgaaggttatggtatttatccaccaactccatctgccattgggtgacttccaggggcattaactccttggcctttccagcctgccctttgtgctgggtgtctgatcttgtggccagaaaagaaaagccctcaagaagaaagctggaagtaagtaaccttcagcttgcaaaggagagtacccaggggaggtgggtggagtaccgagaacatctactctagcccccaccagcgtatttgggggatctgttgttaaagatcccagttcatgtgttggcccataattagtcatttagtatgaccaaaagaacactgatttgtactgcagaaaggaagaggccttgtaagctacttagactttctaaaagtggtctttttatctgccacatgagaa

SEQ ID NO: 859635 - DNA, 616 bp, Homo sapiens
gaaaaggctacctgggactaggcatgttcaaaatgacagcttcatgctcccttctctttgccagccacgtgkatagtaaggagcagacaacatggcgccgcccaagtggaaagtccatttgcataataagattacggtggggtggccagccttccccaagcgctatgtaaatttcacacctgatccaaccaatctgtgggccctacgtaaatcagacaccacttcctcaagcgtgtctataaaatccagtgaacaccacagcggttttctctttccagcacccctctctcgcgcgagagagagagctgttctcctttccgtttcttttgcctattaaccttccactcctaaactcactccttgtgtgtgtgtctgtatgtttaattttggcgtgagacgactaaccttgggtattaccccagacagtgatgctgcttcacaatgatcctgtttccaaatcgagcctcatttgaaggtattggaagtcaggatttcaacatacgaattcattgcagggttttggaggaaaggggcacataattcaatctatagtagtgagcaattactttttctccctatgtctcatcgtattcatctgtcaagtaggattgtaata

SEQ ID NO: 859636 - DNA, 597 bp, Homo sapiens
caacccgttctgagtcattttcctcttcctcgtatttctttagcatccaaggggcatagctgtgtctctttctcttttctccttttcctctgtctcttctcacctttaatttccaaataggtaactcaggtattagtgtccctgatggtttgccaacccgtgtgacatctcttgtccatgtatccacagttgctggaagtgcaggtgcgggaatctctggcaaagtccagccaggtggccattgaggctctgtcggccatgcctacagttcgaagctttgccaacgaggagggcgaagcccagaagtttagggaaaagctgcaagaaataaagacactcaaccagaaggaggctgtggcctatgcagtcaactcctggaccactagtgtgagcacctgaagatgaatacccattcccttgtccttaagatgccgtgactccattcccattcctatgaccctgctcccactcctyctttactgggaaatggttggttcagtattttcgtcctagcaacctgaggctcaatgactctactcagtgtccctagccccctccctctctttaaagatgctaggtggcttcctttcagtatgg

SEQ ID NO: 859637 - DNA, 564 bp, Homo sapiens
agggataatgagggttggggggaatatggaaattcagggaagggagaggggggtggtgtgaagctttccagaccagccacacagaaatagcrtaccaatagtggtttagagcacagacccccagccagaatgagtaatttaaacagccctacgatgtaatcgttgtgtgcatatgcatctctatgcctctctctctctctgtctttctttcatctgagacagggtctcactccctctgtcccacaggctggagtgcagtggtgcaataatggctcgctgcagtcttgacctcctgggctccagtggtcttcccacctcagcctctgaaaccacagggtcttgaacttctgggctcaagtgatcttcctgcctcggcctcctaaagtgctggggttacaggtgtcggccaccatgcctgtctgctatttaagtgcatagaagaatgcctggcactcagttagtgttaaatatttataaaataaattaaaattttataacactacacacatgttgttgagtatgtcataaatagagacatatttaatgagatgtcaacatatatca

SEQ ID NO: 859638 - DNA, 564 bp, Homo sapiens
agggataatgagggttggggggaatatggaaattcagggaagggagaggggggtggtgtgaagctttccagaccagccacacagaaatagcgtaccaatagtggtttagagcacagacccccagccagaatgagtaatttaaacagccctacgatgtaatcgttgtgtgcatatgcatctctatgcctctctctctctctgtctttctttcatctgagacagggtctcactccctctgtcccacaggctggagtgcagtggtgcaataatggctcgctgcagtcttgacctcctgggctccagtggtcttcccacctcagcctctgaaaccacagggtcttgaacttctgggctcaagtgatcttcctgcctcggcctcctaaagtgctggggttacaggtgtcggccaccatgcctgtctgctatttaagtgcatagaagaatgcctggcactcagttagtgttaaatatttataaaataaattaaaattttatracactacacacatgttgttgagtatgtcataaatagagacatatttaatgagatgtcaacatatatca

SEQ ID NO: 859639 - DNA, 673 bp, Homo sapiens
gcagaacatcagggccccaaaagggaaatacacagtactttctttggacttcagtgctctcttttatagtaatggaaaccacaagcgcagaggaaggggagctgattctataaaaagaagtttatttcctactttaaaagatgattttttgactatcttcccacaatagagccagaggatcacaggggaaagctacgatcctcaattatagaaaatgatgttgggtgcatctagcatcacagaagctttagaggacacagtcatctcaggtacctacagataaggaagaagtaccaatgagagtacctactcgtattcttattcatggaagcgaatcccttcaggaaccaaatcatttagctgctggtagatgtttcttttggctcctctctctcctgagctctcaaacacagacttttttttctgtgtgcctctgcttttggcaactctgttccaagaataagaatatttgtttgtagatgagcttgctaggtcggggatctcttgtatagggagatggtgaatcactgagcaggacacagaggcatgagttgaaacagtgagatgtaccttagtttaaagagaggtcacaagagctcayggaccattattagataaactctaaattagaaaaaagaaccatatttctcttttgatagtcacataaaaattg

SEQ ID NO: 859640 - DNA, 559 bp, Homo sapiens
tgataagagtgtcttttgcatgctaatgaggtgactggtggctggggctggtcaccagaaagaccaaggcaggattagagggttgggattttcacccactcacaatctctggggagaagggaggggctgaaggttgagttgactgccaatggccaatggtttaatcaactcaccatgctgacataacaaagcctccattaaaacccaaaagggcagagtttggagagtttccagatagcagaacacggaaagatgcctggaggataggctcttgaagaaggtgtggaagctccgcactctttcccccatactttgtcctatgtgttttgtttttctttatcaatctgttcgtctgtatcctttgtcttatcctatgtaataaaccagtgtatgtaagtaagtgtttccctgagttctttgggctgctctagcaaattaattgaacctgaggaaaggtttgtgggaacctccaatctataattggatggtcagaagtacaggtgatagcaactggcatctgaagtgggargggggcagttttgcatgactgatccctcaa

SEQ ID NO: 859641 - DNA, 626 bp, Homo sapiens
tttcatcatatacatttttttttgtttccaaattagatacaagattaagccttgggtctccctggcagtggagggcgattctgatattcacatataactacccacagggcatggattctgagagatgctgataaaagaagttggtgtcttcttggcatttgtccccaaggatcttccaatacccagagaatctgcatttacacagatcatgctcccttgggagcttctcttgactgccccccacaccctcattcgtggcttttcctctttgatctcccacttcagtcctcacacctgtcaacactgtgcttattaccatgtggagtggttagaagatcttcccagagtcaagacatttccagggtcacccttctcttaggcatttcttggcacgactgtcctgaataaaggaaaggagatgaaggtgatgttgagaagcatctagagggctggagtcagggggaaccggctgaggctgttggatcaagttttagccactggtaaaagacctccaagctgcgaatgctattgccatctgtgtaaagtcgcctccgagattagaayatgccaaagactgaagaaagaggtctaggtagcataaagccatcatgtaattgaagtttctt

SEQ ID NO: 859642 - DNA, 594 bp, Homo sapiens
tttttttttttctttttttttttttgagacggagtctcgctttgtcatgctggctggagtgcagtggcgcgatcttggctcactgcaacctccacctcccgggttcaagtgattctcctgcctcagcctcccaagtagctgagattacaggcatctgccaccatgcctggctaattttttttttttgtacttttagtagagacagggtttcaccatgttggccaggcctgtttcaaactcctgaccccaagtgatctgcctgcctcagcatccccaaatgctaggattacaggcatgagccaccgcgcccggccacaaacgcatatctaattgttccccttcccccgttttgtctatgtcatcttatgtaaaaaaaatgcagattaactgagccagacaaaggcatgaatgactatttttccttaccctcctcttacatgaaaattgtgtacttctcaatatccctaycctttccccttaaatttagagccctcaaaattatcttcggagaaaggtatagacctgtctcctgggtgcttattcttaactttggcaaataaacctcctaaaatgattgagacttgccatttttct

SEQ ID NO: 859643 - DNA, 602 bp, Homo sapiens
agtcaagctgagagccaaatcaggaatgaactcccgttcacaattgtcacaaaaaaaataaaatacctaggaatatagctaactggggaggtgaaagatatctacaaggagaactacaaaccaccgttcaaagaaatcagagatgacacaaacaaatggaaaaacatctcatgctcatggataagaggaatcaatatcattaaaatggccatactgcccaaaacaatttatagattcaatactcttcttattaaactaccattgagatacttcacagagctagaaaaactattattattattattatttttttgagacggagtttttgctcttgttgcccaggctagtgtgcaatggtgcgatctcggcttaccacaacctctgtctcccaggttcaagcgattctcctgcctcagtctcccgagtagctgggatattacaggcatgcgccaccatgcccagctaattttgtatttttagtagagacayggtttcgccatgttggccaggctggtctcaaactcctggcctcaagtgattccccctgcctcggcctcccaaagtggtgggattacaggcctgaggcaccgtgcccggccaga

SEQ ID NO: 859644 - DNA, 597 bp, Homo sapiens
ttatcatattagttactcttcagatttgttttagaaaatagtcaccattaacaccttttagaattggttggtggaaagtttccaatcaaaatygtggtccacctctagcaagctgtaaaattttatgatctccaattagcctcagtttaaactctagtcaggcatttagcttcacaaaaactgaagtcagggatagtcagttttcccatattagtagagagctgggaagtgctgatgtgcacaacctgcagcctgaaatagttgctttttctaaataacagtaaaactgttgctctctgaggatggataggtggatgctatttgttgtttgcaaagcttagggaaccctgtggttgagattttttccaatacatgcattttttttccctttgcaaagggactttggataattgttaattttcccaagaatataattataattcttttattgtttaaatagagttaatagtttatctacagtttcactttctgcagtttcagttatccatggcttgaaaatattaagatattttgagagaaagaggaagaaaaagaggtgtcagtcacataacttttattacagcacatcgttacgtt

SEQ ID NO: 859645 - DNA, 597 bp, Homo sapiens
ttatcatattagttactcttcagatttgttttagaaaatagtcaccattaacaccttttagaattggttggtggaaagtttccaatcaaaatcgtggtccacctctagcaagctgtaaaattttatgatctccaattagcctcagtttaaactctagtcaggcatttagcttcacaaaaactgaagtcagggatagtcagttttcccatattagtagagagctgggaagtgctgatgtgcacaacctgcagcctgaaatagttgctttttctaaataacagtaaaactgttgctctctgaggatggataggtggatgctatttgttgtttgcaaagcttagggaaccctgtggttgagattttttccaatacatgcattttttttccctttgcaaagggactttggataattgttaattttcccaagaatataattataattcttttattgtttaaatagagttaatagtttatctacagtttcactttctgcagtttcagttatccatggcttgaaaatattaagatattttgaragaaagaggaagaaaaagaggtgtcagtcacataacttttattacagcacatcgttacgtt

SEQ ID NO: 859646 - DNA, 597 bp, Homo sapiens
ttatcatattagttactcttcagatttgttttagaaaatagtcaccattaacaccttttagaattggttggtggaaagtttccaatcaaaatcgtggtccacctctagcaagctgtaaaattttatgatctccaattagcctcagtttaaactctagtcaggcatttagcttcacaaaaactgaagtcagggatagtcagttttcccatattagtagagagctgggaagtgctgatgtgcacaacctgcagcctgaaatagttgctttttctaaataacagtaaaactgttgctctctgaggatggataggtggatgctatttgttgtttgcaaagcttagggaaccctgtggttgagattttttccaatacatgcattttttttccctttgcaaagggactttggataattgttaattttcccaagaatataattataattcttttattgtttaaatagagttaatagtttatctacagtttcactttctgcagtttcagttatccatggcttgaaaatattaagatattttgagagaaagaggaagaaaaagaggygtcagtcacataacttttattacagcacatcgttacgtt

SEQ ID NO: 859647 - DNA, 641 bp, Homo sapiens
ctttgtttctccctcctccccattccattctaggtcccaaaggtaactgtgtgtagtttgtgttatactaggatatttcctgtgcttttacacattccaggtatatggcaggaaaaatcctgagacatcaactgaggattattttcctcaggcatctttctacaacagaggcagataacgcatttcccctcatgccatgggagacagaccacagcaaaacagcaatgaccaaaagattaagatttttcatttaaaattttacatttgaaaaccatggtaggccaggtgtgatggtcacatgcctttaaccatttaggaggctaaggcaggaagattgcttgagcccaggagttcaagaccagcccggacaacatgacgagactcagtttctacaaaaaaaaaaaaaaaaaaaaaaaaagaaaagtaaagaaaaaaaaattagctgggcatggtggcgctcacttgtggtttcagctactcaggaggctgaagcaggaggattgcttgggcacaggaggttagggatacagcragccatgttcaggtcactgtactccagcctgggtgacagagtgagaccttgtctcaataaataaataaataaataaataaaatagaaaacccagtagaggccaaatgaa

SEQ ID NO: 859648 - DNA, 633 bp, Homo sapiens
aacatgccatttaaaaggcacaagccaggcacagtggctcatgcctgataaagtgagaccctgtctctaccmaaaaaaaaaaaaaattaaaaggaacaattaagaactcatagatatgcgcgtgcacacacacacacacacacacacacatacacacacagagatgaatgggtgggtgggtagatggatataggtaggtaggtaggtaggtaggtagatagacagaagacattagaagataaaaaaactcttccagaaatttcaacaaaattaatcaactcaggagctctaacatgctgttaataggagtttcagaaagagcacagaaaacactgggggggaaatgatcaaatacataagtcaagaaaatttcctagaacagattgaaaactaccatactgggtccagcgtaatgcataaaaagacacaacaaggccattattatgaaatttaagaaaaccagtaataaaagatcctaatatcttccagagggggcaaaaaagcaggttatgtataaagaatacaaaatcagaatggaataggacctcccaaaagcagcattgggacctggaaggcaataaagcaatggctttcaaaattcagaaagaaaataattttccatctagaattgta

SEQ ID NO: 859649 - DNA, 512 bp, Homo sapiens
atacagggtggagatgctggacaaacgaagggtgattcacatcccgggccagacaggctgggatggcatgaaacttcatcacactaatcagaatggtgtgcaatttaaaatttgtgaattgtttatttctggaattttccatttaatattttcagaacacagttgcccataggtaactgaaactatggaaagcaaaatcgtgaataagggggtactactgtacttctcttcctagtaatatgttcatgctgccaggatgcacatagccatgtgcgaagaaatataattttttagataaacctccctttaagcagaaggtctcaatcctatttcatggagaaaagacccacgtttatactaggactctctcaaccttctacatctaatctttagattcttctgcatgcctgccyatcattttaatcttctctcctctcataagtctgtctcatatctaaggtgaatccttccatatagtctctggatcccatcacctcctttgccctctgaga

SEQ ID NO: 859650 - DNA, 603 bp, Homo sapiens
gaaaaaatacttaaaaatgctctacttcagttttyttaagaaaacacatgtaggtggagagtgggaaaatagacacagagactgggaagggcgagcagtggcgggggggtggcaaagatgaagagaagcaggctaaagggtgcaaacatacagtaaaataaaagaaataaattcagtgtttgatagcagcgtaggatgactgtacttaacaaaaaggtattgaacttgaatgatgggtgctctgaataccctgacgtgaccaccacacattatatacacgtaatacattttctcatgtacctcatacatctgcacaaatttttaaaaaggctaaagcacatgccaggagcatctttaaaataaaatgtttaaaggaaaccccaatataaccatcacctggttcaaagcacagactttccagagtcctgtgtgctttccctatcagaacccctttcttgctgccaaaagtaactgcaaccctgacttttgtagccttttcatcgttgcttttctttctagctttcccacttcaaagcctaagcaatgtagtttagctttgcttttgaactgtaagtaaacagtgacttacgtgtggccttttac

SEQ ID NO: 859651 - DNA, 579 bp, Homo sapiens
tctccaccgtcatggcccagcatcggaatgttcgaggctgtgactgcgatgaagatcttgaagatgatgatcaccatggccagtctgtagaggatgattcttgtattttgctatcaacagctgctcagtttatttattcacagcgtgacaaaccttccgttgagcctatagaagaatacgatcatgaagatctgaaagaatctttcaattatgtttcgaaccatcagctcagtggatttaatcaagctcgtttttattcatgccttgatcacatgagagaaagtacttggagatgctgtgccagatgaaatattgattgaatcagttctgaagaacaagtttgatgtgcagaagcctttgtcagaggttctggaacaagatagcatgtagaatttgaaggacaagaatgagggaagagtatctacaggaaagatagcaaaaggtaaggagtcttattttcttcttctgaagtttcagctgataatgttcmaagttcttatcctcagttagcaaatcatttggattatagtagcaaaccctttgatttttctagctcagtaggaaaatatggattatctc

SEQ ID NO: 859652 - DNA, 523 bp, Homo sapiens
gggactatgaattcaattccatctcaatacaaatttcagcaggcttttttggggatagaaatcaataaggtgatttaaaatttatacagaatggcaaaatatatggattagcaaaaacagttttggaaaagaagaagtttggaagacttacactaggtgacctgaagattttctataaaggcacagtaaccaagataatgcagacgcacagaccaacaggaccgaatggtgtctcaaaatagacccgctcggccgggcgtggtgcctcacgcctgtaatcccagcactttgggaggcgaggcgggaggttcacctgaggtcaggagttcaagaccagcctggccaacgcagccaaaccccgcctctactaaaaatgcaaaaaaaaaaaattagccaggcatgatggtggatgcctgtaatcacagstacttgggaggctgaggcaggagaattgcttgaatctgggagacggaggttgcagcgagctgagatcgtgccactgcactccagcctgggtgacaag

SEQ ID NO: 859653 - DNA, 587 bp, Homo sapiens
ggctggcaggctggcaggctgggaagagttgtgctgaagctccagtcygagtccgtcggctgccgaaatcctctcttcctccatagggagtgtggccttttctctgaaagccttcacctgatcagatgaggccctcccacatccaatcaggtgaagcagatggcctgatttaaatcttaatctttaagaaaaaaaattaccttcacagcaacatttagaatatggtttgactaaataaatatctgagtaccatggcccagccacgctggagcataaatttcaccattcaaactcaagcatcgggattctgccacaccctgcaccaggccagaagcaggttctcaccaagagcctccaaagcacagccaggccctggcatcttgattccggcctggttaaacctggagcagggggactggctgagcccgtaggactccggacctacacagccgtgggaggagaaacatgtgcttctcaacaccacggagcttgtggtcactggttacagcagcgtgggcagcccacagggtaagcccttgatggcagcgggcctgctggggtggagaagcgctcaagtgggtgagatc

SEQ ID NO: 859654 - DNA, 626 bp, Homo sapiens
ccttattgttgtcacaaccccagaccctggagcgggacacagcacacctgtgccccatgaatatcgcggtgtgaatgagtaagtgacagaaagcacggatgggygattttaaagaatagggacctgtgggctgtgacgggcaggatgcctgcgccccagggctcacggtctcggcagggatgtggttttggtagcccctacatcgagtgaggacttctgtgataatgaccactgtcaatcacaagaaagaaactgaggcacaatgaacagagagagtttatttgggtcaaggttgaggacggtggctgggacattgggggtgctacctcggcctttgttacaagcaggttttaaaggcaaagcaggtaaggagtgggcggatacaaagtcctctgacaggagttctcattggtttaagagacagcatggatcggtgattggccgtcaccattgattctagaggatgagttacagggtccagcaggaggcactttatggctacccggtgtcagcctagagcccatacagctggcagattcaagaggtcgttctctagctcgagggggagtgggacgtggctgctgtcacattttaatgcctctctgggcctgataatttaacggagc

SEQ ID NO: 859655 - DNA, 504 bp, Homo sapiens
ccattggctctctctgatttcaaagctttyccatcatcccatataaacaccctgtttctattatgtagtcactcttcactcaccctgcctctggcccctggaacctccagttggctttccatctctgcggatttgcctgttctggacgtttcgtataaaaggagtcatacgctgtggggccttttgtgtctggcttcttccagtttcatccatgttgtagcatgtgttagcatttcatttttatggctgaataatattccattagtggacagaccactttttgttttccattcacctgctgatggacatttgggtagtctccatttttggctgtcatgaatgacactggcatgagcgtgtgtgttcgagtctttgtaatttgctggcatgagcgtgtgtgttcgagtctttgtaatttgattctcttggggaggtgcttgggtggaattactgtgtagctccatcttcagcgttttttttttttttttttttttttgaggcgga

SEQ ID NO: 859656 - DNA, 642 bp, Homo sapiens
caaaaaaatggaaaagaatacgtggggagagcgtggagaagtcagaacccttggattgctggcaggagtgtaaaatgccacagctgctacrgaaaacagttggtggttccttaaaaagttaaacatagaattatatgatccatatggtcataccacatacccttctaggcatatacccaagagaaatgaaaacatatgtccgtgaacaaacttctacacgaatgtttatggcagcattattcataatagcccaaaggcagaaacaatccaaacttccacccgtgggtgaatgaagaaatgtatgcgcgggaacattcgccacgtgccacagcatggtgagccttgaaaacgtggtgcaaagtgaaaagcggtcacaaaggtcacgtattatgtgattccatttatatgaaacacccagaataggccaattcatagagacagaaagcagatgagggattgccagtggctgaggtgaggaagtcagtggtgattattaaaagggtgttttctggggtgataaaaaccttttgaaactagagaggtgatgggtgcacagcaccgtgaatgcagaaaatgcctcagaatcataccctttaaaacagttgttcgttatatgaatttatttgaaaaaagaaaagggaa

SEQ ID NO: 859657 - DNA, 588 bp, Homo sapiens
gacacagcattttactctactgactaacaaacagtcatcaactacactcayaggatcaagatatttggcaactgacagtcatttgcattaacttgaattataaaacaggtttaattctggaaaataaggtagtcctggaagatgggcactgcacacgccggggtttagatgtcaagacagacaaacactgcgaaggggacccagccagccatggacgggtgtcgccggaagaaaggccggcctgaggacggacagctgggttctcacttcaggtgcctgaagagtttcccccacaggtgaccacattttaagctgcccattcggacacatccccctgtgggcgcacacgggtgggtatgggtttaggtgcagatgctggtttcggatgccaaggaatcctgagggattggggcggtttttgtgttttgcttcacattaatgatggaggattgaagctgatgttcaggaagtcaccacgtcctcagaacaaagctgggcagggccgagagccagccacacccacggtcacagctgggggcgtggtcagccccagtggcgagaaaccctgcaagctcagggccgctaccc

SEQ ID NO: 859658 - DNA, 541 bp, Homo sapiens
tgtcttccacaatggttgaactaatttacactcccagcaaaagtgtaaaagccttcctatttctccacagcctcgctagcatctattgtttcctgactttttagtaatcrcccttctgactggcgtgagatggtatctcattgtggttttgatttgcatttctctgatgatcagtgacgtagagcttttcttcatgtttattggcctcataaatgtcttcttttgagaggtatctgttcacctcctttgcccactttttgatggggttgtttttctcttataaatatgtttaagttccttgtaaatgctggatattagccctttgtcagatgagtagattgcaaaaattttctcccattctgtaggttgcctcttcactctgatgatagtttcttttgctgagcagaagctctttagtttaattagatcccatttgtcaattttggcttttgttgctattgcttttggcatttttgtcatgaagttgttggccgtgactgtgtcctgaatggtattgcctaggttttcttctaggattttt

SEQ ID NO: 859659 - DNA, 267 bp, Homo sapiens
ccatgcccttctcctttccgtagtgcaaaatggattgcaaacagaggycagggatgcagggcagggtggactgcacgtattggaagatgcagcacagaaccggagaagtgtgaacagggactgaggccaccagcggtgggatcccttagtgacaattctcgcccctgcctccaattcttggtgcactcctggcaaagcacccggagaaagcctgaggaacagcagcagctcccacttcccatcctcctgcaggtccactgagtggtc

SEQ ID NO: 859660 - DNA, 267 bp, Homo sapiens
ccatgcccttctcctttccgtagtgcaaaatggattgcaaacagaggccagggatgcagggcagggtggactgcacgtattggaagatgcagcacagaaccggagaagtgtgaacagggacwgaggccaccagcggtgggatcccttagtgacaattctcgcccctgcctccaattcttggtgcactcctggcaaagcacccggagaaagcctgaggaacagcagcagctcccacttcccatcctcctgcaggtccactgagtggtc

SEQ ID NO: 859661 - DNA, 267 bp, Homo sapiens
ccatgcccttctcctttccgtagtgcaaaatggattgcaaacagaggccagggatgcagggcagggtggactgcacgtattggaagatgcagcacagaaccggagaagtgtgaacagggactgaggccaccagcggtgggatcccttagtgacaattctcgcccctgcctccaattcttggtgcactcctggcaaagcacccggagaaarcctgaggaacagcagcagctcccacttcccatcctcctgcaggtccactgagtggtc

SEQ ID NO: 859662 - DNA, 651 bp, Homo sapiens
acagaaggtgacagaggtgggtagtggtcttcccctcaagggggtgagttgccactagctggggaatcttctggaaggcaaatgcatatgagctgggctttacaggaggcaagcgtttctctatggaagggcagaggactgtgggaggtaggaggtggggctggggcaaagggaagaggggagcagggaagtggggtgactgcacactgggagtggggaatcagatggaggagacgatgaggagttctgttaagttcaagatgccagtgccagtgaccagcgggcgatggtctctggcttgagggacaggatggaggggagactgtctgaggatggacaaagctggagggaaacagccaattgcaaaggcaggagggcggaagggggaggggagaggtgggatcagcactggtatagacaggcggtgctgcagcccagctcctctctctcctctgcctcctgccctcaggccccttcgaaggcccgaattaccacatcgctcccagatgggtgtaccacctcaccagtgtctggatgatctttgtggtcaytgcatccgtcttcacaaatgggcttgtgctggcggccaccatgaagttcaagaagctgcgccacccgctgaactggatcctggtgaacctggcggtcgct

SEQ ID NO: 859663 - DNA, 639 bp, Homo sapiens
gccatggtctcccgctcacccttgcctctgctcatggtctgttcttgggtcagtcaggtgccaagcagccagcacttccccaccacttttggtccacggatgcccttggccatctgggaagcctgtggaccccatctcaggagaatttttgcaaacgcataaaatgagacccataggattacaaaggcagcaaattatactgaaatacagttatcaaagtattaaacattcatcagtaacatagtctttagttaaaagcatttactggccaggctcatacctgtaatcccagcactttgggaggctgaggtgggaggactgcttgcctccaagagtttgagaccagcctgggcaacatagtgagacctcttctctacaacaaataaaaacagctgggcgtggtggcacaccagtagtcccagctactcaggaggctcaggcgggaggatcgcttgagctctggaggtcaaggctgcagtgagctatgatggcaccactgcactcagcctgggcaacagagtgagattctgtctcaaaaagtaaataaaaataaaagcatgtgttaaacgtattagtgacaccactcagtattaaggtattaartaacaggatcccgcctgacaaccactgttatttcag

SEQ ID NO: 859664 - DNA, 593 bp, Homo sapiens
gcgtgtctgcctgccagattccggggcagttgggcagaggccgggatcccccgcaacccggccttcgggccacctctgccgcgctcggkctctgcccaggagtccaggctgtgtttggccggaaggggccctgggcattttgagaacggcgttactaccgaagggtgggtggcggaactgaggagggagcagggctgcgacctcacccccacagcctctcgtcacctcgagagcctcagctgcgccgtctgggaaaccgaggctcagggctgcaccgagcagaggtgtaagggggacccaggtaggccacagggcaggaaggtagcgcgggcggaggtcgctcctgccgcggcccggcgccccgggaaaggcccgaggcacaggagagcaccgttcttgggaccggaaccgatgggtagggccacagggccaagcgtctgagaccgcgtcccaaaacccagcgcaagcccccgaccgccggggctcggctgcagtaggtcactccgggggacccggtgctccgaggcgagaagaaagcgggacgggcaacagcggcggcccacggtgcccgggaagggggcagtggtgggaaa

SEQ ID NO: 859665 - DNA, 565 bp, Homo sapiens
aagagtcagcatgaataattcagggctgggctgtctgtccccatccagaggaagaactgctgtgatggaactggaactgcacagcacagcgaggctggcacagggggtgggggccgcttggacgagcgctcagggcagttctggcttgagaaaacttggctggctgagccaagcacacggtcccggctcgcaccttcaaggacaggctgctcaccaccccaggcaacccacttgatgactggacagtgaccagggtcagagggggctcctgaccctaagaggacacttgctccctgcaccctcccacacagccacagctctccaggtcctaagaagaccccccagaagctgctcttcccacgccgatagccgggggcctgcacctggtcacagcttgggcagagacacaggtgttgcccaagaaacagcaaggtggcatgaagattggcatggcgaggcctcggctggaggggagggagtgagctccacaggccccctctgtcctgagacactctaggacatcacyggagccttgtcggctagctgcaggtcttaggacacaggg

SEQ ID NO: 859666 - DNA, 606 bp, Homo sapiens
tttagcatgtttcattcccgttgtctaaggagtctccgggttaggctggggccctgtgtccacagcgcacctgccagccttcacgcctttcccccatcatgcagcacatgccttcatgggttctaaggtgatcgtcggtaattgccattgaggcaccccataatagtctacctggtggacgctctggaatgtaaaccttcatcagacagctccattttccaggcatttgtttgttttatgagtggctatggtggattcccagggctgccatgcccagccccacaggcgggggtgttgagcagcagacacgtgctctccctcgccctgaaggctggaagtctgaaatcgaggtgttggcagagccaggctcccctgcaggcacaagggcatggtctgttccaggcctctctctcagccctggtggtcccttggcttgggggagcgtgactgtaaccttcccaccacgttctctctgtggacatggctgggtccaaacrtccaccttttatggggacaccggtcatgttggattaagggcctgcctgactctgatggacctcatctgaactaattacccctgcaatgaccctacttccaagtcaggtc

SEQ ID NO: 859667 - DNA, 569 bp, Homo sapiens
gtttcctcagccagcccagacaagtagctgggcggagcagggggccagaggatctctgagcccctgacttgtccccrcctgtgaggcttccatgctctgccaaggtgagggaggggacatggcacagtgaggctggggcaagggtagggagtggggccggaggacagtgtcagggttgagggaggcggcagagcactggggccagcctgcaggggggtccattctgtgggaagtgtgcttgtctcctggggtcacgggaatgctgggaacgcacttggcctggcctcagcggggacaggtcccacctctcctgagggatagagtgctcctgggacccatgttgcaaacatccccctcgatggaccccaagggtctctgggcccaggaggagctgcaagaggggccctggctgctggaggagggccccctgcctccagggtggggtccagccccgtgccacccttcaaggggtaggcaggtaggcttttatgttgaagggcacctgctgaccccgacctccctcttgactacagacccacgtggccaggctgcagtttgggctgaggaca

SEQ ID NO: 859668 - DNA, 633 bp, Homo sapiens
aaacctcaaaagtagggaagctgacagtgcagccttcagtctgtggccaaaggctcaagaktccccggcaaaccactggtgtaagtccaagagtccaaaagctgaagaacttggagtctgatgttcgagggcaggaagcatccagcacgggagaaagatgaaggctggaagactcagcaagtctgctctttcctctttcttcttcctgctttattctagccccactggctgctgattagatggtgccaacccagattaagggtgggtctgcctctcccagtccactgattcttatgttaatctcctttggcaacaccctcacatacacacccaggaaaaatactttgcatccttcaatccaatcaagttgagacccaatattaaccatcacagcacacataagatccttcatgaaccctctaatgctctctggagtcaagggcacacagggcttctcatcatggccctgacaaaaacctgaccctccgtgattttatgactttgttcttgctgtaacgttctcatcctttcttctctgcctggtgagttcctcagcttaaatgttacctctattgtgatgcctaactccaccaggcaggtaagctcttctccactctgtatattcgcagcatt

SEQ ID NO: 859669 - DNA, 613 bp, Homo sapiens
ctccttcctttgttctcccctgcctttgcctcttttaaaaagttctaagttgctagccaatcaaggcaaatacagaatgtgaggtcccattccagccagtagaaaccggacacagmagtaaggtggaagcgtcaggttataaatgaccctgtctcctttgttcagtgtactctcatggcaaaactgctggtgagtgtaccctttctgcagaaagtataaaaatagctttgctgagatttatgttcaagtgctatttctttacagcactgaagaacaagcgtttcaaacagatatcacggcacaattgccactgtctgctcttccccctggcagagttccatgtgggtgaaagagataatccagtatatatcaaatgcctgagcatagtagatgctaactaaattgtcattctattcttattctacagtaatttgcaagcagatggaacttcaatatggcaatagagaaagaatcaattagaccagagtctcctcaggaagactttctataggtaagatagaaaaaagaattgtagtttccattaattggcaatagtaggaagagtattacagaataggggaaaataggaggataattgtaatgcccatttgct

SEQ ID NO: 859670 - DNA, 569 bp, Homo sapiens
tgccaagcctttgcttgctactactaaggttgcaaaaatgaatcattcatgttcctaatctggagaaattcatgatctaattgtggaggccrttatatatttttaatgtccatatcatgtgataagaactaataaaagtggggactaaatggcaaaagagtatagagaaaatgtagcctatcttagaattggacgaactaagtcctgtgggctgaatccagtctgcagcctgtttttatgaataaagttttattggaacaaagccatgcttatttatttacatattgtctgtgcctgctttggcactataatggcagaattgagtagttgcaacagagactatattacctgcaaagcctaaaatatttactctctggtctttgacagaaaaagcttgttgactctggatctacctaggtatggctgaattccaggaactgtaaatccaaatttgggacaattgttcagaatttgttagtgtatttggatactgacatttctcctagatttatttcattttctacctggattttctctttatttttattttaaaatatattttactttcc

SEQ ID NO: 859671 - DNA, 520 bp, Homo sapiens
ctatcatttacttgactaagataccagatatcttcaaactcttgggctgcagctaaaactgcattgttttcattaaaggccagggtttgatctaacaatagcatgacatctctccaagtgagatcaaaggtttgctctaggctgtgtaggacatctatatacctatcgggattgtctgaaaacttccccaggtctgccttgatctgctttaaatcagagagggagaaggggacatgtacccaggttgggccaaattcccttccccctacagcttgaaggggacataaccgatagcccaggggtttttgtggtcccttggagatttctttgcttgcttccttctgggtgggggagattagaggaggcttatcattaataggaaggggagctgtagaaaggctagtatatggaggtaagctgagaggttctgctgtgggatgtaaattgcatgctttgcatarttgtggattctccttcaatgaaaagaaagcttgggcataaggtatttcactccatttgc

SEQ ID NO: 859672 - DNA, 568 bp, Homo sapiens
aaaaaaaaggcagaccatgattgaagctcatgttgatgtctagactaccaatggttaaagaaaacctcagcaccaacaggtctaagatgatggaaatcatgacccaaggccgggcgcagtggctcacrcctgtaatcccagcactttaggaggccaaggtgggcggatcacaaggtcaggagattgagaccatcctgggtaacacggtgaaaccccgtctctactaaaaatacaaaaaattagccgggtgtggtggcgggcacctgtagtcccagctactctggaggctgaggcaggagaatggtgtgaacccaggaggcggagctggcagtgagccaagatcgcaccactgtactccagcttgggcaacagagcgagactccatctcaaaaaaaaaaaaaaaagagagatgcagacaaataacttgaaagaagtggtggagaaaattattccagacagcactggagaagacacagaaatgcctgcaaatctatttatccgctccacgatgtcttctctgtgaggaaagttaaaatgctaaaaacactcaggtttgcattgggaaaac

SEQ ID NO: 859673 - DNA, 641 bp, Homo sapiens
aaatcatatgatcatcttaattgatacagaaaaatcatttggctgaattcaacactgcttcatgataaaaattctctcaacaaactaggactaagaaggattttaactcaccaatttgaaggccgtatgtgaaaagcccatggctaacatcatactcaatgatgaaaagctgaaaactttccctgtaggatagggaagaaggcaaggatgcccgctctagtcatttctattcaacatagaactgggagtcctagccagagcaatttgacaagaaatagaaatgaaggcatctaaattggaaagggagaagtaaaattttttgtttacagatgacatgatcttataattagaaagccctaaagacttcacacatacacataaacaaaacagaactaataaaaaaattcagtaaaattgcaggacactgaatcaacataaaaaatcagctgtatttctatacactaacaataaactacctaaaaaggaaattaagaaaataattccacttatgatagcatcaaaaagaataaaatacttaggaataaacttaactaaggaagtgaaagatttgtacayggaaaacaatagaacattgatgaaagaacttaaagaagacacaaatgaatggaaagatattctgg

SEQ ID NO: 859674 - DNA, 641 bp, Homo sapiens
aaatcatatgatcatcttaattgatacagaaaaatcatttggctgaattcaacactgcttcatgataaaaattctctcaacaaactaggactaagaaggattttaactcaccaatttgaaggccgtatgtgaaaagcccatggctaacatcatactcaatgatgaaaagctgaaaactttccctgtaggatagggaagaaggcaaggatgcccgctctagtcatttctattcaacatagaactgggagtcctagccagagcaatttgacaagaaatagaaatgaaggcatctaaattggaaagggagaagtaaaattttttgtttacagatgacatgatcttataattagaaagccctaaagacttcacacatacacataaacaaaacagaactaataaaaaaattcagtaaaattgcaggacactgaatcaacataaaaaatcagctgtatttctatacactaacaataaactacctaaaaaggaaattaagaaaataattccacttatgatagcatcaaaaagaataaaatacttaggaataaacttaactaaggaagtgaaagatttgtacatkgaaaacaatagaacattgatgaaagaacttaaagaagacacaaatgaatggaaagatattctgg

SEQ ID NO: 859675 - DNA, 616 bp, Homo sapiens
tgacacctgggttatagaagtttctcttgagtatgggtctacattagtttcttctgtgatctccaaaaatatttacaagcatagggccaattgcagatcagtttcttgaactgaagatccttataccattggraaggcatatattcaggtttcatatttacgtatagctcagatttgggattttatgttctcataggaaattttctttttccactctagcatcaaagcagaaataagattcattttcttattttcattggcatcatttttaagttcttctttgagggttagctcttcaagttgtgtggttctcagtcccagcttaaatctctgcgtgcacatgaagattccagcccccagctgtcatgacacatgtctgaatctgattccttttcaggctgccttcatacagcatgaaacctaactcactgtctctaatttcttcgtgtttggtacctgactatctcttcttttgaacttagctattaatttttgtgagggcatgagggaaaggtgggttatagtttacccaaaattgtaatggcttttactggagtgtggtagaaatgtagttggaatggttgcattatctcaattcaacattgtaccagaactg

SEQ ID NO: 859676 - DNA, 616 bp, Homo sapiens
tctgtcttgaaaattaattaattaattaattaattaaataaagaatggcattgtacctaaaggtctcttgctgtcatttcagctataattaagctatttagaacacaattctctctggaaatgtagagtttcacacctgatccttggttcatgacatagcatatgttagaaacctccaggaatccatagaggccattccttggaggatctggggaagaggcagaagagtggtattttccattacatataatgacaataataggtaacatttatgaagtgtgtactaaattcctggcatcatgctaaattccataaatgcattatctccttttatgttcaccacaattctatgaagttggtactgttaccatctctgttgtacagatgaggaaactggggcttagagaggttaactaactgtccaaacaccccacagtcaattggcagagccacatgcaaacccagagctgcctgactccagagctttaccacagcatacacattgcctctcagagatgaaaggtgcaaaaagtaacaagaaacaccyttagatagcactaatctttctcttgccaaacttgtcccaacccacttctttctagcaaataccatacta

SEQ ID NO: 859677 - DNA, 615 bp, Homo sapiens
atgatcatatggcttttatccttcattctgttgatctgatgtaacaccttgattgatgtgtgtatgtagcaccatcctcgcaacccagggataaatcccacttggtcaagatkaatgattgttctaatatattgttgaattgggcttgctagtatttggtggaggatttttgcatcaatatgcatcagagacaatggcctgaagttttctttttctttcattctttttgttttctgatgtttctttgtctggttttggtatcagggtaatactggcctggtaaaatgagtttggaagtactctgtcctcctctcctttttggaatagtttgagtaggattggtatcagttcttctttaagtgtttggtagcattcagcagtgaagccattgggtcccaggcttctctttactgggagagtttttcatatggctttgatctcgttacttgttattggtctgttcgggttttggattcaatcttggtaggatgtattgtatctaggaatttgtccatctcttctaggttttccaatttattgacatatagttgctcatagtagtagccactaatgatcctttgaatctctgcagtatcagttgtaatgtctcctttt

SEQ ID NO: 859678 - DNA, 541 bp, Homo sapiens; identical to SEQ ID NO: 844705

SEQ ID NO: 859679 - DNA, 667 bp, Homo sapiens
ctagtggagcaataaaatagagtcagaagagaaaggacctggtgaagaagtgacaaggatgtgtctcaggacactcaattaatgagtgacttttcactgaccacttagccaaagacttttatgccctaacttatctgatattgtggggaagggttcagaggggacactcacccattcacagtagccaaaattgtgctgactgatcttccacatgggacccggatgaaggtcttccccaggttcccttaacttaggttgacttagctgtcacacatgaggtgcaagtgcagggattgtttacctgccagcctactggtaggagcagcaggtcccattcaaggtggtactactgtggacacttgcctgttcactcagctccactgcccactgggaaagatgatggatctggaaagggcctttggttagtgttatggctttgcggtgttagcagctctttattgttacagcctcagggttatagctctgcagcttttggttgccatctcaccatctcttgccaattgctgcctctccactgatcrctgattgccgtcatcgccactgtctcaccatcttacctctccaccaatttccatctctgctctctcactctctctcacttgctgtctttgtccctttgttggtcaccagataacacagggcaggt

SEQ ID NO: 859680 - DNA, 667 bp, Homo sapiens
ctagtggagcaataaaatagagtcagaagagaaaggacctggtgaagaagtgacaaggatgtgtctcaggacactcaattaatgagtgacttttcactgaccacttagccaaagacttttatgccctaacttatctgatattgtggggaagggttcagaggggacactcacccattcacagtagccaaaattgtgctgactgatcttccacatgggacccggatgaaggtcttccccaggttcccttaacttaggttgacttagctgtcacacatgaggtgcaagtgcagggattgtttacctgccagcctactggtaggagcagcaggtcccattcaaggtggtactactgtggacacttgcctgttcactcagctccactgcccactgggaaagatgatggatctggaaagggcctttggttagtgttatggctttgcggtgttagcagctctttattgttacagcctcagggttatagctctgcagcttttggttgccatctcaccatctcttgccaattgctgcctctccactgatcactgattgccrtcatcgccactgtctcaccatcttacctctccaccaatttccatctctgctctctcactctctctcacttgctgtctttgtccctttgttggtcaccagataacacagggcaggt

SEQ ID NO: 859681 - DNA, 585 bp, Homo sapiens
tctaggtgatacagacgtgtattgtgctattttctactgggtaacaaacaaacctttgtcatttataatttgtatatatttttctcatccatctttcttcttcaccatagaggttgcatgctgacacaaccaaaaatatatgtaacactgaaaacaaaaacaagattacgcccaggcatggtggctcacacctgtaaccccagctctttgggaagccgaggcaggtggatcatctgaggtcaggacttccagaccagccaggctaacatggtaaaaccccatctccactaaaaaaaattagccgggcgtggtggtgcatgcctatagtcccagctactcaagaggctgaggcaggagaattgcttgaacccaggaagtggaggtttcagtgagctgagattgcatcaagatcaggccactgcactccagcctggatgacaggacaagaatctgtctcaaaaaaaacaagattacctttatttctaccacccaaacacaasacgcaaaagtcctatttcttatgtattttctgctagtctgcattttgaccctgtatatgtgtacatgtcacatataggcatgtgt

SEQ ID NO: 859682 - DNA, 585 bp, Homo sapiens
tctaggtgatacagacgtgtattgtgctattttctactgggtaacaaacaaacctttgtcatttataatttgtatatatttttctcatccatctttcttcttcaccatagaggttgcatgctgacacaaccaaaaatatatgtaacactgaaaacaaaaacaagattacgcccaggcatggtggctcacacctgtaaccccagctctttgggaagccgaggcaggtggatcatctgaggtcaggacttccagaccagccaggctaacatggtaaaaccccatctccactaaaaaaaattagccgggcgtggtggtgcatgcctatagtcccagctactcaagaggctgaggcaggagaattgcttgaacccaggaagtggaggtttcagtgagctgagattgcatcaagatcaggccactgcactccagcctggatgacaggacaagaatctgtctcaaaaaaaacaagattacctttatttctaccacccaaacacaagacrcaaaagtcctatttcttatgtattttctgctagtctgcattttgaccctgtatatgtgtacatgtcacatataggcatgtgt

SEQ ID NO: 859683 - DNA, 567 bp, Homo sapiens
atccccaagcggggaccgggcacctccagggaggaatgtacaggggagtggggtctgtacagtgctctgcacacctcaattgctaacaggacaaaaggcccttggacgcagggcttctctgtcccttcgctcgcttctgaagcgcctcgtgagaagcatccctccatggccctgcacgtggccttgatgcctgggacccagttccgtggcccaccctgcctgccacgacccctccccaattcccccacacaaaggggtctgggcaagtgtttattcttctcctgccaccaaagccaggtccacttctaagctgaatgtgcagcctgtgccaccctccacctctgtctccccttccaggccaccccccccgccccccgtccagggcagcccctgcctgtgacctcaggaaggagagaccaggagcatggccagcggaagccgaggcggccacccctcttcccacccagcccaaggcagcgccctgcccctcctcccggaggctgcggactcccttgccccccaccctgcccacmctgcaggccagggctgggaggcgtgctccatggc

SEQ ID NO: 859684 - DNA, 600 bp, Homo sapiens
ccaccatgcctggctaatttttttttttttttggtattttttgatacagatggggtttcaccaygttggccaggctggtcttgaactcctgacgtcaagtgatccactcgcctcagcctcccaaagtgctgggattacaggcgtgagccactgcacctggtcaatctgcatctcactcttatctgtctttaccactctactaaaatatctcatgagaagatctcttaagatggggacattactaaattcagtggacgcttttccacattgattttgcttgatcttgtagcagttgtcattattctttgttttttttttttgagacggagtcttgctctgttgcccaggctggggtgcagtggcgcgatctcggctcactgcaagctccgcctcccgggttcacgccattctcctgcctcagcctcccgagtagctgggactacaggcacccgccaccatgccctgctaattttttgtatttttagtagagatggggtttcaccgtgttagccaggatggtctcaatctcctaacctcatgatccgcccacctcggcctcccaaagtgctgggattacaggcatgagccatcatgcctggc

SEQ ID NO: 859685 - DNA, 559 bp, Homo sapiens
ccaagggagctcaccttataaatgcaaacctgtatcatgataataatgttgtattactgtacttcctaatttcagaacgacatctcatcatagtcatttttaaaatatggaaacaaacgcacgagctttgggaaaaggtagaaatgacactaggaaaacaacgggcacccaacagatacaaacaaaaagccttcaccttacattgtggcctctggcggtataaacttggtccccaccaggcttctggaagaagtgttgtctgagtagggactcagaaaataaaagggagttttcaacaggcccaaagcagtttcaggcttaacaaaggccacattgtataaaattcttctcaactcctaaagctggaggatccttggaagtaaaaagcagtcagaagtcaggtatcaaacagagaccggggcttaaatccaggtatgttttcttggtcttgartgattaacgaaatcaacaaaatgtggtcaagagctggaagcaacccattatgacatgtatggttcatcaaggacatgttcagcaacagataaatgggcaaaccaag

SEQ ID NO: 859686 - DNA, 476 bp, Homo sapiens
ggagaactccggcttttcgtctgcgtgagctggagaagagccgaaggtttctgcgcacagcacggacctgcgtgcctcagctttaaggaaatcaccgtggccgccgctgtgaacgcagagaagggcgcgagcgtgggagcaggaacccaaggcggtgggaaacggtggggctttctgagtgtattggaaagtagagcccacagatctgctgcagaccagaaaggggcgcgagaaagagcggacagaggcagacgccggggctggcggcgatggagcagcagtcggaggacgcggaaggcctgcgagagtcgcccgcgcccagcgccggccttcgggtcccaccttgcgggtgatgttgtgcacgtaggggcacgtgttgcaggmgaagcggtggcagcgttgtccctcctccacgatcagcccgttcccgcagccggggcagaacagcagcatggtctcgaactccgcaggctcca

SEQ ID NO: 859687 - DNA, 620 bp, Homo sapiens
atttaacatctacttatttggaaagcagtttctcctttctgttatatcagctaacaagataatttcaaaaagcattaccaaaatacatataaataatgagtcatcatcttacagacatgaagtatacacatactgaataaaaataaacttctgcaatgactattttatatcacaatatcacaggacatctttacatggcacatattattcatttttatcaacaaacttagattcaggccgggcacggtgactcatgcctgtaatcccagcaatttgggaggttgaaatgggtggattgcttgagctcaggagttcgagaccagcctgggcaacatggtgaaaccccacctctaccaaaaaatataaaaattacccaggcatggtggcgtgcacctgtagtcccagctactcaggaggctgaggtgggaggatagcttgaacccagaaggtggaggttgtagtgagccacgatcatgccactgcactccagcctgtgcaacagagtgagaccctgccaaaaaaaaaaaagtagaaaaattgagatttcattcttatttagcaatctagacactaaacrtattttttcaacaaaaatcagtgttatcaaaaacaagtaagtt

SEQ ID NO: 859688 - DNA, 603 bp, Homo sapiens
caatggtaatgggatcatttgtattccaaacttcagcatcatgcaatacgccccaagtaacaaacctgtacatgtaccccctgaatcttaaaagttgaaatgattttttaaaaagatttgtggttccaattttaataatttttacttgctacagtgagattggaaaaggtgtctaaagaaaagctgagaagaaaggcggcttttattgagccacttaatatatgcttcatgcatttacatatattatctaatttacttctcacaatagcataaagaaactattattattattttcagtttaacagaggaggggattagaactcagaggcattccctatgctgcctaatggggcacaacactaagaatcaagagccagaaatcaaatacaggcttttcttacattataaccccaggatctttccaagattgcaagtaattacaatgatgataatgttattaataaaaattactggttcatgtgcatgccttttgcatcatttaagtragccctattaagattggaagtctcacctgcctagggaaaatcacaggctgagtgaaagctcttggtaatctttacttcaaaaccaaaatgattcgat

SEQ ID NO: 859689 - DNA, 631 bp, Homo sapiens
aatatactagggatattataaagatagtgcatgcaaaacactgkaatacaatgtctgtctcacattaagtgtttaataatgttacctgtagctctataaggtgtggctcaatgaggtttaaaaaaatgaaaaaagtcaattaaagcagtaaataggagtctctctgactaacaaaaaaaaaaataaaactaagtaaagtagaaagctttgctttgaggtttcctactataccatttttgggaaacttctcaagggactccatttcattttgacacattgcaaatgatatagaagttctgttaatttgaattctgatagaataagaaactctaaaagtaagaatgagtctgttcataccaaataggcttccttagaatacacaaataataataagtcagtgaagcactgacctatttggatggcaaattattagcacaggtaaatagtttccaaaatacctggaagataaaaatgtaccaaagaagtaacccaacagaggtctgcttctccaaaggtcaagcccttgtcagaatataaaattcatggcagatggagaaaaataggaacatgttgtcagcttggatcgaattggctatattattattttttatttttgccaatttccaatgct

SEQ ID NO: 859690 - DNA, 567 bp, Homo sapiens
tgcattcgctgagtaatctgaacaagtctctttcctaagcttcagtttcctcgccaggaaatggtagggataaaagaagattatgcaagttaagcatattaggttggcaaataatcaactcttaataatgggaattactattcctaaaagaaggattgtgttttaatccttgcaattcaaataattttctagggtgtacactaatgtgggcaacttatcactgattttaccttagttgtcgaggctccttttgatctgcaggtatacaattccttttggtgcttgacaattttccttgagtttcatcatcctagggatgaagcagccaacaccctgggccttgcagtatctagagcccatagttttcattaactttttccaacaacacctcagccactcaatcccaggctaacatgccaaaaaaagaaccccaaaaagggcctcatcgaaaataccaaatctctaacatctcactcctcaactctagccttttatcctttcataacatttggacaaagactctgtgmtcagtgcaaatttcctaacctcatcataatttccagttta

SEQ ID NO: 859691 - DNA, 643 bp, Homo sapiens
gtttgctacaaatattccttatgtgtttgctaaaaatsagtcattatatacgtgattgaatgacagtggatttgtgctatgtatatctagaagttgatcggttggtcagtgatattgaccattcactgcatgtgggggcagggatattataccaaagtacaaggaggagtaggaagtccaagcctcttaatatattagcaatttaattggtggggtaggagaaaaaccatgaaaaatatccaatagagtcttaaaacaacatttaaatacagttgatgggactggagaatgccgagtagatccaaggatggaactgaacccttgcccaatttactttgttttcatcgaagtggcatatggtgctgtgtgtttggatcaggtggtaccttgcgggtaacaatgagtgtatttcatctgcccagtggctaatgctgtcttctggtggcagagagccagaattcttcctggaataggcctggcttgtggtatgaggctctctgggctttgcccctctgccaggcccactctgcattctatcccttattatctaggcctgaagagactatgctgagtgtgagtgaacaggtgtctcaggaagtccatcaaggccttaaggacatgggcctcactactctgagcagtg

SEQ ID NO: 859692 - DNA, 614 bp, Homo sapiens
cccaggatgtaggacatggaaccaaggaatatttttggaaatctgaggttaaatgtcccctgctgggtttcagacttacatgggagctgttgctcctttcttttggccaatttctccctttgggagtgggaatgtctactcaatacctgtaccaccattgtaccttgggaataaataacttgtattgatttcacaggctcataggctaaaggaacttgccttgagtttcagatgagaatttggactttggactttgagttaatgctagaatgaactaagacatttagggactactggaaaggagtgattgtattttgcaatgtgaaaaggatatggtatttgtggggccaggggtggaatgatatgatttggatgttttctcccctccaaatctcatgttgaaatgtgatcccaatgttagaggttgggcctggtgggagaagtttgaataatgggggtggatctctcatgaatgactttgcrccattcttgcagtaatgtgtgagttttcagtctattaattaatgcaagatttagttttttaaaagagcctggaacttcctcctccttctctttctcctactctcatcatgtgatatgcctgctcccccttt

SEQ ID NO: 859693 - DNA, 575 bp, Homo sapiens
agcttacttagccatgtgaaccaaactttcattgtggaggtgtccaaactcttttcaatgacattatccattcacagttaaatgaagcaagagaataccaggaggcactcaagtagatcacctggtttcatatgtattcctttcttactcattttactaaagcagccctacccctcctacacatcatagtcaattactcctgccacatgtggattccccttcttgtgcggcgattcctggatatcagtagtccaatccgtgttcaaaccactgctgtgatccttgtgggccactacgatggggagtaggcacactcctgctttcacctcttattcctaatcccattcttccaattagatctaaagcctaacgtataggtctgtgatttaatgtatacactgcatcctggagaacggcacccaattttttcagggtttacttttattggtgctttatctttgccttcagaaktgttctgtgaggtcagctccttctggatggtgcagtatttgatatgataagtggatcctcttgttctggacccatttgtgccccttctttactatgaagtgact

SEQ ID NO: 859694 - DNA, 575 bp, Homo sapiens
agcttacttagccatgtgaaccaaactttcattgtggaggtgtccaaactcttttcaatgacattatccattcacagttaaatgaagcaagagaataccaggaggcactcaagtagatcacctggtttcatatgtattcctttcttactcattttactaaagcagccctacccctcctacacatcatagtcaattactcctgccacatgtggattccccttcttgtgcggcgattcctggatatcagtagtccaatccgtgttcaaaccactgctgtgatccttgtgggccactacgatggggagtaggcacactcctgctttcacctcttattcctaatcccattcttccaattagatctaaagcctaacgtataggtctgtgatttaatgtatacactgcatcctggagaacggcacccaattttttcagggtttacttttattggtgctttatctttgccttcagaagtgttctgtgaggtcagctccttctggatggtgcagtatttgatatgataagtggatccwcttgttctggacccatttgtgccccttctttactatgaagtgact

SEQ ID NO: 859695 - DNA, 612 bp, Homo sapiens
agaactcattctaattaggagaatgagataataaataagtaaatatctgatatgtcagatggtggtccaggctatggacaataataacataaagaagcaaaataacagttgttmgggtggggtgacaggagaacagagaaatagttataatctcacatttttgtaaaatagtttttcacctctcttctgaaatttgcctttaccatcctgttatgtatgtttacctacatgctttttggagggaattgggcaggatatatagtaggtaaatacatatatttatcccatcataataattcaaaagtcttttgactggttttcagggtactctgtgatgattaattttaggtgtcaacttgactggattaagagattacccagatagctggtaaagcattattccggagtatgtctatgagggtgtttccaaaagagactgtcatttgaatcagtggaatgaatacgaaagacccaccctcacccaatattggtgagcactgccaaatcggctgagggcacagacagaagaaaagtcagaagaaaggtaaatctatatgtactctctgtcttctggagttgggacacccttcttctcctgcccttggatatcag

SEQ ID NO: 859696 - DNA, 542 bp, Homo sapiens
atgggattacatcaaaccaaaaggcttctgcacagcaaaagtgttgcrggaagtcagggaccccaaacggagggaccagctgaagccatgacagaagaatgtggattgtgaagattttatggacatttattagttccccaaattaatacttttgtaatttcttatgcctgtctttactgcaatctctaaacataaattgtaaagatttcatggactcttatcacttccccaatcaatatccttgtgatttcctatgcctgtctttactttaatctcttaattctgtcagttgaggaggatgtatatccttccaggaccctgtaataattgcgttaactacacaaattgtacagcatgtgtgtttgagcaatatgaaatgtgggcaccctgaaaaaagaacaggataacagcaattgttcagggaataagagagataaccttaaactctgactgtcggtgagccgggcagaacagagccatatttctcttctttcaaaagcaaatgggagaaatatcactgaattccttttctcagcatggaa

SEQ ID NO: 859697 - DNA, 398 bp, Homo sapiens
aatataagatttggaactgtaaaattcctagagaaaaatatataaaaatatcttcttgatattggtttttgaaattatttattgaatctgacactaaaagcacaggtgacaaaagcaaatataaacagtaagattatattaaatagaagcttcttgcacagaaaaggaaacaatcaacaaactgaaaagcaacataggaaatgggagaaaatacttgcaaactgcatatatgataaggggttaatttccaaaatatataaagaaaaacataataacaaaaacaaattttaaaaaataaccttattaaaaatgagagaaagacaggagcagaaatactgcmaataccatgtgatgatctcactcagatgaaatgttacaagtcgttctcatagaaaaac

SEQ ID NO: 859698 - DNA, 539 bp, Homo sapiens
actaaggctccgtgaggtcgtaagggtagggccccgatcttatggatccctgtaaggagagaccacagggagcttagtgcccatgtcccctctctcctcatcatggaaggaggcagagagaagrtggcatctgccaaccaggaagaggaccctccccaggagctggactgaccggcaccctgatcctggacttatcagcctctagaattgtgagaaaatgcgtttttgttctttaagccgccctgcctatcgtgtcgtgctatggcagccaggcctgaccactgtggacagtgttcatggtgattcagagaggagtggctgggggcgcacccaactggaaatggactttaacccccatcagacagaactgcactggcctgtggaatgaggagaaatcagcctgtttcggtcaagctccagagatgtggggattattgttttggcagcgagaggcatttccctgactcatggagaaattggtacttaccttgggtgtttccattaaataaggagggaggtgagatcagcttcaaggtcag

SEQ ID NO: 859699 - DNA, 590 bp, Homo sapiens
gtttaaggagcatttatccaccaccaggagacaaatggtttgaatgggtaagtcacagaagttctaaacatgtgaaaaacattcagcctcacagagattttaaaatgcgaataggagcaattatgaaagttttttcacctttcaaattggcagtttagcaagacaatatttgatgttgggaagagtgaagtgaaatggtgatattttttgctgctggtggaaatagaaacctgaattgcctctcaaaaggaatgtggtgatctaagagacgagagttaggagtttacactccttaataccatcacgcttccaaaaaccatcctcagagtagctcagagatgcaggcagagatgttcacgcaaggatgttcaccgcagctttcacaaatgagctctcagccacctgaaggaatctggccgggagaaacagcccagcacagcccagcctttcatagggatatttagctaaatattagggacctccttcttcctgccggacaccagtttctaaaaagtgtatatagatttgcaagtaaaagattcggarttctgagggaatttgctcaggagattatagatacctgctttcta

SEQ ID NO: 859700 - DNA, 642 bp, Homo sapiens
ttttcatttcaaatttatttatttctgctctaattcttattatttktttctattaatttgggttttgatttgctcttgcctttctagttctttaataggcatcattaggttgtttatttaaaatttttattctattttcttgtatgcacttatagctgtatgcttccctgttagtaatactttcattatatcccataggatttggtatattgtgatttcattatcattggtttcaacaatttttttaaatcttccttttttcttcgacccactggccattcaggagcatattttttaactttcatgtgtttgtattgtttctgaaattactcgttattgattttcagttttattccatcatgttcagagaagatgcttcgtattatttctattttttgaatgtttcaagacatgctttgtgaccaaacatagtctatccatgagaatgatccatgtcctgaagaaaaaaatgtgtattccatagccattggatgaaatgtcctgtaaatatctattaggtctatttggttaatagtgcagactaagtcttatatatatttttttctgtctggaagatatgcccaattctgaaactattgaaaatggcatgttcaagccttcagcttttattttttggagtct

SEQ ID NO: 859701 - DNA, 477 bp, Homo sapiens
tgtgtttgtattgtttctgaaattactcgttattgattttcagttttattccatcatgttcagagaagatgcttcgtattatttctattttttgaatgtttcaagacatgctttgtgaccaaacatagtctatccatgagaatgatccatgtcctgaagaaaaaaatgtgtattccatagccattggatgaaatgtcctgtaaatatctattaggtctatttggttaatagtgcagactaagtcttatatatatttttttctgtctggaagatatgcccaattctgaaactattgaaaatggcatgttcaagccttcagcttttattttttggagtctttcttttgtaarcataataatatttgctttatatatctgggtgatacactgttggatgcatatgtatttacaatcgttatatcaacttgttgaattgacccctttatcactatacagtgaccttcttctgtcttcttac

SEQ ID NO: 859702 - DNA, 477 bp, Homo sapiens
tgtgtttgtattgtttctgaaattactcgttattgattttcagttttattccatcatgttcagagaagatgcttcgtattatttctattttttgaatgtttcaagacatgctttgtgaccaaacatagtctatccatgagaatgatccatgtcctgaagaaaaaaatgtgtattccatagccattggatgaaatgtcctgtaaatatctattaggtctatttggttaatagtgcagactaagtcttatatatatttttttctgtctggaagatatgcccaattctgaaactattgaaaatggcatgttcaagccttcagcttttattttttggagtctttcttttgtaagcataataatatttgctttatatatctgggtgatacactgttggatgcatatgtatttacaatcrttatatcaacttgttgaattgacccctttatcactatacagtgaccttcttctgtcttcttac

SEQ ID NO: 859703 - DNA, 570 bp, Homo sapiens
ctcattcacattctcaacagagtcttttagtagcgaacagaactctcctctcgtaaagaaacagtgcgatttctatcataattccagtggttaatcttttgcttgaaatttccaaatattttcttacatgccctttaagaccataaatacagttttaaaacattccacagttgactaaaagcagcaaagatgatgattctaagagacttccttccttttcctcggtacgaaaactatcctcattgtataatgcaggtactaaggttcgtgacctcttttaagctttatggtacttcttttttctgtggagtgtggcttttatttacatcctaaagagtatgtcattaattatccacttcattatctcacttatgtcctaacacaataatgaaatcagcaaattgagagtatttgagattaacaatctcaaaatagcaaaacaaaatgaaacaaaaaaaacycttgtttactaaattctaggttttaaaaattatctttggtataatggcttctattagcacaatccagacaccaccaaactacctattaaatctgccagaaagccccgcg

SEQ ID NO: 859704 - DNA, 517 bp, Homo sapiens
ccgggctggtctccagctcctgaccgcgagtgatctgccagcctcagcctcccgaggtgccgggatggcagacggagtcscgctcactcagtgctcaatgttgcccaggctggagtgcaatggcctgatctaggctcactacaacctccacctcccagccgcctgccttggcctcccaaagtgcagagattgcagcctctgtccggccgccaccccgtctgggaagtgaggagcgtctctgcctggccgcccatggtctggggtgtggggagcccctctgccccgccgccccatctgggatgtagggagcgcctctgcctggccgcaacccagtctgggatctgaggagtgtctctgccccgccgccaccccatctggaaggtgaggagcgtctctgaccggccgccccgtctgagaagtgaggagcccctccgcccagcagccgccccatccgggaggtggggggcagcccccacccggccaccaccctgtctgggaggtgtacccaacagctcat

SEQ ID NO: 859705 - DNA, 522 bp, Homo sapiens
gcaagttccttggaactatgtcagcttcgtttacctgttaagcccaggtctggcacctgtaaggtatttaagcactggtttaaaggtggaaagcaggaaccaayggctaagagtgagatgagagtaagggagtatatggcttccaggtctctaacttgggcacttatttggatgggaatagaggttgagtatcccttacctgaaatgcttggaaccagaagtgtttcagattccggctcttttttttttttttttaatatttgcattatccaaaatgcttcaaaatctgaaagattttgaatgccaacatgatgctcaaaggaaatgctcactggagcatttcagattttggagttttggattagggatggtcaacttgtaccttcatctgggaatgccgataccatgaaagctgaaaatcaggatgtgggaggtgaaggaggagagttagtaagttctctgtggatgaggaattagtctcaagagataggaaactaaagcttggataggttaataattttt

SEQ ID NO: 859706 - DNA, 634 bp, Homo sapiens
aacctccaagcacactgtgtcccatggcttcttccaggactttgtgagacaatccttttcctcttagcatggatagcaggccatgtcattgacacctccaggcctgcctaaggtgtgtttgcttgcttcactctacccggagtcccctatctgcttctttctcttttgtctaaaatgctaccttcagctatagctcagtgttactctcttacggggagcctccttggcatggctgcccttccctttccttgagtttctgaaggctgggccatgggaacagcacatctcatacttcttggtactctggcaattcaggggtctatatctggcctctcaggttagctattgaggccgcagaatgcaagagcctatcagatgtcccaaccagcacctctagttctgagcttagccctggcacatgtaagggctcaaaacctagggctctggtagttatggtttctattagaggacctgcagcagggagaagacaaagttaacttggccctacctgagaccacagccctgctataagtttctgaacagaataaaatattcaggtagcccttcacagttaacaaaacactttaataacaaccttgtacattaygcgtttatcaacattccaacttaaaga

SEQ ID NO: 859707 - DNA, 527 bp, Homo sapiens
cataaaaataagaggttcatccctggacatttgtaaactgtttttttctgctctttctacaccctgtcagcagttaacttttaagcaagtttktttgtttgtttgtttgtttccttttggaagatgttttgctaggctaggaatgataagggtcactgtttatattctctgtaaagctttaattgtgaaaaaggatgtgtgagactggtcttaagctgtagccaatctggtgtgctttgcatgtctgtacggttcatagaaaactttgctgcaggcctccatcttttttttacatcctggaagtatggcctgtaactacatggcaagactttgtttagcaatcctgacttaaggaatgagtctgtttctggtttaatatctgcaagttttcctacccctgtctcttaaagggacccacccaggaactgggttttttttctgcctgtctgtgtaactatatatgtgttgtgtatgatatctgcaaaaaagagctctaattaatttggcctaaagaaagacaagcactt

SEQ ID NO: 859708 - DNA, 600 bp, Homo sapiens
tgaatatgatattcattcatgagtatgatatgaatatgatattcattcatgagtatgatatgaatatgmtattcattcatgagtatgatatgaatatgatattcattcatgagtatgatatgaatatgatattcatgagtatgatatgaatatatttataaattgaaaaactaaatattgtaaagttatccattttgggcactttcatcaatagctccaatgcaatttctataaaagtttcagcaagttttctgaggacatttgtaaaaagttttaaaatttaccaagaaaatattgaataagagcagtggtgggagacttaaacaacttattattgaaatttcttataaagcagtagtaattagataaatggatattagtgaaaggatggacaaacagagagtcaagaaacagcccacacatttgttggcacttgatttatgatcctgtggaacagtggcagagaggctgttaaaacagtcacatggaaaaaaatcttgccatgtatacaagtctattgcacatgaaagtctactgtaaatccacatttgagtggtaaacaataatgcttatagaggaaaatgtagaagaatagcatca

SEQ ID NO: 859709 - DNA, 630 bp, Homo sapiens
ttacatgggctttgtgacacacgacgggtcatctaatgtctctgaactgcagcttctgcctatgtagaatgggagcagtaacacagagcataaagacatgataggggcaaggagagcaagtgtgtaaagcactsagctccgggttttcatgcacaagtgtgctgcacacttgtgcctgacacttattcagtcgcactagctcatctatagaatgggaggtgatacacgcctagcaggcttgttgtcaaaacaaactaagctcactgcagctggatcagtgatgaatgtcactgtcgtcatcattcccactccacagcctgaggcctggccaagtgctcctgtgatgtgccacaccagtccagcaggcaggggaaacatgctttgcttggtgggattcaaggtgtagggatggccctccctttacagtcaccaccctgggttgagagtttgttcctcctccttgctctgggctggtctctatgtgatatctgaccaagcccggtaactgtgtctgttaggtgggatgcatgacccattccagcctctccacagactcgggagtgctgtctctatgccagggtctgagaatagataccgatacatgggtcagcagctcctgtgggggtgtca

SEQ ID NO: 859710 - DNA, 639 bp, Homo sapiens
cgcttgagcccatgagttcaagaccaacctgggcaacgggcgagggggactctgtctctacttttttataaaatagaaagagaaagagagagagactctaatggtagagaaaaacctcagttacaatagcaacaaaaaaaattcaaaaggacagaaaaagcaacttaacaagaaatgcgcaaagcctatttaggatagctttaaaataacctcctaaaagactcaaaagtaggtttgaacaaatggaagacatccctcgtccttgaataggacaactcaacatcataaaaatgtcagttctccctaagataatttaaacatttgacccatccacaataaaaatatcaatatgcttctttattgggctaaaaatgctgacccaagttcacatggaaaatcaagcatgcaagaatagcaggaaaactttgaagagaaaaagctacaaagggtctgaccctacaagaatactctaaagactctctgtaattaaaacagtgtgtggcttgtgcatgaatagacagaccartggactagaatagtgagtccagaaataggctcaaatactccaggaaacttagtgtatgataaaggcatctcaaaccactggggcaaagatggacttcttttttgtttaagaga

SEQ ID NO: 859711 - DNA, 408 bp, Homo sapiens
cattgcaccttattgccatctgacatactgtgtatatttgcttcttcttcccacagtaggatctgagccacatgtgagctgggaagaggactgttttgttagtggcatggaagtgagaggggtcaaccctccagactaccagtcccaccactacaggtcccaccggcctcagcattcagccccatcacccaacctgccagccccaaaaccaacctcctcagcatctcctgagcacctatttgccccaatgccaagccaaggacagacttggtctccggccctccaggatcctgtcttcactgggaaggctggatagtggggagccggkagtccccagtaggtggggcccggaattcttcttgcaaccccaaaggaggtctaagagaggctgtttctgggaaacttgaa

SEQ ID NO: 859712 - DNA, 614 bp, Homo sapiens
ctaagaaaaacggccatttgggaaactgaggacaygaaacacgattacggaaacaccccctacttttccttggagcatattgcactacagatatattggagttgacagtgttttgcactgtgggaaaaatgcttgaaaaaccgcaggaggccacacggcacatgccccccaagctggaacggtgccacccacaccaacctccggtggggtcccccccttggcgggccactggcctatagggccacgggcggtggttctgaatagagcctttgggtttcccaggtgctcaggcgctcctgagacagctcacttgcttttggtgtacctgagggcggcattcgtgccctgggcctcggcgagcttgcccatcttccccggcagcagcagtcgcacggccatctggatgtcccgggaggtgatggtcacgcgcttggtgtaatgggccagctgaccagcctcggtggcgatgcggtccaatatgtcatggatcatagaatccatgacactcacggcctcctgggaaaggctgaggccctggtgaacctgcttcagcacccgggggaaatagggggtgaagctgtccccgaagctgtccccacggcggttggcgtggc

SEQ ID NO: 859713 - DNA, 593 bp, Homo sapiens
cctaagtggattttttgtgatatagaaatacaagtgatttttgtatggtgattatatattctgccagcttgctaaagtctcattaatacacttttctggtgatgtctgtgtaaataaccctattccctgtgaacagttacttgggaatcattctttcatctatacatattattcctttctcctgacttactgcactggttaggacctccagccccacaaagaatgctagtgatgacagaagcacacttatcttcttcccgacttcaaaggtaatgctttcactatttcatcatttcataggatggctaatgtatgctggggttttttttcatccaatagattctacttagctgggtaaggcagccctctcctatccttagtttgccaacagcttctttgttatcatgaaaagatactgattttattaagttatttcattgttatcaattttggtgatcttatagyttttcaactttaatctgttaatgtggttagtttcacttccatacaccaaatttgtgccctgtaaataactcatttgtcataatagtttacatgtttcacatgttacagcactgggtttacgaatattt

SEQ ID NO: 859714 - DNA, 396 bp, Homo sapiens
gctgaataaaagtcagtttaaaaaggatccatattgtgtgacttcaattatgtggcatttargcaaagataaaactatgaagatagtaaatatatcagtgattgccacagattcaggaagcgagattgaggattatatataatatatatatagttatgtgtatatatataattttaaaaaaatatccctaaggagctcaaggaaataatgggatggaatgaagaatgtgacacaataatctaactgcactaaaatgtataatgcagcctcatggaagaggatgtcagagaaagaagctgatgcatgtaactttggaagtcagtggtcagtgacactagagacaaaagaagctgtgcacagcactgtgctttagttgacacagttgcttctcacaga

SEQ ID NO: 859715 - DNA, 499 bp, Homo sapiens
agaccatcctaatctatgaaaatatttatcctggagatgatttgggaaacatgacccttcttttcaaatatcttgtttttttgtaagcccaagatgtcacctaggtgggagaaagccacagggaagcagtccaaaggagaatttttttatagtcaaaaaaaatggcttgacatggaacaggctgacctaggtcagagatggttgcacactgggcagtttaaccttgggatgggactgtagaagaaattcaaaggagcttacactgagtgaccctgaaggtcccacccaacctaaagtctgtggcctgtgaaatgtgcccatgccactgtgccgtagtttaacatgtccttctggaaggcaggtaggacccagagatgagaagtaggggctcccaattcaggctgcctggactggcatgctaygtccaccacttccgcattagatgatctggggagagtcacttcttctttacaggcctcgatttctaaaagatgggcta

SEQ ID NO: 859716 - DNA, 540 bp, Homo sapiens
ttggtggggtgtttcagatttgttaaatatttagtagtagaaagaagatgagctttgctgctgggcatatttggattcctagctgtgtgacttctgacaagtttcttaactatcctgagacttgttttcttcctatactcagtggaaataaagctacacattttggggaatggttttaagagtaagatgtactgtttgtaaagtgtgtctgtcttgttcacttttctgtttctgccacctgacacaatgcctggcacatagtaagtgctcagtgaatatttactgaatgaataagaggtttaggcaccatgattgcacagacacgatgttcatagagtagttggtcttctccttctttatcaatgactccatctccctgtcacacttcaaggccagggcaggtggttcaraaataccagaggttggctttatagttctgccattacccactttgaccaaagagggcagcagttagcattctttacttatttattttatttaaaatgaaggtttccttaaaaggatttggatcttctcttt

SEQ ID NO: 859717 - DNA, 671 bp, Homo sapiens
caggcactcttcgggcagctttggctacagcaataggtaaagcaaagaacctgctgcccggggaggcttacattttaatggggagagatgatcagtaaagaagcaagttaatgtataatgtcagatggtggccagtgtctgatagagcacagtgtcaggggccaagggattgcgaggagggggaggaatgtgcatggatcaggatcagggaaggtcccccgcccaagtgaagaaagagtgttccagcagagggaactgcaaggtcagagaccctgagagcatgcttgggtgctagggtgtgcagtagagtgagctacaatttcctgagattaagaaggccatgagagccccgggtgcagggaaggcctgttatctggagctcagtgttggatgggtcgaatttgagatgttttattaggcttgcaggtataaatgtagactaaatgtagactctgggatatataagtaaaaagatcatcagggaggggaacaacatacactggggcctgttggtgggtggggtaggggagggagagcattaggaaaaatagctaatgcacrctcggcttaatacctcagtgatgggttgataggtgcagcaaatcactatggtacatgtttacctttgtaacaagcctgcacatcctgcacatgtaccccagaacttaaaa

SEQ ID NO: 859718 - DNA, 648 bp, Homo sapiens
gtttactcatacatcaattgataggcatttgtgtggtttccacttttgagctattatgaataatgttgttacggacattcacgtgcaaatttttgagtggtggacatatgttttcaattttctagtatatatatacctaggaatagaattgatgggtcccatgctaactctttgtttaattttttgaaggactgccaaactgttatccgaagtggttgcagtgttttatattcccatcagcaatatatgaggcttccaatttatccacatttttgttaatatttgttattgctcatcttttttattatagccatcctactgggtgttgagtggtattgcattgtggttttgatatgcatttccctaatgactaattatgttgagcatcttttcatgtacttattgaccatttgcatatctttgaagaaatatctattcaaacactttacctagtttagattgtgttgtcttttattattgttgagttgtaatagttctttgtatatcctagatactaaactcttatcaggtattatttgaaaatattttcaayccatcctatgggttgtcttttcttgatgaaagattttttcctaagttttgaagcacaaaaaatttaaagttttctgaagtaaaatgtatttattt

SEQ ID NO: 859719 - DNA, 550 bp, Homo sapiens
ccaatgacggcaagagagagtccaacaggatcctaccagtgagcagtgacccagcagctcargccagctgcatgggagcaggtgggcatcacactgtgttctcctagaagcatccattcaggggaaattgggtttgaagtgtccctttagaagagaccaatgaggaagagagatggcaaaagggcctcaggcagcctggggaatgactgtggtagggagtttcttacaggtgacatgctttttatatatgtttatttgtagccccagctagtccctccctaaatattgtaaccccttccttactcctcatgcttgtcatctcctggaatgtccctcactcccagcttacttggcctattcctccttttctttcaggtccctgctcaaaccagagctttcacagaacttactctaacctcaccttatccccaggttgaattccttggtaggcatttggggtattagtatttctccttcaaagcatgtgtcacaatggtaatttcacaggtagttgtctcatctttgatgctgatctatctctgtcattggt

SEQ ID NO: 859720 - DNA, 464 bp, Homo sapiens
tatgatgtcaccagaggggccaaagggtgtsttagaaaaacctggtagtcccaacacatgggtggggagctcatgaattggagaggaagagagggaaccaggcaactggacatgagagaggcagggatgcactccaggaagaagtgagaaggaaagataagtacttgactcttcataagcctgggggaaacaattcctacctcttctggcccaggtccatttggccctctctccctgctctacttgctttttacctgcatgtgctcttacttatcccagtgccctgtgatgagagctaggcctacgcttttcttaattttttttttttggcctcacaacaccaaggccttgcactgcaagaaggcacttgacaaatatgggctgaattaaagagaaatgagggagaagagggacatgtccccagaacctcatgctggtcccccttagtggtgtcacctgagacc

SEQ ID NO: 859721 - DNA, 647 bp, Homo sapiens
aggagagtgctggagtgagaaggaagacttcctgcaggagaggttgaggcctgtgtctgtcaatctatctcccacaaagaaactggcccagagtggagggagacaaggccacactcctgtagggktaaaagtaattaagacttcagattctccaggagtgggcatgagaacaaaactctcactaccaagaaaagtgcttctaaaatgagttgcttggtcatgaccacccagtcagtacccagctcccaaggtaactttatagccttcctgggagctgctatgcagtaccagggcgacaatgtcatcgcactgtgagagaggtggggccatctcaaggtgacctagctgcccagcctccaccctcattccatgcttacagatcaccggtaaggacccagaggtagagactgggggaagggaggaccctagttgagggagatgacagctgagtggagtgagatgtgggtttgggattgaattcctccaatgactcggtgtgacctcaggcatacattcacagctccaagctgcagcccacaactctgtaaaatggtataatagcagagtcatccccacagggtgcgtcccagccaaggcaagcatccagtgggcgggcatcaggatccttgctcgggttaactcagccc

SEQ ID NO: 859722 - DNA, 647 bp, Homo sapiens
aggagagtgctggagtgagaaggaagacttcctgcaggagaggttgaggcctgtgtctgtcaatctatctcccacaaagaaactggcccagagtggagggagacaaggccacactcctgtagggttaaaagtaattaagacttcagattctccaggagtgggcatgagaacaaaactctcactaccaagaaaagtgcttctaaaatgagttgcttggtcatgaccacccagtcagtacccagctcccaaggtaactttatagccttcctgggagctgctatgcagtaccagggcgacaatgtcatcgcactgtgagagaggtggggccatctcaaggtgacctagctgcccagcctccaccctcattccatgcttacagatcaccggtaaggacccagaggtagagactgggggaagggaggaccctagttgagggagatgacagctgagtggagtgagatgtgggtttgggattgaattcctccaatgactcggtgtgacctcaggcatacattcacagctccaagctgcagcccacaactctgtaaaatggtataatagcagagtcatccccacagggtgcgtcccagccaaggcaagcatccagtgggcgggcatcaggatccktgctcgggttaactcagccc

SEQ ID NO: 859723 - DNA, 647 bp, Homo sapiens
aggagagtgctggagtgagaaggaagacttcctgcaggagaggttgaggcctgtgtctgtcaatctatctcccacaaagaaactggcccagagtggagggagacaaggccacactcctgtagggttaaaagtaattaagacttcagattctccaggagtgggcatgagaacaaaactctcactaccaagaaaagtgcttctaaaatgagttgcttggtcatgaccacccagtcagtacccagctcccaaggtaactttatagccttcctgggagctgctatgcagtaccagggcgacaatgtcatcgcactgtgagagaggtggggccatctcaaggtgacctagctgcccagcctccaccctcattccatgcttacagatcaccggtaaggacccagaggtagagactgggggaagggaggaccctagttgagggagatgacagctgagtggagtgagatgtgggtttgggattgaattcctccaatgactcggtgtgacctcaggcatacattcacagctccaagctgcagcccacaactctgtaaaatggtataatagcagagtcatccccacagggtgcgtcccagccaaggcaagcatccagtgggcgggcatcaggatcctwgctcgggttaactcagccc

SEQ ID NO: 859724 - DNA, 678 bp, Homo sapiens
atcagcatgcatatttgttcaggtattaatctatgtaaatagattttttgtttgttttactttcaagtacagatcatgtactgcatggtctcttttctaataatatagttaakatattttctatatcggtgcatttttagcactcaagagtaatcttgatggctctaatatattagctaattttatattcatggacatttattctttcatttctaattattttatattataaaacataggaaagaaaatctttatgcacatttgtgaacctgtaacattattttctcagggacatttatagagttgaaaccgtgtctgtgctaatttgtaacaatttgatgcatagtttcccataaaaataatttctaatataataatcaatgtattcattttctcccaacttgccattaaaataccaaagttttttcatctttataaatcttataggaaaagtatattacattactttaatttatatctctttaattaataaagttaaataattttcatatctattgacattttcatttcttcattggtgaacttccttttaaagaaatttgtctgctttttctaatgaactgtcattttaagttttaatagtatttcagttatcgcttttataatataaatatatgctcattaaaaatttcagcaatatttccaagaaagtagatt

SEQ ID NO: 859725 - DNA, 678 bp, Homo sapiens
atcagcatgcatatttgttcaggtattaatctatgtaaatagattttttgtttgttttactttcaagtacagatcatgtactgcatggtctcttttctaataatatagttaagatattttctatatcggtgcatttttagcactcaagagtaatcttgatggctctaatatattagctaattttatattcatggacatttattctttcatttctaattattttatattataaaacataggaaagaaaatctttatgcacatttgtgaacctgtaacattattttctcagggacatttatagagttgaaaccgtgtctgtgctaatttgtaacaatttgatgcatagtttcccataaaaataatttctaatataataatcaatgtattcattttctcccaacttgccattaaaataccaaagttttttcatctttataaatcttataggaaaagtatattacattactttaatttatatctctttaattaataaagttaaataattttcatatctattgacattttcatttcttcattggtgaacttccttttaaagaaatttgtctgctttttctaatgaactgtcattttaagttttaatagtatttcagttatygcttttataatataaatatatgctcattaaaaatttcagcaatatttccaagaaagtagatt

SEQ ID NO: 859726 - DNA, 616 bp, Homo sapiens
ttgaaaatatgtatttaatatatagtatgcctttaggctgtagtgttgtctaaatgaatgctaaagtctccaagctttagcttttaagtcataacctcacagcatcatctgactttccaactcattgtggacagtattaccataaagtaatgatcaccaagccatatcttaccaccttgtgagtagtactaaggaagtaagtatagtttattcactgtgttgattgacctttctaattactatacttaagtacttgaatcaattcattttgtttcaaatgtgtcatgtaatcaaatagtagatgtgctttttgatgtctgacaaaaaataagtttttgcattctagtgataatatacaatacacataaatttttatcttacagtcagaaatgaagaagcatctgaaactgtatttcctcatgatactactgctgtaagtaaatatgacattgattagactgttgaaattgctaacaattttggaatgcyttgttaaattatttatcttacatttttaatttcctaatctgtaatttatctaagcctttgagaaagtctctaaacctggtcctatatgtgattttaacttcctgtgaaactctgctgtctctctgtt

SEQ ID NO: 859727 - DNA, 641 bp, Homo sapiens
ccaatctctgggatcccaagacatatacatgtctttaggtgggtgcggaggttgtccttctgcaatcaagccargacccttcagacaggggcagctgagcccaggataggaagccctatggtccaggtcatgtcaatgtggttcatttggcattgaaatatggcggaacagcacagtccaaagggcgtggccaaactcagccacaaaatgatttcttggtcatccccctgtgaggaaggatgaggtccttcagaaggaggacatgcatgccagtgctgcattgtcaccacactaggaccacggcagtccacagctctttgcttttacaaatgccaccaagaccctggctgggttgccagaggcagacaccccccccggccttaagtgcttaaggatgtttcccgaagggagtctgttttcccttggacaaaggcagcccatctgattgcccaggcacggggagtacatgctacaaggtgcctttggagacccacagatggtgcgtgggtggctgcagggctgcagtgaaggccacatggcacctgaatagagatgggaacaggtctcaagctgggcaaggctcgccatcagtgacagggggtagaagcaggagtgactgagcatcagccgctgtggcactg

SEQ ID NO: 859728 - DNA, 605 bp, Homo sapiens
tcccaaatttggaaggaaggaagaaaaggaaggagggagagaagagagggagaaagagaagggaagacaaggaaagtgaaaagaagcaaaataaatatcctcccacacatagccctgttgggttgttttgtctgttctggtttcacatataaatgtcatcttggaatgggtcatcttttctgtctgatgttttccactcaacactgagagagtcatcgtcgctgctgcctttgtctgtggcacctgcgttcttgttattgtgaagtattccattgtgtggctctcccaagtgcacctctccacccactgtgatgggcgtacgggtggacttctagtctgaaacggtcaggaacaccccagtgggtgtctctgcacctgcggtgagcagctgtgtgcatttccgccctctgcaaacatccttcggagcaggatggccgggtcactgcggggctcaggttcagcttagtagatactgccaagtggttttcaaaatggctgagcyggtttccaatcctgccagcatttatttcatctatggcacagaggctatgattattgcagggaggagcagagactagaaggggcgtggaggaggttttttgttt

SEQ ID NO: 859729 - DNA, 635 bp, Homo sapiens
acattcttaaaatacaatgcatagaaatggaaaactaattagaacttgcccagttttaaggtaggytggggagaaggatattgtgtggttataaaaggtcaacatcaggaattcttgtggtcataaaactattctgtattgtatgtgcaggtgtctctgttttattttgcacaactgtgtgtgaaaatacaattattgtaatatttcaaaaagtttaagtgaaaaagaaactaataaaagggactgagttacagatacaatagaacaaaaaataattttctatggaaatcagattccatctcttttgagaatggttaaataagtgcattgcttgtatctatgtgcccaatacttagacaactaaatatcaacataattacatccagtggaagttctttgtaagtgtcacgaatgggaaacttacagtatatatataatctttcttaatgtgtatttattcattcactggaatgaataacaaaataataacaaaacttttaatattgagatgtgtaggaggaaatgcaagaaggaaaagaaagagaaaaagaaaaataatagctgataccagttttatgatgtaaatatagtatcttaaattggtcaacacaaagagcaagtactgaaataattta

SEQ ID NO: 859730 - DNA, 586 bp, Homo sapiens
tggcccaggtgctaagcccctcattgcccagggcagcagcgctggccggctgctacgagtgtggggcccaccgagcccacgcccacccagaactccagctggcccgcaagcgccwcgcgcagccccggttaccgctagcgcttctccctctacacctccccgcaagctgagggagccagctctggcctcggccagcccaggaaggggctcccacagtgcagtggcgggctgaagggctcctcaagtgccgccaaagtgggagcccaggcagaggaggtgccgagagcgagcgagggctgtgagagctgccagcaagctgtcacctctcactagtttattccctctctctggcctgagactttaagagctacatttctggctctaatcattaggagtatccatctacattgactatactttattttgtctttaagacaatacttgattcttttctactttcattacagtgacacactaaacttttactttatattttcctggtctgttttttgtattctctctctaggatgggctgtagttaattccagtcacacgagtatttgcagaacattgtcttactttgccc

SEQ ID NO: 859731 - DNA, 552 bp, Homo sapiens
tctaactacctgtaacatttggaaatggtgaagctggtggaatgttgtgggaagtcagggaccccaaacggagggactggctggagccatggcagaggaacataaattgtgaagatttcattttaatatggacatttatcagttcccaaaattaatacttttataatttcttatgcctgtctttaccgcagtctctgaacataaattgtgaagatttcatggacatttatcagttcccaaataatacttttataatttcttatgcctgtctttaatctcttaatcctattatcttcataagctgagaatgtatgtcacttcaggaccactattgtacaaattcattgtagaacatgtgtgtttgaacaatatgaaatctgattgtaaaacatgggtgtttgaataatatgaaataagtgcaccttgaaaatgaacagaataacagcgattttagggaacaagggaagacaaccaaaggtctgacttcctgcggggtcgggcagaatagagccatatttttcttyttgcagacagcctataaatggatgtgca

SEQ ID NO: 859732 - DNA, 549 bp, Homo sapiens
atttaaggtatgatgggaagtttcaaaggaatttcatcaggactatccataatattctttagtttcctctgtgatttagggctgaaacaaaaaaaagtcggaagcagtgctttaattgacacaggsaagtcgagaagcatggaatacttaccttaacagcagtgcaattttgtctgtgttccagtatttcccataattgcaaattgagctgttatcctgggataatcatagttcaagattttataatcagaagaataaatcttcatttcttacatggcactgcttacttctctatgtatatctcttcttctagttcttggagagaagatggaataggtggttctgatactggcgtagtcataggtggttgctttcacctctacctcatcacttctggcttacccattagtctggttagttgtgattggggtaccatgcttttatatggagaagaattgcctatgggtcttttccttagaaagagactgggagtaaagctagctcgcaattagagtttcaggtataatttctgttattcctttctgttca

SEQ ID NO: 859733 - DNA, 615 bp, Homo sapiens
agtagtatatcctccaaacaccatctttcctgtagatagcagataatttaatttttgtgtatttggggatggcggtattttctgtagtctgtgtttgtatatgagaatggcttcaataaattgatgttaatttataggaaagttttctttttggttgctctccttttcctctcaatagtgatgagagaaacactgatataagttgaatttcagagtagttctttcattttgatattgtatctgctgttttatctttacaagaacctctgtagtcctcctcctatgtagcatttggttggctggcttcctgagaaaaggtttcttagaaatatctggcatttttgaggttccactaatctagggcctggccattaattttgctttttagaaatgattttgttatggaaaattaccaaacttataatctaattgaaaaaactacactatgatatttttgtttataatatgaacaataggctggcaagatgtgcaatggaagtactgagggaagtcttcaagaatagcaagaagtaaactcatttaaatgtatttttgactaaatgaagcctcayattgccctaatttgttgggaaagaacagttttgtattggcctt

SEQ ID NO: 859734 - DNA, 536 bp, Homo sapiens
ttattatcaagatgacattgttgcccatagtgagttgtagattcaatacaatttctaacgaaatattaagataattttaaacataaattgacaagctaatttttcaacttacatcraaatgcaaaaacccaagaacagccaaaaccatcttgaaaaagaagaacaaagttggaggattcacctttccctatttattgtattataaagctacagaaatcaaaagagtgtggcactggtgtaaagatagagttacacatcagtagaacagaattgagagcatattttaaaaaaatcctttgcatgtataactaattttgacccagatgagaaaatgaggaaataatagtgttttcaaccaatagtgtctgaacaattagacagccacatgtaaaagaatgaagttaaacctttatttcctcgcatataaaaaaaagctcaaaatggatcaaagacttaaatataatagataaaattataatactcttagaagaaaacctgcaaggaaatttgtatgactttggattaagcaatggttt

SEQ ID NO: 859735 - DNA, 613 bp, Homo sapiens
taattaccatccaccccccatacccattaccttccagccactggcaactactaatctatttatacatttatatatttgccaattatggacatttcatatgaatggcatcaaacaatgtgtgatcttttgtgactggcttctttcatttagcatgttttcaaggttcatccatgttgtagtatgtatcagtactctatcccttttcatgcccaaatgatattccattgtatggatgtacaacatttcatttatccattttatcagctgatggaaatttggttgtttatactttttggctcttatgaataatgctgttataaacatttttacaattttttaatccatcccctcaagcatttatcctttgagttacaaacaatccaattacattctttaagttactttaaaagatacaattaagttattattgactataatcatcctatcgtgctatcaatattaagtcttatccattctttctatttattttgtatgcattaastatccccaccttgcccccagtctcccactacccttcccagcctctggtaaccatcctgctctttatgtacatgagttccattgttttgatttttagatcccacaaataaat

SEQ ID NO: 859736 - DNA, 622 bp, Homo sapiens
ggctagattcagtgaaagtgattccttggtcagagggagattttcasaggaatcaatggctgtgcgcttcactgtcttaaagtggtctatgcctcctgactactttcatgctaaagcccatctctcagcctaaggttgaggcctgcaaatgaactggtcttattctcctgtgcggataagccacctgtcaacccccgctccccaaaatacacacccagtgccatcccctgctgatacctcagctcaacatgcattcccaagtccatgcccgctggggagccctatctgccccataaaccccccatcagccacgaccttcaccaggacaatgcggggtgccgggtgtcctccccaagcttctcagatgcaggtgctgcctgagacagcagaagggaggatggttctgaaggaagcgtaagcgggggcatcagtcacgaagcttggccacaaagaaagtgaacagcgggaaccgaggctgtggctttccagggaccagcagctgcaggggtggggcacgcggcatggatgggggccacggacagatttggaaggcaaaatctgctgaaaagtttagagaggataaagcggggggctctgatttagattagccgtggcctggggg

SEQ ID NO: 859737 - DNA, 654 bp, Homo sapiens
ctgtcatggctcttagagaaactttctggctgaggcatggatacttatgcaagcctttgtgtgtcagtgagcaccagacccaacagcaaagtggcacccatgttgarcagcaccagttggctgttccctgaatgcacctgttgtaagcgtcagggaggtctgtagtgcaggagaggggctgttgcacattgaggaaagattgcaaccatggttctgcccattgattcttgagtggctttgtgtaatacactaagcctctttctacttaacttttcctatctgtcatctctcagctggtttccagttctgagttacggcgagtgattaaggacttcttttctcatgatgtatttttatcaactcctgaacatattttcccctgtgcatgaaggtggtcattctcttacttgggatcactctcttccagtcataatttgcaccccacacattattctttgtctctgtgtggcactcacatatatacaaaaccacacacatacaccatacacacacacacacacatgcacacacaatgagcatacgaagccaccttggaagatgccccagaattcctctaccctcacatgatatgactaaacttaataacaatcgcatattaagggctgactggtcctaggcagtgtattaaacgct

SEQ ID NO: 859738 - DNA, 618 bp, Homo sapiens
tccccgcccagcccctcagcacagccctacccagagggttcaaggaaggacgatccggctctcctccgatcacaagtaccgggccgratgcactctccaagcaaccatagcccacctgccccgcctcctcctcctcctcgctgaccctcgattggttgccgccaaaagctcccaccctcaaggtctcacaaaaatccaatgggagtagagagctgggataacagccttttcttgagatgcaattcgtagagttatcagttcttcaagttcagtctgcttgacgagtggttgtaattgacgtcaaccagctttatatcccgcccccgctgcgcctgagagtcccgagataaagaagcctccacgtcaagcagtcagaagcggtgacaagagaagctttctgattggtcagagtctggcttgacccatcttcgggaggaatagggattcgccactcccgctgtccttctagaagtgggttcgcctacaatggggcaggttgggctctaggcggtctggagcggcgcctgcgcagtgggccaggccgccgctgtagaggtcgttttgacttgctctgacttcgcgcggttctcgcggcttccccggttcccgggttctgca

SEQ ID NO: 859739 - DNA, 618 bp, Homo sapiens
tccccgcccagcccctcagcacagccctacccagagggttcaaggaaggacgatccggctctcctccgatcacaagtaccgggccggatgcactctccaagcaaccatagcccacctgccccgcctcctcctcctcctcgctgaccctcgattggttgccgccaaaagctcccaccctcaaggtctcacaaaaatccaatgggagtagagagctgggataacagccttttcttgagatgcaattcgtagagttatcagttcttcaagttcagtctgcttgacgagtggttgtaattgacgtcaaccagctttatatcccgcccccgctgcgcctgagagtcccgagataaagaagcctccacgtcaagcagtcagaagcggtgacaagagaagctttctgattggtcagagtctggcttgacccatcttcgggaggaatagggattcgccactcccgctgtccttctagaagtgggttcgcctacaatgggrcaggttgggctctaggcggtctggagcggcgcctgcgcagtgggccaggccgccgctgtagaggtcgttttgacttgctctgacttcgcgcggttctcgcggcttccccggttcccgggttctgca

SEQ ID NO: 859740 - DNA, 594 bp, Homo sapiens
actctcaactcccttcccttcagttgtatactagaactgttattgaaacttaaaagtttaaaattttttttttattgtgtagttctgactctctaggtctctggcagaacccaaaatccaactgccagtgaatcacaagaaagggcttttctgccaggggatctagtcaaagttttccttcttccaagagattcagtcatctccattttgaagtatttcttccagcttcaataacaactctgcagtgactttcagatgtggtatagtcaaagtgattatttagatagtcgagacttatttattatacaccagaggaacaaaaagaacaaaaagcaaccattatccctgttttcctatttaaggtagaggtaagacatcaactctgtagctttcttcactcatagagaaaagttgatccaaaaaaaagaaatgaagtgaaagaaataacaacctccatgacatggagaagtgttaaatgactcactaaactcaagtaaggggagaaagtcaagacctaagaragacaagagacaagtcattgtgacccagagcagagcatgtgagcaataaacttagaaaagtgaggacaaactt

SEQ ID NO: 859741 - DNA, 568 bp, Homo sapiens
aaagcatttgacaggcctggcgtggtggttcacgtgtgtaatcgcagcaatttgggaggccgaggcgggcggatcatgaggtcaggagatcgagatcatcctgggtaacacggtgaaaccccatctctaccaaaaatacaaaaaattagccgggcgtggtggcgggcgcctgtagtccagctactcgggaggctgaggcaggagaatggcgtgaacctgggaggcggaggttgcagtgagccgagatcgtgccactgcactccagcctgggtgacagagagagactccgtctcaaaaaaaaaaaaaaagcttttgacaaaattcaacactctttcatgataaaaatactcagactaggattagagttcaccctcactgcttctgttcaacattgtactgggagttctagccaggacagttaggcaataaaagaggaatctgcattggaaaggaaaaggtaaaattatttttatttgcagattacataaccttttgtgcaraaaatcctaagcaattcacacacacgaaaagtagaactaagaaatgagtttagaaagtttcagaacac

SEQ ID NO: 859742 - DNA, 602 bp, Homo sapiens
gttttcctaccatcatttggaattgttgctccagagtgtaatgagaccagttatatatttttaaagttactttttttratgtataaatttcaaactatctgcagatataaaggaagagtgattttagcttagaatttcccaggagacagaggttggaactctggcatttagagaagtcaggagacgggaggggaaagttctaagggaagtgagcagttcccagccaaagggcagaagtccagagtttgaaaagtgatggccagcaagaaatctgctgtgctggggagctgcccccaaatgaccacaacagtctgcccagggcaggaggctggtgcaggagatgccatcaactccatacgtaagcacacatttgcatcacttctctgtccaggaattatcagacattctggtgacagcagtgagccatttgaattcctgcaattagacaggcacttgaaactgcttaattactagggaaaggattgccccagaaagttgcaggccacatgaacatttatattgcacattaatagaccttctcctttttccaccacgtatttagttctgtgtacagacttccaagacagccattcttgttggca

SEQ ID NO: 859743 - DNA, 654 bp, Homo sapiens
aagggtttgaaatccttgaaagaagagggctgtgacaacaccagctggtacaaaggatctggaatcctctcagctacgggtgctgcccttgggaagctcccctactcatcgatgaggggaggggcctgcaagtgtgagacccatgtacatgtccttatctgagggtagaacaagagttgtggctcttggagggtgggacagacatcaattcaaaagaagcactgggcagctcgaggcagtgtggtgagggtacaaaagaagacctgggtctggattctgaccttgagtggctgtggaaccctggaaagcgatgctttctcttagactgacttttggtgaaatgggaaaaaaatagcaaaaccgcacagggtcaccatgagattaatacccaggacgctagcagaatacctggcagagttattatggtgtttgctcacaaaatgttactttccttttctcccttcctccttcctgctatgtgccaggcaccgtgctaggtgctgagggtctggagaaataaggcacagttcctgctctcaagargttcagcctagctgtggagacagacatgcacaaccactaacagagtgggacggtggcatattagtataatgagggtagaaataataaaaataagccaagcgtggtggctca

SEQ ID NO: 859744 - DNA, 528 bp, Homo sapiens
gcctagaggggtcaaacagggctctgtgtaagttgcagctgaacaggatcaaagcagccaggccacaaggggaaaccgtggcccagacttgtatccactgagtctcttgatcccacagctcctcttcccttcwccccctctctctggagcttaacacattcctggagggtcctttggagactggccttgagcagcctagcctgtcttagggttttgggtctgtccatcctgggctctgctgcctgctgcgtgactgaagagttggcgacatgcggctcgcacgtgagagcaggaatgcattctgggctttctccgggattcttctgagatacagctgtttccacagagccatctgtttcttggcattgtcttgcagggtgatgccatacaatgttatagaatctgtttatatgtgtcttatttttaacttctagttgaggtgatgctgttgttttttcctcttagcaggcttagtgtcagggaacgtggccttggaagtggcctgtcaccttcatagcgtgagagagt

SEQ ID NO: 859745 - DNA, 733 bp, Homo sapiens
cactaccactattttggcactaaccgcactacttaataatcctctgcttgtctgtaaccctcactcaacagtgactgcaagagccgagctttaatctgcaatgctgcctgctagaacactagccctgtgtctggcgactacctgaattatcagctgggtggatgatatggtttggctgtgtccccacccaaatctcatcttgaattgtagctcccataattgctacatgttgtgggagggacacagtgggagttaactgaatcatgggggcaggttccccctatactggtctcatgatagtgaataagtctcatgagatctgatggttttataaggggaaacccctttcacttggttctcattctctctcttgcctgccactgtgtaagacgtcccttgctcttccgccatgattgtgaggcctccccagccatgtggaactgtgagtcaattaaacctctttcctttataaattacccagtctcaggtatgtctttatcagcagcgtgaaaatggactaatacagtggatgaaaggagtcttaagtcacttagacactgccatcagagcctgctcccatctaggatctcaagtccaaagaagaggttcctgacttggtttctttcagactcaccaccatctgtgcacttatcacagctctaatgacctcttcccacagagctgggagcataggctttgggctggatccragatcataccctttccctctggt

SEQ ID NO: 859746 - DNA, 621 bp, Homo sapiens
gaactgagcgtggcttcgaggagctgagggggacacccatcaacagccagcaaggaaatgggacctccatcctggaactgawttctgctccaacccaaatgagcttggatgtggatgccaatccccagatgacatcccagccctggataatcccttgagatttcagtcctgagaccctgggcagagggccctgctaacatcttccagattcctgacccatagtggccacaaggtaacaaaggtgtactttttaagctgctcaatgtgtggtactttgtcacctaacaacagaaaacgaatggggtgcctgagccccacataggctgcatactccttgaagacagggataggtcttttaacacatattcccctcccactaagtgcctggtgcagaacggtgagcggtatttgccgagtgatcatgtggatgtggagatgagaaaactgtgggcccaagaagggacagggctcgccagggccctcacagcaggtcaagcatggacctggtgctagagcctccatgcttgtcccttgctcttttgtcccatgctgtctttacctgttacctgctaggatccccaagttctctgtgcacaggagtcccagtggcctttctccaag

SEQ ID NO: 859747 - DNA, 606 bp, Homo sapiens
ccaggctgatcttgaactcctggrcccaagtgatccacctgcttcggcctcccaaaatgctggaattacagctgtgagccactgtgccctgcctagaggtgtgacttctagccccgggcaccccctccaagcttctaggctctagtagctcccacctcttcgtctcgcctcctctggtgtggtagctgcttcttggagatggccttttctgctgccttcagggttctctttatggctttgtcaatgcctctttagctaactccctacacattaaatactttatggtaaaataactcataaggttcctgttttcctaactggaccctggctgattcatggagacgatgcttcatccattcattccttcactcattcatttagcagtcacctgacacttcctttgtgccaggtcccaggcagggcgatgctggcagctcacagataaatcagacacagttcttatcctggaggagctcggtctgatgggggagatgcttacaggcaaaacagagcagcaagtgcagtgcagggggattcggggccgtgtccaccggtcagcatgggatccccgtccagcccagggcctctagacaaccctccctgagg

SEQ ID NO: 859748 - DNA, 588 bp, Homo sapiens
gcgggtagcaaggacagggctgtggtgtgaaccaagacatggtgccccctgcccctgtctttcttctgcagggagaggggctattttggtcctgagtacttttaaccccatgtgaaccacgcggacgggtggacagttggagggccagtagcagcagcaggagcctctgcccacttgggggccccgagtgctggcatgatctgactccatggtgtgggcggggtccgggcccacttggaggagcaggatatgtcgtcggaccacagttgggggtgccagactcaggccacgccatatttggtgtcagagcccaagacccaggaatagaaactgtgtatggggccaagttggccgcagcccaatatccaggtgacctcaggcccaaagcatgctcctggcccccgagacgggcctcgcagttgcagcctatgtcctggaccttgtcagctgggcytggcacacccctgctgcctgcccctgcctccaggctcactacttcccgccctgtcaccagggagctactcccagttagcctgttactgtggccactcccctgctctaagcccttccatggctcccatcgccagg

SEQ ID NO: 859749 - DNA, 565 bp, Homo sapiens
atcgaaggaagacttaaattaatggaggtatataccatattcatatattagaaaattcattataaagctgacaacagcccttaaattgagctgtagattcaatgtatttccaatcaaaatcccaacagggtttttcatggaaatttctgtttattaataacatttgtatgggagagtaaagggcctagaaacccaagacattaactggtgatggtggtggaggggtggtagtgggagtattgcctgaccagatatcaggctacttataatactttggtgattaaaaatgtaatattagaccaatggacagaatagagcctgaaactgatctatgcatgtgtcaaaacctgatggataacagaagtaccactgcaggtcaccgggaggaaagatgagcctattcaataaaaggtactgaggcagtcagtaacccacataaagaaggaattgaaaawgaatccctactggggaaagatttctggtgttgttgttccattattttgagggctgggcacacagatgcccaaggaatgcctgagctcgtcatctcactctttatacagct

SEQ ID NO: 859750 - DNA, 565 bp, Homo sapiens
atcgaaggaagacttaaattaatggaggtatataccatattcatatattagaaaattcattataaagctgacaacagcccttaaattgagctgtagattcaatgtatttccaatcaaaatcccaacagggtttttcatggaaatttctgtttattaataacatttgtatgggagagtaaagggcctagaaacccaagacattaactggtgatggtggtggaggggtggtagtgggagtattgcctgaccagatatcaggctacttataatactttggtgattaaaaatgtaatattagaccaatggacagaatagagcctgaaactgatctatgcatgtgtcaaaacctgatggataacagaagtaccactgcaggtcaccgggaggaaagatgagcctattcaataaaaggtactgaggcagtcagtaacccacataaagaaggaattgaaaatgaatccctactggggaaagatttctggtgttgttgttccattattttgagggytgggcacacagatgcccaaggaatgcctgagctcgtcatctcactctttatacagct

SEQ ID NO: 859751 - DNA, 585 bp, Homo sapiens
caagataattttgttttcatgccttttaatacatatcacgtcttttagttcatggatcaaggagtaatttaaaatctgagstcatattattttaaaaatacattttggccaggtgcagtggctcatgcctgtaatcccagcactttgggaggccgaggcgggtggctcacaaggtaaggagttcaagaccagcctggacaacatggtgaaactccatctctactaaaaatacaaaaattagctgggcatggtggcgcgtgcctgtaatcccagctacttgagaggctgaggcaggagaactgcttgaaccaggacccgcgaggtggagcttgcggtcagccgagattgcaccactgaactccagcttgggctatagagcgagactctgtctcaaaaaaaaaatttttttcataaagctatagttgccatagacagtgattcctctgatggatcttggcaaaggaaattgaaaaccttctggaaatgatttacctttctagatgccattaataatatttgggattcataggaggagatcaaaatagcaacattaacaggagtttggaagttgattcccatccttat

SEQ ID NO: 859752 - DNA, 647 bp, Homo sapiens
agtggcctcattcagagattttttttttttttttttttttttttgagatggagtctcactctgtcacccaggctgaattgcagtggcacgatctcggctcactgcaacctccrcctcctgggttcaagtgattcttctgcctcagtctcctgagtagctaggactacaggtgcatgccaccagaccaggctaatttttgtattattagtagagacggggtttcaccattattgaccaggctggtcttgaacccctgaccttgtgatctgcctgccttggcctcccaaagtgctggggttacaggggtgaatcaccgtgcctgacccagagattttttaaggacttaaatatgagatgactttatttttgaggcatagttttttggagaaaaacacctaaatatccaggtacatttaaacacctaaatattcctcttctaatattgattcattcatttcttcaatcagtcaacaaatatttactaaacaccaagtgtgtgcctctctgttcataacacaggagacaaagcattaacatcccagacgaaaagccctggcctcctcgagggacttatattgtagtgctggtgggaagagagggactatcaatacaataaatgagtaaataatagaatatgttaaaagaac

SEQ ID NO: 859753 - DNA, 625 bp, Homo sapiens
tgcacattttttttccaactaaatgacgattgaaaatcaagtattcttgggatgggaaagtcctgatagggagggctgactttttgtagctatggttcttcaggacctacttcaggacttgagtagcgggaactgtggtatacacagggatcctggaaccaagcccccatgtataccaaaggacaactgtagttggaagtagttttgaagtacagttttttcccccaaggagctcctggttttgtggggcaagggcatacatggatagttatgccactgtgtactctgtgcatgtgccaattatgcttcaggtgcttggggacaacaggggaagaggactaaagctgagtggttaagcagtgtttcccaaaagggatacctgagctgggttctgaaggtagagtaggagttggcgaggccaagatggcggggatgggcatgggaagctgaagaaatagcaatgcaaaaatgtactcctcaaagagaacagcgtgttcctccctgagtctttctcaccttggccagtggtgctttttcttccaggatgctggacactgaggagtcctcctgggcattgttgcttccctcatactccctgtcaayacatcttatgtgcagtcacact

SEQ ID NO: 859754 - DNA, 604 bp, Homo sapiens
taaccaggggacgctcagggatccagctgcctctcacatctgggaagatttcctggaaccaagacaccctggctgagtcaggcacccgcatctgacaatatggccagagagyttttacgaaatgtgaaccaactggactctcaacagcttctccccaccccaccccaacctgtgagtgggactctgatcttgcctggggctccagcccagcccctcagggttcaggggtaaatctcacttccccgaggttgggttaggtatggttatgtgaccagctgtggccaatgagaagcgagaagaggcttttggacagaagaatctctgattctctttcacccacccttgccacatccatgaaacggaagggttcgtcgctgggttttgagacttttttccatgaagctgaaggccaagggagctgaaagccttgccactgaatgctgaaacaaccttcactggctactttagagataacattcataggtcaccatggtaatggtggcttcggttgtttttcaggaattgggccagctgaaaccagttgagacccttcagctggggaaccgtatatgtgcccaagagatggccatttgatattggagga

SEQ ID NO: 859755 - DNA, 659 bp, Homo sapiens
actcgagtcaaacccttgttaaataaccagtttctccaattgtgtcctgttacaaaaaaaaaaaaagaagaaagaaggaaaaacagattcttactgcacttatgcaaataactatattgcygtaagttaagaacactcacaaatagtttccaaattctgcagaaatcaggtaaagagaaaaaaacatattccaaattttgtttttggacaaaactttgttttataatccttaccggagcgtactttactcaattgttaaaagctgtaaatagctcaagaagggggggtttcttgactctgaaaaacaaaacagaaagatcaacaacattttaagcaaaaagtcataaaagattatttcagtcttttattagttcagtctatgcaattaattcctgttttgcttgatatatatgtgttagttttccaagagtcttggatgatgttttctttttctctgcatttaagagtactcatcagagtcctatagctgattataaaccaccttttgaagagaataaaagcaagacaacaattgtctatggatgacagaaagacttagagcagtcatggttaaagaattaatatcattgactaggaaatgtggatacctctgtggcatataataaattaacatcataacaattataattattattgat

SEQ ID NO: 859756 - DNA, 592 bp, Homo sapiens
atatttctgtgatctgtggatcaagccacatggtggatgtctatttacacgtctgtctctcccactggcttctgagctgctggtgmgcaaggggctgtgcctcacccctctctgcacctccagctcctgccacagcttggtgtgaagcacatagttaataggtgggaactgtattgaattttggattctgcaaaaaactgctcattttaccttccttgaggtcctctccggaagccttctagggatatcctggatctgcctctccctctccgggacctgtcctgctctgcctcccatatcatgtgagagctggatggagtcagatgtccccaaatgtcagtatctctctggagcgtggtaggaatggtgggtagagaggagaggtcagagatcggaggagcagataacgaagagtctagactccaaaaagtcaaggtttcagtatcagtacctgtgtcacaaaccaccccaaaatgtagtggcttacaatagccatgttattatccctcatgattctgtgggttggctgggctcattcaggccattctttttctttgatggtggctgactgcgagtcacctggagactcagc

SEQ ID NO: 859757 - DNA, 645 bp, Homo sapiens
atgtctggcaggcagtgttccttctcctgtagatggttcacagatttacacctgtgacattcctctggaccccattgttatccccaccttacaggtgagaacactgacacacaggatggtcccgctgcttgcctgtggtcacagtatccggagcatggctgcagctgggaaccacctccaggcgacaaagcaacccagcacgggtgggtacggaggggccgttcgtctcgctcacagtctgggggtggcctcatggtgctgctcatcacagcgggcatgttggctggggctgactgtgagaacccagctctgccccagaggcctggccttggctggttctcacagggaggaagagagcccagagcagtaagcacagcccgtcagagagcgggcagagacgcactgcgcttcctgagaccgcggctcaccgctcccctgcattctgctcttcaaagacacatgcagaaccttcagggtgttgaaaggggccgcaaagatcacagctctcagcgggggcgcggtcagtcggccacagcggtggagatggcgttgaaagccggggatgatgactgctgsgctgggatgactgacggctgagccaggccctgctgctgtgcttgttgtgtaagccgagctcccagggct

SEQ ID NO: 859758 - DNA, 687 bp, Homo sapiens
atgtagaatcagtggcagccctgagcttgttttccttcaaccagwggatcccatctgagggtgatgggagacagggacagaccatcaggcattggagcctcctgcgcagttcacaatagggttcgccttcctacgagaatctgatgctgctgttgatccggcagaaggtggagctaggacggtcatgctctctcgcccgtcactcacctcccactacagggccccgttcctaactggccaccgaccggtatgcgtggggttggggacccgtgctctgactcatacctggcatcacgcactgttacagacccttggagggctgtgggtgggggctcaacatctgaagtggaaaagccgattctcacagctcactgcttaagtgtattatttttaacttttgattcactttgttaaactggcctttaaaattttgttccagttgacattcctacccactatgtataaaaatatctttttcccacagacttgcgaacattaagaaaatcatgtttagcgcctaacgtagaaggaagaagaaaaacatatgaaatgtagcttttcaattagtgacaccttgatcatttaaattgcttactagaaatatttctttcatctttctgagtttgaaactttgtgtagtttgactctttccctgatcttctcaagaaaaagttaaaataaatcatg

SEQ ID NO: 859759 - DNA, 653 bp, Homo sapiens
agatttccatccactttattttcttataaaacggcactaagcaccttacagctctagagtgatttagtgcaaaatgcaaacatgtccaggaataaggcaccgagcctggggcctccctgaatgcctgatgctccgaggacttgtctgcacccagctgttgtgcttccttcattatcacagaggtgagcacatgttacatgcaaaacgctacgaaaaattattgtgatgtgccaattacaattttccctattcaaatttggagcatcgagtagaagaatgtccttaaaaaaattcttcccaaatcccaaatgattagtttattcattttgccatcatgtacctgttatttaaattcaaaagtagtgatgttagcgttgttgttcacaggggtgtgggttaacagttctgaggccatttttgtctgctgctgagtcagaacaaatgcgtatgatgggtggtggatgggggagctggatttcttgctgtcagagtgagagttaaatatcaataacagcatgaggctaaatgacccatgaggtcacgggttagggctggagacaccagcaagaactcatgttgggcttactagagatccatacagttacatrcagagctatttatagatacatgtatatacacagtatgtgcacaca

SEQ ID NO: 859760 - DNA, 532 bp, Homo sapiens
ctctgagttcactaggcccccacctccctgcgttccccacccactccacggctcactgggaccactctgaagttggctgacgttcaacttttccctggggtgggtcttggagactccaaagaggagggcacggggtggcatgggagggggttttggggcacacggcagttgtttattatcttaatagtttaatgattttattttaaaaggtattacaaggaatataactaggtcctcaaacctgtaatttggcttctcatctctgcagtggtggtggcagcgacgaggatgtgttttgtatttcactgatttcaaatgagcctgggaagccttttcccagcttcccattgggctttctgtctttttctttctgaagtaggaatcgcctctctagtcacgacattagttcttcattgacgttctgctttctttcagctgatcatygggccatagcgtcgtgtactggagacaaccactccgtgttgatggagaagtcgcccaggtcttgcctggtggtgtcccatgttccctg

SEQ ID NO: 859761 - DNA, 566 bp, Homo sapiens
gactgacaagcagatggttagagacaaacctggaggaaacagctggatcaaggagatgctggcccctgggggctcgtgagtttgtggtaaatccagagtcaatgcaagaggttccaccccatgtcctgtcctccccatcaggcctgttctacagaaggagggccttctgtatgctgcttcacaggcaaaggtgacaccacctccctgggaatcgccctctctgccttggcaggttatggatacagatagcttcttgagatgggttccagacagttgtgctggattttttcaagaggaattagtgaggcccaccatggccatcttcttgagggtcaagttgaaactaggagagattaataaaatgaatgaaatgaaaaattcaatagagagcttcatcagcatatttgatcatgcaagaggaagaagtagaagaagaggaggaggaggaggagaaggaatstgcacattcaaagactcgttatttcaaattatccaatcagaggagaaaaaggttttttaaaagattgaaaaagcatgacaaaaccctaagggatttatgaagaaaa

SEQ ID NO: 859762 - DNA, 499 bp, Homo sapiens
cccttggaggtggaagctggaggggaagggtctgaggcagagataaaagcaagagagggattccccaggctctcctggggacgggaggatggtgtctgcccagctctgcgcctgcaatttccacgccatacatatcacagccatgtctgggtcacgcctgcccagagcccaccgggcatgcacatatgtgacatgtccgaagctgagggcaagccacccagggcagagtatgcccccaggctctgcgcctgtcccagggcagttgcaatgcagcaagcgtgttactgttacggaggcaagaaagccagcgccttcccacgcacgcacacaggctaggtggcctcttctgcacaagatgggccaccaacaaactcacctatgctacatacctgctccccaccgcccccacctcactcgtaaagtatggggaaaagaaagcaaaarccctttccgacctggtcttcttctgcgcctcttcttggagccgaagagtttgacc

SEQ ID NO: 859763 - DNA, 511 bp, Homo sapiens
aagcagggcacccattcctcccacccatgctgacccaaaaaagcatgagtgagtccagccgaggtcagtagggagctcaccttagcccagccagtccacgaccaatgcacaagaggcatgatctgtagtaaatgacttgttttaagccacttaatatgggggttatttgtgactcagcaatagctagctgatacagcatccttgattcctctctccctcacttccaacatccaatccatcagcaagctccaaataaatctacccacttctttccaattgcctggccacacccttagtccattccagcatcatttctcatgtaaaccactgattctctctcacctacactcttgcctgcctccaatccattctctacacagaaattgggattctttcttcaaagcaaaattgaattaggtctccctagacctagagtagagacaaatcttmataaaatctcagctcctaatgatgcccaccaggcccctacaggatccatcccctgatgacc

SEQ ID NO: 859764 - DNA, 612 bp, Homo sapiens
tggtcaacttattttctgtaaagatgccaagaacacatgatgaagaaaggacagtctcttcaataaatactgcgggaaaaactggatatctacacgtggaagaatgaaatcagacccttatctatcaccatatacaaaaattcactcaaatgaatggctattatcaaaaagacaaaaaataataaatgctggtaaggatgtgaaaaaatgggaacctttaaacactctcactggaaatgtaaattagttcaaccattatggaaaagagtatagaggtttctcagaaaattaaaaatagaactaccatatgatccagaattctcattcctaggtatatatccaaaggaaatgaaatcagtatgtcaaagagatatctgcactcctatatttattgtagcagtattcacaacagccaagatatggagtcaacctatcgtccatcaacagatgtacagataacaaaaatgtggtatatatacacaatggaatactctttagccataaaaaggaatgaaatcctgtcatttgtggcaaataaacctggaggacattatgttaygcaaaagaagccaggcacggacagacaaacagcgtatgctctcactaatatgt

SEQ ID NO: 859765 - DNA, 676 bp, Homo sapiens
tccgtggtggggaattcccaagtataaggaaagtgtgcacagatactgtgccaccaaaagtccyctaaaagtccatttcaggggctttgaaacccaagctgacttgggttttaataccagctctagtaatcgcaggccatataatttgcagcaaataatctctctgattctcagtttcctcatcatgagagaggagtattaacacctactttcagagattttattcaaatcttgaaaataatacatccaaaattacagcatattataggtccttcctccacacgcccaacaaacgcaattgagcaattggacaggaaaactttttgacaacgtaccaccatgaatggccttaatgctggcgatctctgccatgggatattgtcttttccatgaacatgccagacaccatcttcataaaaagaaagtcaatcttgacgtgtcttagtccatctgtgctgctataacaaaaataccttaaaataggtggcttataaacaacagaaatatatttttcacaattctagagcctggggagtccaaggtgaagacagtggaacatttcatgtctggtgaaggtccattccctgtagacggcactttctcactgtaacctcacatggcagaaggagtgaggtagctctctggggtctcttttgtaacagcactaatctgacag

SEQ ID NO: 859766 - DNA, 562 bp, Homo sapiens
tcaatgctaatttagtgctgaaaacgactacgatgtaaaacttctgcaattccgtggctgactgagtttgactggccggttcttctgctccacatggtgcagctgaggttgctcacacacttgggagcttagctgagagcaacactgaggctgaaacgtccaggttagcctctcaccctccggggcactctctccacatggtctcttgtcattcagtggtctaacataagcttttttcatagcatgatggctggtttcccagagtgagtgtttcaagaggaggggccccaatgtgcaaatgcatatcgatcctctacttatattatgtttactaatgtcccattggctcaagtcagtcgcatggccacacccacagtccaggcgggaggggactacacaggaagtgtgattcataagaagccacccacrtgaagtctaccatgattaactcattttactataagccctttgaagacaggagctcatatgctaggtgcaccatcgtatccccagtcttagaagattattgaatacatccaatcctcacaaccaatccaagaag

SEQ ID NO: 859767 - DNA, 658 bp, Homo sapiens
cttgcacactggtggtgggaatgcaaattaatataatcgttatgagaaacaatatggacgttcctgaaaaaactaaaaatagaactaccatatgatccagcagtcccattcctgggtatatatctaaaggaaatgaaatcagtatgtcaaagagatatttgcactcccgtgtttgttgcagcattattcacaatagtcaccatgtggactcaacctaagcgtccatcaacagataaatggatacagaaaatgtgatctatatacacaatggaatataactcagccttaaaaagaaggaaatcctgttatttgtgaacacaggtaaatctgggggagattatgttaagagaaataagccagacatggaaagacaaatgttgaatgatcttacgtacatgtggaatctaaaaaaattgcactcacagcagcagagagtagaatgatggttactggggctgagggtggggacattggggagacattggtcaaacaacacaaaatttcaattacataggaggaataagttcaagagatctataacatggcgactatagttaataacaatgtattgtaattgaaataaaaaattgctaggagagcaaattttaaatactctccctcaaaaaaaaatggtgsgtatgaggtaatgcatatgtta

SEQ ID NO: 859768 - DNA, 349 bp, Homo sapiens
gggggctgacccccccacctccctcccggacggggctgctggcctggcgggggctgacccccacctccctcccggacggtgtggctgccgggcggagacgctactcacttctcagatgaggyggctgccgggcggagggactcctgacttctcatatggggcggttgccaggcagagggtctcctcacttctcagacggggcggctgggcagagacgctcctcacctcccagactgggtcgcggcggggcagaggcgctcctcacatcccagacggggcgttggggcagaggcgctccccacatttcagacgatgggtggccgggcagagacgctcctcacttcctaga

SEQ ID NO: 859769 - DNA, 349 bp, Homo sapiens
gggggctgacccccccacctccctcccggacggggctgctggcctggcgggggctgacccccacctccctcccggacggtgtggctgccgggcggagacgctactcacttctcagatgaggtggctgccgggcggagggactcctgacttctcatatggggcggttgccaggcagagggtctcctcacttctcagacggggcggctgggcagagacgctcctcacctcccagactgggtcgcggcsgggcagaggcgctcctcacatcccagacggggcgttggggcagaggcgctccccacatttcagacgatgggtggccgggcagagacgctcctcacttcctaga

SEQ ID NO: 859770 - DNA, 515 bp, Homo sapiens
ggtatgtggtgtgtttcatatttcttgctgaccataagaattagtataytatcatcagggtaacagaccatgatgacatttgataggttgtaacgatggcccctccagaccacaatgacaaagaccaagagagctgacataggcctaagtctcaagggagagggaagaaagtggttactggaacccgaaaggagaaagtcatgtgaagaaggtttccttgacaggatcccttgagcttcagctgaggaataaaaatcagtcccacaagagagcagtgagaaaaaaaaaataacccaacataattttccttcctccttctgatgtcctgctgggactccccattagccaaatgccaactgggagacagagggaaaagaaactgttggtgtgtccattccagactcccagacatgggagcagggttaaagagagtggatgtggacaaagtgaaggtatctgagagagtgcagagaagccatgtttgccctagtgagatgattaacattagtaataga

SEQ ID NO: 859771 - DNA, 604 bp, Homo sapiens
cccaccctatctagacatatggcattccatatggggcacagggatccagggagacatatcatgaggtccctamctctgggagttcacagtctaccggaggaggcaggtacaaaacactgagaatactaataacagtataaataaaaagatgcaggccgggcacggtggctcatgcctgtaatcccagcactgggaggtcgaggcgggtggatcacctgaggtcaggagttcgagtccagtctgataaacatagtgaaaacccatctctactaaaaaaaaaaaaaaaaaaaaaaaaaaaaaaaaaaaaaaaaataccaaaaaaatagccgggcatggtggcaggcacctgtaatcccaactactcaggaggctgaagcaggagaatcacttgagcctgggaggtggaggttgcagtgagttgagatcacaccattgcactccagcctgggcaacaagagcaaaactccttctccaaaaaaaaaaaaaaaaaaaaaaaaagatgcagtggtaggcagggtggaagggaaagctaaacgagcagaatcgcttgcacaggtggcagggaggcatgagcctagacctgttatgcaggacaacttggcca

SEQ ID NO: 859772 - DNA, 553 bp, Homo sapiens
attctcattgactgaacccaacaggagcccaactatccttagaggttagcttttggtggcacagaagaatgacagaaaggtctggggagwggatctgggaaagtaaatgatgaacacccagcgtagcccattcactgccaccccactttctccctttgcattcactcttacgctttggatggaaagctcatgatcttaacaggtggaacacataaaattttagtagctttatatcatcacctgataatgtcaattcagtttcaccttaaacctaaaatattaacaccaggagtgctctgctctttcatataaggcagttggggtgggaggaagaagacaaaacataattaattcacctaaaatttagctgctagagttttcattgctgtaagtggtcacaagaaattaattggtaatcattgcttcttttttccacacatatattacatttactacctgcagagtagcttctgcatcatcttgagatgggatgactcaaaccctcatttctttagggtcttagtcatcagctatccttttttattgaactgca

SEQ ID NO: 859773 - DNA, 551 bp, Homo sapiens
attcatcacaatgtttcaaaaatcaagcagatatatcagtaataggacaggtaagaagatggtcaccaaaagagcttcaatgcccagagagagaggaaaagctctttccatgagcgttgcaggtaagttttcttattagtatctatcataataaaattaacccattgcatgagtacagagcactttctaaagcactttcttttccctgcatgtgatttttttttcattagaacaactctggaagacaattacccataattctggccaaaaagaaagacacctgctcaaccttgccaattggatattgcaaatagaagagattagaaagagtagaagccaaatctagcgaccaagactcttgccttccatatagaattaatatcaaatcattcacattaaatcaggatcattagtacataaacaagagtatgaataacaaaatccattatactgactttcaattaaatcttaaaatttaaaatgaagatgctcatagtcatagtaaaccaataacatactacattgmtctatatgttaaaattttcttaatg

SEQ ID NO: 859774 - DNA, 534 bp, Homo sapiens
actttcatggaaacaaaactcagaaaaatagtaagagaaggaatctattaaagaagagctacaaaaatcccactgccaacataattaatggtgaaatattaaatatttcccacaagagtggaaacaaagcaaggatacctgctcttataacttgtattcgattttgtataagaggttccagcagtgcagtaaggcaaagatacataaaataaaacaaagagcacaaatgtttgaaaggaaggaaaactgtcttcatttacagaaaatgtgattgtttatatataaaattcaaataaattataaaaataattactagagttaaaaagtgaatttattaaatttgcagaatataaggttaataaaactcaattgtcttatcttctagaaataaaaaaatggtaratgaaattaaaaattaatttcatttatactagcaccaaaaacataaatgtaaatttacttaggattaatttaataaaagaagtataatagccctactataaatacagagtactgttgagagaacttaaagaa

SEQ ID NO: 859775 - DNA, 534 bp, Homo sapiens
actttcatggaaacaaaactcagaaaaatagtaagagaaggaatctattaaagaagagctacaaaaatcccactgccaacataattaatggtgaaatattaaatatttcccacaagagtggaaacaaagcaaggatacctgctcttataacttgtattcgattttgtataagaggttccagcagtgcagtaaggcaaagatacataaaataaaacaaagagcacaaatgtttgaaaggaaggaaaactgtcttcatttacagaaaatgtgattgtttatatataaaattcaaataaattataaaaataattactagagttaaaaagtgaatttattaaatttgcagaatataaggttaataaaactcaattgtcttatcttctagaaataaaaaaatggtaaaygaaattaaaaattaatttcatttatactagcaccaaaaacataaatgtaaatttacttaggattaatttaataaaagaagtataatagccctactataaatacagagtactgttgagagaacttaaagaa

SEQ ID NO: 859776 - DNA, 630 bp, Homo sapiens
actttgtctgaattatcgattgttctctttaaatcctagygacctttcaaaggtgaggtcaagttgatctcttcaaaaattctccagaagcatgaccgtttttactggttattattagtataattcatctgaatcttaacagtttgtgatttcatccaagtagacattctgctatgtgggtgtcctatatgctaattgcaaaggatgatggagtggaatgggaaattccagagaaaaataatccatggttgttgccttcaataagtttacagtcacatgtgatagccataagtaactaaccataacggatttcagaaacatttcatgaaagaggtaacaaagacatttctgtggaagcagaaataaagcctgcatagaatggaaagattggaagtcaattttttaataagcagttttgggaatgggcaggattttggagaagaaaagatcggaaaggtttccagggatggataaataacatccaaggtttccaaagtataaaaatgaatgatatatctaaaggaaaaataataattctatcccacctggtgaataggataacatggtggggagggtgaaatgggaggtatgattgaaggaaggtagtgaaagggaaaagagactataaag

SEQ ID NO: 859777 - DNA, 630 bp, Homo sapiens
actttgtctgaattatcgattgttctctttaaatcctagtgacctttcaaaggtgaggtcaagttgatctcttcaaaaattctccakaagcatgaccgtttttactggttattattagtataattcatctgaatcttaacagtttgtgatttcatccaagtagacattctgctatgtgggtgtcctatatgctaattgcaaaggatgatggagtggaatgggaaattccagagaaaaataatccatggttgttgccttcaataagtttacagtcacatgtgatagccataagtaactaaccataacggatttcagaaacatttcatgaaagaggtaacaaagacatttctgtggaagcagaaataaagcctgcatagaatggaaagattggaagtcaattttttaataagcagttttgggaatgggcaggattttggagaagaaaagatcggaaaggtttccagggatggataaataacatccaaggtttccaaagtataaaaatgaatgatatatctaaaggaaaaataataattctatcccacctggtgaataggataacatggtggggagggtgaaatgggaggtatgattgaaggaaggtagtgaaagggaaaagagactataaag

SEQ ID NO: 859778 - DNA, 590 bp, Homo sapiens; identical to SEQ ID NO: 853020

SEQ ID NO: 859779 - DNA, 627 bp, Homo sapiens
aattggtaccagtagagtggggtgctgctgtaggtactggaaaatgtggaaacaactttggaactgggtaacaggcaggggttgtaacaatttggagggctcagaagaagacagggaaatgtggaaatgrttggaacttcctagagacttgttgaatggctttgcttaaaatgctgatagtgatatggatgatacagataatacagattcttctgtatctggcagaataaattactaagcagcaaagcattcaaaagatgaattgggtgctgtgacaggtcttcagttttataaggaaagtagagaataaaagtttggaaaatttgcagcctggcaatactatagaaaacaaaattcattttctgaggggaaattcaaaccagctgcagaaatttgcataagtaatgaggagctgaatattaatccccaagacaatggggaaaatatctccagggtatgtcagaggtcttcacagcagaccctcccatcacaggcctggaggcctaggaggaaaaagtggtttcatgggccgggcccagggtcttcatgctgtgtgcagactagggacttggtgccctgcatcccagtcactccagtcatggctgaaaggggcaaacatggagctca

SEQ ID NO: 859780 - DNA, 601 bp, Homo sapiens
gattcccctattcaataaatggtgctgggataactggctaaccatatgcagaagattgaaactgggccccttccttataacaaataccccttccttataacagaaaataaactcaagatgaataaaagacttaaacgtcaaactaaaaactataaaaaccctggaagacaacctaagcaataccattctggacataggaactgagaaatatttcatgacgaaagaaaaaattgacaaatgggatctaattagatttgacagcttctgcacagcaaaactatcaataaagagacaacctacagaatgtgaggaaaatttgcaaactatgcatctaacaaaggtctaacatccagcatctatacggaacttaaacaaccccattgaaaagtgggcaaaggacatgaacagatacttttcaaaagaagaaatacatgtggccaacaatcatatgaaaaaaagctcatcagtgatcactagagaaatgcaaatcaaaaccacaatgagataccatctcacaccagtcagaatggctatyactaaaaagtcggccaggtgtggtggctcacacctgtaattccagcactttgggaggccaaggcgg

SEQ ID NO: 859781 - DNA, 546 bp, Homo sapiens
ttctagccagaagacccagaaaagtagcccttgggggctacagagtgtgggggagaycatagagaagagagagctagaagaaaggacatctgtgcaggaagttccaggttcatctctgatgtgtaaaggtgtggaactgaccccaagcagcatagcaaccagctttgagaacatgattactgtgtagttaagactgacttctaggtggtgcacacgtgggtttccctgaagagcgctgcaatgactttgaaaacaaaattgacattaaaaccacagaaggcacgttaggacttgcagtctaaaactaactaggctgattgcctgctaaaataatgaccaaaaacaatcaacacactacagaggattttaacaaaatcagagtgtcataataaaacacttaaaatatctaagatacagtccaaagtgatataaaataccagaaaaatctccataatgctcaatgtaaaagacaacagacaccaaccccaagattaactagatgttgaaattatcagattgtaaagcagctattatattcatgaagag

SEQ ID NO: 859782 - DNA, 598 bp, Homo sapiens
gcagacggcccaggcagacagagaagcaagtaaagtatgtgaggagctcatgaaactggagacaacaaaaggagagacccaaatgactggattgctagtgagaaagaaaaataagaaacatgcccaacactctgccccttttcctcccaaagtatttggtgaattcttaagctgtgtggggcagaagactaagtaggcaggaagcctctgagaagcaaaagggattttttggtcaccttgtggtcctgaggaaataaggactggagttcaggacctcctggaggggaaggggcagggctcagagaataacccagtgatatggtttggctgtgtccccacccaaatctcatcttgaattcccatgtgttttgggaggcacctggtgggaggtaattgaatcatgggaggaagtctttcccgtgctgttctcatgatagtgaataggtctcaagagatctgacggttttaaaaagaggcgttcccctgcacaagctctctctcatttattgcctgccrccatccatgtaagatgagacttcctcctccttgccttctgccatgattgtgaggcttccctagccacatggaactctaagtc

SEQ ID NO: 859783 - DNA, 620 bp, Homo sapiens
tgctgccaccatgcctggcctgctccaaatttattagccttgctaataccagaggtttcctctttttaatgtcctaagccatgcacaggtgtgtgtgaaagagagctgagcatctgcacgtgtgtggctgaagctgcattattgctggaagctgaagatgcataggcatctgaggaggcctcatggatgccgccacccccacctccccccttgtgggattgaaaacgctttgtgcaccgtctttagctccaatacgttttcccacctgtccaagtactagtgtctgagaggctggattccctgggtgtacagacctggctcagtctctgtaggagatgatctcacctgggattctgcacaagaagaggaagccccaccacagagtgaccgtgagccctgtgcaaggaagtcaaccacagacatccaagcctgccccagccactccagccccaccacagagtgaccgtgagccctgtgcaaggaagtcaaccatrgacatccaaccctgccccagccagtccaggcctggggaagactcctgctccagctccaggtgcctcctgattcggctgtctctacgttgcttctgcactcactcagggtttggtctgcttctcttt

SEQ ID NO: 859784 - DNA, 608 bp, Homo sapiens
agacattcatcttggctcactccaaggttacaaaagtgctttcctggctgggcacagtggcttatacctgtgatctcagcactttgggaggccaaggtgggaggatgaatagaatccaggagttggagaccagcctgggcaacagtatgaaactctgtctttacaaaaaaatataaaactttagccaggcatggtgtcatatacctgtggtcccagctactcaggaggctgaaacaggaggatcacttgagcccaagaagtcaaggctgcagtgagccaagatcacactgccaccactgcgttgcagcctggacaacagagaaagtccctgtcttacaaaaaaaaaaagaaaaaaagaagaatattttcctccacaatttttattgtcttgtctttcatatttaaacctgaaatttatcttaaactgatgttcgatacgctatgatgtagaacttgaagttaattttttcccatatgrtctttgattcctcaagcccccattactgaaaagaacaccctttcctaccgtggcaccaccccacctctgtcataaatgagtggatggcatctgagtctgtctctggacttttcttatttcagtggccagc

SEQ ID NO: 859785 - DNA, 610 bp, Homo sapiens
gggagggtctccctccccggccggggtgcccataacacataacacgtaacacgtctgctgcttttagctctcaacagggctggttgtttcatttcctgagtcctcacaggtattctgccagatcctattttaaactgaaagtcctcgttgaattcacactcaatcccaacattctgcttcctcctcgaaggtgtcagacacattggctccgcttctgcacaccacaaacatatttccataactgactgctttgcgcgtgaagccgtgccatcctttctgagtaaggattcacatgttttcaaggatttctgacaggtttcgagaaaagagccgtcgtctccttttccgttagccatctcagcgttgcgcgctgttccgaagcaccaccttcctggcacaggtcactcgtggcttccagatggcacagttaaggaagaggaggcagcagggagcacataaatcctgacactcactaatagastttattaatagttcacgcatggtgatcggccggccccaaacacgctccccgtagttacggatgacccgcttctatattctggcactgctggaaaagacttcatcggactcattttaattattttccaga

SEQ ID NO: 859786 - DNA, 569 bp, Homo sapiens
caatacttacgacattttgcccactcattcatggacatgcaaatagctatgaaaaatgtgagtcaccaatatatacattctgagcttgaaaagggggatactgccttcttgtttcakctctcatactataaaacaattgtccttttcctggtctatttagtgccacatttgtcacatttttctacttcttgttgatgggttagctgtttaacatggccccttagcatagtgctgaagtactatctggtggtcctaaaggaaagaaggctgagacatccttacagagaaaacaagtaggtgctagataagcttcgttcagccacagcttctagtgctgttagccatgaattcaatgttaatgaatcaactatatatatgataaaatatggggtctttaaacagaaaccaggtaaaacaagtttatgtattgatggctgctgaaaacgtggagaggctcacaggtacctaaccctgtatttcctctaggagaaatggttcagtattcactaactaaatgtttacattgactttacagagcataactaccatgaataacaagaattgactat

SEQ ID NO: 859787 - DNA, 517 bp, Homo sapiens
atctaggcaagcttcataatcatataagaagtgtgcaattcagacttttcaaggccctcccccgctcttttttttttttttttttttttttttttttttttggcagggccttactcgcccaggctgtagtacagkggcatgatcatggctcactgcagccttgacctcctcaggttcaggtgatcctcccacctcagcctcccgagtagctgggactagagatgcacgataacgcccagctaatttttgtatttttagtagagacgggatttcaccatgttgaccaggctgctcttgaactcctggcctcaagcgatctgcctgcctcagcctcccaaagagctaggattaaaagcgtgagccaccgcacccagccccaacagtatacttttgagaacatcacagggatgcccttcctcacttctccccatcataattccttccccaatttatattcatttatggagatgaccagacacaggcaatttccatgcttgagtgctgtgaactttcttac

SEQ ID NO: 859788 - DNA, 616 bp, Homo sapiens
catcatagctcctgtgctggcttactgcatgaccaacagagagctccagcagggcagcccccatggctacacactagcacacccactctttccctctcactgcagctttcctggagcccatggccacccccatatggctttgcatgtgtgtatgtgtgtgtgtgagtgtgtgtgtgtgtgtgtgtgtgtgtgtgtattttgccttccctgccctgccagggcatgtgtgtgtgtgcaccctctcctgactttactgctggcaggagtgcattccaccacccctactttgctgtaccaccacagaagccagagcattggctggtatcaagcccaccagccctgctccttctggtgaactgccccagcaccaacagtgcccctagagtgaaaccaggcatagagaaaactggactcttccccaccctgggcagccacacagggcacacacgaacctgcacccatcagcaccctgcccccatgctaacaccaccasaagcacaaccatgtacaaagttgccagtgtgggggccccaagccttgctgtctctgcaactgctgtgaacactcacataaaggcaggcaccccagcacctgctagtaccttgccacaatgaat

SEQ ID NO: 859789 - DNA, 616 bp, Homo sapiens
agcttacattcccaccaacagtgtagatgggttcacttttctccacagtgttgtcaacatatttatttaaaatatggtcctttatgcatgctctttagagccatctttaacatatatcaactgtccagatatgtgttgtctatttcacaactctagactgttcaaatgatttatttgactatcttcacctcaatcccacactctcatctttactgtagctatataatgagtcttgatacctgttggttcatccttcacttatattatttctggtgctctatttatccaaatagatttgaaaattatcttgttaattttcacaaaaacctaatagaattttgatggggattggatgaatatgaccaagaagtttagaagaactgacatcattaaaatatatagtcttctaatctatgaataggctatactcctccattattttatttttaaaactactgctagggtataaaatgcaattgatttttatatatggaccttgtggctagcagtctcacttaattcatctattaattctaataatcttttatgcatatttttaaagatttttacrtactgaaccatgttgtctgtgaataaaaactgtattatttctttt

SEQ ID NO: 859790 - DNA, 546 bp, Homo sapiens
acttttgggtaaacaatgaaagtaaggtaggaatcaaaaaaaatttgaaactaatgaaaataaagttacatcatagcagaatctacaggagattcagtgttaaaaggaaagtttacagcattaaacacccaatagcaaagttggaaatgtctcaagttaaaaacctaacgtctcacctagaggaaccagaaatacagaagaagacaaacctgaaagctagcagaagaaaataaataaccaaaatcagaacagaacttaattaaattgagatgtgaaaaaccatacaaaagatcaactaaacaaaaagctgattctttgaaagaataaataagattgatagaccaccagttagaataatatagaaaaagaagtgagaatattcagataaacacaatcagaaatgaccaccagccccacataaatacaaacaactctcagraattatcacaaatacttctatacatataaactagaaaacctagcagaaatggataaattcctgaaagcatacaacctccgaagattgaaacaggcataaattgaaat

SEQ ID NO: 859791 - DNA, 617 bp, Homo sapiens
agaccaatgacactatgaagaaactgcatcaactaatgtgcaaaataagcatttagcatcatggtgacagaakcaaattcacacataacaatactaaccataaaggtaaatgggctaaatgccccaattaaaagacagactggtaaattggataaagggtcaagacccatcggtgttttgtattcaggagactcatctcacatgcaaagacacacataggatcaaaataaagggatggaggaatatttaccaagcaaatggaaagcaaagaaagcaggggttgtaattgtagtctctgaaaaaacagagtttaaaccaacaaagatcaaaaaagacaaagaagaacattacataatagtaaagggatcaatgaaacaagaagagctaactatctgaaatatatatgcacccaatacaggagcacccagattcataaagcaagttctatgagacctacaaagagacttagacttccacacaataatagttggagactttaacaccctactgtcaatattagacagatcaacaagacagaaaattaacaagaatattcaggacttgctgtagaccaagtggacctaaaagacatctacaaaactctctaccctaaatca

SEQ ID NO: 859792 - DNA, 633 bp, Homo sapiens
cttgctggagaggagttgcaatcatttggagaagagacattctggtctttggaattttcagcgtttttgtgctggkttttccttatcttcatgaatttatctttgatctttgaggatgatgaccttcggatgggcttttgggggaggggaggtccttttagttgatcttgatgttattgctttctgtttgttagtttttcatctaataatcaggcccctctgctgcaggtctgctgcagtttgctggaggttcactccagaccttttttgcctgggtatcaccagcagaggctacagaacagcaaagatagctgcctgctccttcctctggaagcttcgttccagaggggcactgacttgatatcagccagagctctcctgtatgaggtgtctccctcaggaggcacgggagtcagggacccacttgaggaggcagtctgtcccttagtagtgcttgagcgctgtgctgggaaatgcgctgctctcttcagagccagcaggcaggaacgtttaagtccactgaagttgcgcccacagctgccccttcccctaggtgccctctctgtccggggagatgggagttttatctataagcccctgactggggctgctgcctttctttcagagatgccc

SEQ ID NO: 859793 - DNA, 590 bp, Homo sapiens
acagaacacttgctagcctcaaagcatgactcgcccggaaatytggggctgaatggagagggctttagacgcttgatcaagttcattaggattttcctagatcaaaggataattttgaaaggtcacgagctcccctgaaacagcgaggtacgcttccttagaaccaaaaaatgtgggtgcccaagcccttccccttcccctgtgggcttgggtgagaaaggattccaggtgacagctagtgtcagcagggacagatggctccactccttcaagaggctgccacacggcgctcacctgcgccaccaggccaccttctccgtgcccctctctcacctgccaggtgggccacggcccctccccctcttcagccccgcggtgccccgggctgctctccttgctttctgttctgtgtggcccctgcaacacccctgcccagcggccacagctcggcacaagcacctgagtcccctcatcccagtcccgggtgggcgtcctgccacctcagcctccccagcctttggggctcccatgttctgaggaggcccgaaaggtggggaggctgccttctcctgccttctcctctaactggt

SEQ ID NO: 859794 - DNA, 544 bp, Homo sapiens
ggtaggtgatgccagtttcctttccccaggctcagaccctcccacccaggccaacatccttgtccttttagyggccacagcacagcccacggaaagacgcaccacagttgatgccatcgtgcaggccccttggtgggctttagggtattcctaattattcagcattacaaataatcccacagcaaaagccttcctggaagcttctgcactgatgagcgtgtgcgtttcccaaaggtgagagtggagaaaggaggctcgggaaacattccttggttaatggtgtaaatcgcttttttggctttattatttttttcatgggtagtttaagacagttgcttccgcagccccaggaaccagccaagctaaatagaagaggccggcacaggtgtgctagaaccgggcctggactccttgtggcttgggaacagacctgtgaaagctcccacatctcctcgccagtcatcaccaactagtcaccaccaacaaggagatggcgcagcccctgcctaatcacagcaattaactgttagggtctttgtgcagg

SEQ ID NO: 859795 - DNA, 680 bp, Homo sapiens
caaggagatggcgcagcccctgcctaatcacagcaattaactgttagggtctttgtgcaggaagcacacgatatgctgagaaaaaccagcttttgtctaagcatgcacctctatggactaagttgggtctaagccccagtcacatgcagactgggaagatgtctgctaggtaagtgttgagggcaggtccaccactgactgactgtggcagacttggcaacagcagctgtcacccacagcagtggcaattccccgcacctccccccccgaaactaggacatgtttggcgatgtctggagacattttgggttgtcacaactaaggacggtgctcctaactctagtgggtagcagccagggatgctggtaaacatcctagcatgcacaggagggtcccacaacaaagaatgacccagcccgcaataccaggaatgccgaggttgaggagccctgccccggagcactgattcatgccacatgttgggcctcaagagcttgtttaatccacataatcctgtatggtgggtggtcattctcattttccagatgaggaaaccaargatcagagaggttaagtaactgacccgaagtcaaacagcttatgagtggcagagctctattcaaactctgagcacatgcctttagccaaagctctgcacctggcagacaggcccaacgata

SEQ ID NO: 859796 - DNA, 680 bp, Homo sapiens
caaggagatggcgcagcccctgcctaatcacagcaattaactgttagggtctttgtgcaggaagcacacgatatgctgagaaaaaccagcttttgtctaagcatgcacctctatggactaagttgggtctaagccccagtcacatgcagactgggaagatgtctgctaggtaagtgttgagggcaggtccaccactgactgactgtggcagacttggcaacagcagctgtcacccacagcagtggcaattccccgcacctccccccccgaaactaggacatgtttggcgatgtctggagacattttgggttgtcacaactaaggacggtgctcctaactctagtgggtagcagccagggatgctggtaaacatcctagcatgcacaggagggtcccacaacaaagaatgacccagcccgcaataccaggaatgccgaggttgaggagccctgccccggagcactgattcatgccacatgttgggcctcaagagcttgtttaatccacataatcctgtatggtgggtggtcattctcattttccagatgaggaaaccaaggatcagagaggttaagtaactgacccgaagtcaaacagcttatgastggcagagctctattcaaactctgagcacatgcctttagccaaagctctgcacctggcagacaggcccaacgata

SEQ ID NO: 859797 - DNA, 451 bp, Homo sapiens
caacagcagctgtcacccacagcagtggcaattccccgcacctccccccccgaaactaggacatgtttggcgatgtctggagacattttgggttgtcacaactaaggacggtgctcctaactctagtgggtagcagccagggatgctggtaaacatcctagcatgcacaggagggtcccacaacaaagaatgacccagcccgcaataccaggaatgccgaggttgaggagccctgccccggagcactgattcatgccacatgttgggcctcaagagcttgtttaatccacataatcctgtatggtgggtggtcattctcattttccagatgaggaaaccaaggatcagagaggttaagtaactgacccgaagtcaaacagcttatgagtggcagagctctattcaaactctgagcrcatgcctttagccaaagctctgcacctggcagaca

SEQ ID NO: 859798 - DNA, 541 bp, Homo sapiens
tccacgatgaaaatcattcaaatctaaaattactttgggatcccacatttgaatctcaataagttattctcactgaggtagcaaacttgacattgcaaatatattttcctttgtagtcaaaaatgtttacaactataaggcaaaaggtgggtgtatgtgttgaacttatatttctaatttttaaaaacccaatcatgaaaatttcccttttcagttcttattggcttttcctaggttctcccagctctcgtaattttctttctggcacaaatactgtaaaatggtacctaaattaatttgtcttcaatattataaatttgtcataaaagctgtgcacatatcttgtctcattttgttttcatttgaaactaatactgcaggtcttaatggtacctcaatacataataatcaggtgccttggtccccatgttggtgagtgtttggagttctcttgggctcayggtgtgatttttctccctttaaggttctattttattaaaatttttagatattttgacaattccaacaagcaactaatcaa

SEQ ID NO: 859799 - DNA, 567 bp, Homo sapiens
ttaagtcccaaccctctaatggtgccttggtcttcctggtgacyagttcccatcctgaagcaaccagaggctgccagccatcagtcaattattagcatacaaaaagatatcactttggaaattctaaggattttaggagttgtatgccaagaaacaggatcaaagaccaagtatatatttcacaatatcacatatattgtgtgagttttcattttattatattctgtaataactgtcccattgtcagagataaaacacggtctcttaaaaaataatttggatctacaaacattgaatctaggaatattgaaaactgatgtatgcaactctcagatagttcagggaaaaaatatcctgtgtgtgtatagacagagtgcacacttaaataataaagcaaatggggagaaacattaataataggggaattagggtaaaggggacatgggtgttctttaagctttatttatgcttgcaacatttttaaatgtttgaaattatttttaaataagaagttaaaatgaagaaagggacatggatggacagaatgacataagtggaaatcaccag

SEQ ID NO: 859800 - DNA, 531 bp, Homo sapiens
tggtgactagttcccatcctgaagcaaccagrggctgccagccatcagtcaattattagcatacaaaaagatatcactttggaaattctaaggattttaggagttgtatgccaagaaacaggatcaaagaccaagtatatatttcacaatatcacatatattgtgtgagttttcattttattatattctgtaataactgtcccattgtcagagataaaacacggtctcttaaaaaataatttggatctacaaacattgaatctaggaatattgaaaactgatgtatgcaactctcagatagttcagggaaaaaatatcctgtgtgtgtatagacagagtgcacacttaaataataaagcaaatggggagaaacattaataataggggaattagggtaaaggggacatgggtgttctttaagctttatttatgcttgcaacatttttaaatgtttgaaattatttttaaataagaagttaaaatgaagaaagggacatggatggacagaatgacataagtggaaatcaccag

SEQ ID NO: 859801 - DNA, 627 bp, Homo sapiens
aactggttttccaaaaagcttgtaccaatgattgctcatcttttaasactaatgttatttctcatgtcttttattatacaatgtttgtggaatcaaatatatcaatattttcctttaaaacttatgttttgggattttgtttaggaaactctctactctgaggacatgattttttattggttttaagattttggttgtgtactttggtcttttatacatctagattttattttatataaggcatggatctagatttttcttcgagaagggaaacaactctcccaatcacatttattaaattattcatccttttttcactcctttgcaaaatcacttctttcatataacaatttactatatgtgccttttctaattttgtaatcaatgtttcaaattccacaaaaattggcctgttaatattttgattggaataatattggatttatggattaatttgagaagaattaccaatttgctcacttaaagtctccccacatacaaatggagtattgttgggaaagacaacccatcatggtccctaagcattcacacatgttctttctgagtatgccaaaaatgtaaggcactgaagactcttcaccttggccattctcagggccatgtttg

SEQ ID NO: 859802 - DNA, 622 bp, Homo sapiens
gccaaaccatatagtgggtatataaccaaaggaaacaaaatcagtatcttgaagagatatctgcaccccatgcttattgtgtaattattcaaaatagcaagacatagaaacaacccctacatgtccaatgacagatgaatggataaagaaaatgtaatatatgtgtttgtatgtgtgtatgtatgtgtatatatacacatatatgcatacgtgtataagtgtatgtgtatatatacatacatacacacacatctacacacatgcatacatatatacatacaaggaatattcagccaaaataagaaagaaatactatcatttgaaacaacatgaatgaattttgagggcattatgctaagtgaaagaaagtagacagagaaagacaaatattatatgacttagtatgacttagtgtggaatctaaaaaggaaaatctaattcatagaaacagagaatagaatgatggttgccaggagctgaggtgtgggggaaatgagatgttggtcaaagagtactaactttcagttatragatgagtaaatcctggagatttaaagtacagcatggtgattataataatgttatattgtacacttaaaatttgttaagagagtgatcataa

SEQ ID NO: 859803 - DNA, 629 bp, Homo sapiens
aacagatttgttgacatgtgtcattgattggtattgaggtgtgtgtgtgtgtgtgcgcgcgcatgagtgtgtgtgtagagagraagaaaagggcgtaaggagtggagaggagaaaggaggaaaggaggcgaagaaagagaaggaagatagagaaagagggagagagagagaggtattttgtgctttatttgggaaagtagaactgggtgaatgggatgaggctaggctatgtaagtaggtggagaatgacaacatgcagaaaagtgtgaggctgaaactttgcttgtctctcagtagagttcaaatctagccggttgaaacattcataatcctctgaggacaggcccttttctccttttcttggggaatccctttacctcttaagccctttaggaccttccaacattttcccaccttcctagctatctgacaactctttaatcttttcacagggttcttgctctaatgaatgcatatttcattggtggatctggaaacagttgtattaaaaattatttttttcaggcctcttagataagtcactctttcagcaacagtattgtcaacttctcagagctgagatctaattctgcttcttttaaaccccaccagtggcctagcacaagcta

SEQ ID NO: 859804 - DNA, 620 bp, Homo sapiens
tgtaagaaatcacagagatggtataatcgcaggacatcagaagtgaaagggaccttagatatcatctaatttaatcttttgattttacagatgtacacactaaaagccagagggaaatgtggcatgcttggaaattgtaaagggaggaggaaggggaaaagttcctttcagtaacatatgtagaattgaatgcttaccaagaagtctttttgttgttgttgttgttattgttgttgttattgaaatgccattgaaagtttctataaaatatgtaagcccacttttcttccttgataaatataaccaactgaatattgcagaatcttttttggtgcccaaggatattacaatgtctcagggtcatctttctgaacataggtattcattacccaggactgtagaagttaaaatggaggcaactggctaaatgtgtactgaccctggagcagcccaaggagactgtcacttttactaaatccctgatatcacccgctccttttgaaatcatttttttttycctaaaatctctaggcagaaattttggctatttgaagattctgacccatcagactctgtttgatagagattttactgtaaaaagaaatttaaatgttattttg

SEQ ID NO: 859805 - DNA, 590 bp, Homo sapiens
gaaagatcaccaagagacattgttaaataataaaaccaaagttaaaaacagtgtgtagaatatgagatcatgtgtgggagaaaaggcagaaggataaaaatatacaaatatgctctatacaaacagaacagctcttgaaagacacacaaaataattgcagtagttacttctaagaaggatgaattgggggctggggtagtgagaaagggcaatttattcttcagtgtataacctttgatagcttttcctttttaattcatgtgcacatattattaaattctagtgttctgcacctcataggatgactatagttagcaacaagttattatatagtttcaaatagctagaaaaaggatattgaatgttcccaacacaaagaaatgatcaatgtttgagatgatgaatatgctaattaccctgattttatcactatacattaaatgcattgaaacatctctaggtaccccrtgaatacatacaattgttatttgtcaattaaaaaaataaaatctaaaaagaaaagtagagaaattagttaatggatacagtgtacattatttgggtgatggacaccctaaaagccctgactt

SEQ ID NO: 859806 - DNA, 586 bp, Homo sapiens
tgacatgaagaatggagatttgcttaacaggagaaccaatatatctttacgattacatgatgcatttagttaacgggtcatactgctctgataatctaaatgagaaaacttgygtgctttatttagaacaagcataatacaatttatttcaggagcctacctatttgcttgtggactggctcagcatttcttggcctctgcttttctaggcaatgaatgtggtgagccagttggccgaaagcccttcagagaaaaagtagctaaatgtgacatgtgacatgcttggaaatctttcaggttgaatggctttgaagtaaagtcaaatatcattcgtgtgagacttctgagcataaaaatttaggggtaatatgattaactgcttttaaccaaatgctacattgtaaagctagttgtatattcatgccctttgaaaatgcccaaggatggctcttggaaatatgtgaatctatgtgtgattttgcctgcttttgttgattattacttgaatgagcttactatgcaatctaaattctcaagcagtgggttttgttttctttctttctgagcctccccctgtgcgccatgt

SEQ ID NO: 859807 - DNA, 452 bp, Homo sapiens
agcattgtttctatagattatagatttacttaaagtattccttatgggaaacaaagggatgggccaaaacaaagggatgggctctggctagttatctgcagcaggaacatgttcttaaggtacagatcactcatgctattgtttgtggttcaggaacacttttaagcagttttctgccctgggtgggccaggtgttccttgcccttattctggtaaacacacaaccttcagcgtgggtgtcatggccatcatgaacatgtcacggtgctgcagagattttatttatggccagttttgaggccagtttatggccagatttgaggacctgttcccaayatgtccccctttgttttgcaaagtgatgaaagcaaagtggctttatcacagtgagctacttctcgcaggagtcgggatccacatatgcagaccacacaaagacaaacaacacagat

SEQ ID NO: 859808 - DNA, 694 bp, Homo sapiens
aagaatcaacagcactgaaatggttatactgcccaaagcaatttacagattcaatgctatttctatccaactattatatcaatgacattcttcacagaactatyatgaactattttaaaatttatgtgaaaccaaaaagtagcttgaatagccaaggcaattctaagcaaaaagaacaaagctggaagcatcactttactcaacttcaaactatactacgtggctacagtaacccaaacagcatggtagtggtacaaaaacaggcacatagaccaatgaaataaaacagaaagcccagaaataagaccacacatctgtgaccatctgatcttcaacaaagctgacaaaacaacaatggggaaaagactccctattcaataaacggtcctgggataactggttagctatatgcagaaggtacaagtagaaccccttccttagaccatacacaaaaattaactcaagataaagacttaaatgtaaaatctgaacctatgaaatccccggaagacaacctacgcaataccattctgaactaagtaatgggcaatgatttcatgatgaagatgcaaaagcaattgcaacaaaagcaaaaattgacaagttggatctaattaaactaaagagcttctgcacaacaaaataaactatcagcagattacacagacaactcacagaatgggagaaaattttt

SEQ ID NO: 859809 - DNA, 612 bp, Homo sapiens
cgttttatatataaaaagcaggtgcactgcaaataggcaagtttcctctctcccctagaaaggagaggtatatgtggatgtactggtgtcagagtgggcaacgttatttacttacatgtttgtccatcatgtttctatcctctttattatttacacatcccaattccaaactttattacactcattgttcttattctctctcctctgtccccatcaaaacctgctgattaagttgttttttgtttgtttgtttgttttttgagacggtcttgttttgtcatccagtctagagtacagtggcatgaacacagctcactgtagcctcaacctcccgggctcaagcaatcctctcacctcagcatcccgagtagctgggactacaggcacacccccaacaaacccggctaatttttgtattttttttgtagagatggggtttcaccctgttgcccagactggtctccaattcttgagctcaagcaatccgcccgccttggcatcctaaagtgctgggattacaagcatgaggcactgcgcctcacgggttcaggttctttatctgtttgttgcctattataaayaaaattttgtatatgtagttttctaggaaga

SEQ ID NO: 859810 - DNA, 587 bp, Homo sapiens
tggagcaccataagtaaggcagaaagtgatagaagagtctggcaggaaccagatctatataaagaatttggattttcttttaggttatttattcttaaatattccttgatttattattgtaagtttatcaattgccactaattgctttgggcacaaaaggcagctttgtataatggaaagtattagcatcaaaataaaatcttggcctctaaaggcagaatcttgaaggagctgagccagaccagatgttccaaaagttagtgtatttgggaatcacctgcataatttgataaaatgagaattcctggatcccacccttggatattggtatttatttgttctgatgtaggggcatgtctgaagagtaccccaggtgtttctaatatggatattccttgggccacatattgagaaacaaatcaagtccacttatacggactacataatttaacaatggtatgttatttctagctctgacaccctaggatcatgtaagggctyttatttaatggtatttggtgatcctgggcaacaaagtattcttgtggacacatgaaatcctcctctccactgacttttattttcac

SEQ ID NO: 859811 - DNA, 474 bp, Homo sapiens
aagtgctgggattacaggtgtgagccaccacacctggcccagatttttaattttttgtagagatgaggtctccctgtgttgtccaggctggtctcgaactcctgggctcaagtgattcttccacctctgcctcctgaaatgctgggattacaggcatgagccatcaggtccagtccatttttgtcatttggtcagtctatgattaatcttgtttttgtcttgatccattgcagtcccagaatggccttgtctgatgttggtgacctctgaaattgttcatgttcagcaggagaatgccaaggcctagctgtgggtgccatggcggattttggatgtcacrgactgcttttctttcttttttttggctgttgatctttttttttttttttttttacactttaagttttagggtacatgtgcacattgtgcaggttagttacagatgtatacatgtgccatgctggtgcgctgcac

SEQ ID NO: 859812 - DNA, 584 bp, Homo sapiens
gctagtttttgtatttttagtagagatggggtttcaccatgctggccaggctggtctccaactcctgacctcaagtgattcacccaccttggcctcccaaagtgctgggattgcaggcgtgagccaccacacccagccaaactcatctagttgtatatattaactatgtacagctttttgtatgtcaaaaaaatttttttaagaaagaaaagccccatagaaggactagccctctttagttgaccaggcagatctcaaagtcacagcagcccaggggctgagcatgatgcttgatgacacctgaaagcatacggcaaacaattgttttctgtgatgtccctgtcatgaatattcatttaagaactagaagggaaagaggcccaataaggtctgtgattgtcaaagtaacttcttgggaagaaaagaggaataaggaacataaaacaagcaaataaatttatttgtaccatgaaaaaaattaccttagaataaaatgttttgttaaacaaaaccataaatcagtatagtgtaatcctrgagtaactgtgatatatctcgatgtcttacacttggttatattattc

SEQ ID NO: 859813 - DNA, 446 bp, Homo sapiens
ccgggcgtggtggtgcatgtctgtaatcccagctactcaggaggctgaggaaggagaatcgcttgaacccaggaggtggaggttgtggtgagctgagatcacgccactgcactccagcctgggcaacaagagcgaaactccatcacaaaaaaagagtctggtggtgatgtggaacaatgacacagatatgagggaagtgtttttaggctgagaggaaaaaactagtgaggaggaagagcttgcccaaagggaaagaggatggcttctggggccgagtgtaggagaaagcaagagaatatagtgccaaggacacaactggaaggggtaaccttgaggaggaagtacctccttctcatgaaggtggtgtgggtggatgaacaggcatgggtgaatgtgcagagaastgggggaaagtgaggtgaagagggggacattgaaggagttcc

SEQ ID NO: 859814 - DNA, 594 bp, Homo sapiens
ccatcccatgaatggacttgtgatgctgaaataatttccacttgatcaaaattgatatgatgtaccaagaactataactgtgaggtttgaaagtgaagataatttatgatataaaagtacatatgttaaaaacattttatccatataatgtcagaaacaatgactcaacatttcttattaagaaaaatattgtatgtttaaatggtatgtctagctcatgcctgttctgacattttagtttggaaatgcataacttgtttgatttcacaggctcacttcaggacaggacaacaatttgcctcagcatgaatcgtgcctgagtctcacttgcatgatgtttagaggagactttggacttctaagttggtgttagaacaagattcttcagactattcagatggaatcagtgtattttgtgtgtgaaaaggacatgagttttgtgagacaaggggcacactgctatrgtttgaatgtttgtccttccaaaacacatgttgaaagttaagtgtccttgtaacaatattaagaattacggcctttaggaggtgaatgacccataagggctccactttcatgaatagtttaatgccatta

SEQ ID NO: 859815 - DNA, 617 bp, Homo sapiens
actgaggtgcagagagacgcatcagcagctgggaaggagccaccttgggggagaggagccctcctctctggcagtggaatacagggtggggctggagggtgaacctggctctgctgttccctagctattgtgggacctgggcaatttcttatgctcactgggactcacttttctcatctacaaaatgcggagatggggcttaatttatagggttattttggggattagattttggttagtgcaggcaaagtgcttaaaatagccctgtgaggtggtcggtgctccaagcatgctgatcctccatgagccatcctttctacagatgtgagcagtggctccggtctaggcactaggcaattcacacatgttgatctttaatttacaacgtcctaggcttcctgtggagtattaatagcttcattatgcagaagaggaacaactgaagctcaaatacagctgggaagcagtaaaacaaggattaaaaagtaaccaaaacccgtgttcttatttcattttagacatcaggccgcytcacaacagagacacggctgatgtttctgggttacaaaggcacctgtagcctagctctggaaccagagcacaagaacctcaaagcc

SEQ ID NO: 859816 - DNA, 571 bp, Homo sapiens
cggagggccttgaatgcagtggggggttccctcaagtacctttggccgatcaccactcttgctttggagggaaaatgcagagtgtgctcgcgtgattctgcacgggaagcttcattttcagtatgggtgatttgggcatgggatgaggaccccgtaggggatcccttccttagccgcaggagaggagcaaggctaggagggaggggctggaagcagagagacctgacgcctggattcaggcatcagggagggtatggccagctctgttcagagatagctcacctgggtgaactcgaggctggtggggaccttaggagggacaggaggccaccttagggggagggtgctgtatttggactgatcaattcctcaacccatgagtattgagtacctcctctgggccccattctgtgagaccgggtgtggccttctggttgacccatytcagaagcattttgcaaaggtggatggatgctcctagccccacaagctctggccctggcatctctgtgggtgccaggatgcagaggtgggctgcagaggcccagactctgcggaagtgccctcgcct

SEQ ID NO: 859817 - DNA, 605 bp, Homo sapiens
ggatcaaacagtgtgactgtttgtaaggtttttggttgtcgtggaatcaccctccagaaaggtcacgtgctttgtagagcctgaagccgggggtcacaggcagacctyagtggctcaggcaggtggggctggtggcgagaggaaagtccctcatcctaacactcactcacgtgcaatgtgcaaacatagctgatgcgtcagctggaggtgagggccagctggcactggcaggcaggagcccagcctggcttccttgggggccaccaggggtgacatagaccctcagagccagggctgagcatcaggaggttggcagggcctgggggacgccaggagctctcttgcaacaagagagaaaagcagcatcttagagttgtctcagtgcaaaggctcacatcacagtcagccccagcaaggccagggagacccagtcgaatactttgaccccaggtgggcctgtgtttgtctttgtgtgtgtccagcattgtgttctgttttgatgagaatgtatgccatgggctacgttttcattttcatcttggtgaaggtttacgttgttgatgacctgtggactctaaggatcagggagaggaccctgcatccag

SEQ ID NO: 859818 - DNA, 552 bp, Homo sapiens
ctaatatattaatagagggataaaatgaagtcctaaaaaataattagccagcaaaataaagtcaagaaaagaggaaaaaggaacagataacaaatagtagattcaaacctagccatattgataattacattaagtctaagtggcctaaacattccaattaaaagacagagattctcagattggattttattttattttattttttttgagatggagtctccctctatcacccaggctggagtgcagtggcacaatctcagctcactgcaacctccacctcatgggttcaagtgagtcccctgcctcagcctggagagtagctgagattacaggtgtacacgatcacatccagctaatttttgtatttttagtagagacagggtttcaccatgttggcaaggctactcttgaactcctgggctcaagtgatcygcctgccttggcctcccaaactgctgggattacaggtgtgtgccaccgcacctggccaacatttctttatgtgaatctctgtctcaaaatagtaaagtaagagacaggttaacccagata

SEQ ID NO: 859819 - DNA, 601 bp, Homo sapiens
acagagacccaggctcctgcaggagatgaccagggacagttaagagttgaaattgmtgaagagatccaggtacaagggcaaggaaataagaatgacggtggagttgaggatgttgcagaactccaggatataggaagccagagaaagtgcacagatgaggatgttggagagcctcgagcaccaaggggaggaaacaaggatctggtcagaggagaggatgctgtgagggacagtctccaagtcgactgttctgggagtgagaggcccacaggcaggaagcacagcctaccatggcctccagccttcactggctatggatgtgggacccgggaacaggaacaggcagtggctgtgaatggtttcatctctgccccctgtcctgagatgaatcctgtcccccactggggtgaagtcttcctgctggtgggtggggagggagagcatctggccagccagggcacaacccctgccagggatcatagagtggggatcagtccagcctcccagcaggcccaacctgaatcctggagaagacgacaaagggacaaaggggtggatccagagaaggcccccagcctgactcggcagtcccaaaaccctc

SEQ ID NO: 859820 - DNA, 561 bp, Homo sapiens
gaaaagtacaaaaattagccagtcggggtggtgcgggcctgtagtcccagctactcaggaggctgaggcaggagaatcgcttgaacctgggaggtggaggttgcagtgagccgagattacaccactgcactccagcctgggagacagagagagactctgtcaaaaaaaaaaaaaaagaaaggaaggaaggtaggtaggtaggtgggtatttggggccagctggcctgtaatcccagcacttggaggctgaggtgggtgaatcacttgaggtcaggagtttgagaccagcctggccaacatggtgaaaccctgtcactactaaaaatacaaaaattagctgggcgtggtagtgccacttgtaatcccaactactggggaggctggaacctcggaggcggagattgcagtgggctaagatcgtgccactccagcctgagtgagactccatttcmcaaaaaaaaaaaaaaaaaaaaagaaagggaaaaaaagaaaagaaaagaaaaaagtatttggaaccaaagaagataagaattctgttccatttggtagtttattttaatt

SEQ ID NO: 859821 - DNA, 571 bp, Homo sapiens
aactccttgccctcacgcgatctaggcaactgagtgtcgaatatttgtccctaatttgtggggtcctgtttcctttattggaaaggacatccatagtttaaaacacttcagacagtgctggggtctatacagggaaaggaagtcttcctacaccacactctaggactcgctgcctccccagaggctgctagtttcttgtgtatcctgttccaaaatctggccacatgcacatatacacacacggtgtctctgtgtgtgtgtgtgtgtgtgtgtgtgtgtgtgtgtgtgtgtgtttgtcctgggggccaaggagcctgcatccttttcggaacacccaggtgctggggtgtctctctctgtgtgtgtgtgtgtgtgtgtgtgtgtgtgtgtgtgtgtgtgtgtttgtcctgggggccaaggagcctgcatccttttcggaacacccaggtgctggtgtgtcctgcccctcccaggtgctggtgtgtcctgcccctcccaggtgctggtgtgtcctgcycctcccaggtgctggtgtgtcctgctcctccttcttttctttttttttaaaccc

SEQ ID NO: 859822 - DNA, 595 bp, Homo sapiens
aggtatcttgttctgggtcatttacctgtcttggaaagccccctctgaggatcctgcaaggtaacaggtggtaatctgaacagagaattctggttgaaatattaatgactgataaggatttaatttattcccttccagatagcacgcttgcattttggcacaggctttcagtgcagtaatacaaataaacaaatttgtggaatttcagactaatggcacactgttggggggcaatttttctggggaattttgctattttgcgatcctcaaatgacactgggtaagcttttaatggcttccctggagcagttctcggctcaggtctgctagaaagtgacattacttcccttccctcccatccctcccatcagtgagtgcctggcacaggccttgaaaatggagtcaatttttcagtctcttagggaaccagatagaattcaggttgtgttgtacttcttgtttctaaccctgtttaagggaagtcagacagctgaggagcagatgttacatkcctccttctggcatgccttgacccagagaagcaaagtggaaaggcagttggaactgcatgccaaccttcgctctcttgggcagg

SEQ ID NO: 859823 - DNA, 518 bp, Homo sapiens
agtctaccttggagaatgttccatgcactgatgaatacaatgtatattctgtggtcaatgggtacaatgttctgtaaatatctgttaagtccatttgttccagggtatagcttaaatccattgttcctttgttgactttctgtcttgatgacctgtctagtgctgtcagtggagtattgaagtcctccagtattattgtgttgctttctatcttatttcttaggcctagtagtaattgttttatacatttgggaggtccagtgttaggtggatatatatttaggattgtgacattttccccttggacaaggccttttatcattatataatgttcctctttgtcttttttaactgctgttgctttaaagtttcttttgaaacgttaaagaatataagaagagctacttgtgctcacttttggtatccacttgcatgggatgtctttttccacccttttaccttaaatttatgtgagtccttatgtgttaggtgagtttsttgaaggcagcagatacttg

SEQ ID NO: 859824 - DNA, 582 bp, Homo sapiens
ggctggtagaaagtcaattattagatgaccacacttagaccttcacccctagagccaggaatttggtttgggactctgacttgccaacttggttatttgggactctgacttgctgatagagatgttcaaagtttccaaagagaaaaaaagtacttacagcaaatgcccaagaatccacctgcatctctcagaaagcaacatctttccatttttatagcatgtcctgtattgcaaaactagagcactcttagttataaattaaccccagcattaaccctgggatggtattttcaaagctgatgtacaaaaccaaggccaagaggaacaaagcaaaaaatgataaggtttgaactttgagtgattgctttggctgccagacccttcatgtaaaacaaaagagaaagaggattgtcagagctggaggggtttaagtccatgctggcaagagtgtcttcagcaggcagaataggggccataggcaaaagcaccaagaggcagcaggaaaaagttctcactattgggccaaacagcagtggrattggcagttttttaagggaaagttgtacaaaagcagaggctggg

SEQ ID NO: 859825 - DNA, 646 bp, Homo sapiens
tgttgctagaatgggctgtcctttcattctagaatcactcagtgctccctgagccctgatccagccttactatgagctgggaaccagacaggaggccttgccctcaagggactcgcacattatagttataataacgacatgcatgaatgtgtgtgtcccagctgcctgcctttccgaggccgtgtggtttgccgctttataagcacaaagtcattgaatccccgagagaatactacgcattgggggctgctaccatcatcttgctgatgaagaaacagagaggtgaaggaacttgttcagggtcatccagtggacaaggtccagagccaggatctgaaacaaagatctcactcccacactcatgcaggacagaaacctgcacaacccaggtcattaactgctcaaatcaaggtagcacttggggctgtgggagcactgaggaaggagaagcttaaggggagttcaggaagggactcacaggggacgttagtgagcagggacttagaggcatgaaggcttggacaggagaagaggaagggtgggccaggcagggatgacagcctggacagaggcccagagcaggggacaggaagctcaacccacgtccgcccccctgcctggatcckagctccgctcatcgccgctg

SEQ ID NO: 859826 - DNA, 586 bp, Homo sapiens
gtttatgggacttcttgcatatatatatatctttatactggaataatagtttagcaaggtataaaattrttgaatgacttttttttaatgaagtctttacggaaactgcttcacacacttctgaaatctcctatggaaaagtcctttgacagctttagggggtgtgaattccctcagtattatttctgtatctttcaagaccagtaatttcatttcctcttcttcagggctaaccgttatatatattttggaaatcttccttgtcttttattgctattgtatttttcttatatttaaaaactaaaattatttcatttgctcaagttttttaagcctattttcccctgggtatggctgttccagccttatgatgcttcaaatatagccttctctgtgatggctttcttgatctttgtcatttcctcccaaggtctgccaaattatttttatacttttcttctgttttattattgcctccatgagctcttgtgtctctgcttttaaggcttttatttcctgacttattataacttaaaaaaaaaaccatcatctttaaatccatgtgatgctattttttcttcataat

SEQ ID NO: 859827 - DNA, 611 bp, Homo sapiens
ttccaaaaatggaagtaatactgttacttaactcacacggttgtggtgatgattgcataagataatacacacaaagtatccacagggcctagcacattgtaagtgctaagaaggtattcattatttattactgtataaaaaggtcagaagaaaaactttttattagcaccattattattgtttataagatgaatacacaaaagactatagaaaagaatcggtgagcaactttagcgttagtttataggaaatcatttctaccttcacttaatacgcaacaatgattagtgccaatttgaaaattagagctggcaatattgataactgcttctcttacacctgagtgcctttttatatgtctagaaaaacagttctgctccttctatttattcaacacttggcaagttgaaccgtccaagtatgaaaatattattttcagggaaagctgttatctgtttatccatatagagtgataaatacattaagtttttaaacatatttctgagtcacattaaatttttccattgctaaactaagaagatattattattattattatatacaaaatcatttaccctcataaattatakcctcctaatatgtgttttcat

SEQ ID NO: 859828 - DNA, 551 bp, Homo sapiens
aaatagttggctataattttgatccattctgtgagcatgtgttttcggcattctttcattgtgtycaagaatggtattctaccccttatttttttattcttacagcaatattgtatgggatttgtcctctgtatattcttctttatatcaaattagttttcctgaactttcagaaggaggtgggggttcagggtagcttttcaaatgtcagagctccctcttctgttgtttttgcatagtgctaaaaattatggaagcttgtttctgagattcttggctctgtttccccacttttatttagacagtctcttcccttattgaggtaggccgaataatgactccccaagagaaatctctggaacctgtgtatgttaccatatgataaaaggacttttggggtgtgattaagttgaagattttgagatggagagattattctagattattaacataggccctaaatgcaatcacaggtgtcgttataagagggaggcagaggaagatgacacaaataggagaagaaaatatgaatacagaggcatagattcgag

SEQ ID NO: 859829 - DNA, 579 bp, Homo sapiens
ggcttcctttaggaatggggttgattaggactatgaaaaactagtcacaggtggccaggtgaagagggaagtgcggacctggaaggkagcacgatgccagtcaatgtgtggaggtattgtggggtaaacacaaatttttaaagatcgaattttccctggtgtcaaaagagaaagacgtctctcttagagcatttcctttagaaaacttgtaactgtaaaattttctctgtccctttgagatgtatgtaagtccttttaaaagctaaatctcttgccagttttacatccccggaatgtttttcttaagagccttgtagccatctctttgaaatgtaaacatcaatgaaaatagcacccctgtctttccctgtcttcgtgggaatttgatctgcgtgcctggcttcaagttattacctgcttgtcatagagatatgagttttcgttttcctttggataaaggcaattaactaacacagatagccaccctaattaccaggtgaatttgggatgaagtatgtgtaccaaatggtgccgtcaagtttcttgagcacaagttattgtttgagaatatgtttgtaa

SEQ ID NO: 859830 - DNA, 213 bp, Homo sapiens
ttatttcaaaaaataaagtatgatatcatgatggtttatgatgtcmcaagatgataggaattttccagctctattataatcttatgagaccaccgttatatatggtttgttgttgactgaaacattacgtggcccccaaaatgtaataattttctccacataggtctgagacatctttggttaaacattttattttatttgagatgaagtttt

SEQ ID NO: 859831 - DNA, 600 bp, Homo sapiens
gggatttctttaaaaaatccttcagaaatataattgttctctggtcttttttgatagtagttgggtagtagatagtgcaaggttaaaatctctgagcctcactctgtcttgagtattcttccctcaggtatttgcatggtttatcatcattctttttcaggtttccactcaaatgtcaccttgtcatagagtcctttccagtctttgcaagctaaaacagttctcttccttactttttttttttttttcagacggagtctcacttctgtccaggctggagtgcagtggcgccatctcggcttactgtaacctccgcctcctggattcaagtcattctcctgcctcagcctcccgagtagctgagattacaggcatgcaccaccatggccggataatttttgtattttttctttttttggtggagacagggtttcaccatgttggccaggctggtctcgaactcctgtctcaagtgatccacctgcctyggccttccaaagtgttgggattacaggcatgagccaccacacctggccatctctattgattctttttttctttctttttttttttttttgagatggggtctcactctgttgc

SEQ ID NO: 859832 - DNA, 592 bp, Homo sapiens
taatggttttaaattttgttcagtatgaatccttctaattaatattaccagagctaaatttatccatttaatctacaaagataataatgtttttatagggaacagtaggactttttaaaatattctatcactctctaatataagcttgttctgccagctagggcaaattggtttatccctactccaacttgaaattaatcttttgttagaatatttaaatgtatttattttttaattttaattgacagttaaactgccccctagccctttcaagcctctggtaactttcactgtactctctacctccatgagacaaactttttaagctccaacataagtgagaatatccagattcatccatgtggctgaaaatgatacaatttcattttttgtgtttactatgaacagcatgatgttttaaaacatatataaattgtggcattgttaaatctagctaattaacacatgagttacctcacatagttatcactttgtgatgagaatatttctccactgttagcatatttcaatacaatctarcatcattaactatagttactgtgctgtatagtatatcttttgaatttattcc

SEQ ID NO: 859833 - DNA, 456 bp, Homo sapiens
cccaggcttattagggggaggaaattcccacctaataaactttggtcagaccagttgttctcaaaaycctgtttcctgataagatgttataaatgacaatggtgacaaaacttcataagcaattttaatttaacttcggtcctgtggtcctgtgatctcgccctgtctccacttgccttgtgatattctattacactgttaaatacttgatatctgtcacccagacctattcatatactccctccccttttgaaactccctaataaaaacttactggttttgtggtttgtggggcatcacggatcctaccaaagtgtgatgtctcccccggacacccagctttaaaatttctctcttttgtactctgtccttttatttctcaagccagtcgacgcttaggaaaacagaaaagaacctacgtgattatcagggcaggccccgcgataggtacacgac

SEQ ID NO: 859834 - DNA, 456 bp, Homo sapiens
cccaggcttattagggggaggaaattcccacctaataaactttggtcagaccagttgttctcaaaaccctgtttcctgataagatgttataaatgacaatggtgacaaaacttcataagcaattttaatttmacttcggtcctgtggtcctgtgatctcgccctgtctccacttgccttgtgatattctattacactgttaaatacttgatatctgtcacccagacctattcatatactccctccccttttgaaactccctaataaaaacttactggttttgtggtttgtggggcatcacggatcctaccaaagtgtgatgtctcccccggacacccagctttaaaatttctctcttttgtactctgtccttttatttctcaagccagtcgacgcttaggaaaacagaaaagaacctacgtgattatcagggcaggccccgcgataggtacacgac

SEQ ID NO: 859835 - DNA, 672 bp, Homo sapiens
aaccgcgagcataacgcagaaagataaaacgaaagccctaaacgccgccgtgggaatttaagtccaaggggcagagaaaacaggaggggaattgcagatcggcttgtcccggtcgtagttactgcccctgcaggttcccgcgcccagcctcgggatggagaacctggcacgctacgtttcgcgggctctgagactcgggtggtgagagtcgccgagatgcgcactgggaagagaaaagagccaggacgcacctgcatttatggcgccatcgcccgggcggaatcctccacggaataaaaagtatgcagaagcaaggcgatttatgactgcataaaccctccgtgctcctggagagttcttagacctctccactccttggcacaactgacctctccactcttcgacaaactggcaagcgcttgccgccgttcgccaaaccttggtacgacagtcaatccagaaatgagcttctggaacaaatcctaaatccttttttgtctgtcttcttctgattcgctctcatccttaagggacctgtttctccttcaaaacctgaaaacatctaacctatagtaccaaccccagatccaggcctggccttcctgaccagtcaaagccagttggactgtgcgcctaraagtggacagacatgcgaaatgccatactgtatac

SEQ ID NO: 859836 - DNA, 604 bp, Homo sapiens
catttttatgaaaacatctgtaagaggaattttaaaaggcctgacaaattatttraagagggaagcagagggactaaaaaggaaagaagctaacaatggcggtctatgaaaatgaaataaacaaaacaaaaaaacaggatttaatttccaaccttgaaatgagtcccttgactgttttgtttgaggttcatataacttggttttctggtatgtccaggattacgtgagagtaacagagattggggtggaaattgagatgatgctgtattcaaatgagactgaccataaattggtagttgaagttgggagatgatataggagggttcgctgtgtattttcttcatttttgtatatggttacaggtttccatagtgaagagttcattcaatacagaaaaaaaaaaaatcaccaagtctcatcaaaagcatctatgctaatattttggcatatttcttcccagtttttaaagaaatatgtaggttcaaatctttctaattctcacttttttctattattctttttgtgcatcagaaccctaaaatgggtttggcaatcacatcccatacaaatccaagttcttcacatcctctaaacaaagaatctg

SEQ ID NO: 859837 - DNA, 604 bp, Homo sapiens
catttttatgaaaacatctgtaagaggaattttaaaaggcctgacaaattatttaaagagggaagcagagggactaaaaaggaaagaagctaacaatggyggtctatgaaaatgaaataaacaaaacaaaaaaacaggatttaatttccaaccttgaaatgagtcccttgactgttttgtttgaggttcatataacttggttttctggtatgtccaggattacgtgagagtaacagagattggggtggaaattgagatgatgctgtattcaaatgagactgaccataaattggtagttgaagttgggagatgatataggagggttcgctgtgtattttcttcatttttgtatatggttacaggtttccatagtgaagagttcattcaatacagaaaaaaaaaaaatcaccaagtctcatcaaaagcatctatgctaatattttggcatatttcttcccagtttttaaagaaatatgtaggttcaaatctttctaattctcacttttttctattattctttttgtgcatcagaaccctaaaatgggtttggcaatcacatcccatacaaatccaagttcttcacatcctctaaacaaagaatctg

SEQ ID NO: 859838 - DNA, 637 bp, Homo sapiens
acctcaaggagccaaaaaaaagaacaaactaagtttaaatttagcagaaaaaaatgaaataacaaagttcagagcataaataaatagagtacagaaaagcaatttaaaaatcaacaaarctaagaattggtttctgaaaagataagcaaaatttaaaaacccttaactagactaactagaaaaaaagagagaaaacttagatcaataagatcagaaatgaaagaggagacattgctactgaaaccacagaaatacaaaacatcataagaaactactatgacaattattgccaacaaattagataatctagtacaaatggataaattcttagacacatacaatctaccagaactgaatcacgaatatgtagaaaatgtaaagagatgaataagaagaggttctatcagtaataaagatactcctatcaaagaaaacccagaactgaaaaaacttcactgctgacttgtaaaaaaaaaaaattgaataatatcaagtattctcaaatttttcaaaaaaattgcaacacagcgtcactttttgaggttagcactaccctgataccaaagtcagacaagaacactacaagaaaagaaagtgtacaagccaatatccctcatgaacacaaacgcaaaaatcc

SEQ ID NO: 859839 - DNA, 620 bp, Homo sapiens
aattattcttgtttgcagataatatggtcttatatttggaaaaacctgaagagtctgctctcctatgtttattgcagcactgttcactgtagygaagatttggaagcaagcttagtgtccatcaacagatgactagatgaagaaaatgtggtacatatacacaggggagtactattcagccataaaaataatgggattctgtcatttgcaaaaacatggatagaactggcaatcattatgttaagtgaaataagctagagatagaaagacaaacactgcatgttctcacttatttataagagtttattttataaattagaactttggtacacttctaatttataaaaattaaaacaattgaactcatggagacagagagttagaatcatggttaccagaggcagggaagggtagtacggggtttggcgagcagcggtggttaatgtgcacaaagatataattagatagaatgaataagatcttgtatttgatagcacaatagggtgactgcagtcaacaataatttattgtacaacaataaatacaactaaacaactaaaatagtataattggattgtttgtaatacaaaaaaaggataaaagcttaatgtagtggatac

SEQ ID NO: 859840 - DNA, 550 bp, Homo sapiens
agcaattttcacacctgagaagaacaccaagttcaatggctatttcagtgacagccaggggtmgggtagaaaaggcagcaagcaggaaaacaagagggattgttgtaactcactaagttaattctctgaatttcacccaccgggtagaggcaagaaaggagcctactattctaaattttctcatagcccattctgcaccatattcctctggcctacttaagctagagtgtaggccgttaatatatggcaggatggcccctttactggctttctgcatgcatgtgcagcatggacgcaatgccgatgtcacctgtgtgcttcgagcttctgttgcacatcatgctgttcagaggacaggggctggaaattgaaaagaaggccataaagcagcaagatgtcaatattatgactccatagagcctgctagccatacggctctcttagcacccagaactcacacatgtgtgctcacactagcccattgtttccatgggtcctcattatttcacagggttttccttcgatgtgtgtgtaatgacagaagcttcag

SEQ ID NO: 859841 - DNA, 662 bp, Homo sapiens
atctatcaaaccatccatttttatctgttaagccagacgttgtccttgaagctcactgagacctcttaattctttattcttttcataaatagtgtttccccaaactggtgaaccagttgctgttgctgttcaactttttagggagccaactgagacatagccataccaaacctttccacccccacaaaaaaaaaatccaacaattatataataaatgcatgtattactttgacatcaaattttaaaaatagatgtttgaaattatatattattctgcaatatttgtttctccattgcaaaactgttattacttaaacaaaacaataatggtgtgtccagaattggtaggttcttggtctcactgacttcaagaatgaagccacggaccctcacggtgagcattacagctcttaaggtggtgggtctggagtctgccccttctgatgttcagatgtgttcggagtttctttcttctggtgggttcgtggtctcactggctcaggagtgaagctgcagactttcatagtgagtgttacatctcttaaggtagcgcrtctggagttgtttgtttttcccagtaggctcgtggttttgctgggctcaggaatgaaactgcagatcttcacggtgagtcttacagctcacaaaagcagcatggaccc

SEQ ID NO: 859842 - DNA, 662 bp, Homo sapiens
atctatcaaaccatccatttttatctgttaagccagacgttgtccttgaagctcactgagacctcttaattctttattcttttcataaatagtgtttccccaaactggtgaaccagttgctgttgctgttcaactttttagggagccaactgagacatagccataccaaacctttccacccccacaaaaaaaaaatccaacaattatataataaatgcatgtattactttgacatcaaattttaaaaatagatgtttgaaattatatattattctgcaatatttgtttctccattgcaaaactgttattacttaaacaaaacaataatggtgtgtccagaattggtaggttcttggtctcactgacttcaagaatgaagccacggaccctcacggtgagcattacagctcttaaggtggtgggtctggagtctgccccttctgatgttcagatgtgttcggagtttctttcttctggtgggttcgtggtctcactggctcaggagtgaagctgcagactttcatagtgagtgttacatctcttaaggtagcgcatctggagttgtttgtttytcccagtaggctcgtggttttgctgggctcaggaatgaaactgcagatcttcacggtgagtcttacagctcacaaaagcagcatggaccc

SEQ ID NO: 859843 - DNA, 584 bp, Homo sapiens
ccagcttacatatcttggtgatccaatgtcatgtgcatatgagaggtctctaagatagtgactatcttggagacagctaccatctcggcctccatccagcccccagtggcctgtcagctccataagggcaggaatcttgtctagtgtgtttaccaggcatggtctgctcatattcaaaatgcctgtgttaaaatcaaggaaatcctcaaccccttgctgtttgaaagaaggggtcagattagcttttcctcccactgtcttcaaagattttatccccaggaaatagaatatagctaaatgttgggaagcacataaccaattcaaaaataaattatatttagatgactaatgacaattacatttttcagtgggtcttgatgcatagaccagtgagcattatctcagtccccttgccatagtaattggttcaggaataggtagtaaaaccaaacctaagccaactggcacatgaatttctctgtccacagggattagtccartcaataagagcaaaacacagggctttgctggctgggaaagacaagtcattgatgctgtgactgcagaaattttttaaaatttat

SEQ ID NO: 859844 - DNA, 647 bp, Homo sapiens
agaactttttcaaaacaaaaggccttaaaatttaaaatcaatatatccgaataacaaataatattggtgtaagagtagcaagactaagtatttcagttttttaaacttgctgtcatttggttacataactcactcaaacattttgtaaactttaaaatctcaatacaataagatacgacctcataccttatgatggttactatcaaaaaactaaaaaaggaaaaactaaaaaataaaataaaataagaagggttggtgaggacgtagaaaaactggaatccttgtgtactgttggcaggagcataaaatggtgcagttgctatggaaaatagtatagtggttcatcaaaaaaattaaacagagaattaccatatgatccagcagttccacttctgggtatggagtcaaaagaacgaaaagcagggactcaaggagatacttctatacccatgtttgtagcaccattattcacagtagtcaaaatgtgggagcaatccaagcttcccttaacggatgagtggacaaacaattggtagcatatacatgtaacagaatattagccataaaaaggagggaaattctgacacatgctacaacaagcttgaaggcattatgctatgtcawataagccctcacaaaaggacaaa

SEQ ID NO: 859845 - DNA, 612 bp, Homo sapiens
agtactggcaaatattgtcaaaatcaactttttaagaaagctgtaaattgatatgggctttcaacaaactaagtaacactaagtgtctatytaagaaaaatggttaaacatatgtaaggacagtgagctttgtgacattcaaacccaccctattcctatgcccttttccccagcttttcaggagctttgaaaatcaacagcatcaccgtcagagtagctgtgaaaactagtagccttgcatccactggagagggaagaacatgtttgagcttccccaaaactccgttaccaaagaattgtcattatctgagctgtctgggaattccctgaaaacccccagttcacagcgcttgtctttatttaacctgactcaaatcattactgaaactagcttatacccagggtgtttgtcaaagacagtcagtagtaattagtcaacatggcagttgcctgaaatggtaataacagttgagccaaacaagatgctaaccaaaaagcttaaaaagaatatctgggagaatgagatgtccataggggacttagaaaagttccaatgtattcctaggaatctagaaggccaagtacatgtgcagaactgtgtgtatacccagg

SEQ ID NO: 859846 - DNA, 442 bp, Homo sapiens
gccctgctttggaaggacggttttccagtttcattagtgacacgtcattttatctttgacttccacagtcaatacttagaatctggcttggtcctgttggctcatgcctgtaatccccacactttggsaggccaaggcaggaggatcaattgaggctagaaatttgagaccagcctgggcaacatagtgagacccgtctctacaaaaacttctaaaaattagccgggcgtggtgctgtgcacctgtagtcccagctactcgggaggttgaggtgggaggatcacttgaactcaggaggttgaggctgcagtgaactatgttcatgccattgcactccaacttgggcaacagaatgagacctgtctctgaaataataacaagaagactctattagagccttggaagttttccattaaattatttatgatagtgctgttcaaca

SEQ ID NO: 859847 - DNA, 559 bp, Homo sapiens
aatgaaatactaagctactttagaaaaacctasaagttaggggtggaggaagaataaagtgaaatgaagcaaagcacttacaagatttcattctgatctggataaaggtagagtggagaagaatagagaagtgaaaatattctaaaagactcatcttattgggatagatgaacttggtgacggaaataagttacatattgtttagttaaattataaaacaggaatatgtgctttcttatgagtttctagagagaggggacatttatagaataggaaattatagtagaataacaatattatcaaaaggaaaatgataataacaagaagcttttgaaaactagttaaaaaaacaaaaggaaggagaagagacaacaaagtaaaccaaagtgaacataaagtaaacataaaattagacagaataaaataagcacatatatgatgaagtcatcaaaaacaaacagagtacgagaaactgtcagagccaagaaaagcccaagagacatgatgattaaatgttatgtgatatccccgatgggatcctgaaaaagaaaagaagcat

SEQ ID NO: 859848 - DNA, 635 bp, Homo sapiens
aggagttcaagaccagcctggccacatggtgaaatcccatctctactaaaaatacaaacattagccaggcatggtggtgcrcacctgtaatcccaggtactcaggagagtggggtgggaggatcacttgaacccaggagccaagatccagccattgcattccagccagggcgacagagcgtgactccatctcaaaaacaaaaacaaaaaacaaaaaactgtgacaaaaactacaaaaataagcaaacgttattttaaacaacaaaacactaaaatcacttcaattattatcaggaatcagataagaatgtttgatcttaccattactattgtcttagaggttgtagcaaatgcagtgggaaaaggcagtaaaataatttgtcaatgccaggtgtggaggggcatgcctgcctatagtcccagctactcagaaagctgaggcaggaggatcctgtgagctgagaagtttgagtccagactgggcaacatagcaagaccccatctctaaaataaaattttaaaaataacgatttatataaacattggaaaagaaagattaaaactctatttttgttgataatattattgtattcctgaaaaacccaacagacttaagaaaaaaagtatttgaattga

SEQ ID NO: 859849 - DNA, 673 bp, Homo sapiens
tcattcctgcccactgagcccaaggaccagggtaaatcaataaaaagtacaaataatcttaggttggtacagattctctgcatggcatcaaaaagtatgatgaacagrgactattacagaatagctgcctggaaatatacccactattcagggctgcaatttatcaattaagaacacaacttttattttggacagaatgtctaagaagctaatgggtgttaatttggaggagcaaagcctttgttttgtaaagtacaggacggacagcactctggatttaatcacagtccaccattatggtgggccccaaaagtctcggaggcagcaaatctctgaatattttgtttagcttcagcgttgaatcaactctataaaatgaggggatatttgacttagctgatacttttgttcatattttacttgcacatttttaaaagatgtaaataaatctgtgtttggtttaagttttcctggtcatgatgctgcttcaaaggaaaaaaaaaagaattaataaaaggaggcatgaaaaacctaattctttttcaaaaataatagggataaaagaacagtgtgaaatcaatggtggcactgaaataatagttacaaaggaaatgcagtacagtacatagcttaactctagtttttagggattgcaaattagacatcccaggaa

SEQ ID NO: 859850 - DNA, 601 bp, Homo sapiens
ccaccttaacctccaactcctgggctccagtgatctcccacctcagctcccaaatcactgggattacagatgtgagccaccacacccagccaaattatgtacattcatttaactgaatacaatacaacactttatggagttctctgtggatcatggcaagctctccaagaggcagtatggcatagtggataataatctagacttaggaacacctgcctggtttggaatcccagccatgtcatttactggctgtgtgcccttgagcaagtttgtgttaaccactctactgcctccctctactaactactgcctcaattttttaacagtaaaaaagagcaaataataatacctatcccataaggttgttatgaataagtaagttaacttttataaaacacccagaacagtgcctgaacacccacgctaagtaaaaaaatcaaggtacaaaacagtgtgtattacatgctacctcttgtatgtaaatatacgtgtgtgtgtgtgtgtgtgtgtatgtatgtatgtatgtattaattagtatttatacaaagaacctctggaaggatacataaaaackaataagcataactggaatttagagtag

SEQ ID NO: 859851 - DNA, 580 bp, Homo sapiens
ttgtaaataaagttctttttttttgtttttgatctttgttttgttttgttttgttttgttgagacggagtcttgctctgtcgcccaggctggagtgcggtggtgtgatgtccgctcactgcaacctccgcctyttgggttcaagcgattctcatgcctcagcctcacgagtaggtgggatttcaggcatttgccaccacgcctggctgatttttgtattttttttttttttttttttttttttttttttagtagagacagggttttaccacattggcctggctggtcttgaactcctgacctcaggtgatccgcctgccttggcctcccaaagtgcagggattatagatgtgagccatgtaaataaagttctattggaatacacctatgtccatttatttacattgtctgtggctgcttttgcactgtagttgcagagttgaatagctgcagcagagacctagtagcccacaaagcctaaaatgtttactgtctggccctgtattgaaagagtttgctgattattgtgctagatgaatgcaggatactacacccctctaaaaagagctgcatagaaatac

SEQ ID NO: 859852 - DNA, 463 bp, Homo sapiens
tctcatggagtccaggtcgatctccaaggaatggattgtacatctcagctctgtgagcgtcatctcagcagctccaacctcggtggactgagtggtggccactgtggtgctcwcctcaatctgctgagaccagtacttgtccagctcctcttagttcttccgagccagctcgtcatattgggcccagatgtcttccatgatcttggcaaggtcctgagatttgggggcatctacctccacggtcagcccagagctggcagtctgggcttgtaggcctttacttcctcttcatggttcttcatgaagagcagctgctttttgagagcctcgatctctgtctccagctgcagccgagtgacattggtgtcatcaatgaccttgtggaccccatggatgtcgctctccacagactggcacatgggcagctctgtctcatacttgacactgaagtcatcagcagcaa

SEQ ID NO: 859853 - DNA, 612 bp, Homo sapiens
caccacgcctgggtaactttttctacttttagtagaggtggggtttcaccatgttgggcaggctggtgtcaaactcctgaccttgtgatctgcctgcctcagcctcccaaagtgctgggattacaggtgtgagmcactgcacccggccgaatataagttttaacatcaagaaatacccatagcttcttagtttatatggcttaatgagcttttttgagatttacaaaataatcagattgttttccagaattattcctggactcacaatttgtaagattcttttaaaatatctcaagagagctgggtgtgatggtgcacatctacagtcccagctgctcaggaggctaaggtgagagtatcacttgagcccaggagtttgaggttgtagtgagctatgatcctgccactgtactccagcctgggcaacagagcaagaccccatctctggaaagaaaaatttgtgtgtgtgtgtatctcataagcctctggctgctctccaaactcttatttagtcttatccagtagaaacacattaaccatcaaataaatccttgatttttactgaaaaataaagaagcttatatttagcaaatgtactatcacaatagtact

SEQ ID NO: 859854 - DNA, 587 bp, Homo sapiens
agcatctgctgtgtgccacactgttctatgattggggatccaattgcgaatacaatagtgaagaaaaaagtcctgcccttgtagaacttaaattctaggrggggaaacatatacatagacatattcatacatatatttactaaagggaaaaaagaaaaggggaattaaatattattttgggaggatgatgaaattctgatagggtgaccagggaaggcctcacctaggccatttctttagcataaacttctaaaggaaaaacataatctggaagaggtagtctctcagaacattttaaagtatttgtaaactgaggtctatgaggtttgtttgagagaactaatacatcttaacttttactaactttaactgaaatccaacatttcttccaatcatgagtagagataaccaatcttgatggtattgggaggatctgtaacaaagttacaggtaggtatcacagatattttcattaccacattacagttgttatagacatctcaaaaattatgcttattaccacttacaaattatagtagttattatccctgctattaaatgttggtatttcatgccttaatttaaaa

SEQ ID NO: 859855 - DNA, 640 bp, Homo sapiens
catgttttcactatttacaaagcttagctacatgccaattttatttgattatttgtgaggtgacacatatgaggcagctgagagtaartgaggaccatgtggtaaaatgattgttgaaggcattcagcctgctggactcctttacccactccccacctgtgccagttcccacgtggaaatgttagtaagtctgagagaaagaaaagggcatctttcttaatatctatagagtatataattgatggaatcatttaccccaagcgctactacaggagacatccgaaaagcttcaaaagttgttcagggaaatttgagaatgatacttcacaaatttttaataataaaaaattatccattgatggaaacctcactaatttttgaggcaatcatgatggaatgacatagagacctccaggctatagtcactgaatacaatataaacagaatagcatccttagtgaacgccaacagcatagataacaaaaagagtaggttgggactctggtttcctgaaggaggaacagccataatttttaaatctcttaatactgaagggacccttaggaaatctctacaatttctctgcaaatcgctttctctcttttgcttcaatttcctctcttccagctccagagaacat

SEQ ID NO: 859856 - DNA, 621 bp, Homo sapiens
ggtgtgtgtgtgcagggggcgtacagtgctcagctgcatgtataccaggagggcatgtggccagggactttggacctttggtgtgatggggaaaccaagrcccagagagggcctgttttggagtggaatcagcctcactggcagtggcggtgagcagcaggcttgtgacctgttctatccctagggccgaagcctttcttttcagctgggaagacttttgggattggacgcctggaaatgctgggtggcttcaaggggggcgccatccagatcctgaagcagagggcctaccagtgcagcaggcagtgttcccagcacgcagggcaggatgagagctgacccttccccttctctgcctctccataggctgtgggtttgagccatgctgcagaggctggcccaggcagtgcccctcctccagccaccctgtggagcagggactggacttggctcctccttcactaacaggctcttttccaatcaaaaaaaaaatttttttttagctcaccgagtataagagagagttttatgctgaattttaaaataccttattttttccagtctctaaactgctaatctcccgggctgagggattctgggacaaaggcaaggcctcgaagt

SEQ ID NO: 859857 - DNA, 569 bp, Homo sapiens
gtcgtggggaaaaagtggaatgaataaatcaaactcagtgaatatagagaaagacaactggagggaacacagaaagcatgaaagatgataaacatgaatcatawtttttcactagttacaatagatataaatagtctaatctcattagttaaaagacaaagattgctcaactagattttaagaagataattaatctatacactatttataagaaacatacaactttagagtgcaggaagatcaaagaaaaggatgaagaaagattaggcaatatttattcaaatattaatcaaaagaaaaaacccgagagagagagagagagagagtgtgtgtgtgtgtgtgtgtgtgtgtaagagagagagagagagtcagaatttaaggcaaaatacatagagaaaagaaggttactataaaaacgccaaatagttaaatataccaagtatagaataatttcaaatcgtaattaatctaacaacagcttcaaaatatgtaaaactaaaattgactactatattctatcatagaaggaaatcttgttgtattttgtaattattagtagatgaaaagga

SEQ ID NO: 859858 - DNA, 636 bp, Homo sapiens
ttcttataggtgctccattacctacaagatgaagacccttctcaaacygtcctcagggtatttctttttctttttttcttttcttttttttttttttgaggtagagtctcactctgttacccaagctggagtgcagtggtgcaatctcagctcactgcaacctctgtctcccaggttcaagcaattctcctgcctcaccctcctgagtagctggaattacaggcaccccccaccatgcccggctaattttattatttttagtagagaccgggtttcaccatgttggccaggctggtctcgaacttctgacctcaggtgctccgcctgccttggcctcccaaagtgctgggattacaggcatgagccaccgcacctggcctattttaaccatataatagctcctcctgaaaatgatcaatgcttaagtcacagaaaactgttgtcgcatgtttactcctccctgcctttgcacaaactattctctgtgctggacctgccttcctccaccaaccagtcaaaattctacctgtccttccagggtccagattaaatgtcacctcttctgtgaagcattttcaatcccagcccccaatatgctggccaccctgtccctgcagtgcataccacattccgccc

SEQ ID NO: 859859 - DNA, 621 bp, Homo sapiens; identical to SEQ ID NO: 847388

SEQ ID NO: 859860 - DNA, 621 bp, Homo sapiens; identical to SEQ ID NO: 847389

SEQ ID NO: 859861 - DNA, 593 bp, Homo sapiens
gaatgagaggcagaaccagagtcaggacctatatcttgtcttctccttcctaaaactagaaaagtacccacaaccaggcaatgcktttggtgcagaaaaagcagtagtgaacaaaataggcaaaaatgtctgcctttagtgctcacattgttgtggagaaagacaaacaataagcacagtagagaagtaaaaattagaatgttttgctaaaaagtccataaaattgaatattattcagccataagaagggatgaagtaccgttatatgctacaacatggatgaaccttgacaccattatgctaaatgaaagaagccagtcataaaaggccacatatttcattattccatttgaatgaaatctccagaataggcagctacttcctatccacagaggtagaaagtagatgaatggtaaccaggggctaggggaagaggggaatggggagtgactctttattgggtacagagtttctttttgggtgatgaaaatgatctagaattagataactgtgatgttgacaaaactttgttaatatactaaaaaccactgaattggctttaaaccaattgaattttaaagtatactttgaaa

SEQ ID NO: 859862 - DNA, 622 bp, Homo sapiens
ccaggggatattggccgcggatccctgcctgtccccgctgctttgcagtygggccaagaatgcagactaacacgaagaatcagactctccggtgtggaaactattacataattatctatgttattatttttactttttggagacagcatctaactctgtcactcaggctggagtgcagtggcacaatcatggctcactgcagcctcgaccttccaggcttaagcgatcctcccgcctcagcccctcaagtagctgggactacaggtgcccacctacatgcctggccaatttattattattattattattgagaggaggtcttgctgtgtttccgaggctggcctagaactcctgggctcaagtgatcctcttgccttggcctcccaaagtgttgggattacaagcatgagccgccatgccccactggttgtctattttaatagaggcttgatctttgcttgtgaatacaaaacattcttcaaaatacaggtttagagagggcacagcaggcacagaacgagggtagggaaatggagtggggcaagaatatcttcaccccatgtgcttggaaaaaacaatgaaactgcctcgttgtttcctaagtaaaatagtccctgtctac

SEQ ID NO: 859863 - DNA, 497 bp, Homo sapiens
gccagaccccatttaagccctggggcttgagcagtgaacgtgtctgcgtccttctcctcatggagctcacattccattaatagaagggggagctgacagtaacccatgtaaacatggaacatatcggatgttgatggatgccatggaaaaaataaacagggtaagagtgggggtgtgtgtcattatgagtaggatgctgagggaagactccctgaaggaggtggcatctgagcagagagctgtaggaatgtgcaaggcatgaggggaagggtgttctcactggagggaagagtgagggcgaaggctccaggtgggacaatgcatggggttcagactggagagcaacgggccagggtgggtgcagtgagcaggaagagcrggaggtcacgacagaggggagcatgggacactgggaaggctttggctcttaccgcaggtggattgagtcgttggagagttttgagcagaggagaactgtgatctgacttacgtcgtaa

SEQ ID NO: 859864 - DNA, 497 bp, Homo sapiens
gccagaccccatttaagccctggggcttgagcagtgaacgtgtctgcgtccttctcctcatggagctcacattccattaatagaagggggagctgacagtaacccatgtaaacatggaacatatcggatgttgatggatgccatggaaaaaataaacagggtaagagtgggggtgtgtgtcattatgagtaggatgctgagggaagactccctgaaggaggtggcatctgagcagagagctgtaggaatgtgcaaggcatgaggggaagggtgttctcactggagggaagagtgagggcgaaggctccaggtgggacaatgcatggggttcagactggagagcaacgggccagggtgggtgcagtgagcaggaagagcgggaggtcacgacagaggggagcatgggacactgggaaggctttggctcttaccrcaggtggattgagtcgttggagagttttgagcagaggagaactgtgatctgacttacgtcgtaa

SEQ ID NO: 859865 - DNA, 623 bp, Homo sapiens
gtaaaagcaatatccattctgtataaaccatactttaaattttgatcttattccagaccagcgatactmagtaagatactctttcacaatgccaggcagcctcagccacatgatcatgaaggtgaacaacttatactctacactttcaactcacaatattttcaatttacactggatttattgggagttaaccccatcataagttgaagagcatctgtattacatttaaaaacccaggttattttaaaatagttgcttatatttacatacttacaagattattcagtctagcccagatttacaagggggaaaaaacacactcaaggtattttaagcccagagagatgtaatacagtgaagtgcattgcaaaagttttgtaaggacagaaaaagcaaaattgtgcttccaaaggtcaggaactgcaggaagctactattggccctgcagcactaaacaaacccacactcctggcagctgctgctacttgctgtcagaagcagaatgacagcaattttccactgccttctaatcgcaagtgagtgccttcctaagaaagggactctggaagaagtggtgtccaggcttcaaccccaagtgatatggaaaaaagcacaaaacaggg

SEQ ID NO: 859866 - DNA, 584 bp, Homo sapiens
ttatgaatttaactataaataacyatatagtataaataactataattgatatgaaaatatataaagttattcagttgttaatggatacttaagttgttttgatgttttgctattaggaatgaagttgtaatgaacttgcaatagttcttgatgtatgttctagagtagcattgtagtagtaatgtagtatgataatgtatatatattttcaaccttactatgttatgctgacttgttttccaaaatgatcctaacaatttctatttccttcagaagtctgttggtagaaacattgacccacatccttgctaggttttgatatttttattgttttttcagtgtggcatttatttacatttctctgacttataatgaagagtttgaaattttttcacatattcacatgtcatttatacatgttactataaaatgtttcttcttgcctttaccattttttttctcagaaaaatatagtcctttactaattgatttgtaggaggcctttctatgttctgggtactaatccttttcatagtttaatatgttgtaagtatctttatccagtttaccaaaaaaatttcctc

SEQ ID NO: 859867 - DNA, 584 bp, Homo sapiens
ttatgaatttaactataaataaccatatagtataaataactataattgatatgaaaatatataaagttattcagttgttaatggatacttaagttgttttgatgttttgctattaggaatgaagttgtaatgaacttgcaatagttcttgatgtatgttctagagtagcattgtagtagtaatgtagtatgataatgtatatatattttcaaccttactatgttatgctgacttgttttccaaaatgatcctaacaatttctatttccttcagaagtctgttggtagaaacattgacccacatccttgctaggttttgatatttttattgttttttcagtgtggcatttatttacatttctctgacttataatgaagagtttgaaattttttcacatattcacatgtcatttatacatgttactataaaatgtttcttcttgcctttaccattttttttctcagaaaaatatagtcctttactaattgatttgtaggaggcctttctatgttctgggtactaatccttttcatrgtttaatatgttgtaagtatctttatccagtttaccaaaaaaatttcctc

SEQ ID NO: 859868 - DNA, 608 bp, Homo sapiens
ttgcactcaccaatgcaggagcagaaatacctcttgcccaagatcctgcagcggtccctggaccctgctgattggaatagttgcactcaccaacgcagcagcagaaacactagttttcctcctagaccacaaggaggactgaggaaggtcagatttagtggcccttacagacgcattctcgaaaaacttcacccttgcctgtcctcctagatcacaaagaggaccaagaaaaataggatttagtggcccttactgatgcactgatcgaaaacttgttagagtcctaagcattctcctgttaacactgagactttacctctgtcctataaagatgttatgccccaaaaatgaaatggagggccacaccctgagggagagaagagatctccagggttggaagagtgatgccttttgtcctcactcgaatacaaaggatatcatttctgaagctccccatatcctagcttcaggaatagcttttgttaagcctgttagtctgaggaagaatcctaaaaggatagttggtctccccacccaatgaggttttgggcaaaaattatgtctttctgattgrtgagcctgagtgcctaaagaagggaatagagtcc

SEQ ID NO: 859869 - DNA, 366 bp, Homo sapiens
aaataaaaatatgaagtataaaaagcacttagtgcaattctgagtataaagtaaaatgctcatttttacggcagcatgrtgagaatcctgcccctggaaacactaaggcctataaggaatgagtgcctatgtggtagcatgtgaattaatgcagaacgctataagtatagttgtactttgaagtccattctgaatcttagatgttacatttatattaataaaaagcataataattatctaaatgtatataatatgtttaatattatatggttacatcaactgatgtaattcatagttttccctagtgttctctttcctgaacattcaaaaatgtattagttagcaaagtcgtcttatatcctccct

SEQ ID NO: 859870 - DNA, 557 bp, Homo sapiens
atggagtgatgaataaaatgaatctggtctccatcagtacatgccatataacattttgcagtgactgtgtaccaggcctttgattttcagtatacaatttcaataatgatcctattktatctgtggtgtttaaaaacatatacatctctggaatctaaaattgagaagatataagtaaaacccagtatcccaaatgtagtgctagaaatcagattgcagtttaaatctgagcatgtagaaagtccctttctcctatgtcagcagatgccttttgtgtgaggtttgtttaggtatactgcattattagacataagctagtgtttctgccctatgttttcagaatgacaattctttatgaaactaatagaagaacagaaaacaattgcaaaatcatgatgaagatactaattgctttagaatcaaggaataagaaaaataatgtgagctgcagttaaagggatcataaaaaattaaaatgaaaatatttttgagtgtttattatgtggtcagtgctaagaagtcattatttaattttacacttaaaaataatcctgtga

SEQ ID NO: 859871 - DNA, 557 bp, Homo sapiens
atggagtgatgaataaaatgaatctggtctccatcagtacatgccatataacattttgcagtgactgtgtaccaggcctttgattttcagtatacaatttcaataatgatcctattttatctgtggtgtttaaaaacatatacatctctggaatctaaaattgagaagatataagtaaaacccagtatcccaaatgtagtgctagaaatcagattgcagtttaaatctgagcatgtagaaagtccctttctcctatgtcagcagatgccttttgtgtgaggtttgtttaggtatactgcattattagacataagctagtgtttctgccctatgttttcagaatgacaattctttatgaaactaatagaagaacagaaaacaattgcaaaatcatgatgaagatactaattgctttagaatcaaggaataagraaaataatgtgagctgcagttaaagggatcataaaaaattaaaatgaaaatatttttgagtgtttattatgtggtcagtgctaagaagtcattatttaattttacacttaaaaataatcctgtga

SEQ ID NO: 859872 - DNA, 573 bp, Homo sapiens
aaagagtgctggagtttgagccccttcttgctttccaggatccaaacagtgatcagttccyagatccctggtttattcatgtaaaccacacttatttttctcagcagctactgtgtactcggctccattccaagttcaaatcattgtatttgattaagatagagagggtcccgactctcatggaagttacacaacaatagaggagacagacattaacccaatatgcaattaacaaagaagataacattagagagtaatagtgcactgaagaaaagacatcaggtttgtggaaaagagagaaatggattcacccaactttagctcatgtgtttagaaagctctgcctgagaaagtgacattcagctgagacaacaaaataagtagagagccatgtgaagatctaagggacgaaagttccagggagacagaatgtgggggcagggggggtgggaagccctggtgtgggaaattatgtgcagggacagaaagaaggctagagagactgaactatagcattcaaagaaatgcagaggcagaggatgaggtaggaagcagagaggaagtcaggagcct

SEQ ID NO: 859873 - DNA, 573 bp, Homo sapiens
aaagagtgctggagtttgagccccttcttgctttccaggatccaaacagtgatcagttcctagatccctggtttattcatgtaaaccacacttatttttctcagcagctactgtgtactcggctccattccaagttcaaatcattgtatttgattaagatagagagggtcccgactctcatggaagttacacaacaatagaggagacagacattaacccaatatgcaattaacaaagaagataacattagagagtaatagtgcactgaagaaaagacatcaggtttgtggaaaagagagaaatggattcacccaactttagctcatgtgtttagaaagctctgcctgagaaagtgacattcagctgagacaacaaaataagtagagagccatgtgaagatctaagggacgaaagttccagggagacagaatgtgggggcagggggggtgggaagccctggtgtgggaaattaygtgcagggacagaaagaaggctagagagactgaactatagcattcaaagaaatgcagaggcagaggatgaggtaggaagcagagaggaagtcaggagcct

SEQ ID NO: 859874 - DNA, 589 bp, Homo sapiens
aaatgttaattcagaaagaagacatagcaactctaaaagtatgtacaccatacaactaagttacttataagtagagcaaaaaatggtcagaactggaaggagaaatagacaaatacacagttaaactttgggactccacaaaccaactctgaaaagttaataaaacaactggataaaaactcagcaagataatgaaacccaacaaaactatccaccaataagatctaatggacattggcagaccaccacaccagacagaagaatacacattttttaactgtccatggaatatttaccaacatctctcataccctggaccataaaaggaacctcaacaaatgtaaagaattgaaatcatacagactgtgctccctggaagcaacggagctgaaccagaaatcagtaacatgaagaaaatcagtataactccaaacacatggaaacttagtaacatacatttraattacccttggatcaaaaaatgtcttggccaggtgtggtggctcacgcctgtaatcccagcactttgggaggctgaggcgggtggatcacgaggtcagttgttcgagagcagccagaccaacatggt

SEQ ID NO: 859875 - DNA, 545 bp, Homo sapiens
cagaaggtgaagagggagcagtcatataacatgaccaaaataggaagaaaggagtgtgtcagggggatggtgccacacatttaagaaaaaaaaattatttaawttttttaaattttcaacttttattaagttcaggggcacacgtgcaggatgtgcaggtttgttacataggtaaacatgtgccattgtgacttgctgcacagattatcaattgttcaggtattaagcccagcatccactagctattcttcctgatctgctccctcctccaacccccaccctccaacaggcaccaatgtgtgctgttccctcctatgtgtccattcattcttaccatttagctcctgtttttaagtgagaacattgaatatttgtttttctgttcttgaataagtttgctaagaataatggcccccagctccatccatgtccctgaaaaggacatgatctcattcttttttatgtctgcatagtattccatggtgtatatataccacatttttccttatccattctatcactgatgggcatttaggttaattgca

SEQ ID NO: 859876 - DNA, 596 bp, Homo sapiens
attagtgttgatgtgaccttgacaagccaacccagagttgtgagtagcttagtraagcatcccagagatgttaacctgttaacctttaaaacaaactcactctcctcccatctccctgacttccttcttattagttccacacttaaatgttggtgctggtgcctttgccctcttcagtcgtgtgatctcttggtgatctccatactgtggcttcacctaccaccttggtagtgaagtcttcaaagacccacctactttttttttttttaagacggagtcttgctctatcacccaggctggaatgcagtggcacaatctcggctcactgcagcctctgcctcacaggttcaagtgattcttctgcctcagcctccccagtacctgggactacaggcatgtgccaccacgcctggctaatttttgtatttttagtagagatagggttttgccacaccttggccaggctggtctcgaactcctgacctcaagtgatccacctgtttggcctcccaaagtactgggattacaggcgtgagccaccgcgcctggcccaacatctttatttctaattttactttctgctaaaaaaaaaacag

SEQ ID NO: 859877 - DNA, 579 bp, Homo sapiens
gccaaggagaaggcagcatagatcgggggacaggggcttccaaggcaacgcagagcagctgygagacaagaagcaggtgaaaacgcctgtgcggcagtcgctgctgggtggattctcctaagcacaggttttcaggagctggaaccacatttcctagtctgtgggttcaatcacactctgaggttcctcagggaatgacccccacgcaatgctaacatcggcttctttgttaatttccaacgtgtagaatgagtccattgacaaagggccgtcaagcgatttttggttgttccacctggattgcagaggccctcaaccttgaccgtggagctcccaaccctgatcgtggagctgtgagcctgggcagcagcctgagtggggaagggtggagggggggtcatttcttcaccctctgtgctgctcgaggttggcacatcaagaaactgagactaggttctttgctcatgtacccagcggcctcatttgtccaggcccaatgagggccaagcactgctccagacactgaggtcagagctgagctcaagacggaactggttcatcttcctgtgggagggtccg

SEQ ID NO: 859878 - DNA, 614 bp, Homo sapiens
gcatcccttttcatccttcacacctgaatttcacgatttctacttcctctttttgctttacacttctcatttcrcaaatacaatggtataatttcacttacctgaccctcagcaatagttttcatacatttattttcacatatgttataagccctaccttacacttaattttgatcatatagtgatatggtttggctgtgtccccacccaaatctcatcttgaattgtagctcccataattcccatgtgtttgggagggacctggtgggaggtaactgaatcatgggggtggtttcccccatactgttctcagggtagtgaataagtctcgtgagatctgatggtttcataaggggaaatcctttcacttggttctcattctctcttgtctgccaccatgtaagacgtgcctttcacctcccaccatgattgtgatgcctccacagccacgtggaactgtgagtccattaatcctcttttcctttacaaattacccactcttgggtatgtctttatcagcagcataaaaatgggctaatacatatagtaagatgtcttttaagtaaagataaaaaacaagagcgagccccttatctttacccatttatttgcca

SEQ ID NO: 859879 - DNA, 567 bp, Homo sapiens
ttgccggagagaaatcatggattttcaaagcctatctttggtcctcattattgatttacaatctaggaatcattatcctcactgattagaagctcagctaagctatttctattccaccacctgaaataactcttatcccctgtagctttggcttgcaccgcctggctccaggtctcccagaggccggagaaaccttggtgaaacctgaaaagttccctttggcctgacttaatctggggctctgcactttatgcgcagtaagaaggatggagccttgggagcttccccttctgccgctggcaaagccggttacccccacactggatttgtatgtatttattctggtccgttagcaacggccagtctgggcgtttgcttctggggaagcaccttttcagccctaactgtgcctctgcttttctccagagttttctctcccagtcggagtagctgacccaccagtcagcagactgttaattcattatgcacaggyactgcagcctctgtcaaagaacgcagaaaggcaattttagaaaagaaatcctggtttcttgcttggtggctttc

SEQ ID NO: 859880 - DNA, 595 bp, Homo sapiens
ccactaaaaaccaggaacctaggaggccccggaagaggagggacctgcctgagttcacacagcaagacaggtgagggcctggggctgggaccctcctctcagggggctaggctctgtccccttcgccaamtgtcccttagtccctgaggtttggatgaggggcagcatcttaggttgggttccccagaaactgagacgggaatttggagcaggaggccatggtgaggagggggctcttggactctgctgtaggttgagtggtgagccccagaaagatctatccaggccgggcacagtggctcacacctgtaatcccaacactttgggaggccgaggcgggtggatcgcctgaggtcaggagttcgagaccagcctggtcaacgtgacaaaaccccgtctaaattagccgggtgtggtggcacatgcctgcaatcccagctactcgggaggctggggtaggagactcgcttgaacctggaaggtggaagtttcggtgagccgagatcgcaccattgcaatccagcctgggcaacaggagtgaaactccgtctcaaaaaaaaaaaatctatacatattctaacccctggaactggtg

SEQ ID NO: 859881 - DNA, 565 bp, Homo sapiens
tttaaatttttttagaaatgggtgtctttctatattgtccaagctgatctctaacttctggactcagcttcccaaagtgctgggattacargtgtgaatcatggcacccagctatgactctctagagtgctttcctagtgctcgatatagctgtctgcacttagcacagagtaagtagctcttgtgaccatttcaacatgtctgcaaggaaggttctgttacatcctaaaaaccaaagtacaaaccaattaagacttgctgagggctacacacctcgtaagtgtagcctgggagtcagacttaagagcctgtggtcctatctcagacatttggacattctaatgaatgagattattttatgtgcagaaacaactctagtgttaactaatattatgtctaatagggggaaaaatgaaaatgagtgataattaaatattggttttaaagttactgttcatccaatatacacatatgccagtattatctattatagctatacctctacagtcccagttggtgatagggcctctggacatcaaatggtcatttcctgttctcctaaaga

SEQ ID NO: 859882 - DNA, 657 bp, Homo sapiens
tcatgcctgtaatcctagcactttgggaggccgaggcgggcggattgcctgagctcaggagtccgagaccagccygggcaacatggtgaaaccccgtctctaataaaatacaaaaaattagctgggcgtggcagcatgcgcctgtagtcccagctactcgggaggctgaggcaggagaattgcttgaacccagaaggcgaaggttgcccaagccgagatcacaccactgcactccagcctgggtgacagagcgagactccatctcttaaaaaaaaaaaaaaagaaaaagaagtaataataacacttctgttacttatacacaaatttggttttcatctaaatcccttttccccttcttcatgaattgcatttttccactcttaagcatccctttattttcttcccagggatcacagaagagaaagatgaagagcaaatatttttcctttactttgtgtattttctacaaacttggggcctgccttggtggctgtcaaagtgtcctttttttagagcagaaagagttgcaggaaaacatgatgtggtgtttcatgcaacatagtggaaatgcagttttaggtcatcaggctgcacttcctctcagtccgcagccccagagctctgtaacgaggatcccagttttccagactattgtta

SEQ ID NO: 859883 - DNA, 427 bp, Homo sapiens
atacacatgcacaaagacaggcactggtacttgtgagcatacacaggtatgaatacacagacacacctgtaggcatgcaaacaggaacagatgcaggtacagatatgcaagcaaacaaagcacacattccccaagttgtttaggaattatgaagaaaatagttgactccacatggcaatttaactataatgaactatagcacaaaaagctgctgataaaggtgtaaatattatgtcacatctacctataattgcttctacaccttttgttttaaagtttgtgtacaaaaagtaatcacttcaccttttaaatatctgtattctctttatgttttaaaatgttaatttaggatgaaagtacagattggaatktaaatctctagcaattataccatttagtgtcaatatcccaaatttatcatagacat

SEQ ID NO: 859884 - DNA, 623 bp, Homo sapiens
catcattttaatctcagctccatagtcttctccccaccccacattctagttatcatcgcaacaccattttaaatatcatttacagtattacctctatgaaaatttatttttgtaatttagttgtttactgtcttctgcgctaaaacataagctcttatgacaggattcttgcctgccttgttcaccactatatcctcagatcttaagacagtgcttaagtaagcattcaatacatatttcctgaatgaatgaatggatggatggttgggtggatggatggatagagaataaacaaaagggtagatgagtgatgagtttcaacatgctgaagattctaagcttagttttgcttcagaatattatagttctgagactttcagttgtaatatattcagagatgctgaatatagaacaggtaaactgagacactgtatggtatgctgaggacagctcagaggtattttatattgggcatctcatggacacagaataatctactgagaaaatgttggytccctttttctaattgattccctacaggattagtctaattgggacatatggttatggccgaggtactccttgtggacaagtgagccagcccatcactttgtggctcactc

SEQ ID NO: 859885 - DNA, 611 bp, Homo sapiens; identical to SEQ ID NO: 853355

SEQ ID NO: 859886 - DNA, 666 bp, Homo sapiens
gagggaagctgataccttaatttcagatttctgggttccaggactatgagacaatgaatttctaagcttttaagcaaccgagtttatgttagtttgtkatggcagccccagaaaactaatacaatcaatcacataggtgagacattctctagagtctgtatattaaatgagatttgttatatcacaggatagagttatctttaacttcagttaatgatgccaatttgctctccaacatgattttacctatttacagtctcatgagcagaaaatgagagctggtattatcagactttttttttttttttggcaatttaatgagtgtaaaatggctttgtgttattttaatgttcctagcggagttgaaatggtctgggcaacttggactacctgatttgtaagatgcctgccaattcaaaatatctatttccatgatttttaattcttcaatttagcatacctttcttgaatgcctactttgtttcaggcattgtactcggcactaagaatactactatggtctgaatgtttatgtctccccaaaatttattttgaaacctaatcccaatgtaatagtattaagagttagggccgttggggaggcaactatttcatgaggatggaaccttcatgaatggaattagtgccacataatgagacccaaag

SEQ ID NO: 859887 - DNA, 600 bp, Homo sapiens
aaatggtaaaaatataagtactaatgtctatcattgtaattcttcataaaaatctatgtatatttcctttcagggctcatrtgaatatatgtgtctgacttgtatcattgtcttataagtacttatggacatatgttcggccctcaaccaattaggacaagcacataagcatttgtcaaaaataaatatgaagaagaaatgatacttcattttttccaatataagaaggaccacctggttgacagctggaatttaagggatcttaaaatagtgggtaccagcaggtctgttgtacttaaaataattcaagtggtaagaattccatcaggaacatctatttcccaggatttatagctaagtccttaaaaaattgccctttgatgaaacttgaaaaaattcctgttttaaaggctacaataaaaatgccttacagcttaacaatgtttagatattttccttttaagaaataaaaatctcaaggctgtcaggtttgaatcctaaaaagggatactgagattaacagcaacatataattgtgtaagattcagtgtcacactctgtaatctatcttaaaaagccaaatagccaatagctgggtgt

SEQ ID NO: 859888 - DNA, 634 bp, Homo sapiens
gttgaacaatgagaacacatggacatggggcggggacatcacacactggggccagtcagggggtagagggctgggggagggatagcattaggagaaatacctmatgtaaatgaggagttgatgggtgcagcaaaccaacatggcacatgtatacctgtgtaacaaacctgcacgttctgcacatgtaccccagaacttaaagtataatttttaaaaaaggaagaattagtgtgtttctcgcttcccgtggattcacctgcatttttaaaatgtttttaaatttttaattttcagtttttgtagatacatagtaggcatgcaatatgaaataagcacatcatggagaatgaggtatccatcccctcaagcatttatcctttcagttacaaacaacctgattacaatctcagttatttttaaatgtacaattaagttattattgattgtagtcaccctgttgtgctatcaaatagtaggtcttattctttctattttttgtacccactaaccatcctcaccacccccaccaccccccactacccttcctcatctctggtaaccatccttttactctctatctcccttcatgttgtatttctattggctaccacagctctaggctcttcctccttgc

SEQ ID NO: 859889 - DNA, 595 bp, Homo sapiens
tccaggatctagaaggtcaaagcaggtgtcaaaaacgtgtaaagattccaagaaattccaaggaaaaaagcacgcaagacaccaggtgggaaaaccgacccgtgacaaaaaattcaggcagttaatcatgcctgtggggtcaggaaggttgcaaaggtctgagtaggccagtaatctgaaataaaggtgtgtgaggaaagttcctggtgtcaatcactacagcttaaacaggaaggctggtctcaaggctttctccagttctgctttctctggatgcccacatggagctgggatatagctgggctttggcccgaggacgccacagagaaagaactgttggagctggagacccagggccttgtgacttttcctgatatcaggattgagcactattcatcttctcccttaaagaaagaggaattttgcagcactgcaactgtgtgcttttatttatttatttatttatttttttgagttggagtttcactctgtyacccagagtggagtgcagtaatgcgatcctggctcactacaaactccacctcctgggttcaagtgattgtcctgcctcagcctcctgagtagctgggattac

SEQ ID NO: 859890 - DNA, 588 bp, Homo sapiens
acaggactttcttgtgaccaaatgtatcacctaattaaaatgacaaggtgtcacatttttaaattggagccatgactccccattgggttacatgggttaattgaatggctgattggtgcttctgtatgcccatggtgactttacaggcactacacagttaaaggtttaccaccttctactgaatgacagttctctgggtggccttggaccaacacaatactcccctcattcttgcttgtcattcttaagaataactgtagaatgtgctgggagtgcagtatcctgagatagggaggaactgcctgaaacagcaaaagccttgttccagtccttcctggagaatctaacatcttgagatagggaggaactgcctgggacagcccagcctttgttcctttctctcagaagcaggatgtccttcaaagctttgctaaatgagtcacatggcccctgaggtatataactcaggaaaggctgccttttggggtcyctcagctatggtgcaagtgaggcatgcttaatcgagactcattcacccaggcagctttcttgagtcttgggaaaccatctcacagtggatcctaggct

SEQ ID NO: 859891 - DNA, 624 bp, Homo sapiens
tttagctcccacttataagcgagaacatgaaatacttggatttttgtttttgtttgtttgtttttggagatgcagtctcgctctgtctcctaggctggagtgaagtggtgcgatctcagctcactgcaacttccacctcccaggtttaagtgattctcctgccttagcctcccgagtagctgggattacaggcatgcaccacaatgcccagctgatttttgtatttttagtggagatgaggtttcaccatgttggccaggctggtctcaaactcctgaccatctcaagtgatctgcccgcctcgacctcccaaagtgttgggattacaggcatgagccaccacacccagcaatatttggttttctgttcctgcattaattcgcttacgtttatcgcctccaggtgcatccattgcattgtatttctatttgacaatgctgatctacagccagactgcctgtgttcaaattccagttctggcagttactagctgtgtcatcttgggcaaataacctctctgtgcttctacttttctcatttacaatgcatgaaaaccatagagtctttatgaagataaaatytggtctttatatttggtctttgtgtcctcactgacagatgtgt

SEQ ID NO: 859892 - DNA, 628 bp, Homo sapiens
agtaaatgaggaagaataacaaaaatataatgagtccctggcatctgttaccaacagtgaattcatcctgatagcaactggaacattccagtgatcctggcaatgaggaacatcgatgtaacatactccttttgttttaaatgcaaatttttctctcctgttccctggaatgtcccaaaacaagagaatggtccagagcctgagaacaaagcacctacgaagaagaacaacacagagagggacctatacaagactaccactagtatcacaatctaggtcaaggtcattggagaaatcacaaaatcacaccatctcagcattggaaagtgatcatcatgtgtcaacaaatattttccaagtgaccatgtgctagatgctaaggaaacacaaatgattatgacaaaatccctattcaagtcatgtgtgctaagtacttcaatacaggagttaactaagggatatgggagtatagcaggaagaataaaacagcagatttttcaaaataagttgccaagaatgaacttgggatcaccacatccaccatctgccaatattacamacagaagaatcgtggtgattcaggataaagagaaagtaaggctgcagtcacagcagggctaggacttgt

SEQ ID NO: 859893 - DNA, 361 bp, Homo sapiens
gaaccggtatcattatagcttgataaaatactcaaactgaaagcagtgatgtacaytaattttaaatataatggttaagcaaatgttatttccatatctataagtgcattttatttgataattagaatgttagaatcagaaggaatttggaaaatcccaggttacacttctctccaggacgaactccttacagtggctctcctggggtcagctagcttttgcttgaccctttgaagcaggaggaactcagttccactcaagttgcccccttgattttctctttcatattgaacctgctgctgcacaggactcctccgtgactgtctctttgccttcctaaatctcaaagaataaagcaagt

SEQ ID NO: 859894 - DNA, 325 bp, Homo sapiens
cttatacagtggaatactaattggttattaaaatgttgatgtatgattattaaaaggcagcccatggtatgtctcytctgtatgaataagtatgtaaaaagtatgtaaagattactgtacagttcatgggtgggactgggctctctctagcctctgtccttcattctccctgccagtgccttttcccttgcagtgtcccttccctggctgcatactcaagactggatttgcccagccaaaccccattaactcacagaagcaagaggaaaaaaataaattcttattagttcaattctccaaattgggggcggtctatttcacagca

SEQ ID NO: 859895 - DNA, 685 bp, Homo sapiens
gaagctcaagagccctagttgcaaattttctgggatttaagtaccctttagagatttcctattggttactccctgtttaaatgaagacttggcctgccgccagttggaggctgaagtgaaggcttggcccrtgaccaatcagaggctgaagtggagttacactctatgcaaatgaagacttggcccatgaccaattggaggctgaagtgaagttaccccctgtgcaaataaaggctgggctggtgaccaatcaaaagctgaagtgctgcctgtctccagaccctattctgcctcactgaccacataaaaagcagaagacaaaaatctcatgaagaagcttcatcatctgcttcaaaaattggtaattatttcaagaagactgtgcctaaagatgacaatttagcacctgcagttgcagaaggtgcttttacacatacttggttaatcatgatttttcatttagatcaaataactagtcttctaaactaatcttcctcatttgaaattccaaattttctcattcatttatagaaagtgaaatgatagctatttatattttcatgacattagcagaactttgtaaacaggtaaatgaagatggattcagatcaatgtccttagagccttcaaattgaagttagttaattccaataatgtttgtgtttttcatctgcttcatggaatc

SEQ ID NO: 859896 - DNA, 543 bp, Homo sapiens
accctccccctttcaaaaaaaaagcaaaaaaaaaaaaaaaaaagtgcagcaagggaacatttgaattttgcaatatcgagagagggaaattggggagataagaacgaaaagggctatacgacttgtagttgagtacattgctaactaaaacattccatattttcagcttctcttgctgctagatatggctgtgtacctaagttctagctggtaaaatataagtggaagcattttgtggagcctttgggaagtcttctcaaaacagagaaacatacaccttttgctttctccttcctgctggttgaagcatgagatcccctgattagagataggatgcaaccaggtagatgagcctgggcctttgattggctgccgtaccagctctatatgtcttatctagatttctaggcttttccattaaataataatacagtcttgtttgaaaaaacccgaagaacagatatggctggrccggctcctccttgcacatgcttgcccttcctggccacacccagtcacctcacctctaagcccccttccctc

SEQ ID NO: 859897 - DNA, 504 bp, Homo sapiens
ttatttaattcatgcatcataaaattttaaataaactttgaatgttactaaggagatatgtaaatgcttcaccacccttgtccctcacctccatataattataaacataagtttattattttaaataataggggttttaaaaatatctttgaaataacaggggttaatatccaatgcaatttctgaatgtgttgcagtaatatcagttaaaacaagcatctgattaatgtggcttgggaacctcagacaatttattgagctgcttgctgtttaaaatctatgatactttccctcttctgtgcagatattgatttgatagatgaagtgagggtaatttttcttttagagtggtgatgttaatggtcattgaattttcactgacaacagcagtgaactatgtttattagggaactcraacagttgtttattttccttctttcttttgtttgtttctccctttttcttctccttatgacttcagcctttcacagatgatggaaaacc

SEQ ID NO: 859898 - DNA, 642 bp, Homo sapiens
cttagaaatcaatttcagagctgaaacgccactgcaagtatttctgaatactccttttagtcatctgctcaatcactgctgctgtactatcagaaattttgcatttgagcagtcagacaggcacagacaagaacctaggagcgcttaccagtaacaaccacgaaatggggaaaaagtagttggaagcttaagctatttgagcatacttttgatactatagctggtaattggaatttttgagaaatgtaaaatgtatatacaccatttaagcctcaacctattttcctttgttgtgagttaatttcatgcaattacaaatgatcttctgaattacacggcactatggatgtgtatggtttctcaaacattaaatgggtcattttcgtaagtaaatcatactcaattaaaatttttatctctatatggagtaaagtaggtatttaatttttttctctataggtaacctattttccatcactacatattcaatggaaggtggaaaatcatttaccctgtaatttgaaaggccatttgtttcctgcatcaarttctatttatacagaactgccattctggtctatttttaatttctctagctttgtgccaaaaaaaacacttaattaattaggatttatctcttaa

SEQ ID NO: 859899 - DNA, 642 bp, Homo sapiens
cctcttatcccataatacctgagggcctggcgcatgctctgcttttattccctgttccagtgtgaaagagaagatttatatgccaatcacatcatcatcacagtgtgagagctgcaagaaagagcagaagccctgaatcagatatgtgttccataagagagaccttcagctcgctacaattaatcgattatttgagatgtctcagtgtggtcagctgccaaaaacaactgaacaggaaaaatgcgatactaatttgaagtagaaaaatccccctactcacaggcattgctgctctttgtaggggcattgttatgtttttatgttgtcttaagggaaagtggaggatgcaaatgaattctttcaggctgagaaatgcagcagcagcactcactgtggtcaggggagcagcagtgagcagcaagtatcaacaaagaaaatagaagctcagattttatgtggttgtctaaaaccaaaatgcttagatatttggtgctatcaagagatctcacttgcttttctctcccaattgaggtacagaaaaagacctgagcagtggtgttrccaaatgtcacagtaaggcttcattttacctgctttgaaactctagaaggaaaagcaaccaaatcaagacaaccctctgat

SEQ ID NO: 859900 - DNA, 552 bp, Homo sapiens
ataacagcaggtgggaatcactgttttttggagtcaataaggaagccttaaggggggtacccattatggagttctgcttctcacattttcattttaagtatctgctagaatttatagttaaaatagtcttggtttactgtgtttatatggatatcaagaaaataaaaggctcagcttcaaagccccttttggggccacatgactcacaaggtctctatctgagtcatagcactgaattctcccaatgtctgatttgaagttcttagactatgcctttaccaccatgccccatttatccagcatggttgaggatgaggctgtccatgtatgtgaattatccaaaataactgaaatataccgatcagttccaaaatatatataagcattttaatggaaatctttctaaaatacagcctgcatctccctttttwaaaaaaaaatacttagaacatatttaattcttacttcatgatttaaagtcattgtgaacatccatttagacaggtatgttcagagattattgagtcatatagcatcctgagcacatttagt

SEQ ID NO: 859901 - DNA, 504 bp, Homo sapiens
ccagtatggaggaatttccttataaaactgtatgcttgcatttaccagacaacccagaattgctcatatccccccaaaaatggaaacaggttgactcaaaaacctatacatgaacattcatagcagttctattcataatagcccaaaatgtgaaacagcccaaatgccaatggttaagcaaactttggtccatccataccatggaatactactcagcgataaaaagggacaaactactgatacatgcaataacttggatggcccccaatggaatgatgctaagtgaaaaagccaatctcaaaaggctacatactattatttcacatatgtaacatccttgaaataacaaaactatagagatagaacagattcatggttgccagggattggagattgtgaggaaggagtatgtgaatataaagaagtagcataagtaatgatggagaagctctgtrtagtgattgttatgtaattacacgaagctacctacacgtcataaaattt

SEQ ID NO: 859902 - DNA, 563 bp, Homo sapiens
tgtcaacattgataaaggtggggtgtagggtgcacaggaccttcttgtacatatctttgcaacttcatgtaaatctagaattattttttaaatagtttaaatttttttaataaaaataaagcgctcttgacagtttacaaaatgatgtcacgagcattatttgattcaagataagcctccctaggaggctaaccccttggcctaggaggttgcataaaggagatttgcgccccattttacagatggacaatgagatgcagatgaacagctgcccaaggtcacgcagttgctaagtgattgtgaagacaggtagttaacctcacctttgatgatcccccaatccaatgctctctcttccttcttccttctttccatatagcaggcatgaaccttaatggcaggaatttaactgtaccagaaatttccccatttcattgtattctttggaccaaagtacataaggctctaaacactcattctttcatgcttgtataaaattcaatttttgacacwattgagttccctcccctgccctggagtcacacaaaacactgggaggcttc

SEQ ID NO: 859903 - DNA, 630 bp, Homo sapiens
ttactcatcattgcttttggttcctgtatcctacatgttccttctggattattgctaaaggatatcctttcattctttctgcaaggttctgtgaatagtaaactctcctggttatcatataactctaatgcctttattcaacatagaattctagtgtaataaatactttccctcagtactttggaaatactattcttctgtgatagctggccaaaagtttatctttctttctagttgagctctcttttctcctcgactactttaacttttttctcttttcctttgttgttctacacatgtattacaaggtgtctaggtattgatttgttttttattaattccgcctgagactcagcatgcaattttagtttctattttctccttgactcaaatgataagactttttttttctttaattttcaggatacagggtttttttctgattatatttttaatatctagttttatttgcactggaacaaaagcatttttttaatttactgaggtttttgtgtatattttcttcataaaccaatacatcttcatttttttcaagactgtttaatgagtacttgaaaagcagatatattctccrttttcaaaatggagtttgatatgtatgagttagat

SEQ ID NO: 859904 - DNA, 560 bp, Homo sapiens
acccagttctacaccctataaaaccttgctatagcctgtaagtggggctgcctcctctgcttttgtcaagaggtggcctggcaggactgacaataaatcagcttgcctgaacttgggtctattggcctcattcctttctcggccatccttccaattatcccttacagttactcctaatcaaacacttacagaagacaaggttctgggtgaccatgtatttgatgccttagcacattttagtcaaaccaaggagtacaatgaggttggctgtttgctcctaactgcgtgggagaaagtagggaaaggataggctcgggaatttgaattatcagctcaaagtccacataaagaaactgaaagcttctgtttgccctgaaagaaattcttatcttccttccatagccacagggccctgaaaaccaaaattcagagtctccgccctgycagtggctgaatgatgcaaagtgatttctcagccttgtagcctctgtatgaatataaagctggaatgggatcctatgggcagattctcacaaagctggggactctaacccctgagt

SEQ ID NO: 859905 - DNA, 593 bp, Homo sapiens
tcttttaaaacatgacttggatcataccacttatttaaaacccctcaatggattcctgttgcctttaaaaccctttaccatagtgatacaaggtactgcatatctctaagtcctcagctcaaaccattaactcccaatttgagtaataagctctagtcctactgagcttcttaaagttcctataagctgttaacctctgtcctgcttcagaacctttgcaaatgctggcctgtctgcctagaatgctattagcagtatttgaatgatcaatttcatctcatcttttaggtctgaattcaatttttacctccacaaagaggttttcttatcatgtctaaagtaggccactctgattactctttagctaaaccatttgtttccttcataaatatattatttgtaataattgtatttgttagtctgtctccttgttgttgttattgttgtttgtctatgaggttccccatagtacctggcrtatactcagaacttaatggtctactgtttaataaaatattttacatctctcctttgcttagaaacttttgatgtttctcaactgtccacagaatagtctaaaccctttactataa

SEQ ID NO: 859906 - DNA, 515 bp, Homo sapiens
ttgtgaacaatgaaaaacataatgtgcaatggcttaaacaaataagtggactatttttttctcatgtagcaaaaatctggaaacaggtcattaggaccagtgtggcggctcaaaaatgtcacagggaaaacagactgttatgtcactgataatatgtggctttggtttttatggttgtgaatgggttactgaatcttcaggtgttaaatccacattccaggtcagaagaaagccttcttcagccatatacagaagattgaaactggacccctttatttcatcatgtacaaaaactaaccaaagatggactaatgacttaaatgtaagacctaaaacaataatgaaaaccctagaagaaaacctaggaaataccactttggacattggccttggcaaagaatttatgamtaagtccctaaaagcaactgcaacaaaaacaaaaattgacaagtgggacccaattagactaaagaacttctgcacagcagaaaaaatactatcaacagagtaaagag

SEQ ID NO: 859907 - DNA, 521 bp, Homo sapiens
ctgagagagccccccaggccctgtgtcccttctcagaggacctcagccccccagtgcctggrccacggatgggctgggggctggggcccagggcctcgcatcctacaagggcccaagggctgaaatggggctggggtccctggatctaggggatgagggcccagaacgaggctggggtctggggttcagtggagcaatgaccaggaatcaggctgcgatctgtagtccaggtgtctggcgtcagacagcaccctcctgtacacggcacagctgtactgcagggttagggacaggatttactgccaccaacggaagcgttgattccaagtctcagacaccgcccccaggctgggcctccctcgacggaaggtgacgctctctgggaggtccttggtgctcacctccctggctgcttggggccccagggctcctgcctagggatgttttggggctgcagaaggaccctctgcccattatcagacgagaagtgcagagagcaaatgcgtgctgttggcgccccc

SEQ ID NO: 859908 - DNA, 679 bp, Homo sapiens
gaaggatcccctccctcctttgygctaatgttgtgtatattacagtattacagtttttgccttagttgtgtctgtattaaattaagaaaaaaagaaatagagaacatttcatatttccctacctttaccatgtccagtggattttactcctttctatagatgactttctgcctagcaataattctttctgccaagcaataattccttcagcctgaagatattcctttaacatttctatagtgtgtctgctggcaaagccttctctcagttttccgttatctgaaaatgtctttattttgcttttgtttttgaaggatattgtcactggatagaactctgggttgacaatcgtttttctttagaactctaaagatgccagtccatcatcctctggcctccagtggttataagaagccagacatatttgaatctttattctttgagtgtaacgtctttttccttccaggtgctatctttgtctttggtattcggtagtttgactacaatgtgcccagataacattttctcttacttttactgcttacagtgtgctgagcttcttggatttacacatttatatcattcagctattatttctttaaatactttttatgccccattttctgtgtcctctctctgtggggctccaatcacaagtatgttagaccacctggtgcta

SEQ ID NO: 859909 - DNA, 562 bp, Homo sapiens
cacgcccagctaattttttttttttttttttttttttgagatggagtctcgctctgtcgcccaggctggagtgcagtggcacgatcttggctcactgmaagctctgcctcctaggttcacgccattttcctgcctcagcctcccgagtagctgggactacaggtgcgcggcaccacaccctgctaattttttgtatttttttttttagtagagacagggtttcactgtgttagccaggatggtctcgatctcctgacctcgtgatccgcccgcctcggcctcccaaagtgctgggattacaggcttgagccaccacgcccggcctcctggctaatttttttgtatttttagtagagacggggtttcactgtgttagccaggatggtctccatctcctgacctcgtgatctgcccgcctctgcctccttaagtgctgggattacaggcgtgagccacagtgtccagccctttttaattttaagttctggggtatgtgtgcaggatgcgcaggtttgttacataggtaaacgtgtgccatggtggtttgctgtacctgtcaacc

SEQ ID NO: 859910 - DNA, 616 bp, Homo sapiens
gataaggatccactttcaatcttcttaatatggctagtcagttatgccagtaccatttattaaatagggtgtcctttacccattgcttgtttttgttggccttgtcgaagattagmtggttgtaggtgtgcaggtttatttctgagtttcctattctgttccattggtctatgtgtctgttgttgtaccagtacaagaacagcattctggttactatagtcttatagtttgaagtcaggtagtgcactgcctctggctttgttctttttgcttaggattgctttggctatttgggctctttttggttccatataaattttagaatagttttttctagttccgtgaagaatgtcattggcaattttataggaatagtatggaatctgtaaattgcttcggagagtatatacattttaattatattgattcttcctatccgtgagcatacaatgtttttccatttatttgtgttgtctctgatttctttcagcagtgttttgtagttctcctagagatccttcacttccttggttacctgtattcttagatatttcattttctttgtggctgttgtaagtaggattgtgttcttgatttcactctcagcctggccatt

SEQ ID NO: 859911 - DNA, 605 bp, Homo sapiens
agtacaagcccaaagagtaagcagcaactagatttatgacaaacagcaaaataacaaacactccataaagcgtaagggtaccccagcgtggtactacaactggctcgggcagcctgcttttattcccttatctggccccacccacatcctgctgattggtccgttttacagagagctgattggtcccttttgacagggtgctaattggtgcgtttacaatccctgagccagacacaaaagttctccaagtccccactagattagctagacacagagcactgattggtgcatttacaaaccttgagctagacacagggtgctcattggtgtgtttacaaacctttagctagacacggagtgctgactggtgtatttacaatcctttagccagacgtaaaggttctccaagtccccaccagattaactagacacagcactgattggtgcatttacaaaccttgagctagacacggtgctgattggtgtgtatacaatcctccagctagacataaaagttcttcaaatcccwgctagactcagagactccgctggcttcacctggtggatcccgcacccacgccaaaggcgaagctgcccgtcagtcc

SEQ ID NO: 859912 - DNA, 587 bp, Homo sapiens
ggtgaggaacaagaaggaatcaaatactaccaggtcactggtttgtgcaactgagagggtagaggaatgccgaggagcttattatgttggatatcttccattttctttgcaaatccccctgctctgtgctctagaaaggtggcctctatcaactattgcaggtgtcttcttgtcctttggcttctggtttggatttagcttataggtaaaagaaaatagagaaggaaccaagtaaggtgagtgttgttgcctggccccctcctcagagtcacctcagcttgtgaattctttagagggagctcccttgaccctcttttttagagttttattaaggacttttggtcctacaccccaaaagactacggttaataacagctctgctaaaaaacaaaaacaaaaacaaacaaacaaaaaaaacctgggagttttatactgtttcttttggtttcccctataaaccactaaacctctgtaaatatctcccccccaccctggakataaacagtcttcacatttttcacatttgattttgccatctacttcctgttgagactgactaaaataaatatgttcagtttttattctaa

SEQ ID NO: 859913 - DNA, 548 bp, Homo sapiens
aacccatctagcagagtgcgtctttatccttcagggatccacttcctggtcccccaactgcatctcatgtttcttctcacctagaacagtaaagtaagtgcacagtaaccctttaatcaaaacacagcattatagatggaaactgaaaacctgctgttgtttgtgccactgctgtttaactgctaacataggtattctggtctgtggcatcatgtcggcactcaaaaagcttcagattctggagcatttcagattttggatttttggattagggatactcaatttctattggtaactagttaaacatgcttcaggcttgaacagaagctgggtcgtcgtagagagcaaaaggagaaaaaattttctgtaattgggtaaagaccagaagatggatgtgagtttatgcttctggggaaaaaaagcagggtacwtgctccatagttttagcgtttcacaaataaaatcttattgggaagcaggttgagtgataggtttaaaactcttaaagtaggtcaggaaaagagggaaatatgtggctgaaggtagtg

SEQ ID NO: 859914 - DNA, 588 bp, Homo sapiens
caacttgattgtggtggataagctttttgatgcgctgctggatttggtttgccagtattttattgaggattttcccattgatgttcatcrgggatactggcctaaaattctcttttttgttgtgtctccatcaggctttggtatcaggatgatgctggcctcataaaatgagttagggaggattccctctttttctgttgtttggaatagtttcagaaggaatggcaccagctcctctttgtacctctggtagaattcggctgtgaatccatctggtcctgtatttgttttgattggtaggctagtaattattgcctcaatttcagaacctgttattggtctattcagagattcaacttcttcctggtttagtcttgagagggtgtatgtgtacaggaatttatcaatttcttccagattttctagtttatttgtgtagaggtgtttatagtattgtctgatggtagtttgtatttctgtgggattggtggtggtatcccctttatcattttttattgcatctatttgattcttctctcttttctttattagtcttgctagtggtctatctgttttgttgatcttttc

SEQ ID NO: 859915 - DNA, 626 bp, Homo sapiens
taccaccaggccttggtaatttttttgtattttttgtagagatgcggtttcaccatgttgcccaggctaatctcaaacttctgagctcaagccaacagccagcctcagccttccaagttytaggattgcaggtataagcccctgcgtccagcccataaatgttcttttacagtaactttgaaattattattttttttgagatggagtctcgctctgttgcccaggctggagtgcagtggcacgatctcagctcactgcaagctctgcctcctgggttcacaccattctcctgcctcagcctcccgagtagctgggactacaggcgttcgccaccaagcccagttaatttttggtatttttagtagagacggggtttcactgcgttagccaggatggtctcgatctcctgacctcgtgatccgcccgcctcagcctcccaaagtgctgggattacaggcgtgagccacctcgcccggccagtaatttgaaattatttcaaaataaaaagtgtgtgaagcccatactggtagttcaactagagaggctgagaagccaaagttcatataaaacactggctctcaagaaagctgtttcagagcttgtttatacaccctccccatatacct

SEQ ID NO: 859916 - DNA, 630 bp, Homo sapiens
caaatgccaggctgtgctgatatttattggatacaagacaaaggggcagggtaaggagtgtgagccatctccaatgatagataagttcacgtgggtcacatgtccatgggacagggggcccttccccgcctggcacccaaggcagagagagaggagagagagacagcttacaccattatttctgcatatcagagacttttagtactttcactaatttgctactgctatctagagggcagagccaggtgtacagagtggaacatgaaagtgaaacaggagtgtgaccgctgaagcacagcatcacagggagacggttaggcctccggataactgtgggcaatcagtcaggccctccacaagaggtgtggagcagagtcttctctaaactaccccggggaaagggagactccctttcccggtctgctaagtagcaggtgtttctccttggcactgatgctaccgctagaccacggtccgcttggcaacgggcgtcttcccagacgctggcattaccgctagaccaaggagccctctggtggccctgtcygggcataacagaaggctcgcactcctgtcttccggtcacttctcgctatgtcccctcagctcctatccctgtatggcctgatt

SEQ ID NO: 859917 - DNA, 531 bp, Homo sapiens
catcctgtcattttcttgccaaggtctcagcctatcagttgtgacacaagtctcatcagtttcagttttcttgtccatagaatgaccacagatcggccagatgcggtggctcacgcctgtaatcccagcactttgggaggccgaggctggcggatcacctgaggtcaggatttcgagaccagcctgaccaacatggagaaatcccgtctctactgaaagtacaaaattagctgggcgtggtggcacatgcctgtcatcccagctacttgggaggccgaggcaggagaatcgcttgaacccaggaggcggaggttgcagtgagccgagattgcgccattgcactccagcctgggcaacaagagggaaactccgtctcccaaaaaaaaaaaaaaaaaaaaaaaaaaraatgacggcagatcccataaggataaggatcatgtccatctctgtcaccacatccccaatcctggcacctagtaagggctcagtaaatgttccttgcatgagctcagctagctcaggggctattat

SEQ ID NO: 859918 - DNA, 672 bp, Homo sapiens
cctggttaactaaaacgtggaaactttctaaagatgtgagagagctcttaaggcaattataaatagtcttttaaggaagaktcatattgtatgttctgtgttgcaggccaagtggcatcagagctgagtgatggacgacctgcagtcccagaacctctccatggacatgactgactcccctcctgccttggctaataacagactggagaatggcatggctcagctgatcaccaccgaggcctggaacatcaactccactgacctggtaaagaaggccctggtgaccgtgccagccccatccattctgaacccccctgccgagtctcagagtggcatggctctgaaggtggcggccactgtgttgcagcccctgtgcctcggggagagcccagtggtgatgcccattcacatgcaggtggagggaagctccgcaccagagctcaatccgaatggcaatgccacctacgtcatgaccacccagggccccgtgcaactgcccgtggtgctggagcagcacgtctttcagcacctcaactcccctctggtcctgccgcaggaggccccatgctcctccagtaccatccacaacaacctcttccagggagcggaggaccccgaggcccagccccagctcctggacctgaggatccccagccagccgcaggagcccac

SEQ ID NO: 859919 - DNA, 627 bp, Homo sapiens
agcagcgtcagatgggatgtaggtgggtctcctgtgatcaacttggtcaagtataagatggaatgtaagagctaaaatagacctcasagatggtctgtctccttaatactcaaagtggggtctcaggaccagcagagcatcacctgagagcttattaggcatgcacaacctaaggcctcagagctgccgaatcagcatgggcattttaacaagacccccagttgattcagttgatttgtgttcacattaaatttttagaagcattggtcattctaattcaatcttcctcccagtgctcaaacccctctctccagcatctctgaccactggtctcctagccttgtctctgttgagagcactagatgatattttgtaagggggatatctgcaagggttcaagggaggctgatttgatgatgtgctagaaatttgcccagcagactgaggcaggagggagagcagtattgggactggtggagatgagggtaaggaccgtggaaccagtgtgagccataggggaaaaggttcaatgcactaatgacagactgaagggcaagggctaagtctgagatgggagttcagccaaggggcggaactgctgtgagcagccaaaggaaagtagttgat

SEQ ID NO: 859920 - DNA, 636 bp, Homo sapiens
tgaagtgttcaaaatggatacaaatttggcagtgagtcccaggtatcaaatatcctttcagtccttcccacaaggaaactgacagaaatgaagacttattccccttattttcttctcagcttctatggcagccggtgggatggggaaggtttaactgcaagcatgtccttgcgctaagaatttgagggagtaaggaacaatagctggggcgtggctgggtggagaggtcttaagaatagtattcacagggtcggaacacattttttcaagatcttacaagtgaaaaacgtttctgtaaataatctgtttatttcacctctgtttgcaatttaaataatactgaacaatttttcaataaataacactaaaaaatcacaatggttgacatttattgatgcttgctctatgccaagcactgtattaaatcatggccatacattatttcttttaatatgaacagcagccctacgaggcaggaactttttaaatcttcacctgacagactacaagaggcaaggcctagagaggttgggtaacttgtccaagttcctagtaagtagtagagccaaakttaagaccaggtttatctgaatttcagctccaagtatttaattatacactgcctaacatatctgc

SEQ ID NO: 859921 - DNA, 615 bp, Homo sapiens
caaaaaaataatttttctaacatagggtcacaaagattttcttgtatgttttcttctagaagttttatagttttagattttacatctagttctatgattcattgaattaatttttatatattgccaaggtacaaattgaggttcatttttaaagatattcctactagttattctaacatcatttgttgaaaacactctcttttctcagctaaattacctttgcagcttttttgaaaattggttgtctctctctctctatatatatatatatcagtgtatttgtggattctgttctatcccattgaactttttgtctatagaaaaataagacagtaccatactgtgttaatcactttaactttataataagtcttcacgtcaggttgtgtaagtcctccaacttggttctttttatagttgctgactattctgaatcctttgcttttccatatgaattttagaaggtacttgtcaatttctacaaaaaaattctgctgggattttaatataaagatttygttgaatctaaattaattggaggatgattgacatcttaatattaagtcttttcattcatgagcatggtacatctcttcacttacgtaggtttttaaa

SEQ ID NO: 859922 - DNA, 519 bp, Homo sapiens
tagtcccagctacttgggaggctgaggcacgagaatagctggaacctgggaggcggaggttgcagtgtgctgagatcactccactgcactccagcctaggcaacagagtgagtagtctcaaaaaaattattattgatatttttattcaaatttttcttttgagacggtcttttagtagagatggggtttcgccatgttggccaggttggtctcaaactcctgacctcaagtgatccgcccagccaatatttaatttttaattgacaaaatttgtctatatttatggtacacaacataatattttgaaatatgtatacattgtgggatggctaaatcaagctaatcaacatatgcttgcctaacatacttatcttttgtgtgtgtgcgtggtgagaacacttaaaatctctcttagtaattttcttttttttttgagacagagtctcacgctgtcacccaggctggagtgcagtggtgccttmtcggctcactgcaacctccacctcccgggttcaagcg

SEQ ID NO: 859923 - DNA, 568 bp, Homo sapiens
cctccagtttcatctatgttgttgcaaatgacagaatttattctttttatggctgaacagtattcctctctctctctstctctctctctctctctctctctctctctctgtgtgtgtgtgtgtgtgtgtgcaatattttctttatgtattcatccactaatgaccacttaggttgattctatgtcttggctattgtgaatgtgctataataaacatgggagtacagatatctgtttgacatactgattttacttttttggacatacacccagtattgggattactagatcatatgatagtactgttgttaatttttgaagaacctccatagagtttgccatatggatgtactaatataccttaccaccaacagtatctaagtcttccctcttctctacaatcccaccaatacttattttcttttgtctttttcataatagccattctaactggattaaggtggtatatcattgtggtattggtttgcatttcgttgatgattagtgatgttgagcattttttcctatacctctaagccatttatatatcatgttttgagaaatgtcta

SEQ ID NO: 859924 - DNA, 568 bp, Homo sapiens
cctccagtttcatctatgttgttgcaaatgacagaatttattctttttatggctgaacagtattcctctctctctctgtctctctctctctctctctctctctctctstgtgtgtgtgtgtgtgtgtgtgcaatattttctttatgtattcatccactaatgaccacttaggttgattctatgtcttggctattgtgaatgtgctataataaacatgggagtacagatatctgtttgacatactgattttacttttttggacatacacccagtattgggattactagatcatatgatagtactgttgttaatttttgaagaacctccatagagtttgccatatggatgtactaatataccttaccaccaacagtatctaagtcttccctcttctctacaatcccaccaatacttattttcttttgtctttttcataatagccattctaactggattaaggtggtatatcattgtggtattggtttgcatttcgttgatgattagtgatgttgagcattttttcctatacctctaagccatttatatatcatgttttgagaaatgtcta

SEQ ID NO: 859925 - DNA, 558 bp, Homo sapiens
agcagtggccagcagcagcaacctcagactataaatgaacctgttgataccaatatgaattcgcagttgtaataatagagattatggacatacatatagaggcgtctcattcgcaatgacttgaccctgaccacaattctgtgtagcatgcagaacggtgtgacaccatgtgcagggaggagaggaaagctgtggatataccaaaaccagagaatgaaaggtcagatttcacatgcacactgtttgagtccaagtccagctctccttgccctgtaccaccctacagttcatgaatcccagaatgggtcaccagtaagacctgcatcaggaaccacaggtcaaagatgccaatgaagcacctcacagcatgagtcatgcaggaaccaggcggagaacctgagctgaggccagagggtgctggggtggggtctgycaccctgtttgggaactgggggctccagggaggtgggagcagagagggcaagtgacagtctaggaggcagaacaggtgcaagtcagcacctctaacccctaacatctaaataaaaaagcaatgac

SEQ ID NO: 859926 - DNA, 612 bp, Homo sapiens
tgtttcagaaattccataattatgagatgaaatcatcaaatttaagacctcgctacatatgaaaaaccacattatattccaatagttcagaattaatttatttactgaaaaattttagtatgcccttgccaaccaaatacaatgtgtgatccttgattggatcctggattgaattttaaaaagctttaaaggacaattaattgggagaattggggaaatttgaatgtgacctatatattagataccagcattatgtcactttgaaatttcctgagcgtgatgattgttttgtggctatgtaacagactgacctttccataggagatacaaactaaaggttttgaagcgtcatggtcactacaagtaaccctcaaatggttgaataaccatttgagagacaagagaaagagagagaaactaaatatggcaaaatgcttatgactggcaaatctatgggaaggatatgtggatggttattgtctcattcttgcaatatcctgtaggtttgaaatcaaagaaaaagataatcttgagtggaaaagaattgtttaagcttaataatagaacaatttacaaaagwcaaaagaaaaatgacagatttgtctatatgta

SEQ ID NO: 859927 - DNA, 650 bp, Homo sapiens
gtcccaaaggttttagtgaaattcaaagctttaataaggtcaaaactataggtgatacagtttataaaacatcatttgaaagcttatttaaatttcgtttacacttcttgagttttataaattttaaacaaaaattttttttaatttttgttttggtcaacatttgccatcctcaagaagctctgctttctagactgttttattcaatgaatggttttaggcaaaagtaattgaagcaaatgtccagcagtgcatatatatgctgctgattctatcctgtgagtcttggatctgttaaaggtctccttgtgtctctgtctttgctgaggatttgagggtgcacatgtgagtacaatgaggagacagcactctccactcacaaggtccagcaaaacacagctggcctcagcctacctggttgtaaaggggaggggtgagattacccaggggagaaattcaaaacctatgacaactcttaaactcatcgaagcctccactacatataaatttataagttaataatgaccatttaaatatcggcttgatctttgatttaatctatgggcaggtctaattacagacacactggagttagcctcttagttagtcttaaaggcttrattatttaatggccacaacactggtgaatc

SEQ ID NO: 859928 - DNA, 529 bp, Homo sapiens
tgtagtctcagctaccagggaggctgaggcagaaggatcgcttgaatccaggagtccaaggctacagtgagccatgatcatgccactgcatgccagcctgagtgacagagcaagaccttgtctctcaaaagaaaaaaaaatccttgggtcatgagcagctagtatctctaaagcagatatttggtacaccaacccaaatggtatgcccatccaaactgccctcctttaagtctaggcagagctattttagcaacttccaataactagattgccccagaatgtcttattttgctgttgtatgtttgttgtggttttacgttgaggtctatgatcttacaacttttggaagtgagtgctccttcagggtgtcatgtttgtctcgtggtatcatgcatgtctcagatagatcaagccaagtgtagtctaagggctgcatttgaagaactctttgaacatgcagattatggatacaattccaattttracatgaaaatattgtgcaggttgtttctttgtgataaaggacata

SEQ ID NO: 859929 - DNA, 625 bp, Homo sapiens
tatgtttgcgtgtgtgtgtgtgtgtgtgtgtgtgtgtgtgtgtgtgtgtgtgwgagagagagagagagagagagagagagacttatgaggaaatgacttatgtgattatggagactaagaagtcccacagtctgctgtctgcaagccacagactcaagacacctggtcgtacaattcagtccaattccaaaggcctgagaattagaaaagccactgttgtaaatcccactcaaatcattaaagaaggacaacatttcagcttaataggtgggcagaaagaaaacaaaaggcaaattcctctatcctcagcctttttgttctattcaggtcctcaatggattggacgatgcccactcacattaggcagagcaatctactttactcagtgctccaattcaaatgccaatctcatccaaaaacacctttgcagacacacccagaaataatgtttaatcggggcaccctgtggtgcagtcaagttgacacataaaataaaccatcacacagttgcaaggcagtaaacaaaccagatgtggttcctttcccagagacgttcctgctggtggggaagtcattctctagaaagagattcagcaatccatggcccgacggccagacatttatt

SEQ ID NO: 859930 - DNA, 586 bp, Homo sapiens
aggttcaattttgtctgttccatagtcttttatcatcatctcaagtgttgggcctgcattattttctcaggagttatatgtctgcaaaaatttaacaagtaacagatacaaagttttaaaaataaaaatacaaagtaaaattaattgtaatatgccaatcccagtttgcataacagttttcagccatgaaccttggcttaaaaagacaaccaattaaataaatcatacaaccattatcctgccaaatgaaaaaggtagaaattaagaggcgtaagactctcattatgatatggaatactgttctaatatcttggtaaaagctgtctacagcataaaaacatcaccttcttgtactggtttgcagttcgaatgtctttgttgatggcatcagacagtttgatgaactttgtatgacctatacatcaaccctgagacttgttccttaaaatttacctattaataacttcagtgtatagggcttccagaacaargcatttcttatttttggtaattctatggaagaaaattgaactggaagaaactagaagaatttaggatttagtccagtctatagatagataacaag

SEQ ID NO: 859931 - DNA, 526 bp, Homo sapiens
aacaacaaaaacaaaaaataaaaaacaacttttatctgacatattcaaccattattattttcctatatttgtggctgaactttatcttattcaatacacatgacttaaattacctgttkctaatggttgtaggacttcattatcgctgcactgtcacatcactacatgtgtgacaattggtctcctctgatggtattggcatctcaattcacattctccagatgcattaaaaaacattcgtgatccaagaactgttccatctaggtgctgagggtcaggcttaacttgacttccttcctagtatcttacctgtcagtagactttgatggtacgtattaataatatatcctgataccaaattcaagaccttttttttttttattttgagatggagtttcgctcttgttgcccaggctggagtggaatggcgctatctcagctcactgcagtctccacctcccgggttcaagtgattctcctgcctgagactcccgagtagctgggattacaggcatgtgccaccatg

SEQ ID NO: 859932 - DNA, 578 bp, Homo sapiens
aacccccgaagctttgtacattcgtgaattctgctggtcaagaattctcaggaggcagagtgggcaggcccctgctccgtgatgcttgtggcctcggctggaaagagctgagtgtygaggtcactggggcggccagagcaggccccgggcttcctcactcccatgcctgcccggggccacccaggggtgaggcgagctgcgaccgtccccgtgcacctgcacgcagcctgtctgtgtggccaggcttctttatacccgacacctcagagcggtcacctcagggctctgagggggagtgttcctgcgctcagggtgggacttttatgatgggacctttatgggagccacccagggtcccttctgatgtacgctgttggctatagcagtcacagccctcccagattcagaaggatggaacacaggccccatctctccatgaaaagagggtccaataatttgtgaccttgtttcaaaattgccacagagatggccctcccttttcactgctcagctcagccgtgctgtgacccagtgcttgggctcagcttgtcctagagcaccatccctcccacccctgc

SEQ ID NO: 859933 - DNA, 561 bp, Homo sapiens
tgatccagcaatcccactactgggtatctacccagaggaaaagaagttattatatgaaaaagacacttgcacacacatgtttacagcagcayaattcacaattgcaaaaatatacaccagtctaaatgcccatcaaccaacaagtggataaagaaaatgtggtatatatttaccacggaataccacttagccataaaaaggaacaaaataatggcatttttggtaacctggatggagttggagaccattattctaagtgaactaactcaggaatgggaaaccaaacattatatgttctcacttataagcaggaactaagctataaagacgcaaaggaataaaatgatataatggactttggggacttaggggaaagggtgggagaggctgaaggataacagactacacactgggtacagtgtacattgcttggatgatgggtgcaccttaatgtcagaaatcatgactaaataacttttccatgcaaccaaataccacctgttcccccaaaactattaaaataaaaaaatttttaaagaatattatcttgtgataatatta

SEQ ID NO: 859934 - DNA, 501 bp, Homo sapiens
cagccatatcaatagtaacactaaaaatgaatgaattaaacaatccaatcaaaagaactaaaaattatccaactatatgctatctacaggagacaaactttwgattcaaagatataaataggctaaaagaaaaaggtatcatacaaattgccacagtaagagcaagaatagctatgctaatatcaaacaaaatagactttaagtcaaacagacaaaaaatactagagataaaaaggaatattttacaatgataatagtgtattttacagtgattacaataccaatccatcaggaagatataacaattataaatatgtatgcacctaacaacagagttccaaaatataagaagcagaacatgacagaactaaaggaataaatacataatttaacaataaaagtttcagattttgaaactgcctttgtaaattttaacagtgagaaaattataacagtgaaagagatctgatctaaccaactccatcttgactttaatctcca

SEQ ID NO: 859935 - DNA, 612 bp, Homo sapiens
attctctgcgtaacagaaaagtgacaaatttcagttgctactgttcgaaagtttcataaatttaaaaagccacatcctgctatgctttcaaaycatttcactgaaacctagttcctatcaaatattaaaaataaatcatacatgtgatccagattccaggggaccagaactatagtgcttttagaaagtgactgtttacagagatgacttacaaagaaatgcattttataacaaccacactgggggactgcaacaagattacatctgcacgtggtgctgtttactaagacatgaagagctgaaggagactgagatagcagctcacagacggagggcagaaatacacagggctcccaggctgtaccggcccagtttatgtcctacttcctcttgatgtttacagcttagtttcacttaaattttaaaaagccagattctgttacacagccttaatccttacattttcatttcctctacattttagagcccaaggagtaatttctgtaatatttaggctaatatgaaatgagaaactggcattacacaagtcatgcagtctgctcacttaaccgagatcaatgaattaggtctaatttgctccttttactaata

SEQ ID NO: 859936 - DNA, 574 bp, Homo sapiens
catcattattctcctaggctggtccactaacatctgtctacatattactcaaaatacctagagtactgtatatttaaaatgtaaacaacccaaacagaaaacaacattgttgcaaaacgaaataaaactttatttctactgaatcctaatgcctagctaaatgacaaacatccagctagtgaactggtagttctcacctgcataactaccccaattccaacccgagatatgcctaagtcccaagacaaagtgaagtgaaggagcacaccaccctcctgcctgtacccagcaactctgcagccccagcaacgacattccctcctgaggatgacaattctcggcagctccccactcagaaacaggagggaaaaccctcgctttggtaagagaatagagcagtcagagaaaaaagctaaaaggtttggcaacagagtgaaacaccacaaaagtgaaaaaaacagaacacaaaggggacarggcggccatcacggtgcagaggtcaggagtaaagtctctggtggcagttagccactgagatttagtggaaaagaacatctaatggcaaccatgacca

SEQ ID NO: 859937 - DNA, 443 bp, Homo sapiens
acacacatgtgatagttgagcttaaagtgtcaaaatatggacagtattcagaggaaacagtgatagtgagctggagggttctagaaagatcatgtggaggcaatggggcaagagctggaccatgaagaatggatggggcagaagatgggcaggcaggagaatgggggataaggacctcctagtgacttaggtgaatttagtatgacatcttggttttattaaataagtagcatttgatactctttagtctactttaccttttccttccaacaactctgtgaattagaaagggcagatggttaaatctatttattgttgakaaatggaggtccagaggggaaaaaaatgctttacccaagacacacagtgaaattaatggcagcctgagcttctcaccgttgctatttgagtttctccatgttacttgaccacccactggtatc

SEQ ID NO: 859938 - DNA, 591 bp, Homo sapiens
ccctccattctaggtgcgagtaggaaccagccagggaagaggaagaagcaagcctacctgagtccatggtgccagcagccaggtcactgagagactttccatggagctctccagtcactgacctgactggaagggttcgttttttttcttaacccttgaggaggagaaagcaaattgtgggactgaatgtgagccacctgtggacagagggaggttggaggggctggatctctgcaatccctttgcgtgtcagcaaatgccaagaccaacctagcccggtgttttttaatctcctgggccccagccagctggtatttagagaaattctacttgctccagctccctctgccctcactctcacaccaaggcagggtccttttgtcctgtaggggtatgaagagaagataatcagaggaagggatggacatctgataatcacagaaactacagagtctatacaccgaaatagagatgggaaggaacgttctgacaatgacctgggcctggcaacatgtgtgataactaattgataayagccagtgtgtactgggtgtctgtgatctgcagggctcctcatatgtgcctcattcg

SEQ ID NO: 859939 - DNA, 583 bp, Homo sapiens
ttttaaatgtttatatctatgccttttcttatctcccatggctcatttcaacccgcaagcagggagagagsgtagggcaggaattttaatttataagatatggaaactgaggctaagaggggttaagtccccagcctaaggtcacatgatggtgttgggtgtcaggctgcagtctcctgggtttcaggcaggcaggcctcctcactttccccatgcctacctcaccctcttcattctttttttcccatggccctgccagcgcccacacagacccaggcccccggaccacaggcccgtttccatgcccatcaggcacggctccaaggcacacgtcagacaccagctgcatctttgtttgaggagaaatactctgggtttgagtcactggtaccaaaaaaagcctgaaaacccatgctggccacatccggtagcttctgcttccagctgggttttggggctgagggtggagctgaggctgcgttgaccacactgagggtgcaggaggtagaaatggtcccgggtagcctccaggataagttggctaaattcaccgggcagggaggtgggtacgtgaccatcagag

SEQ ID NO: 859940 - DNA, 650 bp, Homo sapiens
aaaaactcaagggggtgccaaaaaactcagtaaccaagatcaataatgtttcaatgcaatcttttttagatcagtggaaaaaaatccatgacaaacaaaaaatataaagtgtttaaataggacaagtgatgttgcgctgtgctaagccacactggagccaaggcagaaagaaaaaaatcagtaatactgatcctgacattatttacaatttttatatgttgtttttcatggatatttttgcatttagattgtttcataacagctttactgagggacaatgcacatatcatataactcacctatttaaagtgtacagttcatgggcccggcgcggtggcccacgcctgtaatcccaacactacgggaggccgaggcaggcgatcacctgaggtcaggagttcgtgaccagcctggccaacatggtgaaaccctgtctctactaaaaatacacaaattagcagggtgcagtggcagatgcctgtaatcccagctgctcaagaggctgaggcaggagaatcgcttgaacttgggaggcagaggctgcagtgagccaaaatygcgccactgcgctccagcctggacaacagagcgaaactccatctcaaaaaaaataaaaaaataaagtgtacagttcaatggtctttagtata

SEQ ID NO: 859941 - DNA, 573 bp, Homo sapiens
gcctttgaagggtttcagcggaggagtgacatcagattcccagtttagaaagcattcctccttgcatctgggaaaacagatctgagcrgggtaagaccgagggcaaggaaaccagtcgggagactctacaggcccagccaggagatgctgagggcatgcctgggcccccaagccagtgctgtggagagagatgctgactgcactcccagggcaggggcacgtgcatggggctgggtagctcaggctcacatcccagttccactgttcaccatgtgacctggggtgagtaacacggccctgtgtgcctgttttctcacctgtcaaatggagacagttatagtacctgcctttgtgaggcattgggctgtatgaattattattacctgcagtatgttttccatcaaaggtagatgttcctttcattctagaatagaggtgggggttaagaatgaggaggtgtctgggatggtgctccggtacctgacatgggtgcctgagcggagagaggggccactcttcgacataaggaatgtaaaaggagccaggtgtgagaggaaacctgatgagttcttt

SEQ ID NO: 859942 - DNA, 593 bp, Homo sapiens
actgttggcatatactcagttggtgcaaacgtaattatggtttttgcattgttggaatttgccatttgatattggaatacattcttaaataaaygtggttatgttatacatcattttaatgggcatttcttgctttattttttttgctaatgacttattacttgctgtttattttaagtttattttagactatggaaatgatgttagacaaaaaacaaattcaagcgattttcttattccagttaaaaatgggttgtaaggcagcagagacaactcgcaacatcaacaacgcatttggcctaggaactgctaacaaacatacagtgcagtggtggttcaagaagttttgcaaaggagacgagtcttgaagatgaggagcatagtggccagccattggaagttgacaacaaccaattgagagcaatcattgaagccagtccttttacaactacacaagaagctgtggaagaactcaacgtccaccattctatagtcgtttggcatttgaagcaaattggaaaggtgaaacagccaataagtgggtgcctcatgaactgagcaaaaataaaaaaaaattgtcattttgaaatgtt

SEQ ID NO: 859943 - DNA, 518 bp, Homo sapiens
aaaatttgaaaaagcaaaaaccactcatcagctttttctattacacgaaaagcatgttcaagagaggaagttagattttacccttgcattaatttgctattaatgttaaacctaattttttaatgaaaccttatagacaattctattcaatcttaaccagtttgaccataaggtgagatttttacatacctgttataattgatgagttttgctaaagagcagattagcattttaagaaaaccttgttgcgcttttatttcagagtttaatttacagaaaaaaatacccttctgaattttgttaatagtttcacacagagtttcctttgcaagattaatttttacaatcttttcacaatttgcttaaaccttccactttaatttaatttaagacaattctttatttctagggagaatgtacatgtccatgcctycttataatctttaactaaaaacatcttttactgttttttttactcacctcgtatgcaaatccatgttcagtagtctcaattacat

SEQ ID NO: 859944 - DNA, 596 bp, Homo sapiens
ttgcctacgcttgctcatttaatccccacaataatcctgtaaggcagatagmgtggtattagctccactgttacaatgaggacatggaaacacagcagggggaagaagcttgtgcagtctcacaactagcaaatcagaaaaccttcctggagaaatccagctctgtcagacactatgtaaccttgggtaaattactcaaccactgaaactaagtttcctcatgggggaattgaggataataatgcctacagataggaatgttatagtgatggattgctttcattcattcatttattcaacaaataccaagtattattaaagttactggggctacactgctgagaactggttgccagtggagacagacaaacaaggaagaagagagacatctaataacaaactaatgaacaaataagtatcaactgaaaaatgctttagtacaataaaagtaccaaccagccctgtgagagacaaaagcccttagaaaatgctttaagaactacctatttggtactacgctaactacctgggtgatgggatcatttgtacccaaaacctcagtgccacacaatatacccacataacaaacctgcaca

SEQ ID NO: 859945 - DNA, 585 bp, Homo sapiens
aagaggtaaactcagttattgtttataaaaaacagtatccagctagagttaaatagaaagaacrgattcctgctcaacagccatagtatttattgaataaatgaatgaatgaatggttgaatgaatgaatgaaaccttagttcaaaggtagatttgtagttgctgggtccttacatggatgaaggagccaaacaaaggcaccactatcagtaacacttaaccttctaaatagacactggccttaattaaggtcttttcacataggaaaaataggttcttaatccggttccagaatgcccaattaggccaaaatacagcattttgcactttgcacaagtcagcaaatcatttcctttgttatataaatccatccttagtatacctaaaattttgggatacagctcagatctaactcaaatgttttccaaagtaattcacaaacacattacttcagcatttcttctacatttaggaaaactatttttaaaaaccatcattctgtaacattcccttttccaactatagcatacagtagggctcaacaaactgtaatatacatgcccctgagtaacatccagtaatctc

SEQ ID NO: 859946 - DNA, 573 bp, Homo sapiens
aaaattatgtgttgttactttatagttataactcctatctgacctaaaacagtagtatcaccaacctgattgccttatctttcttatcagacttgastccaaattccctaaattatttggattcaaatgaactgttattccctaaaatcaaatctgctctcaaaaaaatgaagatggatggccagagacggtggctcacccctgtaatctcagcactttgggaggccaaggcaagtggatcacctgaggtcaggagttagagatcagcctggccaacatggtgaaaccctgtctgtattaaaaatacaaaaatcatccgggcatggtgttgcgcacttgtatcccagctacttgggagcctaaggcaggagaatcgcttgaacccatgaggtggaggttatagtgagcagagatggtgccactgcactccaacttggacaacagaatgagactctgtctcaaaataaaaaagaagaagaatatcacaggctccaaagtggattctaaaagaagttccaaaaaatgttttctgccacacctaaaaaggtactcattgaaagaacaacttcaggc

SEQ ID NO: 859947 - DNA, 664 bp, Homo sapiens
actgtgaatagtcacagtcctgcttcctggtcttacattttatgggggaaacagacaatggacaaacagacaaataatgaatcaggtgctggcaagtgccrtgaagaaaagtaaaaggtaaagggataatgatgtctgctattttagaggagttacaagacttgtattgagcacttaacccttcatctggacttcttcatatatgctggatagtgagcattttcagtgaaaattgttgattaatactgtccacctcttgatcattttcctacaacataacacaactgaatataaagaaaactaggcctcccagcaggacacctgggttctagtcctggctctaataagtatcaaacagcaaagactgtttaaacttctgggttttgttgtctccatttgaaaaatgaaaagaatacacataaaattatacaactttgagaaagagttttttacaactgaaagatgctatgcaagtgtaaaacattattatataggaattttatttccttaaaaatatgccgaggatctggattactgaaaatgctcttttatttgctctctttccactcatccaggaatggcacaactagagaggagcgccatctctggcttcagctctaagtccaggcgaaactcattcgcatatgatgttaagcgtgaagta

SEQ ID NO: 859948 - DNA, 585 bp, Homo sapiens
agtcattcatttagccaaaatgatgactcaaaatattttaaaaaggcaaaaacctttactcattgatggagggaagacttagctttccaaaaaatttgtcttttatctttcccttcttttttcggtagtttattcgaaaggtaaacaaaaatctttcattatcttttaatattacatgaaaatcttgttcaagagagaaaaccacatttcacccttgcattagtgtactattaatgtcaacctcaacttttaataaaaccttatagacaagacaaatctatctaatcttaatcagtttgaccataaggtcaaaaggtttattctcataaagcttttataagcctttacaaattttggttaaagagcagatcagtgctttaagaaaaccctgttgtgctcttattccaatgttcaatttatggaaaaacttaataatacccctttaactttagtcartgtccacacagaatttctttttataagattgatttttcacaaaccttccacaacttgttcaaacttttagctttatcctatctaatataaaacaatcctttaaccctctaaacttaggcaagaaaatcc

SEQ ID NO: 859949 - DNA, 428 bp, Homo sapiens
ccaagacagttaattactggatcaaatctgatcctggacctagtccagtttctgttgtgacttccaaacccagtttggaacagaaatttgttcaaagaaactcagagagctcaaaacacaaatccatggaactctaaaatttaagagagaacttacccatgattcccagctgctctgagagatcagcggacacaggtgggtcctgcgggtaccttgagtgttcactccgcactcctggggtcgttaaagctctacttcggaccctgcttctgacaccatctattaaaaactccagctgtwttaagtttaaaggaatttaatcaagcaatgaatgattcacaatttgggcagcccccagaatcgcagcagattcagagactccagggggggcctcctgatcagaacaaatttgtagacaaaaaagtaaa

SEQ ID NO: 859950 - DNA, 559 bp, Homo sapiens
gtcttcctgttaacaccagaagcagagcacttgctcaaggatgtgtcctcccacttatagtctcagtcaaatacagatacagagaaagtattctcagccattccaataaaggtagagataaatccaaagaaacccctatccaaccttaaacactatcctctgcaaaaggaagccatagatggaattgctcctgtcatacaagattatctgagaaacgggctcattattccctgcacaatcccctgaaacagccctatattccctgtaaagaaactaagcgggagaggatggaaatttgtgcaggaattgagggcaataaacaatatcataattctcaggcacacagtagtccccaacccacaaacccttctatcacctatatccactaccagccagtatttctcagttgtggatctctgcagtgccttctttagtattcctgtagaaccagacagccaatatttgtttgtctttatttggaaagaatggcaatatacgtggactrtaatgccccaaaggtatacagaaagtcccacttagtgttcccaaatattagaag

SEQ ID NO: 859951 - DNA, 616 bp, Homo sapiens
tatatatgcacctaacactggagctgtcaaatttataaaacaattactactaaacctaagaaatgggataaacagcaacacaataatagtgggggacttcaatactccactgacagaactagacaggttataaagataaaatttaaccaagaaataatggacataagctataacctagaacaaatggacttaacagatgtttacggaacatcctacccaacaactgcagaatatacattctattcatcagtgcgtagaatactttttaagacagaccttatgatagatgactaaacaagtctcaataaacttaagaaaattgatattatatgaagtactctctctgaccacagtggaataaaattcgaaatgaattccaaagggaaccttcaaaagtgtgcaaataaatggaaattgaataatttactcctgaatgatcgttgagtcaacaatgaaatcaagatggaaatttaaaaattatctaaactgaacaataatagtgacacaatctatcaaaacctctgggatatggcaaaggcwgtgctaagagaaaagttcatagccttagatgcttacatgaaaaagtttgaaagaacatgattgatgatctaaggtc

SEQ ID NO: 859952 - DNA, 615 bp, Homo sapiens
cagctcctaaagaggggtgagtgaaagaggcatggagtggcccactctcactgtggacctcaaaaattctagctgtaggagaacccacaacccctatggacatctgagctggcagggagaactgccagagagatggcagagacagaaccccagcctgcaaagagccaagaaagtttgatgctcgaacagctgcagtggagaatggccatgggcatccatcactcaatgcttgtcatacacttctaggtagctttagcctttttttgctgtcagacctggacacaacagcattatcttgcccatagaacagggccaatctgatctgagtgactcctatttgctatttcaggctccctgccaggctgcacccactttcagtgcagactcagctgcccagccaaagcacttgtaagcggccaccactatagctcttttgctggcagagtccacctaatagcatctgtgggcagaccaccaccaatgcacaccgaacaagaaccctgcctcactggcacacacttgctcacggcctcccattaccttcacwggaatacactagtcccactgccttcactggaatacagtagcccacaatgtcccccgctaattcaccag

SEQ ID NO: 859953 - DNA, 620 bp, Homo sapiens; identical to SEQ ID NO: 810290

SEQ ID NO: 859954 - DNA, 486 bp, Homo sapiens; identical to SEQ ID NO: 810289

SEQ ID NO: 859955 - DNA, 558 bp, Homo sapiens
ccttcccatacccagtcacccgcacccagccaagacagtgacttctccatcccctgaactcatcacacgtgagcccacctctgcccaaaatgcccgcacttctccatccagcggtacccccagggtaaactcccacacctctgtggatctgctcttccctcctttgctgccctctgtggccaagaatttatgcacacaatatggctggttgtatggcagccaaggcagggacgtttgcttaggtctcaatgtctcttcagatcatcgttgaatctagcaatgctctttcacttatctatttgaaccgtcaacagtactgtcaatgtgggagggcaggccctgtgtcccctttttagaagggagagaaggtgggtacagagacggtaagtgactgacccaaggtcacattgtcggcaggtcccaaacacatgtggtctgttcactttcctagttctgccttacaaccctggttaattttttttttttttttagagacaggttcttgctctgttgcccaggctggagtgcagtggcrcgatcacagctcattgcagcttt

SEQ ID NO: 859956 - DNA, 600 bp, Homo sapiens
aattttaaaccttaaaatagctccaagggcaacaaggaattctctgggtctgggtttcaggtctgaaacaattgatgytaatgatgtccacattccccatcacaccgtgattttggaaagttggtttggggaagtttaacagaagagagaaaactcaggaaacagtgaattgggagaagttgttgcatttcctcattctctctccgtctgtctcgttctcatccacttagtcacacacggcaaccaagcaaaagtgtaaatattacttttcatgcatttatctaggcatagttaggcaagcagaattgagcaaggccccaggtaaagggaccctttgaagtaatagcacttttttggctgttttgttggtcaatttttgggtgcattatgcttttaagatagaacttaataccaaccattaaaaaaccacctccttttcaaaatgaatattctcccttgtatggcttctttggtgatggtaagatatttggcacctcccaagtgtggtttgaactttgaacactcttgttgaaaatgtgagaggaaataaaaatcagctcacagctctccaaagcatactgcaaattaactgtgtatcgg

SEQ ID NO: 859957 - DNA, 602 bp, Homo sapiens
aaagaaaaaccaggacaaactcagctgatatctgcccacagagagagcatttaaaccagccttagccagaggggaaccctaatccaagtgatcggaacttgagttcctgcaaaccttgccaccaaaggctgaagtgctctcggtctctaagtaaacttgaaaggcattgtaggccataaggatttcaagtcttaggtgactcccaacagtgaactgggcccagagagagtggcctggaggaagcatgagacctaccgagacactagctgggacaactaagggagtactggcattacccctctcctaaacccagactgcacagctcatggttccaaaagaggccccttccttcagcctaagcagagaagagggaagaggagggaagactatgtcttccatcctggataccagctcagccacaataggataaggtactattcagaatcataagatcccttttccaggctctacctttctggtgacatttctagacacacactgggccataaggggacctgctgctttgaaggaaagttgcccagtcctggcatcattcrtcacttgctaactgcagagcccttgggccctaaataacaaacagc

SEQ ID NO: 859958 - DNA, 581 bp, Homo sapiens
attttctccccttcttagctccagataatcactattatactttctgcctgtattaatttgactcctctaggtacatcatgtaaatggaatcatacaatatttgtcctttttttgtatratttatttaacttagcataatttcttcaacattcatccatgttgtaacatgtattagaatttcagtttttgaaaaataatcagaatgatttttaaaaaataatttcaacttttattttagattcagggagtaaatgtgcaggtctgtctcatgggaacactatgtgatgctgagatttggggtatggatgatcccatcacctagacagtgagcacaacacccattaggcagtctctcgcttttactcccctccctcccttccccctccagaagtccccagtgtccatttctcccatatttatgttcatatgtactcaatgtttagctcccacttataagtgagaacatgcggtatttaattttctgtttctgcattaattcgcttaagaataacaacctccagctgcatctatgttgctgcaaaggacatgatttccattctttttaaggcagaatagtgttt

SEQ ID NO: 859959 - DNA, 553 bp, Homo sapiens
ctcctactcaacatagtactattctatctatccaaggggggytgcacatcagccctgtctcctgtctgccatcttcctggcaagagctcataaagcaagttccaaaataatcttatatttagaaaaaccaaacactccaccagaacactcttagaactgataagccaattcagtagacttggcaggatacaaaattaatatgcagaaataagtagcatttctattcaccaacaatgaaatagctgaaaaagaaatgaagaagagaattccatttatgatagctacaaaaaatatgataaaatacttggaataaattttaccaaagaggtgaaagatccctacaaggaaaactacaaaacactgatgaaagaaattgaagtggacacaaacaaatggaaagaaattccatgctaatggatcagaagaattaatatcattaaaatgaccatatggcccaaagcaatctacagatttaatgtgatccctatcaagataccaatgtcactttccacaaaaatataaaaaacaatcctaaaatttgtatagaaccata

SEQ ID NO: 859960 - DNA, 564 bp, Homo sapiens
tgatcctactgtagggaaatgccagaaactgttttttttttttttttttttttttttttttttgacagagtttcgctcttgttgcccaggctggagcgcaatggcgtgatttcggctcactgcaacttttgcctcccgggttcaagtgattctcctgcctcaccctccctgagtagctgggattacaggcatgcaccaccacgcctggctaattttgtatttttagtagagacggggtttctccatgttgctcaggctggtctcgaactcccaacctcagataatccgcccgccttggcctcccaaagtgctgggattacaggcgtgagccactgtgcctggcaaccagcaactgttaataagaactgcttttaatttccattgagtaaaacaagaaaaaagtggaatttcatcattttcatttcaactcgaatacattctcagtgacttccctgcaactttctgcattaactcagtggtagtaaatagtttgtcagytattgacaaacgttaataaattgttctacatcaagagcgacaaatgttcctcacctgcgtattaca

SEQ ID NO: 859961 - DNA, 501 bp, Homo sapiens
gctaccgaaggccaacacaggaatgaattgtgcaacacaatgctgcagtgttgaataataactgaagcttaaagtaattatctaggtgtctgtatttgtatacataggtgaataagctaatggagttgcatagaaatctcctttgcaaaagaattccaaataattgatgtagacactcagccatcaggaaggtggagccaactcctcactccatgagtgtgggctctgcatagtgacttgctccaaaagaacacatgcagtatggacaaggaggaaaaataacttcacagtggagaaacctgacaaacagtagctctgccaaatgatccaagtgaacatcaaaaatgacagtttaccttgagaacatgaagtgaaaatgggrgacattctacaaaattactgaccaatcctcctcagtactgtcaaggtcatcatgagatggaaagcctgacacactgtcacagccaggaagagcctatgtgatgactacatgtcgtgcgg

SEQ ID NO: 859962 - DNA, 501 bp, Homo sapiens
gctaccgaaggccaacacaggaatgaattgtgcaacacaatgctgcagtgttgaataataactgaagcttaaagtaattatctaggtgtctgtatttgtatacataggtgaataagctaatggagttgcatagaaatctcctttgcaaaagaattccaaataattgatgtagacactcagccatcaggaaggtggagccaactcctcactccatgagtgtgggctctgcatagtgacttgctccaaaagaacacatgcagtatggacaaggaggaaaaataacttcacagtggagaaacctgacaaacagtagctctgccaaatgatccaagtgaacatcaaaaatgacagtttaccttgagaacatgaagtgaaaatgggagacattctacaaaattmctgaccaatcctcctcagtactgtcaaggtcatcatgagatggaaagcctgacacactgtcacagccaggaagagcctatgtgatgactacatgtcgtgcgg

SEQ ID NO: 859963 - DNA, 552 bp, Homo sapiens
tttttttttttttttgagatggagtttcactcttgttgcccaakctggagtgcaacagcgtgatctcagctcaccacaaccctctgcctcccaggttcaagcgattctcctgcctcagcctgtcgagtagctgggattacaggcatgcaccaccacacctggctaattttgtaattttggtagagatggggtttctccatgttggtcaggctggtctcgaactaatgacctcaagtgatctgcttgccttggcctcccaaagtgcttggattacaggcatgagccactgcacccagccagttttctttttttaattaatttctattctcattccagtttggtcattaaaagtaatctgtaaagttcctattttaaaaaatttgttaagacttttttgtagcctaacaggtggtctatcaaggagaatattttatgagctattcagatgggtatgtattctgcttttgtttaagagttctctacaattctattagacataattgttttatactgctttgaagtcttctatttccttgagtattcttttctgat

SEQ ID NO: 859964 - DNA, 589 bp, Homo sapiens
agggcatgagaggagcgatactagccaggagggggcagatgggagaagagtttgtatttaatgctgctggaaatctgatgatgccactccacttgcataaaaccctcggtggctccccaatacccttgcaaaagccataaatcctcactagggcttcaagatccaccttggccctgcttccctcagcagcctcatctctccctgtgctggcacatgctcacttcatcccctgcaggtcctcagtctcactctgggacctttgcctaccaaccccttctctctggagtgttctgccccactcccctggatgactcaccccccactcattctcctcatctccacctaaatgtcacctcctccaggaagacttccttgatctcctgagtgctcgcagccccctcggctttcctgtcactccgatctaattattatatctttagtgtctgttccataccccctgcctgcccccacyttagtctgtgagccccatgaagggcaaaaaccaagtctgtttatcactggatccttagtgccaagaatgaatggtgccggcacatagcagatacccaactgaaatttattgaataaa

SEQ ID NO: 859965 - DNA, 653 bp, Homo sapiens
tttggtagttttccttctcacagtcaggaccctcagctgcaggtctgctggagtttgctggaggtccactccaaaccctgtttgcctgggtatcaccagtggaggctgcagaacagccaatattgcagaatggcaaatgttgctgcctgatccttcctctgaaagctttgtctcagaggggcacccggccccatatgaggtgtcagttggcccctactgcgaggtgcctcccagttaggctacacgggggtcagggacccacttgaggaggcagtctgttcattctcagatctcaaactccatgcttggagaaccactactctcttcaaagctgtcagacggggacgtttaagtctgcagaaatttctgctgccttttgttcagctatgccctgcccccagagacggagtctacagaggcaggcaggcctccttgagctgcgctgggctccacccagttcgagcttcctggctgctttgtttacctactcaagcctcagcaatggcagatgcccctcccctagcctcactgctgccttgcagttcaatctcagactgctgtgatagcagtgagcgaggctccgtgggcatgggaccctccgagccatgcrcgggatataatctcctggtgtgccatttgctaagaccattgga

SEQ ID NO: 859966 - DNA, 588 bp, Homo sapiens
aaacaatttgtacagttaactcaatcgtcacagggtcctgaggtgacatacatcctcagtttaygaagatgatgggattaagagattaaagtaaagacggcataaaaaattataagagtattgtttggggaagtgataaatgtccatgaaatcttcacaatttatgttcagagactgcagtaaacacaggcataagaaattataaaagtattaattttgggaactgataaatgtccatgaaatcttcacaatttatgttcttctgccacagcttcaaccggtccctctgttcggggtccctgacttcccgcaacaagggatgcctgctcctctctttctagatgggtagccgttcatcttcactctgtacccctttcaaatgcatcctgaatctcctttgaaaaaaaacaccttcttcttcttttttcctcctctgtcctctcttcactgataggtaattgtgtctccatactatgggacactccccttggatgcatcctctgaactgggaaaagttaatttcccaaaccttaaactggttggcttaggattggactcaggggaagggaacccaggagcccaacatgt

SEQ ID NO: 859967 - DNA, 525 bp, Homo sapiens
gcaggtgagggtcaaggattaccagagaaatactcaaatcgttccctaagtggcagtggaagttggactctttcttctcattgcaaactttggtagctgtgtggcctcactagtactggtagatttttttttcttttgctgattgccactgctttgttattttcttctggtgcaatatctgaacttcattggctacagatatctcactcttttgcttctattggcacccaagttggagagggtacaaatgacccagtcaccacttaatagattcatatggacaaaaaaaggtgtatcatttgagctgcagaaacctagagtagtaccctgattctgccatgggctagctgtgtggtataggtaaattgcttaagttggaagaacttcagtttcttcatttgtcaaagtgggttgtygatctgggttgaacagtgggtaagaacataggtttggagccaaacagttctggatttgtctcttagctccatttcctactaattgtgtgactttctctaaacttcagaa

SEQ ID NO: 859968 - DNA, 622 bp, Homo sapiens
agctccagcacaccactaattataactatatgaccatattgcaagtcacttaatctctctgagcttcactttcttcttctgtaaatcacaatcatcataattatgatcatatcctayattatcataattatcaccaatgatgatcatcatcactattatcatttcaattatttcaattagacttaaagccatagcttctaatctttatgccaaaggcacccaaagtcttataccaaagtctctaagaaagactatgccttttcacctcatgattagcaaagtagcatagtccaatgtcaaaatccaagactatgttgcctattgcagataatctcaaaaatgtcccttattaatgtatttgtttttaaccagagaaaagggaggaagagagaggaaataaagaaagggatgatcttgacttgacaaatctatcttcatttttctgaatattttctgtgttatccatctattcacccattcctctattaaattagtattcactgagtacctactatagtatatgtaagtcatgctggacactgagaacctaatgatgggcaaaacaggcaaagtcactgtccttgatgagtatactgcctagtgggagaaacagacattaaat

SEQ ID NO: 859969 - DNA, 613 bp, Homo sapiens
caggactactaactgtacttcactctcagtttcctacttttatatgtaatgaaaaaatagtaattctttcaaaaactaaaggaatatcagccagggtaattagaattactattttaaaatattactaaaatttcatgtttgctttagaaactattgaaaatgtaagaaagcaagagtaatttttttaacttttattttaagttcagcggtacaggtgaaggtctgttaatacgtaaacttgtgtcatgggggtttgttgtacagattatttcattacctaggtattaagcctagtacctattagttatttttcctgatcctctccctcctgccactctccaccttccaataagccacagcgtgtgctgttcctctctatgtgttctcatcatttagttcccacttataagtgagaacatgtggcatttggttttctgtttctgtgttagttaagcaaaaataatttttaaagtcctctctaaatctgccaygtaaggactaaacactatcgacatctatcacatcagatttgtccctatgctaacaagtcatatggatattttgaaaaacaggatcctactatatgcatcaatttttcatttaaagatacatt

SEQ ID NO: 859970 - DNA, 611 bp, Homo sapiens
cattttatctattcaactgttgaaaaacacttaggtcacttccaaatcttgactatttgcagcaaacatgggagtgcagacatctcttttatatactgacttcttttgaatatatacccaccactgggattactggattatatggtagctctcttttattttatttttttgaggaaactcagagtggttgtactaatttccattccaaccaatagcatatgatggttccctttttctccacattctttccagcattagttattgcctgtcttggatacaagccattttaactggggtgagatggtatcttattgtagttttgatttgcatttctctgatgatcgatgatgttcagcactttttcatatgcctaattcccatttgtatgtcttcttctgagaaatacctcttcaaatcctgtgctcattttttatggtgttattggatttatttctatagagttgtttgagctccttatrtgctctagctgttaatcccttgtcagatggatagtttgcaaatattttctctcattctttgagtttactcttcactttgttgattgtttcttttgctgtacacaagcttgttagcttgatgtgatcccattt

SEQ ID NO: 859971 - DNA, 576 bp, Homo sapiens
aaatgcctttttcttcctctcctatayacttttatcacatctcagctactcccacacttattatctctcaactcccccactctatgaaatatcctctagccttaagctttaaataccagttatatttttctttattcctgattctcaatttctaaagcctaaaaatctatttggcaaagctagactttcctttaggggtgataaatgtaagaaaaaaaagagacttttttttaatagttggaggaaaaaagctgtgaataatcaaaaagtaattttttaactttctgtattatgaatttattgtgtgaccttaagtagtcacatagcctctcattttgtcatgttcttactcaaattctacatgtaaatgtaaaatgaaaaaaatcttgaaaaaatttaaagcttctgtacaaatccaagttggttttattttatacagaatgatacaggttaaaaaaacaaatattttaataactttttatataaaatagtttcagtctttactgaacagaaatattgtcatggtgaatttttcatataatgtttggtttggacattttcttctccaaaatatta

SEQ ID NO: 859972 - DNA, 586 bp, Homo sapiens
tggccattttgaagacattgatttttcctatccatgagtatggaatgtttttacattwttttgtgtcctttctgatttctttgagtagtagtttgtagttctccttaaagaggtccttcactttccttgttagctatattcctaggtattttatttttttgcagcaatttggaatgggagttaattcatgatttggctctctgcttgctcttgttatataagaatgctagaaatttttgcacatttattttgtatcctgaaactttgatgaagtttcttattatcagcttcagaaacttttgggctgagacaatggggttttctagatataggatcatgtcaactacaaataaagataatttgacttcttctcttcctattttaatatgctctatttcttcctcttgcctgattgccctgaccagcacttccaatactatgctgaacaggagtggtgagagaagacatccttgtcttgtgccggttctcaagtggaatgcttgaagcttttgcctattcagtatgttattggccatggatttgtaatatatggctcttattattttgaagtatgttcctttaatac

SEQ ID NO: 859973 - DNA, 659 bp, Homo sapiens
gcatcctcatcctttgcaaaataaactttctaaattaactgagacctgtctcggattttctgggttcacagtaggatatgttcaccagatatattattttagggtaaaagttttcttccttcagcactttaaatatgttctctctctctctcctagcctgtaacacttttattaggaagtctgctgccagatgtattggaactccattgtatgttatttgcttattttcttttgctgattttagcatcccttctttatccttgaccttttggagtttgattattaaattccttgatgtagttttctttgggttaaatctgcttggtgttccataatcatcttgtacttgaatattgatatctttctctatgtttgggatgtcctcctattttatttctttgaataatttttctaccccatctctttctctacctcccgtttaaggtgaataactcttagatttgccctgttgaggctattttctaaatcttttcattgtgcttcactttttattcttttttgttttgtctcctctgagwgtgtattttcaaatagcctgtcttcaagctcttgatttttttcttctgcttgacccattctgccaataaaggatcctgatgcattcttcagtatgtcaatttgccaattcagtaagattc

SEQ ID NO: 859974 - DNA, 495 bp, Homo sapiens
acagtatttattttggagttgagtttatcagaagcttatgttttatcatgatgtatgaagcaagttaggaaaatgcatatatttattaagaaaagtctcaaagggtttgcaactattcaagaaaaartatgaaaataaccattgagaatcaggaagctctggttaagtggttgtgattttttttccagagcagattttcagtaaaatcatacacctttaacattcttaaaggactgtgtgtgtgtgtgtgtgtgtgtgtgtgtgtgtgtgtgtgtgcctgcaaagggtgctgggggaaatatatagatgggcattcgattgtctttctttccctgttaggattcaggaagaagtgcacctgtgttcctgaaaggcacggtggaggagaatttagataagttcaggcaagcacagccatgaagagctctgtaccaaactgagagtatatatcgtgactttatttcctgtttccatctcagtcccctctctagccca

SEQ ID NO: 859975 - DNA, 569 bp, Homo sapiens
tctgtagggtcatatgtcccaagtggcagagcagcttgcacagcaacctggaccttttgcagagccttctcctgttctggactccactcaaaactggmaaccttttgggtcactcgataaatgggctggagtaacacacccaaatgaggaatatgttgcctccaaaatgcaaataggcccactaggagttaggtctctcttgttataggaggggccaaatgcagcaacttatccttcaccttagaaggaatatctatctatcttgacaagccccacaccaatggacccctagaaattttgctgaggtagaagttccctgaatttttctcagatttatttcccatcccctggcacactagtgtctcaccaataagtccagtgtgtttgctacttcttgatcactggatccaatctacataatgtcatcaatgtaatggaccagtgtgatagcttgtggaagggaaaagcaatcactatctctgtgaacaagattatggcacaaagccagagagttgatatacccttgagataggacagtgaaggtatattattggccttgccagcggaag

SEQ ID NO: 859976 - DNA, 487 bp, Homo sapiens
agagaaggatccagtcctggcggcattcatcacctgctaactgaaaatctcttgggtccctgaataaccagcaatgatatccaggtactayatcaagggccttggatgagactctaagacttactggcttcaaatgagactcaccacattccaagctattgtggttatagcgcaagactccttctacttgagagcagcaaagaaaatatgaagaagattttgtcatgcgccttaggtaccagctgggccataggagtatagagcaccaagtagggtcttggggcctctgattccagaatgtaggaattggatggcatttaaggacctgtcctgggcaagagagaagcccactgccctgaaggatgagtcccaggtcaggcagcaatgaccacaagctaactgaagggcacttgggacttaaaagaatattggcaacagtctggcagtgctcattgtgtgcctgtggtggtaatggtggacacaaggt

SEQ ID NO: 859977 - DNA, 610 bp, Homo sapiens
aggctgcttcctgggatggtctcatctccagccaggtcaatggcyaccacggtctgctgctggtacttcttacacagctccaccaccttgggggaccagtctgtgggcgagatgcccacccaggctctgtcaccagcaccatggagagacctcccagcctacctgcctgctgtcccacccaaaccccccatgggaggccagcacaaaacagggctcagtgtcttcaaatcctaactgctatgtcctaaccacatggcctgcggaaaactgctctgcttatggcctcagtttccgcccttttcagaaagaaccctgccagctattgcacagggtcacggccaggctttgccgaggccatgtgtgtaaagcaccaaggacggggcctgagctcagtaaatgacacggacccttctctcacctggtgtttccaacaacactcatggtaggcttattcccatgcgcagatgaggaaacggaggaccgtttaacacgtcatctaaaatagaactcacactagtattgggaagtatctcgctaatgtattaggtactcttaaccaataaagttattctgaagtgtttaagaaagaatgaatgaacacaggctttgg

SEQ ID NO: 859978 - DNA, 536 bp, Homo sapiens
gtcctagggccctgcacttacattcttagtctcccaaactccctgctacaggaagaggtgactgggaggggcttgggggcttcttggatgctggaaatgcttcgtaggtcgctctgattacatggttgtttacccgcaaaaaacttccccatgtgaatgtgattgcattcacaatccacgtacttgaccatgtgaatgtcataaagcttaaaaaataagccttgggctgggcagggtggctcacatctattctccccgccctttgggaggccgaggcgggcggatcacctgaggtcgggagttcaagaccagccagccaacatggcgaaaccccgtctctactaaaaatacaaaaattggccaggtgtggtggtgtgcgcctgtaatcccagctactcgggaggctgaggcaggcaaatcacttgagccaggaagcagagtttgyagtgagctgagatctcaccactgcactctagcctgggtgacagagtgagactctgtccccccaacaaaaaaaaaaagaaaaagaaaaattc

SEQ ID NO: 859979 - DNA, 623 bp, Homo sapiens
agtcaagttctgaccagtatccagcagctgaaaggctttttgcaactcatcccctctgtcggtaattttttgaaataaaatccgtttaacatctaaggaggacagtgttggatttgcaacagctgtggctataaaagagatacagctatttattaaacatgtttaaagccaagatactaaacagaaactcttgcactgttgaacggaaccaagaaaacttattagatggtatttctcccaccatatctaggtttacgtgtatcaccgttagatgacttgtaatgaaaaatctactcggtcatctttcaactctgaaatttggtcaatatagaataatagtaatcacaatagtaagaaaaaaaaagagaatcttccctgtaaaggacataggtcagtacaagtgaaaaacatggatattgaaagaaaatttagtcaatatcattcaaataaatctttaaaatatcatattcacctttcatccccttgccaatttttgagggaaaaacatgtaattcttaaacccagaccatttccctytcaaagacagggaagagatggacgctaaaatgcagatataaaaatgttccgagggctgggcacggtggctcacgcctgtaatccca

SEQ ID NO: 859980 - DNA, 623 bp, Homo sapiens
agtcaagttctgaccagtatccagcagctgaaaggctttttgcaactcatcccctctgtcggtaattttttgaaataaaatccgtttaacatctaaggaggacagtgttggatttgcaacagctgtggctataaaagagatacagctatttattaaacatgtttaaagccaagatactaaacagaaactcttgcactgttgaacggaaccaagaaaacttattagatggtatttctcccaccatatctaggtttacgtgtatcaccgttagatgacttgtaatgaaaaatctactcggtcatctttcaactctgaaatttggtcaatatagaataatagtaatcacaatagtaagaaaaaaaaagagaatcttccctgtaaaggacataggtcagtacaagtgaaaaacatggatattgaaagaaaatttagtcaatatcattcaaataaatctttaaaatatcatattcacctttcatccccttgccaatttttgagggaaaaacatgtaattcttaaacccagaccatttccctttcaaagacagggaagagatggacgctaaaatgcrgatataaaaatgttccgagggctgggcacggtggctcacgcctgtaatccca

SEQ ID NO: 859981 - DNA, 619 bp, Homo sapiens
gggaggaaggaatgtcgcacaggcaggccttcctgggctccccactccgactgacagtgttgggctcacagcccttttgtccagtcccatttctacatgcttccaccatgcctagccaatgagggytccataaaaggcccaagaggacaggctttgaggagcttccaaagagctgaacacatgggggttcctggagggtggcttgcccagagagggcatggaagctccgtaccctcctccatcctccacagacgtctcttcctctggtattcatcagaagcctttgtaacatcctttataataaaccaggaaatgtcagtgttgccctgagttctgtgagccgctctggcaaattagtcaaacgtgggcagggagggtgtgcgaaccccaatttatagccagtgggtgagacacacaggcaaaacaacctggggcttgtggttggcatcagaactgggggcagtcttgtgggactgagacctcgccccgtgggatctcgtgctgtctccaggtgggcagtgctggaattgaactggactgggggacatccagctggtgctgctgcaggactgagtgcctgcttgctggcggggagaaatccccagcctgtccgccacag

SEQ ID NO: 859982 - DNA, 609 bp, Homo sapiens
ctttggtaaaacgtcctggccatctccattctccattctctcctttgatcctcacaagatctccgtggggtacgggctatgcctgtctttacctcacaggtgaggactctgaactgacacacagagaggggaagtggcttgtctggggtcaggcagtaagcaactgtctgggccaggatttgaaccaggctcaacttccactttctggggaaaggtcattccaggctagcagagcactcactaaccgatttactgtggggtcctgctcacacctcctgggtcctacaggggccctgagagcctgtgtagagggctgagaggagtggaagggagggcaacttgggccaggcaggtggacagctggggaggagacggaaaaggccacttcaaaatgctagagtcacagaggccagaggtttttgtcctagagagtgtcttaaagttcagccagggccgggcgcggtggctcacgcctgtaatcccagcactttgkgaggccgaggcgggcagatcacttgaggtcaggtgtttgaggccagcctggctaacatggtgaaacctcgactctactaaaaatacaaaaattagccaggcactgtggtgcgcatc

SEQ ID NO: 859983 - DNA, 599 bp, Homo sapiens
ccgtttgactgccccgtgtgcaacaaaaagttcaagatgaagcaccatctgactgagcacatgaagacgcacacaggtctcaagccctacgagtgyggagtctgcgccaagaagttcatgtggcgagacagcttcatgcgccaccgaggacactgtgagcgccggcaccgcctgggcggggtcggggccgtacctgggcctgggactcccacggggccatccttgccgtccaagagagagtctcccggagtgggcgggggcagcggcgacgaagcgagtgcggccacgcccccgtccagcagacgtgtctggtccccacccagagtccacaaggtggagatgggcttcggtggaggtggaggagcaaactgaaggggcaggctactggggtggggtagctttcgggaaagggaataaggagcacgatgcaagggcgctgtggcccccgggtgatctcccaccacacttactgtcttcctttatctctgtggacttgtatatattctggaaggggaaccacagtttcaccatcgcccgcccattctactactcaacccctcccccccaaggtatttccagaactaaacccttcctttccc

SEQ ID NO: 859984 - DNA, 522 bp, Homo sapiens
agtgtatgacatcagcgtgtttagtgcatgacatcagcgtgcttggcacagagtcactggaaggtggcatgagtctgcgtgacgtcagcatgtttgcactcagaaaggttctctcggtgtttgtgctgctctgtgtgatctgctgattggttaatgtgaacaggatgtgcctgaatgctgcaggggcagcaaggtgagccctgggctctgtcctctctgctaatgggagacctgaggaggaagcacccactccagccagaggcaacactcactggcccggggacgcgggcagggccagaaatgcaggtgcacccactgctctcgtgggccccaggttgaactgtctggtgggaaggccggagtttggggtggtgatgcagggggttgtggcccagctgttggggcacggccatgggccaagcctcagtggtgtgaggatcaggagggcgtgcgacaagcctgggactggcctccrgatggcgcctgggtggtcccacgcctcggcgacaacaaggacctgcc

SEQ ID NO: 859985 - DNA, 522 bp, Homo sapiens
agtgtatgacatcagcgtgtttagtgcatgacatcagcgtgcttggcacagagtcactggaaggtggcatgagtctgcgtgacgtcagcatgtttgcactcagaaaggttctctcggtgtttgtgctgctctgtgtgatctgctgattggttaatgtgaacaggatgtgcctgaatgctgcaggggcagcaaggtgagccctgggctctgtcctctctgctaatgggagacctgaggaggaagcacccactccagccagaggcaacactcactggcccggggacgcgggcagggccagaaatgcaggtgcacccactgctctcgtgggccccaggttgaactgtctggtgggaaggccggagtttggggtggtgatgcagggggttgtggcccagctgttggggcacggccatgggccaagcctcagtggtgtgaggatcaggagggcgtgcgacaagcctgggactggcctccagatggcgcctgggtggtcccaygcctcggcgacaacaaggacctgcc

SEQ ID NO: 859986 - DNA, 597 bp, Homo sapiens
aagtcaaaagaactatatgtgagtatcatrgctaaatattaaatacacgaagccatgtccaaggactgaaatgaaggccaccttcaacctcctttatcagcacagattctgagaggagcggtggggattccgaggctccgagggaaggacacgaggccccagccaggctgttgtgttggggtgaagagcgggcggcctcacacaggccctggggccgcagcgtccacagccccgctgcgaaggcggggaaaggaccctcagcagggaacgcagcccagcagcggggccctcgggatgaagagctcggcaaggagcctgggagcaaggaacacatgactcacaaacctctggaaaatgcccgggaatggaaggaaccgagttccagtagacaggaggcaggaggagggaagaaccggccggaaggtctttatctttctaggtttccattcgacagacgccccaccagtgacgcctgaccacatcaacgctgtgcaacaaagatccccaactccatgctgagagggaccccaccgccacgacgtgtcaccggggcctgtgcatcgcagggcccagctcctcatgggagctccttgagga

SEQ ID NO: 859987 - DNA, 609 bp, Homo sapiens
aagtaaaaacagagtccttcttccctgcctagtagttaaatatagaagaaaaaaactctttgaaaaactaggyggggcatggtggctcacacctgtaatcacagcaatttgggaggccgaggcgggcagatcaccagaggtggggagtttgagaccagcctggccaacatggtgaaatcacatttccactaagaagaaaaaaaaaaattagccaggcatggtggtggacatctgtaatcgcagctatttgggaagttgaggcaagagaattgcttgaacctgggaggtggaggttgcagtgagccaagattgcgccactgcactgcagcctgggcaacagagagagactccatctcaaaaagaaaaaaccaaaccaaaccaaacaaaacaaaacacacaaaaaaactaatcataattccaattggattttatatctgttatactcgatcttgatttaaaaaaagctttaaataacaaccaaacaaactgataaagaggaattttagttactaaaacgtagcagagaacatcttggactaaggaaagattatgtgtaatcccccatatcttgcagattagatatgtcatctacatggagaatttgtattt

SEQ ID NO: 859988 - DNA, 648 bp, Homo sapiens
acatcctcataccctaggacaatatctgctgcggtgtctaagggctgactcatggcccaaggccatggccttcttgaayccttggtaaagaaacagagaaatatatttctctccatctccctctccctctactctcctttctttctctctttcgctccctttctttctctctcttacacacctgttcacataaaaaacaaaaatgtaagcaccagcttgtgattaaaacaggcttcacaagcaccctgtgaggagtactgacacatttgcctctgtcctttccttcaacacctctgtttcttttctccttcccacttgtaacttaactgagagagacctgataggacacttggttcaaatctttcaatttacccaggagaaagctgtgacccagaaaggttaagagatttgtccaataccacatctattgaacttcagtcggctagaaagtttttggataaaaaggattatgtttcctcaggggaagagtaaactcttagaatccatataaaggccaggcatggtggctcatacttgtaatcccagcactttaggaggccaaggcaggcggatcatgaggtcaggagttcgagaccagcctgaccaacatggtgaaaccccctctctactaaaaatacaaaaattagc

SEQ ID NO: 859989 - DNA, 543 bp, Homo sapiens
aaaaataaaaaaaactagttgggtgtggtggcgcrcgcctgtagtcccagctactcaggaggctgaggcagcagaatcgcctaaacccgggaggtggaggttgccatgagccgagattgcaccactgcactccagcctggcgacagagcaagactctgtctccaaaaaagacagaaaaaaaaaaaaaaagaaacaccttggacaggaaacatgtctatgggaggaagtaaggccagatgcttgcaaaataggggggaaagtgagaccgggagggaacacttccaaaagttacccccatggggtctgaatttggggcctgggaaggaatttgggtgcatttagatccaccactgatagtctctattttggcaccctgttttgttcccgtatagcacttaccactgttctaactaaacaattaatttcattatgggttgtgcaaagtctatgattctcatgcgggaccccaggtgtgttttttgttcatgtagcacaaagctcattgcctaagtagtaggtaggattggtagataaaatacaaga

SEQ ID NO: 859990 - DNA, 543 bp, Homo sapiens
aaaaataaaaaaaactagttgggtgtggtggcgcgcgcctgtagtcccagctactcaggaggctgaggcagcagaatcgcctaaacccgggaggtggaggttgccrtgagccgagattgcaccactgcactccagcctggcgacagagcaagactctgtctccaaaaaagacagaaaaaaaaaaaaaaagaaacaccttggacaggaaacatgtctatgggaggaagtaaggccagatgcttgcaaaataggggggaaagtgagaccgggagggaacacttccaaaagttacccccatggggtctgaatttggggcctgggaaggaatttgggtgcatttagatccaccactgatagtctctattttggcaccctgttttgttcccgtatagcacttaccactgttctaactaaacaattaatttcattatgggttgtgcaaagtctatgattctcatgcgggaccccaggtgtgttttttgttcatgtagcacaaagctcattgcctaagtagtaggtaggattggtagataaaatacaaga

SEQ ID NO: 859991 - DNA, 621 bp, Homo sapiens
ttaggatatggcataagctctcaaactattaaaaaaggctaatagcttagtgttgaagaacaggccttgagtcagatggacctggattcaaatccctgttccctcctcttactgtttgagggactttggacatgttacctgacttctctgaacttgagcttcctgatctgtaaaatagagacagtaacacctcgaagggttgttgtaaggagtctggactatggcaagtgtcctgctatatagcaagtgcgcagtaaacactggccattcttcttgttggtgtggttactgggattggttgccattgtgctgttgggactggtgatagaactcttggattgagaatgtcgagatggtgcactgaagattctgtgtgctctttcagaccaggaggaggatgaggaggagggaggtggagacgtggacatcagcgcaggacgttttgtccgctatcagttcacaccggcatttctccgcctccggacagtcggggctacgtgagtaccattactacctgaggggagaacattctgtttgttcacagagaagagtgttttcggttgggttttgggttggctktagaggagggaggaggcaaagtcgggcttacagagatttatt

SEQ ID NO: 859992 - DNA, 592 bp, Homo sapiens
tttccaaaatgactcagtgaaatatagaaataagaccttagagctgatgattgactggtagaagggggttttcattctcttatctggtgtagcatgcctttggatgtccctgtgttttagggcagtataaacagtattaatacatgatgacttggctgttgaacaaaaagggcctgagatatgggcaattgtgtggtgagaggtattcttcaaagacaagctcttcaagatgatttcctgcagagaatcctatcaagcctgaatgaacaatgcaaggggtgactgtcttacaagcttcagcgcaaaacattttggtaccacagtctgtgggttgttcacctgcaggacagtagcaaggtaagtcataataaagcactctagtgaaaaaagaagtgtccacacaagctgaagagcagatatggggtgtgtcaacaacactgtcatatgatatgtgttccaaatttctttggtggaaacacagatgcaaagatattaaccgaaagagagagaaaaagagagagagcgcgagagagcgcraaagccagctgaaacatttttatagatcattatgatattaattccccagactcaa

SEQ ID NO: 859993 - DNA, 642 bp, Homo sapiens
tcaggacatcgtacaactgatgcaggatttttcttggtcattttgtgccagctggggacctccactgctggcaacgtcctcacccsggcctcactcagccctgggcctcccacatgccacctgagccatgcctggcttgtgtgccaggcaggaccccatgctatgggatccatgctcagcctgcagctgggccaggtgtgccccagcctacctgtgttacagctagtactcctgtttggtggttcccgagtttttgtcccatgtccaagaagaatgagggtacactgataattgaagggtgaggaggatggagaataattttattgaacaatggaatagctctcggtggagaggggatgcaaggatggtcccctacctgaagtcaggtggtctctccaccagtgtggctgggtctggggattttgtgggctcagaatcggggagtgcatgctgactggtttgtgagtattccaaaaaggctaaaacaaaggcaccactcaaaagtgagcatgacagtgtaaaaaaccaattagggaagggtagatttacataaagtaggtgaaggttgaggatcaatcagaggaaagtgtgccaaacaggaagagagatttttaattcagtccttgatttatgcaggactta

SEQ ID NO: 859994 - DNA, 635 bp, Homo sapiens
cttttctgtaagagggaagggaaatggagtgaaataccatatgtccaggctttcttttcattgaaggagaatccacaactatgtaaagcttgcaatttacatcccacaggaggacctstcagcctacctccatatcccagcctccctatagctccccttcctattaatgataagcctcctctaatctcccctgcccagaaagaaacaagcaaagaaatatccaaaggaccacaaaaacccccaggctatcagtcatgtccccttgaagctgtagagggaggggaattcggcccaacctgggtacatgtccccttctccctctctgatttaaagcagatcaaggcagacctggggaagctttcagatgatcctgataggtatatagatgtcctacagggtctagggcaaaccttcgacctcacttggagagatgtcatgttattagatcaaaccctggcctttaatgaaaagaatgcggctttagctgcagcctgagagtttggagatacctggtatcttagtcaagtaaatgatagaatgacagctgaagaaagggataaattccctactggtcagcaagccgtccacagtatggatccccactgggacctcaactcagatcatggggactggag

SEQ ID NO: 859995 - DNA, 258 bp, Homo sapiens
agggccggcttcgtgggtaaaccagcagtgcagtctcacaggagggacccttacgttttcattttgcactgggccccatttgtagtcggttctgctctgaaatatttaggggagggcatcctcaggattgagggagggcttcaaggagggagggtgtttccttacgaattaagggattatccccaagartggggtctctgccaagcaatgcggacatcctttaaggggttggggatggggatccgggtggatttggga

SEQ ID NO: 859996 - DNA, 623 bp, Homo sapiens
tctctgccaagcaatgcggacatcctttaaggggttggggatggggatccgggtggatttgggagtgttgagccccggggtttttgtccagggtgaagcttcttgctcaggtgaggcagkctttcctgtgtgggagagattcttggttgggatttatctctgaggaggaggtattctaatggacgaaaaagcggccgttagagagatgacgtcccctctggcttagggaggagacacgaagtggttaaaaaagcaagatcttgggggagttgagggacaagtcagatctggatttaaatcccagcactgtcatttactagctatttgaatgtcttctttaagtaaaggaggactaaatgtaaaaggaaaccagttcatacgcttgttagcagtattaaacatttgaagttctctcagcacaatgtgaggcacatagtaaatgatcaatgaatcttatcaataattgtcagtttatacaactatcccaaaggccacagcaaggttttgaacaaccagctctgaaatgcctataatgtatttttcgaacctccataaataagttatcaggttaatcatgtatctggaagcttcctatttacatttctacattttcctctgaccat

SEQ ID NO: 859997 - DNA, 605 bp, Homo sapiens
taccagaatagccattaaaaaatgcaaccattctcatctagaaagccattttgatccagatgttcttgcattcttctttacaatgatatccataagtccttgcttcatcaattaaataagtgcagggttattttagcttagtagtatgccccatcttctatcttctcccacaatcataggagatgattttcactttaggacacagtttaaaatctctctgttcctaaaacacatctcaaatcttaccttctctataaaccttttctgatagcaccaattcatattgatttctcaggctctaaatttatatacatatattagtatattatcaaatactttttaaaaattatggttcaatattttctctgtaaatattttgtcaccttaatgtattcaggtatttctatagaaaagagataggattccttgacatattacattacagtaaaagttgaaagagttatagtaatgtcatggtatagaagcagtcccasaatattagaattttagtgatttatttaaagttttaaaggactgagtaatttctgaattctttttaacaatacatagcaagtaattatgttagcattgtcttttgtctctgg

SEQ ID NO: 859998 - DNA, 625 bp, Homo sapiens
gcaggtaaaagtaccaatgtatcattatagctaagtatttgagaaaagaataattgttatacatttgtgcccttaaaatttatttatataaaacagctgttcttgattaggctgttctcataaccaagaagtgatgtttcatggggcagagttcagctgaatgtatatctgtggcagagatctgggggatgtgttcccttcacccagttcttcttaagctctgtgccccatctccttcccatttagtacaaaaatttgaaaactgtactgttagtctttctcctcatctatagaatacataataaacttgcttacatgctccaggctgtaggctaggaagctatgtcctcctagtcagttctccagttcctccctacacttgcatttcaagttcttatcaacacagtagttcctgcttacaaaaggctcataaaagcaggctgctttgcttccacctctaagagactggggacttttttggtgggtgtggacgtaactagcgaaaggatgaagtagaggggaggatagagctgtatgcaattagaaatgcagaagccatttttcctaggggaraaatagcaaaaatgatatttaaattccatggagatattcattctataattct

SEQ ID NO: 859999 - DNA, 582 bp, Homo sapiens
ataccttgaccactgataggaatagtcacagctctaaagcactagatacccaccatgtgttataaactggactaggtactggcrcctttccatacatattcttacccaccctccctaaatatgattttaaaattctcctttgcaggtgatgcaagtgaaagtgaggggtgaggtgattcacctatgtgggtacagttgggaagtggcagagccagcattcaaactcttgcacctccacagctgaactggtatttgccctggtgacatcttgtctctggggtaatgctgagagtgattggtcaaggatatacaataggtaaaatgagagtggttctaccttatccacaatttcgatttctgtggtttcagttacccatggtcaaccatggtctgaaaatagtaaatggaagatttcagaaataaacaattcataagttttaaatggcatattgttctgagtagcatgatcaaatctcacgctgtccagcttcatcccgcctcggatgtgaatcttccctttgtctaggtatccaatctgtctgcacaacttgccccttatccactagtggctgtcttggttac

SEQ ID NO: 860000 - DNA, 590 bp, Homo sapiens
tgtcttagccatttctaagttcccaaggtacatattcaccccatatttatttagtcaaatatatttatggatcttatggatttgattaaaatcaaataaatatggcagatcgaacactgaatcagcagtcaggacaacttggatctactctgattctgctgtcgtttttctgcatgaccctgagaaaccctctgctcctttctgaggtatcagtttttgccatctgaaaggcaacaggtggtattaaataaatgttaagggtagttccagtcttttatttaatacatattcaatgggtacttattaagcaactattgtgtgctaagtagtagaagttctgatgaaggacaaaacaagaccctggcctcaaaatgctcttattccagtgaggcagggaggacaatgatcagataattaccatggcacatgatttgttaagttctaagactataactggtatcagcacaggtggcgactgcagctccaaagagaggtaggtaacccagcctggagtggtgaagaacagyggtgcttcctgggggaggagctctctaagataatgcctaagagaagagtaagagttgcttact

SEQ ID NO: 860001 - DNA, 563 bp, Homo sapiens
ctcctgggctcaagaggttctcccactcagcctcctgagttgctagaactgtaggcatgcaccaccacacccagcytattttttgatttttttggagaggcaggatcttgctttgttgcctaggctgatctcaaattcctgagctcaagcaattctcctgcctcggcctcccaaagtgctgggattataggtgtgaaccactgcgcctggctgaaaatacttattatgttacatcttcttatgttacattgagtgggtaagtgagtgagaatccttaaatataacagagaaacagaaaactaggggcctgtagattgtgttgctttacaagattcaggtgaattgctttttgactcttccaataagctctcaagtatatttaacattttttttttttttttttttttaacagaagtggtgtctcactatgttaggccaggctggtctccaactcctggcctcaagtgatcctccccctccagcctcccaaagtgctgggattacaggcatgatatactgcgcctggcctgcaaccgtccttttttccccctgattattttcga

SEQ ID NO: 860002 - DNA, 561 bp, Homo sapiens
tttttgtggtttttcaatagcaagttatgtttgtaattgaatggttggcctctagaaagtcgaattgattccctagaaatattccaaagtttgcagcatttaatctcatacttatagtgttaccaggactgggtmtaggcaaaatcatgacaagtctttcccttcattttcccttagttttctatgtctcttctggtatttcttcctcatcaccccttgggatttctgtgctctcagtctactgcctagaactccatattaccatggcccaatacctagtgtaccttctgatacaaagtatatgctcaataaatatttctgaaatgagtaaatgaacaaatgaaaaacccctgaagactgacagaattcctcagggctctgctaaatgacaggagaaatcagatgaattcctgtgcttgaaacaatcaaagtcaatatgcgcatgtcacccacctttactcacaagcagcaggttcctttgctgatgctctatttatgaaaaggaaaccaagctggaagttgaatgacaattccactgggccttagcttaggatgccacaa

SEQ ID NO: 860003 - DNA, 605 bp, Homo sapiens
agtcctccagacacccttggatccttacagtyttaaccactgccactttcataaactgtcagagtagagctacgttgcattccatgcaaataaaaaaaatataacccatttttctatatgctaacagttgatggcaagagttggtcattttgaaagcaagattggggatgttggtttagacctgtgggtggggggtccgggatatcctgtgcagggtgttggcttggccagctgggtgcttgggaagtacatcagtggacagggacaggaatgttcagacgggagccctgccctgttggacctgggttggactatttatcatgggggagggcccgtcggcttcatgcacaggtgccctggagaaagccggtggggaagatgccactgggagagggcagggcctggttatttatttatttaaattaaggccaattattttttgtcaagtgcagcgagtggtggattctgggaaaacttgctttcaccgtaaacatattggttagaagtcattaatatgacattcacacatccctaataaagtacataacacagagatctggcaccactgaaatacccagaggacattaagtatgagtcttaaaacc

SEQ ID NO: 860004 - DNA, 324 bp, Homo sapiens
ggccccgggggcgaagagtgggggagaagccgggaaggatccggaggaggcggcgggggcggcgccaggggaggaataatcccggcgcagtgccgatttaggttgaaaacgctcccagtcatgggcctgcacgtggagcgccggggctgggggaggcattcgcggggctcctttcccgccccgctcgggagctcacgtttgccggcgcccacagtcccgtccccacctccaggcctcagggtcgagatggagaaaccaagccgcactttgagagcccacaggagggagggkacaggctgaggagcggccgtctgggtatgggtc

SEQ ID NO: 860005 - DNA, 527 bp, Homo sapiens
ctattctgttccattggtctttgtgtctctttttatgccagtactatgctgatttggttactatagctttgtactacattttgtttttttgttttattttagagacaggrtttttctctggtgtccaggctggagtgcagtggtatgatcataggtcactgcagcctcagtctccttgggctcatgggatcctcctgcttcagcctcctgaatagctggggctataggtgtgtaccaccgtggccagttcgtagtgtattttgaagtcaggaaatgtgatgcctccagcttcgttctttttactcaggcttactttggctatttgaggtcttttgtagttccgtataaattttaggattttttttctatatctatgaagaatgcctttgctattttgacagagattgcaccaaatctataaattgctttgggtaatattgttattttaacaatattaatttttccaatacatagcatgggatatctctccatttttttgcatcctcttcaatttatttcatcagttt

SEQ ID NO: 860006 - DNA, 623 bp, Homo sapiens
tgtcacttcagaagtggtcagtggatgttggcattattctcttgaggtggtcaccctgggttttaagtgctaggcattgagccagtggcaccccttagagtggggattggtattctatgaccacagatgtsttaggcaagactttcctggaattagtgataaaaccaaactcaaatggcttaagggagaggggatttattggctcacataaccaaaaactccagggataactgcccagagggaaatgagggaaaaaaaggaaatactcccttcctgggatctcccacttcccagtttgccaaggaaaactgagccccaggaggacactgaggcaaagtctcaatactttctccccctcctctctgaaaagagaataaaatgaaggcttggcacacacaccatctccgagacagtgctagctcctgcctcctaggaactgattccaaggtgaactgctggtggtggaagaagcccttcaatatagcatgtattgattgcacttgatgtacaaaagaggacatagatgctgagggacataaagatgaacagagaccttgtctccagagttcacaatccaacggaggagggagacttgacatcagtattctagtaggaaggcaacc

SEQ ID NO: 860007 - DNA, 616 bp, Homo sapiens
catcaccttcagagagagacatgccgcgggcttttgacctgccctggggatcaatctattttgtatgagatctgtatagaaacttactcatcaagcattcctcagcctatctcctggccactcccttctctaggatgcctcctttgtccccaacacagaagcacaggcacctcagcactcctttcttaccccttctatcttagtaagcccccatacctgcaaatttcaggatgtctcctccaaaaatcaacacttctgagaaaaaaaaaaaaaattaaatcaaaccctgattccttaaaggtagtaaaaaaacatcattctttcttagtggaatagaaactaggtcaaaagaacagtgattcagagaataggcttatactaaagatctcatcccagacaagccacttaacccatttgagtctgtttcctcaagtggagaatgagtacgtggaaccagtttacatctatgctccatttctgtgaatggggaaagacaggagaaaggcagctagggtttctgatgaggtmtgaagacagctgccctcctcccacgataatggaatgcttttaattaatttattgatcaatatatgttataggctggggcttgtgtaag

SEQ ID NO: 860008 - DNA, 645 bp, Homo sapiens
cagcctggccacgtgcaaagaaagaaaaagcttttttggaggaaggatccaagcaggcagcagagatccaaccacttgttacagagttctgcrtgactaaaaatgagccaggttctgatagccaagacaatgggaaaaagactttgaaggcatttcagaaatatttgaggcagcccttcccatcaccggcccgcaggcctaagagaaaataacgttccctgagccatcccagggccctgctgccctgcacagcctcgggacactgctccctgcatccaggctgctccagctccagccttggctcaaagggccccagatacagtgtgggccaccactctggaaggtgcaagccataagccttggtggcttccatgtggtgttaagtctgtgagcacatagagtgcaagagtgaaggagacttggcaacctctgccaagatttcagaagatgtatgagaaagcctgggtgcctaagtagaagcctgctgcaggggcagagccctcagacaacctctactacagtgggcagtgcagagcagaaatgtggggtgggaggacccatacagagtccccaatggggtactgcctagtggagctgtgggaaggtggtcaccatcctccagatcctggcatggtagatccatca

SEQ ID NO: 860009 - DNA, 643 bp, Homo sapiens
ccactctcttatttcaatctttgttaaacttatctgataaattctgaattccttctttgtgttatcttggacttcaytgaccttcctcaaaacaactattttgaattctctgtctgaaaggtcacttatctctgtcactctgtaatatgttactggtgcattatttagctcttttagtgaggtcatttttcctggatggtcttgatgtttattgatgctcatcagtgtctgggcattgaagagttaggtatttatgcaggctggggttgtttttacccatccttcttgagaaggactcaaagggaattgagtgttgtcatcaaatatttggtcactgcagctgtatatgcattaggggacaccctaagcctagtaatgctgtgactcttgtaaagctgtagaggtaccattttggtggtcttgggtaagatctgagagaattccctggtttaccaggcaaagtctcttgttcttttcccttactttctcccaaacaaatggagtctctctctctgtgctgagctgcctggagttggggaaggggtgatacaagcactcttgtggccacgaccactgagactgtgctgagtcacacatgaagccaacacagtactgagtctcacctaaggcctgtggcaactat

SEQ ID NO: 860010 - DNA, 642 bp, Homo sapiens
aggagaacttccagggcgaggatccaactaagtggaattgtcaaattgtcagttaactgaagtatttccagtttgagaggagagagcaagagataataggaacctggagaaaaagcagccacagggggtgttcggcttcaatccaggtccgttcaccccttacgttcaaaacagcaaatttcaggaatgccacagtccgttaagcatcaaagagagatggggccacccacgttcactgtattacgaccctcattagacagaaaaggacgtctgtgattgaggaaagattttccaacgacatccctcagttgcccatcaaagttgcctacttctcatttcctcaccttctgggtcttcttcgggctctcctggagtcctgtgtgttattactctgctgttttcaactcagccacagtgaatcatttcttcttaccaagttgtgtaatcccgtcatttgtctgtaagagattccatcccagggcatattgtgtccccgtgctatgggcttaagacggcaaatccgagctgtgatataaatgtaaaagtcattcccrttctcctcgagcgcatgttaacgacagcacagaatagtgataattagatgaagcatcatttcacaccatcaccagcgtgctttacatt

SEQ ID NO: 860011 - DNA, 505 bp, Homo sapiens
ccttctactgctcctgcacccacggagataacccagaatctcagtcagtccagcccaggagctgttatccccatctatgttatccccatctatgtatgagaaagtccaaggsgggtatagacattgggtaaacattcctgctccaaaagggagaaattggccaaaagaaagagtagcaggcctcaggcaactcagaaacccagcaggacagtcttaaaccttaaaactccaaaattacctcctttgaccgcatgtcccacatccagggcacactggtacaagggatgggttcccaaggccttgggcagctccacctgtgtgactttgcagggtgcagccccccacccagctactttcacaggatggcattgagtgcctgccgcttttccaggcacagggtgcaagctgtcggtggctctaccattcttgggtctagaggatggtggctcccttctcacagttccactaggcagtgccccattggggactctgtgtgggggctcca

SEQ ID NO: 860012 - DNA, 649 bp, Homo sapiens
ccggatccaggtgggtcatggcaacatcaggtcagatttgctttsaagggaagagaaaatctcatggaactcgaggttggaggctaggttgttttcggtagagttgatgccacagaagaacaaacgtccccttcctggtgcctgctgaagtatcccttaggattttacctcagcgggagggctgcttgaaatccattcatctcctctatattagtctgttctcatgctgttaataaagacatatccgagactgagtgatttataaaggaaagtggtttaattgactcacggttctgcatggctggagaggcctcaggaaacttacaatcctggtggaaggtgaaggggaagtgtattcgtccgttttcatgctgctgactaagacatgcctgagactgagaagaaaaagaggtttaattggacttacagttccatatggctggggaggcctcagaaacatggtacttcttacatggcagcagcaagagaaaatgaggaagaagccaaagtggaaagccctgataagcccatcagatctcataagacttagtcactatcactagaatagcacgggaaagaccagccccataattcaattacctccccctgggtccctcccacgctcccttgctcattctgctttccagat

SEQ ID NO: 860013 - DNA, 493 bp, Homo sapiens
aagctgggggagaggagtgggaggaagttttcaccttttaaacttttataattttgttccatttgactatttcctaattttaaaaaataaaagtgtttttttttaagcaaagaaagcaagcccaagtttaaaacacattgaaaaaaggtcagagtgacattttctacctaattttaggtcatttggaggacttaattccctctgggcactatgcctgcaacaaaggtagccatgaccatctggtttgtgatgtagttgaaccagcaaggctcgctaaactagaccttagcctgcagagcatttatccaacgggccgggcaatattgcttttagctgtaagaagaactcttaattcacctaacacaatgagaaagaaaaccagyctcctctcatcattaaactgattgagatgatgccttgactgcaggggcaggaagaacgcagtccagaggactgcacaggagcaactgggggtttgcaggaggctgcagag

SEQ ID NO: 860014 - DNA, 614 bp, Homo sapiens
tggcatataatacttgctaatctaggaaagaaagcaatcattttaacaattgcacataaaaccagtctttgataaaatgtataaactgcatatctaataattatatgttttcagaaagaacaaaataawggtgatatctgggtgttaggacagaaactgatgtacattataaaagtttaatttaacacaatagacataatagatctaagagctgtgggttgtgtaagtctaagcctagttaggaaacagcagtattggtggggaacatgataaatggcttgcatgagaatgaaatgtacgtgcagctattcctgcaacagtgctgagggtaaagtgatagtggaaacacaatattccttgtaggagtccccatgtaagcgccctccgagagactgctttctcacatgcaacgcggggaatgggaaaagacaacttgaagatgaaaaaacaaacaacttttaaaatttaacctattgctttctacttgggaaacaaaaatattatagaatcttcggacaaacatgtggaactaataataacaacagtagaacaatagcaatagaacctatacagccaagccctaccattaagggctggcaaagaaaacatactct

SEQ ID NO: 860015 - DNA, 580 bp, Homo sapiens
ggcgcggtggctaatgcctatagtcccaacactttggaaggccaaggtgggtggatcacctgaggtcaggagttcaagactagcctggccaacatggtgaaaccctgtctctactaaaagtacaaaaattagctgggtatggtggcaggcacctgtaaccccggctacttgggagactgaggctgaagaatcgattaagcctgggaggcggaggttgcagtgagctgagatcacaactgttgtaccccagcctgggcaacaggagcgaaactctgtctcaaaagaaaataaaataaactggtctgaaaaggaacacatggcttttgagtatttagtaaataaacctggcatggcaagaaacaacttctaataaaactatggaattaataatctttaaaaaacaaaatggaccctggtgtttcaaacatgtcactatcaaatactcaaaacagcagataattacagaactcaactatgtgtccaactcaatgctgtgtatcccccttctgaytatacgcccaactgaaatagttttattactttttaaataaccacaagtgatacaaacttcaagaggtac

SEQ ID NO: 860016 - DNA, 580 bp, Homo sapiens
ggcgcggtggctaatgcctatagtcccaacactttggaaggccaaggtgggtggatcacctgaggtcaggagttcaagactagcctggccaacatggtgaaaccctgtctctactaaaagtacaaaaattagctgggtatggtggcaggcacctgtaaccccggctacttgggagactgaggctgaagaatcgattaagcctgggaggcggaggttgcagtgagctgagatcacaactgttgtaccccagcctgggcaacaggagcgaaactctgtctcaaaagaaaataaaataaactggtctgaaaaggaacacatggcttttgagtatttagtaaataaacctggcatggcaagaaacaacttctaataaaactatggaattaataatctttaaaaaacaaaatggaccctggtgtttcaaacatgtcactatcaaatactcaaaacagcagataattacagaactcaactatgtgtccaactcaatgctgtgtatcccccttctgactatamgcccaactgaaatagttttattactttttaaataaccacaagtgatacaaacttcaagaggtac

SEQ ID NO: 860017 - DNA, 658 bp, Homo sapiens
aagggtctggatccttcatagtcctgcctggattgggatgttgtagtttcccattgaccttaatcacagggcatggtaatactaagagatgccctaatgaatctcctgtattccatgctactcttcctscgttgtgcagtagtagactgatttcatcttgatagtctgggggttaaatcaccccagccaatgctgttactatcttcttagcctattgacttgaaggtaggaggagcctaaagtgtccaggtggcaatcttaacttccagtttaatggaatcgtatttgtgtctcctggtggcagcatacctccctctggaactaagacctctaggccagcagaatgtaatgtcacggtaacaggacgcaaaaattttgctagtggatcactaggggtgatggtgagtggtgccacttccatttctacccgttgattcctggacccaggaatcctggctatgggagaaacaataccatatattggatgctgattcagagcatacatggccttctggagaactttgcctgagccctgcaaagtatcgtcacccagttggcattgtaattgtgatttcaaaaggccagtccactgttttatcaatccagctgcttcaggatgatggggaacatggtaagaccaatcaattccatgagcatg

SEQ ID NO: 860018 - DNA, 590 bp, Homo sapiens
ccagaacacagggctgctgcactctctgccagggttcctggggcaggatgcccccaagggcctccaaggcattttgagtgaactggtcaacggacatgtgtcacccaggaggttaacccatgctcctgcccaggacttaaggtcctactgctccctggtttaagctcttgttgccaaccttctggctcaaaacagaactcaggaagaaaaacattttgaaaaaaggtagatggggcagggtgcggtggctcacgcctgtaatcccagcactttgggaggccgaagtgagcggatcacttgaagtcaggattttgagaccagcctggccaacatggtgaaaacccatttctactaaaaatgcaaaaaattagccgggcatggtgatgcgcgcctgtactccgagctacttgggaggctgaggcgggagaattgctggaacccaggaggcggaggttgcagtgagccgagatcatgccactgcacyccagcctggtgacagagcagactctgtctaaaaaaaaaaaaaaggtggatgggtgcaggagaagagagctcattctgattcccacagcacacccaacaggaagcca

SEQ ID NO: 860019 - DNA, 543 bp, Homo sapiens
ctgtataatgatcaaactggggtaattaccamacccattactttaaacatcatttctttgtggtgataatatcggaaatcttctcttctagctatcctgaaatacgcacgacattgttatttgctatcgtcaccatagtttgtaatagaacaccagaacttattcatgtctaactttttcttcttttaaagagatggggtctccctgtgttgcccaagttggccttgaactcctgggttcaggcgatcctcctgcctcagattcccgagtagctggaactgcagccctgtgccaccacagtacctgacttaaatgaaactttgtaccctttaactaacctctcctggtccccctctccttcctaccatctctagcccctggtaaccactattctactctctacttctataaaatcaatttttttagattctacttatgagtaagatcatgtgatgtttgttctgtgcctggcttacttcacttaacataatatttattgtccaggttcatccatgtcaccacaaatggcaggatttcattctg

SEQ ID NO: 860020 - DNA, 543 bp, Homo sapiens
ctgtataatgatcaaactggggtaattaccacacccattactttaaacatcatttctttgtggtgataatatcggaaatcttctcttctagctatcctgaaatacgcacgacattgttatttgctatcgtcaccatagtttgtaatagaacaccagaacttattcatgtctaactttttcttcttttaaagagatggggtctccctgtgttgcccaagttggccttgaactcctgggttcaggcgatcctcctgcctcagattcccgagtagctggaactgcagccctgtgccaccacagtacctgacttaaatgaaactttgtaccctttaactaacctctcctggtccccctctccttcctaccatctctagcccctggtaaccactattctactctctacttctataaaatcaatttttttagattctacttatgagtaagatcatgygatgtttgttctgtgcctggcttacttcacttaacataatatttattgtccaggttcatccatgtcaccacaaatggcaggatttcattctg

SEQ ID NO: 860021 - DNA, 566 bp, Homo sapiens
taaatatcacatcttatattagaagcatttaaaataccctgggcttttattattttattttctgaaaataaactttgaatactaattgtccgcagtctcttctatagaataaataacctttccttctcccatctgcccactaaaaatcaaataccgatacaaaacacaagctcttgactatagctgtcttttaaaaatagcagatattataatttttttctaatttcgcatttgtatttggccaaagttgaataagttttagtgctgctagatgtaactcaaaccatttgctcgatatctgatgtatttgtaacccatctatttttctcccaacatgactaaattaaaatggctataggtgctattttagagtaatgtatttgtagattttgtgtacaaactctaaacaaaaatagaaaatttcctgtctggagtgattcactgatggcctaccatacagactgctctgaggaattcaggataagactggcctttaaaaaaaatgtggtaaaatakactacataaaatttaccatgttacccgttttttaattttttaaattttct

SEQ ID NO: 860022 - DNA, 571 bp, Homo sapiens
tcttcacatgactttgtgccaaaatgcatgtggctgctgttaatttaagtgtagaatgaayagtacattagtgttctggataatcctacagtccgcatgaactggatggaatgaatagtacatcggtgttctggataatcctacagtccgcatgaactggattgtttgtaaaatttttatacgttagattaaaccataggaaattaccagcaatattttgggcctacaaaaatgtctatttaatatggctagttgatatggtgtttatgaaatagggggatgaagatttcagtttctcacgatgttaatagccattaccaaaaagcacaaaatcacagaaggcagagcctgcgtaatgtgacagtggaatgcctcactattaattagaaatgtagagaaaaaagagagaggagaataattttctccatgatttgaaaacagagacaagcaagcattctttcctttttccacctttcaagggtgttgcccatgcattgtttcttgagaacagattccacctgtggaagcacagaatcagccgaatcgtctttatctggagggaaggagcgct

SEQ ID NO: 860023 - DNA, 604 bp, Homo sapiens
atttcagattcccaggggagaaaaaagtaaggaaaattctaagcacaattttgcccyctcttaagaggggaggactgttattattattattatatttttataaatcatcatctttatttacgaatgatgaaactaaggcacaaggcagcaaagttactcaaaagcgtattgtttggaggtggtgaaggtcagaatcctatgcttatcccaagataactcctggggtccccaggcctccctgggccagctgcatcctcaccagatgacagactccctgcatttcttcagcaagaagctacatccctgctcatggtacttaaggtgtttactcttcaagggattcatttcccatttaattgcataagatgacaaacaaaatgaaaatgtctcctccttaagccatctttgacttctgtctttctcaagccctttgtaaggtacgatctcactctgtctcttgcatttcagataaacatcacccttacctaacaggcatctgatttattacagatacacccgcctctgtatggtggagtcctctatgtgtttattaccagagttgcatttcttgaattacagatattcaaaaaggaggaaatagatt

SEQ ID NO: 860024 - DNA, 564 bp, Homo sapiens
cttaattttcttttgtattatcacctagatagaacagaacagaacagtatgctataatatgatacgatacgtgtcttagttcattcaggcagatatcacagaacatcatagattgtgtggcttctaaacaacagaaatttttttctcacagttctgccacaagtccaagatccaggctgtgtcagattttgtgcctggggagggctgctgtctggttcatagccatcttctggctgtgtcctcacttgatggaaggcatgaatgagctctctggggtctcatttctaagggcactaatctcatgcatgagggctccacccttctgacctaatcacctcccggaggccccacctaaaaccatcacactgggggttaggtttcaacatatgaatttagtggggggaacatacacagtctatggcgttccaccccagtccctaaaattcatatctttcccacattcatcccatctccatagcctccgcttcattcccacatcaactcaagtctaaagcccaacatctcatccaratcatatggtttcctctgatccccaatgtcagt

SEQ ID NO: 860025 - DNA, 619 bp, Homo sapiens
tctgtatgcaattaaaattgcgcataaatatgactgcaagactgccctgaactgctactatctgcctatggggtagccctgctctgcaggcgcagttatggagctgtaacactgctgcttcaataaagctgttttcttctacctccagcttgcccttgaattctttcctgggcaaagctaagtacccttgtggcctaagctccactttggggcttgcctgccctgcatcaaaaccatgctaatgtggggcaggctttgaaaaagcctagagcctggagtctagaaggccattattggaggtagctctcttttatgcatcctgcaagcacttccactgtgcattccagattcatttaaagggacccagagatatgcttcttagactttccaccaaagcatctctcaagccaaagggaataaacaggtagcttcaaacagtctgcctcatgcctggaatatatttgaaatctttttgttttattttaaaaattacaygacttttgcattctactttgtaatatcaccattgttttaataacccttccccccaaattcttgacataaaatgagcactgcagaaaaatgtttcatattcatttttggccttatgtaatccttg

SEQ ID NO: 860026 - DNA, 609 bp, Homo sapiens
tttggtcttgttctgggtgttttccgaggctgtgctcgctctgtgtggatgacatgagtgtgtgtggagtttatggctgtgataaaatacagctctggcatttgctgtggttccctatcgaaagccacgctttctcggcactggttgcctcccactgtagaatctgaaaatctcagataatcacattcctggtgtgtttgtagctcagcagaggaatggcacccaatcctgggcaaaggaatgtgaaggtttctggaaaacaggttttcttccccaattttcaaagagaggtttcttccggtccctgccttcgttcgagggagcacgtgatacttggcactgcaaccacagtcttgtgaacctgtgggagcagcaccaaggaccacgaagaggctgccccagggcccaggagtcactgaatgactgagccaatctggaattgcttctctctagggcccttttagtcacatatcttgcttcttgcagaagaaagcattaacaatgaattacagcatatttagtcggctatgcgttaatgacarcgtagacccaaatccccctttcaaggcccctcagggcttctcactgcaggtagaataaagcatgagg

SEQ ID NO: 860027 - DNA, 583 bp, Homo sapiens
agtcaagaggtgatttgtattagggttctccaggaaaaacagaaccaagaggagagagagctatatggtatataagccatattatatatgataatatataagccacttttaatttaattttattttttgagacagagtctcactctatcgcccaggctggagtgcagtggcgcaatctcggctcactgcaacctccatctcccaggttcaagcaattctcctgcctcagcctcccaagtagctgggattacaggcacatgccaccatgcccagctaacttttgtatttttagtagagatggggtttcaccatgttggccaggctggtcttgaactcctgacctcaggtaatctgcctgcctcagcctcccaaagtgctgggattacaggcgtgacccaccatgcctggccataagccactatttaataattaatatgtatgtcataggagatakatattttatatatatgttttatgtttaatatatgtcataggaaatacataatctacatatataacattctatatgaaacataatctacatgttatatgatctatatattatgtattctctatgtattat

SEQ ID NO: 860028 - DNA, 494 bp, Homo sapiens
taacccaagctatcctgcccaataagaacaaaatgggagggccaggcacrttggctcacacctgtaatcccagcacactgggaggctgaggtgggtggatcacggaacatgaggtcaagagatcgagaccatccaggccaacatggtgaaaccccatctcaacaaaaaatacaaaaattatctgggtgtggtggtgcataactatagtaccagctactcaggaggctgaggcaggagaatcacttgaacccaggaggtggaggttgcagtgagctgagatcatgccattgcactcctgcctggctacagagcaagcctccatccaaaaaaaaaaaaaaaaaagtggaggaatcacattaccggacttcaaattaaattgccaagctggggtgggtggagccaagatggctgaataggaacaactccggtctacagcgcccagcatgagtgacacagaagatggatgatttctgcatttccatctgaggtactgg

SEQ ID NO: 860029 - DNA, 568 bp, Homo sapiens
ctattaatatgctgcattgcattgattgagattcagttgttattttatagaattaaccagtgaagccatcgtctgataggtttttctttttggaagttcttttaatactattattagctcagtctttttacttsttatagattcatttagactttctatttatcttcggtcatttttgtagtttatgcctttttaggaatgtctccatttaataagtcaatcaagtttctgttatttagtgaatcaactttgtgatctagtatgacaactagccttttggtctataattgtatataatattcattgattacacattttagtaatttttcttcccatattttcatcaacctagctgaaagtttattaattttgtggatattttcaattaaacagctacagcgtttgttgattttgtattctttgctttacatatatgcactaaaaattttatttatttcttcctatttcatttgggtttagcttgttcttttctctagtcttcaaaggatacagttaagttattcattcaaaatctttcttctttttaaatatagacatctgcacaaga

SEQ ID NO: 860030 - DNA, 568 bp, Homo sapiens
ctattaatatgctgcattgcattgattgagattcagttgttattttatagaattaaccagtgaagccatcgtctgataggtttttctttttggaagttcttttaatactattattagctcagtctttttacttgttatagattcatttagactttctatttatcttcggtcatttttgtagtttatgcctttttaggaatgtctccatttaataagtcaatcaagtttctgttatttagtgaatcaactttgtgatctagtatgacaactagccttttggtctataattgtatataatattcattgattacacattttagtaatttttcttcccatattttcatcaacctagctgaaagtttattaattttgtggatattttcaattaaacagctacagcgtttgttgattttgtattctttgctttacatatwtgcactaaaaattttatttatttcttcctatttcatttgggtttagcttgttcttttctctagtcttcaaaggatacagttaagttattcattcaaaatctttcttctttttaaatatagacatctgcacaaga

SEQ ID NO: 860031 - DNA, 561 bp, Homo sapiens
attcaggacacaggtatgggcaaggacttcatgtctaaaataccaaaagcaatggcaacaaaagcctaaattgacaaatgggatctaattaaactaaagagcttctgcacagcaaaagaacccaccatcagagtgaacaggcaaactacagaatgggataaaattgttgcaatatactcatctgacaaaaggctaatatccagaatctacaatgaactcaaacaaatttacaaggaaaaaacaacctcatcaacaagtgggcgaagaatatgaacagacacttctcaaaagaagacatttatgcagcgaaaaaacacatgaaaaaatgctcatcatcactggtcaacagacaaatgcaaatcaaaaccaaaatgagataccatctcacaccagttagaatggggatcattacaaagtcaggaaacaacaggtgctggagagkatgtggagaaataggaacacttttacactgttggtgggactgtaaactagttcaaccattgtggaagtcagtgtggcgcttcctcagggagctaggactagaaataccatttgacccag

SEQ ID NO: 860032 - DNA, 590 bp, Homo sapiens
agctagggcaatcacagggccgagtaaatcagaggctcaatgtcagactcaaggatctaaatgttttgtgtccttctgactcttgttctcaaggatggacttttgttctcatactgttccttcacgttatcagtgagccaccctggtgccccgggccataccctcatgcctatgaaaaagagtctctttcttgtgtcgcttttaagaagcatggtggatgttccagaatcctcccggcaggtacatctcaggcctccctggtcagaactgcatcatcttccctttcctttttttttttgagatagagtctcgctctgttgcccaggctggaatgcagtggcacgatctcagctcaccacaatctccacctcctgggttcaatcgattctcctgcctcagcctcccgagtagctgggactacaggcgcccaccaccatgcccagctaatttttgtattcttagtagagatggggtttcaccatgttggctgggctggtctggaactcctgacttaaggtgatccrcccacctctgcctcccaaagtgctgggattacaggcatgagccactgcaccaggcccatattccct

SEQ ID NO: 860033 - DNA, 664 bp, Homo sapiens
agacagtatgcaaaggctaaaccggtacagggaagcccttctggaagggttaaagaagggagckcagaaggccacaaatgttaacaaagtctctgaggtcatttaagggaaagatgagagcccagcacaattctacgagagactatgtgaggcctatcctatgtatactccctttgatcccgatagccctgaaaatcagtgcatgattaccatggctttagtcaaactacagaagacattagaagaaaattgcagaaacaggctgggtttgtaggcatgaatatgtcacagttattggagatagccaaccaggtgtttgtaaatagagatgcagtaagccgcagagagcaccacagagagtgaatgccaagcccggcgaaacactgacctgctagcggcagctattagaggggtttcccccaaaggggcgagagaaggggggccccaggaaaaatacccaatctggccatccacacttgcagcgtaaccagtgtgctttactgtaagaaaacaggacattggaaggaaggggcccccagttgaaagggaaatgaggtgactctgagcaaagggtctcagacaaggacgaaggagacttgttcaatctgccagaagggttatgggacagagggggaccaggctcatgtgcccccaaagagcccat

SEQ ID NO: 860034 - DNA, 573 bp, Homo sapiens
gaaagagcaattgtgataattaataataatattttgcacttggaattttcccctggcagcagctactctaaaagcatctcctcattcagccacacatatcagccaattgrccagtccacaggagctcctggagcttctgctgctggttccacagccctgcacggggtcctgggaggaacccagccgcatgggaaatgcttccagcactcaaagagcttgttcagggggccatgcaaaagtaaaccagactagaggctgtcactgagaaaggcatctggactctgcaacatcactctcctaggcacagtaataaaagtcagatattataggagcttccgtttgatttaccatcttatttccttcatctggaacgatgcctgaagttcattggccaagggtaactagcatccattcgggaataatgcccgaaggcacctactccagagggaggattaaatgagttaaaacacgtacagcacttagaacaaggccatgcatatggtgagcaccccataaatgctagcctttgttgttgttaactatatgccttggtgtctgcatcagcaaggatcc

SEQ ID NO: 860035 - DNA, 543 bp, Homo sapiens
gatgggtactgacatccaagatcaccaccacatcacctttagaagacgccaaggggtccattattttcacagtcaaggtaattcgaggtccttatcagagctgtgaaatgatgtaggtttcagtgtggatgttctcagataaccagctagactaaaggagggtgagaagacgttctcctgaggaggtcttggcctacaagtggttctgcctccagataactgtcaagtcccttggtggtgaccagaggtctagggagaattctgcaggttcctactcactcattctcgaagcctctgtgatgcctgcttccaaagatgggcacacaatctttcccatcccatgtgcccttttgcaaatgtggctttgctactcctcccactaagagatgaaatctattctccccaccttcttgaatctggaccagctctaagagttgctttgacaaataaaatatagtggatgcaatgctgtgtgasttacccattgaagtcttaagtggtcttttagcttttggttttgcatttggtacctgaaacttagga

SEQ ID NO: 860036 - DNA, 598 bp, Homo sapiens
tcgaattgtagctcccataatccccatgtgttgtgggaggaccccgtgggaagtaattgaatcatggaggcagstttttcctgggctgttcccatgatagtgaacaagtctcacaagatctggtggtttcataaagggcagttcccctgcacactctctcttgcctgccaccatgtaagatgtgcctttgctcttccttcaccttccaccatgattgtgaggcctccccagccatgtggaactgtgagcccattaaatctgtttttctttgtaaattacgcagtctcaggtatgtcctaatagcagtgtgagaacgaactaatacactctcccttcctggaaaacttctagtgcttcaagtctctattgagttgtcatttcttcggggaggacttgcttgcccctttcccaccctgataccttgtatcttcctcttatacattctcctcacttcctgttagggttttaattgtgtccccccaaattcatatgttgaaatcctaaccctcagtacctcagaatatgactatatttggagagaggttcttaaagagatgattaagttaaaataaggtcattagggtaagccctaatccaa

SEQ ID NO: 860037 - DNA, 598 bp, Homo sapiens
tcgaattgtagctcccataatccccatgtgttgtgggaggaccccgtgggaagtaattgaatcatggaggcagctttttcctgggctgttcccatgatagtgaacaagtctcacaagatctggtggtttcataaagggcagttcccctgcacactctctcttgcctgccaccatgtaagatgtgcctttgctcttccttcaccttccaccatgattgtgaggcctccccagccatgtggaactgtgagcccattaaatctgtttttctttgtaaattacgcagtctcaggtatgtcctaatagcagtgtgagaacgaactaatacactctcccttcctggaaaacttctagtgcttcaagtctctattgagttgtcatttcttcggggaggacttgcttgcccctttcccaccctgataccttgtatcttcctcttatacattctcctcacttcctgttagggktttaattgtgtccccccaaattcatatgttgaaatcctaaccctcagtacctcagaatatgactatatttggagagaggttcttaaagagatgattaagttaaaataaggtcattagggtaagccctaatccaa

SEQ ID NO: 860038 - DNA, 608 bp, Homo sapiens
aaaggcatctaaagctacgtgaaatgtttggatatagatgggcaaatgctagagtataaggaacaaacagaaagatggtttggtttgtggcatttctgtgattatggataatttttttcttcttaaatttaraatgtttggctgggcgtggtggctcacgcctgtaatcccagcactttgggaggctgaggcaggcggaactagggagttcaagaccagcctgaccaacatggagaaaccctgtctctactaaaaatacaaaaaaaattagtcgggcgtggtggtggcttataatcccagctactcaggaggctaaggcaagagagaattgcttgaacctgggaggcggaggttgtgatgagccgagatagcgccattgcactccagcctgggcaacaagagcggaactccatctcaaaaaaaaaaaaatttagaatgctcttggctttgctctgatgtttgaaaaatatcaatagcaaatccctaatgattaggatctattgacttctaaaaaacctcctgtatttccctaaaattttccccctttcaagttctctgcccaaaggtcagcgtttccttgcaaatgtgactatttttttagttatttt

SEQ ID NO: 860039 - DNA, 569 bp, Homo sapiens
ttcccatctaaaattgctaagcctctatttctctctgatcagaggtaggggctggaggcaacattgagccaggggaggtgcctgctccctttctgtagttcctgtgtctattcagccctcatcaggggagaggggggcatgcttgtactaactccgcagcctgcacagtgaaggagctcgcctcaggagcccccactttgatggctttttgtatttgtgtttgactatgtctcagcatgagcttctgcccgagtgttctgctcattagagtttctagaaagttgtcctttcctgaccacaggcatcacttctggggttgttttcttgggaccgaagctgagattgcagatggtaatggctatgtgtgctttagcttgttccattggcgaaacataccaattaaacttcaaatgaaccaattcttgtttctttacaatgtaccttggcttgaagttggagttttagccagaatttccrttggcctgttacaacacatgcaaaaatgctgggtattctagggtgttttgcagcaaatgctgcttctctggatcctgctccttgacagagat

SEQ ID NO: 860040 - DNA, 495 bp, Homo sapiens
tgcattaaattaaatctgttactacatcagtgtacacaaattatgtgatgctgctgccatattattttgatttstattaatttgtcttattgtactccaaatggacagtgggaaaatgccattcggaagttccacacactaatttacaaacataaatgaaagattttaggaacccaaaaagtctgcgctattctttcgaatacttcaattttgtaccttatttcactatattctcctaaactaagtttcaggaagatcctactatactccacagcccactttctaaaagatttaatcaatatcttgtgtcctacatctgaataacctattaaaacttccttgttatggtaaaaattactcctatttagttttactttccccagggaaaaaatgagtttcctcaggctttgtgtatagtcgtaattacttttattttctccaacttttttaagtaaatgtaacctcaagattttattatctgcataataaaacaaa

SEQ ID NO: 860041 - DNA, 600 bp, Homo sapiens
ttagtttctcacttaatacataatatataaaaattattctcttgcatgtaatttaaaaatcactatgttcctaagcagtttaggctttaaacaccctattataattaaggagctgtctttgtctgtttgtgttgttataacaggatgcccaaaactaagtaatttataaagaacagaaatttattttcttacagttctagaggctgagaagtccaagatcaacgcactggtaggttcacttgtctggtgaggattgcattctccagaggagaggcacactgtcctcaaatgacagaagaatggagagagagagctagcaagctggagaaacagggaagctggcagcatggctcagtccgaggccaaaggcctcagaaccaaggatgccattggcaaactcaaagtttgagcctgaagacgtgagatttgggagactgatggctcagttcccaaagttcccaaatttcaaaagctagagaacctggaggtctgagggcaggagaagagaattcctactccagaagatgtaccaagaattcacctttgwctgtctttttgtttcttttggcctcagctgattgaatggcgcccacccacatt

SEQ ID NO: 860042 - DNA, 544 bp, Homo sapiens
ttcagaatagtcaatgattgttggcttcaacttaaaagtcaccagcttcattagcccctaacaagagaattggcctgtgctttgaagatgtsaaaccatgcgttgacttctcctctctaaatatgaaagtcctagatggcatcttcttccaataaaaggctatcttgtctacattgaaaatgtgttgtttagtttggccaccttcatcaattatctcagctagatcttctggataacttgctgctgcttctgcaacggcacttgctgtttaccttgcacttttatgtgatggagatggcttctttccttaaacctcatgaaccaaacttttagcttcaagcttttcttctgcagcttccttacctctcccaggcttcattgaatcaaagggagtgagggccttgtcctggattaggctttggcttaagggaatgctgtggctggtttgatcctttatccagaccactaaaacattctccatattagcaatcagactgttttgctttctcaacatttgtatgttcactggagtagcagtcttaat

SEQ ID NO: 860043 - DNA, 645 bp, Homo sapiens
gtctaatgagatattatgcaggatcccatgaaggtaaaacaaacactttaagccctctgatagtggtgctagtttaggtcttgccctattttatatacaatacatgtcaattctagtcmtccagtggttgggtggttttccagttgttttccttagaagcctctgaccaatcatccaagccatttaccatcattcatgagtttgtatgtattcttctcttgggccacttctctttccacacaaagtagatgatcaaatgcattgcctgaaactgcccactgggaccaatttcccttgctgctatcatttagggccaccctgagaagagctgcagagcagcagttttgcaattcctgcttgcacttacctactgaattgacaaaaccaaacttgagggttttctttttttctctttaagctgactataagagactccttggacaaacatagggataaattcagggagaggtgctggtgcaatattagtgaataatatgggggtctgggctacctgcttgttcccttaggccctacttgtgcacaattctcaacgtaccacttccatcttgtagattgctgctgggcctgctcaaactcatgactttcaggatctaatagaactactcgaaatgggctatttcaagt

SEQ ID NO: 860044 - DNA, 670 bp, Homo sapiens
aactcttcaatgccaaacaccaaagaacatctaatagcatcaacattatttaggaaaacatgacctcaccaaatgaactaagtaagccaccaggggccaatcccagagaaacacagatatatgaactttcaaacagagaattccatatacctgtgtggaggaaactcaaagaaattcaagataacaaagagaaggaattcagaattctatcaggtaaatttaacaaagagagtaatataactttttaaaatatcaagcagaaatgctggagttgaaaaatacattgacatactgaagaataaatcagagttcttcaatagcagaatgaatcaagcagaagaaaggattagtgagcttgaagacaggctatttgagaatacacagtcagagaagacaaaagaaaaaacaatgaagcaggcctacaggatctagaaaataacttcaaaagggcaaatctaagagttattggcctcaaagaggaggtagagaaggagatggggtagaaaatttactcaaagggataataacagagaacttcccaaatctagacaaggatattaatatccaaatacaacaagggtatagaacaccatgcagatttaatccaaagaccayctcaaggcatttaataatcagactttaaaggtcaaggataaagaaaggatcctaa

SEQ ID NO: 860045 - DNA, 678 bp, Homo sapiens
tcctgaccctaatctactggttcactgctttctcccacttcctggctatgtgaatcttttgctcttaccagattggtctaatttttgtccctccataargtcttgtgaatacagactctgagctatgctcacaccatttcctctgcccagaatatcctctcaattcattgtacattctgctcccacttgaaggttcagtttaatgtggctgaaaatccattatttttatttttcagggaaagcttgctatttgttatgtatatggaaggtaaaggagttgatatgtggggcataggaagtgggatcttgaacttcaaaccttcctctatctagttgactacttgaaataccaataatctaccaagaatgaacaaaacatgtggaatggcttccgccctaggattgatcagtttagtctatactgaccttggaaactctgattttatattcattatttggtaataaattgttaattgctctgtgttataagattacttcttaagcgtgctttccttgtctctgctgctagatttttagctcctttggggagcagagcccatattctctaccttcttttgtctcctttgtttagaactatactttgcacataatatgttattatatgcttaaaatataatattatatataatataaaaataatatagtattaggtactca

SEQ ID NO: 860046 - DNA, 643 bp, Homo sapiens
agtgggctcagaagatttagtataccagactgtaaagagatgtgctgtcatctaggccttgttgttccatttatgtagcataggcagagtagatgtagcataattctttatttttatttttcttatgtatttatttttagttgtagtagagacaatgttttacgttgctcaggctggtctcaaactcctgggctcaagtgatcctcctactgcagcctcccaaagtactgagattacaggcgtgagccaccacacccagcctatgtagcataatttgtaagggcccgaggatttttggaacggcaaatgagcattggcttcaacataaagtcagcagctgcattagcccctaacaaaagagtcagcctatcttttaaagctttgaatccaggtattgacttcccttctctagctatgacagtcctagatggcatcttcttccaagagaaggatgtttagtctacatcgaaaatctatttagtgtagccacctttatcaatgatattagcytgatcttcaggataacttactgcagcttctacatgaacacttgctgtttcaacttgtacttttatgttatggaaatgacttgttttcttaaactctgaaccatgagccaagctctgctagcttccaacttttc

SEQ ID NO: 860047 - DNA, 643 bp, Homo sapiens
agtgggctcagaagatttagtataccagactgtaaagagatgtgctgtcatctaggccttgttgttccatttatgtagcataggcagagtagatgtagcataattctttatttttatttttcttatgtatttatttttagttgtagtagagacaatgttttacgttgctcaggctggtctcaaactcctgggctcaagtgatcctcctactgcagcctcccaaagtactgagattacaggcgtgagccaccacacccagcctatgtagcataatttgtaagggcccgaggatttttggaacggcaaatgagcattggcttcaacataaagtcagcagctgcattagcccctaacaaaagagtcagcctatcttttaaagctttgaatccaggtattgacttcccttctctagctatgacagtcctagatggcatcttcttccaagagaaggatgtttagtctacatcgaaaatctatttagtgtagccacctttatcaatgatattagcttgatcttcaggataacttactgcagcttctacatgaacacttgctgtttcaacttgtacttttatgttatggaaatgacttgttttcttaaaytctgaaccatgagccaagctctgctagcttccaacttttc

SEQ ID NO: 860048 - DNA, 579 bp, Homo sapiens
ctcaacatcaataatcaacagagaaatgaaaaaaaaaactacaatgaactattatctcaccccagttaaaatggttttcatccaaaagacagacaataatgaatactggtgaggttgtagaaaagggggaaccctcattaaatgaattgaatatttcatatgaaactgcagatttccacttagggacacaccaagcagttataatacttgttttattcttatggcttgaatttgtgaggaaaacacttctttagatagccaccctttctccttttttatatataatctctaacaatataagagaacagtaacatgtacttttttctggagtaactaccatccatttgcatagttccaggtaatttgcatccataatctcatttaatccacactacaactctttttctccaagaaagatgctttgtaagtaaaaaaaggaatttctgctagatattgttaaatattacctgtcttgagatctatgaaatttattttattttattttaaatcaactttaattttagattcagagkatatatatgcagtttgttacatgagtatattgcatgatgctgaggt

SEQ ID NO: 860049 - DNA, 575 bp, Homo sapiens
tctttctgtgtttctgccttattccaggcagcttagtgatgccatttttttctagtgtttcctttagtgctgcttctcctagagtatttaccaaaatgagattagattgggatttctgggaagtgtcttggagtgttagggaaactagataactgtcttcagttttcatttcctcccgtagatactaagcacccacaaaaattctctccatttggttttattccaacttgagggagaaggatgggtgacatggtctaatttggaattcactcatttctgtgaacaatgtggttatcttaggtttgtttccaagtattggggttttttaaaggatgttatggtgtgtggttagtcagcagttgaactttcttcgtgagaaagggagcctgagacatccagttccaccatctttctgattttctatcttcaatttcttttagtattaaaaaccaatatccgtgtgctrgatgtggtagttaatattggtgtgcagttgcttctaggacctctcagttgacacagaaggaaatatttacatataagtatatgaacatacttgtgtctataaatgtatc

SEQ ID NO: 860050 - DNA, 656 bp, Homo sapiens
atacttttcctatagagctatttgagcttcttatgtatttttgttattcatcacttgccatatgggtagtttgcaaatatttcctcctattccatgggttgtctcttcacttttttgacagcttcctttgctctgcagaaactttttaacttaatgtgattccatttgaccatttttgttatggttgcctgtgtttatcgcatattactgaagtaatttttgtccaggccaatgttctagagagcttccccaatgttttcttgtaatagtttcacagttgaaggtcttagacttaagtctttaatacattttgatttgatttttgaacatagtgagaattagacatctagttactctcttctgcatgtgaatattctgttttcccagcaccatttattgaagagactcccttttccccagtgtatgttcttggcacctttgttgaaaataagttcactgtgaatatatggatttgcttttgggttctctattctgttttatgagtctgtttttatgccagtaccatttttttttctactatagctctgtagrataatttaatgtcaggtaatatgattttttccagttttgttctcaggatagctttgactattctggatcttttgtggttccatatacattttagggatgttttt

SEQ ID NO: 860051 - DNA, 637 bp, Homo sapiens
agatgatgatgtatgagttctctgatgagaattcaaaacagcaatcttaaggaaactctgtgaacttcaagataacaaagaaaagcaattcagaaatttatcagagaaatttaacaaggagataaaaattttaaaaaatcgaatgaaagcctgcagctgagaagtatatttgctgaacagaaaaatgcattagaagctgttaagagtagaatggataaaacaaggaaaaaaatcaatgacgttgaaaacggtatttaaagacactcagaggagaaagaagaaaagagaatggaaaggaataaagaacacctacaagatatagaaaatggcctcaagagagcaaatctaagaattgttgatgtccaagagggagttgtaaaggagccaggagtagtcttattcaataaaatagtaattgacaacattctaaaatttgagaaatatataaatattcaggtacagaaaggtcagagatcaccaaacaaattcaacccaaataagactaacccaaaatatataataatcaggctctcaaaggacaaaagcaaagagatgatcttraaagcagtaagagaaaagaagcaaatactatataaaagagcttcaattcattaggcattggagttctcaatggaaa

SEQ ID NO: 860052 - DNA, 632 bp, Homo sapiens
catggtttgcaaatcacacataaatrgaggaagatttcaataccctactgacagcattagacatatcctcaatgcagaaaactaacaatgatatttgaaacccaaacttaacatttgagtaaatgtgcttaacagacaactatagaactctccacccccaaaaaaagaatatacagttttcacatctggatatggcacacactctaaaatcaaccacacaattggccgtgaaacaattctcagcaaattaaaaataaaaagtaaaaaaagtataccaaacacactctcagaccacaaaacaataaaaaatagaaaccaatactaagaaaatcactcaaaactatacaattatgtggaaattaaacaacctgttcctgaaatttttttattaaacaatgaaattaaggcaagaaattaagatattctttgaaactagtgagcacaagcatacagcatacaacaatctctggtgaaaagcagcgttaagagggaagtttatagtgctaaacacccacatcaaaaagttagaaagatctcaaattaacaacctaacatcacacttagaggaattaaagtaaaaagggcaaactaaacccaaagccagaaggagacaaaaaataacaaaaatcaga

SEQ ID NO: 860053 - DNA, 627 bp, Homo sapiens
catagccaatatcatactgaatgagcaatagctgaaagcattcctcttgagaaccagaacacaacaaagatgcctactctcaccactcctattcaacatagtactggaagtcctagccagagcaatcaggcaacagaaagatataagaggcatccaaatagaaagagagaaaaatcaaactgtctctgtttgcagacaatgtgattttatatctagaaaatcccatattatctgctcaaaagctctttgatctgataaacaacttcagcaaaatttcaagatacaaaatcaatgtacaaaaagcagtaggattactatacacaaataacgtcaaagctaagagccaaatcaagaattcaatcacattcacaatacccacaaaaagaataaaatacctaggaatacagctaatcaggaaggtgaaagatccctatgatgagaattacaaaacactgctcaaagaaatcagagatgacagaaacaaatggaaaaaaacttcatgctcataggtaagaagattcartatcattaaaatggccatactgcccaaagcaatttacatatttaatttaattaaactgaacagtttgaaatttatatgtcattgttcacacaattagaaataaa

SEQ ID NO: 860054 - DNA, 572 bp, Homo sapiens
cattcccagacattttatcttatcaaaatgaaacatgttyacacaaaaacaaaaaaactatatacagatattcatggaaggtttaattataactacagcaagctttatttgtaaaaactgtaaacaagcctgttgtccctcaatcagtaaatgattaaacaaactgtgtgcatccatatcatgaaatattactcaaaaataaaagaaataatgtattaacacctggagcaattatcaataccaagggcattatgctgagcgaaaatgccaatctcaaaaggctgcatacaaaaaataaataaatttaaaaagggctacattctgcataattccacataagatttcctaacactgaaatggaaagcagattagctgtgacaatctaggaacaatgaggtaggtgcaactgaaaaatggtggtataatgcagtttctctggggtgataaaatagttctttttcttgcttgttagctgctgaaacaaatatatatatatatatatatatatatatatatatacacatacacacatatatgacaaaattttaaagaatcacacacacattgacaca

SEQ ID NO: 860055 - DNA, 597 bp, Homo sapiens
tgcctcccaactttttttgtggtaagaacccttaacatcagagcttcttgacaaatttttaagtgtataatacagccttgtaaatgatgggcacaatcatgtacagcagatctctagaacataatcattttgattaagtgaaactttacatccattattggttctgaatactaaattttttctactattttcattgttagttttccccccaaatttttaatgtatattttaacttcttaaaatataagccagcagcacatcaaaaagcttacataccgtgattaagtaggcattatctctgagatgcaaggttggttaaatatatgcaaatcaataaatgtaatccatcacataaacagaactaaagacaaaaaccacgtgattatctcaatagacgcagataaggctttcaaaattgaataaccccttcatcttaaaaactcttttgataaaatttcacacccattcatgttaaaaactatcaataaattaggaattaaaggaaaawttctcaaaataataagagccatctatgacaagcccacagccaacatcatactaaatgggcaaaagctggaagcactgcccttgaaaacc

SEQ ID NO: 860056 - DNA, 587 bp, Homo sapiens
tatccatggagttaatgatttacacatacttggccttcagtatacttattcttcagttatttactttaattcatcttgaaaattttgattctaaataaaaagtttatatttttycactaatattggtgagaaaatatttatttcatgacaaaccaaataacaaaacaattttcacatataaaaattatatatgcttgataataaaaacattttaaataaatatatagtttacacataaaaaaattttttttttgtatttgccaacagaggaacacttcatagtgtgtgatgattgatgaaagatggacacaagtgaggtattctttacaagattcattcttctttacttactatattttttatcattttgcaatttatggggcttacaggtttcccatagtgaaactgcactcagccttgaggtactctagctttttcatgttaggtaaatgagtaagaaccagacaaagcagctgagcaggaattaccactaaaataggagcaataccaggagagcaaaacagatacataactaactagagttagttcctaaaggccctagtatctaacaaaagattttacaaaag

SEQ ID NO: 860057 - DNA, 658 bp, Homo sapiens
ggcaacggtaggcagttgggatccataatattggtttcataatgcaaatgccctataattccctattaattttctttaaatttaataggctgcagtggtaaaaccttagaagacttacatggaaagaattattctgtttccttcacattagcttttgacaatcagaaccctgggctaacattctggcactttctggtcatgtgagcccgagcctgtttttagtatttaatgggagaacatgaccctcattgccagaatcatgtttttctggagcacagggatagcgtggagttggaaaggcatatctctgtacttaatctatatgcctgtctgtcccaaattatatttccagtcttgatgtctttactgagtaccagacttgtatgtccctctctagttgacatatctttttggattttagtaggtatctcaaacatattttgccccaaacggagctcttgatttcgtacgtcctctcctactccacccatctacttccttgctttctctttccctacatccatgctarcaaactctgcctgcaaaacgcagccgcagtccttcttctcttgtatccccagtgcctggagcagtgcacagcacattatgaaccctggaaatactgtggaatggcggacaggactgggggtgactacct

SEQ ID NO: 860058 - DNA, 607 bp, Homo sapiens
ataacattgttattatttttgctttaaacagtaacaacctcttaaagttgttttgtgtgrgtgttttgttgttgttgttgttgttttgacacaaggtgtcactctgttacccaggctagagtgcactgatgcaatcatagctcactgtagcctcaaactcctgggctcaagcaatcctccaaccttagcctcctgagtagctaggactacaggcatgtaccaccacactcagctaattttttatttttatggagatggaacctacctcactgtgttgcccaggctggtttcaaactcctggcctcaagcagtcctctcatcttggcctcccaaagtgccaggattacaggtgtgagccaccacgcccaacctaaagatattttttaatgaggaaaatttttttattacttttttatttacatacttagttttttaaaaaaaattaaacaaatagttttgttttgtgtttttaattccttcaaagtcagtgagaaggttctagaagggtcaaatgcaagataggaaaggaatgatccataaggcttcatatcagccataaagggatggtccttgggatgaacagtttctgtgttgtggcaggaggaag

SEQ ID NO: 860059 - DNA, 602 bp, Homo sapiens
gactcagagaggacacagaagttggaactatctgacagggaaagtaaaataattatgaatgatgtattaaaggctagtggacaaagtgggcaccatgcaggaccgggtgggtaatcacagcrtagagatgggcatgaaagaaaccctcaaatggaaatgtaacatctgtaacatcaatgccagagatgaggaacgcatttgatagcactcaacacagcctggaaaagaatcattattcaagctgaaacagagaaagaagaatgaagcaaacagaatagagcattctaagaatttggagacagcctcaaactgtccaacataggtgtaattggaatctcagaagaaatagttgaagaaataacagtcaggaattttctactgagccaaagaccatcaagtaagttaaatacagaacaaaaacaaaacaaaacacttgggcatatcatattcaaactgatggaaaaaagaaaatcttgaaagcagagaaaaaagacagattacatacagagaaacaaagacaagaattgtaacagacatttcttcagaaaccatgcacactaaaaagacaatagagtagcatcctcaaccagaaaaactgtcag

SEQ ID NO: 860060 - DNA, 631 bp, Homo sapiens
tcaagaagggagaaattcttcttggaggagctggaggggctttgtggagagtttcagaatgctttgcccactaggtttgctgtatccatttctcttcatgyatcccaaagaccaagccaagaaaccagaagcctctggtcccactggcccatgggctccctcggttccccccgtcactaatggccattttgcatgtctctctcccaggcctgctctcttgaacagtgccgaaaacttcactgtgctcatcaagaacaatatcgacttccccggccacaactacaccacgtaagtgcccaggctgcctggctgtcttagttatctactgctgagtaataaattatcccaaacctcagaagcctgaaacaacaaacgcctattgtctcccacggtttctgtgggtcaggaatctgggaatgactttgctgcgtggttctggctcaaggtctgtcaggttgtagccaagctgtcaaccagggctgcagtcatttctaggcttgactggggctggagaacacttttccaagctctcacacagttgctcgtgggagagctcagttcctcaccacgtgaacctcgccctagaccacttgagtatccttggtatatggtggctggcttctcccagagc

SEQ ID NO: 860061 - DNA, 631 bp, Homo sapiens
tcaagaagggagaaattcttcttggaggagctggaggggctttgtggagagtttcagaatgctttgcccactaggtttgctgtatccatttctcttcatgtatcccaaagaccaagccaagaaaccagaagcctctggtcccactggcccatgggctccctcggttccccccgtcactaatggccattttgcatgtctctctcccaggcctgctctcttgaacagtgccgaaaacttcactgtgctcatcaagaacaatatcgacttccccggccacaactacaccacgtaagtgcccaggctgcctggctgtcttagttatctactgctgagtaataaattatcccaaacctcagaagcctgaaacaacaaacgcctattgtctcccacggtttctgtgggtcaggaatctgggaatgactttgctgcgtggttctggctcaaggtctgtcaggttgtagccaagctgtcaaccagggctgcagtcatttctaggcttgactggggctggagaacmcttttccaagctctcacacagttgctcgtgggagagctcagttcctcaccacgtgaacctcgccctagaccacttgagtatccttggtatatggtggctggcttctcccagagc

SEQ ID NO: 860062 - DNA, 531 bp, Homo sapiens
ctccacacctcattccatatgtctagtcaactcatctagtagcttaacaaatcctagcaaacatttcacctaggtatttaaagcaggcagatggcttcgcatagagaagtaatgctattcaacagtttgtagttgatgtatatgtgataggaatctcaattggcctcacactgaatgaaacagaggtgggtgaggggagagaatgcctagatttagctcaggaacagagactagtgtgtagaggagtctttggggtggcccaggaagggcatgggtttggagtctcaaccactagcacacaagtctgaccttgggcaaatcacttcttcctgggctgcagttttctcatttgtgaaataatgaaggctgactgcttccttgcagggctgttgtgggctatagtgataatgaattttaagtggccacgcagtgcgtaatgtagtgagtgttgaagaaatctccttccctctttccccctmgatgagtaatcgggaaagggaaatattgatcctcctatgggtaaggatccat

SEQ ID NO: 860063 - DNA, 624 bp, Homo sapiens
taaggtggttatgtaagtacccacatatatacttgattttgcctcttgacctgccaagcctaaaataattattatctgacccctgattttatctgctgtctttttaarttttgccaattaccccccagtgtccgttatagcaatttatctcccaatttaggatccaacttggaaagtaaaactgcttccattattttcatggtgtcatagttcctcagtctgtctttttttatgatactgacattttttggagagttcaggccagttgcattgtagaatgttcctcaattttgggtgaactggaatgtgaacccctatttctttccaatttcagagccatttttatttatgcaggtctgagattcccaggacaaaggacttttaaaaccagaaagtcccagaccaaaagggatgagcttgtcatcctagcaccagtgtctcaagcactgagtaatcctggggaagataaaatctccttaccctggccccaccctccacctggcctttgcagtaaagccagttctcaaaagccaactggtggttttagcagaaagggtgatgaaccaaatgccagtgtgagaacctgtccccttccacacaggccttttgtcttctgtcttccca

SEQ ID NO: 860064 - DNA, 671 bp, Homo sapiens
agaggaaaataaactgtactcgggctctcctgctagatggacttaatcgcttcgaaaaaggaggagatgaggttgtggttctcaataaaagctgtttaagggattgtggatttggacatttgaagagtgagaacgaaatttcaaaaagctacagtagagaaagccctatggaatcaatacattttctttgcaggactctggaaagaggcaagcctagcattttgtttgaaaagctaagcttggaatgcttttatcagacatcacagtgaatctaattgattccatttttaaaattgcacctgccattggagttatgccaaaacacacataccaaattaaagcacaaaagccaataaaacataacaggagcagaatgctgcaaactcaattgcttattaaaaacctattagctttaaaatgttagcatgtcagaaaacagtttccttctactaacatcagctttgaaggccagctaatcggaaatacatagaattaggacaggcagtaaattcaataaagtagaccttgcagtaaaataaactttgctccaggcccatgcygttgcaattagaaaggcatcatcaggcacaggcctgcagatcagaggtcttagtaagccagtggtcattctggtatttagagtccgcttgttataacttaagtcatctttt

SEQ ID NO: 860065 - DNA, 641 bp, Homo sapiens
ggacaacacacacacaaatttatgttttgagattttccgtaatacccaagcaatacggagmtggcttgacaatctgtgatagccagcctgtgtcatgacttctcacggacacaaatttttttctgttttcctccttgttctgctgagctccaagacaacttctgcgaaagttccttgagtttggaaatagggacgggtttccttctgtttcacccttaacatgaagatacagtcctgtggaatcccagatccatctggagagagtcggctattaaactcttttcataagtacgccctgggccttgactactgtctgtctagagataggaggctgatagttccttcctggcccatcagttttggatacaattaatgtttcttccattcagaattttcaattgtttgggaggtgatatggtttggctgtgtctccattcaaatctcaacttcaattgtatctcccagaattcctaccatgttgtgggagggggacccagggggaggtaattgaatcatgggggctggtctttctcgtgctattcttgtgatactgcataagtctcaggagatctgctgggtttatcaggggtttccgcttttgcttcttcctcattccctcttggcaccgccacgtaagaaga

SEQ ID NO: 860066 - DNA, 638 bp, Homo sapiens
tctgagccgaagcctaaggtcaggagaaggcagttggcagagcatgyagaatggctccaagatgggatcatcttggtgtgtttgaggagcaggaggagtggctggattttagtgactgaaaaagacagtaatataataagaggggtcggggataggcaagaaaccaagtcgtataaggcagtatggggcaaggtgaggcatttgaaagtgagaaagaagggcaatgtacaggtcttttaaacaatgatcaatactagggatcttttggtactctacctatgggactagcggatgcagaagggtgcagtaagacagcgaatccaactatatttgagtatcacctgtaagctgttaagtaattatgtattataaaaacagatggcagaatgtcatgtctatatacctaacgcattaaacttcatttattcacattaggcagaaaacagggactatctgatttagtaaaaattacaaagagtagtttttaaaagacagtttccttatttttatagctgcttctaactccaaggaggctaagtgcttaagacctccttttatgtatacgagtattatgcacaatgctaacactagcattaatttaagcactttacataatggtattgcacttcagtgtatca

SEQ ID NO: 860067 - DNA, 617 bp, Homo sapiens
caaacagcatcatatgctacagagaaatattttgtgaaaggaggagtcaatcaatgggcaaacttcattgtggtcttagtttaaagatactaaaacagccatgccaacctgcagcaaccaacaccctgttcggtcagcagccgtcaacattgaggcaagacctcctaccagcaaaaagattacaacttgatgaaggctcagatgactgttagcattttttggaaataaagtactttcaaattaaggaatgtacattgtttttctagacataatgctatggcacacaacagactagtgtaagataaacaaaagttttatatgcactgggaaaccaaaaaatcatgctttactgtgatgcttgtttcattgtggtgctctgaaactgaactcacagtttctcttaggtatacatgtaaccttcttataattttgttagtgatggaagaaactaagtgaaataaataatacatcaaagatcaaaactttgtactttattcctctagaagcctawtttttaagtaatttaatctcacaaaaagacaatttctggaaaaacaacaactgcagaacctttaggaacatgtaatataaataaaacacacctggttcattggtca

SEQ ID NO: 860068 - DNA, 536 bp, Homo sapiens
aacttaagagcttggctgttcaagcagaaaccctcctcttaaccccagggtcaaacaaatcaaaagcagcaaagaccaccgcaatttggaagacatagctcttctggctcagtttcctcatctgcaagatgacaaaatacaaccttctctaaggtggctgtgaagatgacagatgaagaatgtaaagcaacaaggacataagtgataattaatcagtggcactatttagctcagagctgtaatttctagctaaggaaaccgagactcagggaaatgagccaacgtgtcccaggaacacaatcggcagtggcagaagttggacaatgaccaccatgactcatactgtcacctgttaattcttattgagcatttactcagtgccaggtcccacactcaaaactttgcagtattatctcataacagttttatgagacaggtarctttattttctccattctgtacaagtggaaattgccacttggagaggtcaaagaacttgcccgggtgggtcacaaagtggtggagctgagattcac

SEQ ID NO: 860069 - DNA, 548 bp, Homo sapiens
gtaatacaaccagacatgttctttaaagagattcctccaggrgcaacatagtagatgcacttgaaaagtcattctggagggaggaaggtcagtcaggaactcgtagtgacggtgcttacttagtagcaatgaaatggggaaaagcatctagttctgggaagacgaggacaatacaatacataggagagggtcactgaatcgtcataggaggtgagagggaggaagacaacccagatgaatccagcttcctgactccaaactttgaagagtgaaaaatgatgacttttggacttgagtatttcctggaggacatttgggtggagatgtccagtaggtagttatctcacgggtccagggctcagtggagaagtccaggctggaaatttagttttgaaacttgcataggatgaaaactgaaggcaagggtgtgggtgagattgccaagacacagtgtagaatgaggcaagcaatacattaaagctatgaaacaccaataggcctaaatttaagtcaaattcagggtaacaggagcctgcggaggagattga

SEQ ID NO: 860070 - DNA, 425 bp, Homo sapiens
tactgaaatttatagttttaaatgttgattgtacatataaaaagtagtagcacaatctagaacctttaaaattgttaactacaataattggtgttacccgtaatcactgcatttatttgtcctgatgatctttaattgcttcatgtctgggcatattagaaaaaatgtaaaaaccaagagttttgaaaagtcaataactgatatgcatacttcttgaaactcttcctatacattacagaaagacagtgagttttagtggataaaacaaatgccttgagtaagtacagatctgcttttyttcattcactggtatgagtaggggcaagttatttaaccctaaagttcagttttatcattggcataaagagggaattaaaacaatcctatatatattttctataagaaagaagcaatagaatgaaaat

SEQ ID NO: 860071 - DNA, 539 bp, Homo sapiens
catatccagtttaaattcggtgtaagatttaattactttccaaatcaaacatgtatttcaatctggactggaacacatttacataatagtttattcccagcaaataaagttgcatgaaaacactgcatataaaccacaaagatattaatataaaattacaattaatttgaaagagttctaattctattataataacagaattgtttgaaaatgaacatttaaaaatcaggataacttgaagtttattttaaattcatattctatagagcttcatagattaattatattttagtttctactactgttttcataaattttagcattaataattttctttgagcaaaaaaaactgcattctttcttttctgagaattggaaatgctttgttacaaataagcaaatattttagggtttgaattacaagaagtcatctctctttccattattctttctatgaaccygacagaaaataaaacttctgataaatccattacttaagcctggaaagaaataaacgtttaaagataactgtaatctta

SEQ ID NO: 860072 - DNA, 615 bp, Homo sapiens
tcctgtgcattgtagagagtttagcaacatccttggcttctacctactggatgctagcagcacactcaccccctgccagtcaggacaactgaaaatatctccagacattgccagatgtcacctggtgtgggagggaagcaaagttgctctgcttccttctcagctgggagcctctcatctaaagggtgatggtgggattgggtattattttggaagccaagtatttgccaacatcacagtagacatcatgaagaaaatgagatatgtgaggtagggggctgtaatatatttcctattctatttaaatacttttgtaaaccatattcttggaagctgaacctttctaggagtctgagagggtagtgtgtagctttaagaatgtatcaacatattaaaattgtcaaaatatttttagttatgtgaggtattctatatctgaagccaggttttaatgttcttctttcccaaaattacataccccctttctatctatttaataacccctcaggaagcaaatactccaagtcaccatctgcaagtaggaaatcaattactccttctttgcgacrggctggatggaacaatgtaaaaaaggctattttattcaagcttaat

SEQ ID NO: 860073 - DNA, 503 bp, Homo sapiens; identical to SEQ ID NO: 854061

SEQ ID NO: 860074 - DNA, 510 bp, Homo sapiens
cactgcgcctagccaaatcccccattttcaaatcaccagaatgtaataaagtagacttcaagggtcacatcacaagatgcccccaatttcttaacccgagggttaaccttgtgcacatctatccttactgtgatgaacctaatcccatctttcctattgtaatgagctgaaagagtggtccatagaggaccataacgatggaagtgttggagacagtggtgactaggaccaccacgaaaagtcctccaatagttacagaacccaagcatgggttctctaacccatactggattagagaaaagtccaaagggagacaggctaactatctcctaatatgtgaggggctgtcatgtatgggggaaacatattgttaattcaatattccatttagaggtaacattccatcgaatgggtggaagttatcagaaggcaggttttggctcaacagtggtatrgtgaatgcttgttgattttgctctccagcatgcattcttcctttttctggtaatg

SEQ ID NO: 860075 - DNA, 647 bp, Homo sapiens
gagccactatgttggtgagcatttatagaaatgctcttttgatttcttctaattttataattaaggagaaagtgaagtcatcagctgagtgtgaggatgtgggagcaagtgtcagagatttaaggggagaaagaccctgtaagagagttggaaatggacagaaggaatggtcaggagaattggagtaagtacagagaagtgagagaggggccagagagttgatggtgtattcaagagaacgttgtatttatagaacaatggaattcaggctaggtgagagaggaagacagtaaatcaaaagctgagtgaaaaaagtgaaaaatggtaggatcaatggattgaaagtcccagaaggattgttattggggtgttagaaggagcaagctagaaagaagtgataatgagttgagatatacaaagtgagataatagcttgcacttattaataataaaatacccacaacatgggcatggaattgaatagttaaacaagagtggaggacaaaagtcattgaaggagaggtgttaagaaatcagagtgatcagggtgtaatttcatgtatattgaaataaccaggaattaagataggaacaataktggagagagtgacaataagccaggatccaaaatcgtggaaaaatgaaagg

SEQ ID NO: 860076 - DNA, 513 bp, Homo sapiens
tgcattttggcaatgtgtgccaaaaaattaaattgaactaccaaatcctacttttaggaatttatcctaaacaagtagtaaaaaaaattagcgaagataattgcaagggttcttttttttyccaaagtaatattatagtggcgaaaaaaatgtattccattgtgaagtaaagagactgtttatgtaaactatggtttggccacctaatggaatactatgttgccataaaaaggatgtatgtattttgatatatatcaatatggcaaggtatctatagtatatcattaggtgataaaatgcatgtccattaaacttcatgtactgtatcatgagctctggagtcaaacggccttgtttcaaattctggcttctccacttgctgtcatatgagtttgggcaatctgaccttttctgtcctcaatttttttatctctaaataggaaatttattgatagtacatactttataaggtggctttaaatatgaaaaaggaattcaaataaagggctaaag

SEQ ID NO: 860077 - DNA, 614 bp, Homo sapiens
acatgattatctcaatagatacataaaaagactttgataaaattcaacatcccttcatgttaaaaactctcaataaactaggtattgatggatcatatcacaaaatataaagagctatttatgtcaaacccacagccaatatcatattgaatgggcaaaagctggaagcatttcctttgaaaacccatacaagacaagggtgccctctctcaccactcctattcaacatagtattggaagttctgcccagggcaatcaggcaagagaaagaaataaagggtattcaaacaggaagagaggaagtcaagttgtctgcagatgacaggattttatatttagaaaaccccatcatctaagcctcaaaactccataagctgataagcaacttcagcgaagtctcaggatacaaaatctatgtgcaaaaatcacaagcattcctttataccaacaatagacaagcagaaagccatatcatgaatgaactcccattcacaatcgttacaaagagaataaaatacctaggaatacagctaacaaggagtgtgaargacctcatcaaggagaactacaaaccactgctcaaggaaataagagaggatgcaaacaaaaggaaa

SEQ ID NO: 860078 - DNA, 639 bp, Homo sapiens
tgcttgaggagacggataccccattctctgtgatgtgcttatgtcacattgcatgcctgtatcgaaacacctcttggaacctagaaatatatacagctactacatacccacaaaaattagaagttaaaaatttwaaaaaaaagaaaaacctctctcctactggtctgcttggttctgatcctggttctttggcaaagctttttttacttctgcttttttttggcaactaggtagaacttcaggtaaaataaaacaaataaaaatgtattgtgaaatatacaatatatgcaaaggagactatgaaacgtttatgtgccatttaaagaataacacttaagaactagaatattgccagtatttcagaaccaccttcctcacctagtaaatctccatgatcatgtcctccttccccttgacagaggtgacagctctctttaattttctgtccattattaccagttctgcttttcagtttttcacacttgtgtgtatccctacaaaagatctctgctttttagggggtcagagggtgatttcatgtaataaggaaagaaaactgtcattcttctaagagcaaattgttctttttagagaaaaaaaattactaaaacctgatgtgctttccaaatacttaaccaa

SEQ ID NO: 860079 - DNA, 357 bp, Homo sapiens
atatcgtatggaaagataatatttatagcactgaggtaaagttgcaaattctttartattaatcttccagtttttgctgtttgataaattaatcctaaaaaattgtaaagattcatcagtgaacaagtcacatccctggccactctagtggggtgagttggagagaatacaaaaccaatataatgaataccaggtgctatgaaaaaaattgctgttaaacatgttattttaaaaaattaagtaggctagagagtgctacatttaatagagtggtcatgatgtttttcctgaagaggtgatatttgaacagggatctgaacgaagacatccaggggaagagcattccaagcaaaggga

SEQ ID NO: 860080 - DNA, 549 bp, Homo sapiens
tacttaagactatatttagaaccatgtcatctgtgaatagagatagttttacttcctcttttctaattttaatgtcctttgtttatttgtgtgctgaattggtctaaaactttcgggacaatgttaaaattagtrgcaaaagcaggtattctttccttgatcctaaccttagggaaaagattatgcctttcacctttgaatataatgttagtggtagattttttaaaaatggactttgcatgttgaggaagtacctttctatttctggtttgtggagtgttttcattatgggagagtgttagattttgtctgtttctttcagtgtcaatttaaatgagcttgtactttcttttttattctattaatgttgttcactacattgatttattgtcatatgttgagcaactcttacattccttcaacaaatccaacttggttattacgtagtccatttaatatgctattggatttcatttgctagtaattggctgaagattatttcattttttttaatttttattttttgtgggtacatagtaagtgtatata

SEQ ID NO: 860081 - DNA, 484 bp, Homo sapiens
agctgggtttccatggtcttggccagctccaatcttatggctttgcagggtacagcctccttcctggctgctttcatgggctgrcattgtctgtgacttttccaggtgcatggtgcaagcagctggtggatctaccattctgcattctggaggataatagccctcttctcacagctccactaggcagtgcccccgtagggactctgtgtgggtgctctgaccccacatttcccttccgcactgccctagcaggggttcttcatgaagtccatgcccctgcagcaaacttttgcctgggtatccaggcatttccatacatcttctgaaatctaggcacaggttcccaaacctcaattcttgacttctgtgcacctgcaggctcaacaccatgtggaaactgccaaggcttgtggcttccaccctctgaaggcacagcctgagctctattttggctcctttcagacacagctggagtggctgagac

SEQ ID NO: 860082 - DNA, 484 bp, Homo sapiens
agctgggtttccatggtcttggccagctccaatcttatggctttgcagggtacagcctccttcctggctgctttcatgggctggcattgtctgtgacttttccaggtgcatggtgcaagcagctggtggatctaccattctgcattctggaggataatagccctcttctcacagctccactaggcagtgcccccgtagggactctgtgtgggtgctctgaccccacatttcccttccgcactgccctagcaggggttcttcatgaagtccatgcccctgcagcaaacttttgcctgggtatccaggcatttccatacatcttctgaaatctaggcacaggttcccaaacctcaattcttgacttctgtgcacctgcaggctcaacaccatgtggaaactgccaaggcttgtggcttccaccctytgaaggcacagcctgagctctattttggctcctttcagacacagctggagtggctgagac

SEQ ID NO: 860083 - DNA, 622 bp, Homo sapiens
atttcttgtttaatgtcaacttttctgcgaaagggttttgaatgttattaaatgttttcattcttaaagggcatcttgtatgcttcatagattttctcttatgacatttgtatacacatttttgtgtgaaaataactttccaaaacacttgtataaatatctaatattagcattgttaatttgtttggtaagtatatggttaatttggtaaaaaacaaacaaaaaaactaccaaactgttttacgaaaagctgtacaattttgttttctcttctgcaatatgtgaaagttctagttgtttcttttgcatgttcagcagcacttggaattctccaatctcgatgaaaagtataaattcagagatctaagaagctcaaccagactctaagcacaagaatcagaaagaaataggctgtcttcaaactacaccaacatacatcttactcatattgccccaaatcagtattagcaaattttaaagcagtagtggggtaagtggaacacrtgttatgtatgaaggaacagaggaaggtatgacaaaacttttccctccataaaaatgccagtgggaagacatttaattaatatcaggaaagaattaaaaggaaaaaaaaatcctgtca

SEQ ID NO: 860084 - DNA, 374 bp, Homo sapiens
aaatgttccataaatatctgttaagtctactttttttcctagtgtattgtttaattttattatttctttgtaggatttctatcttaattatctgtctagtactgtcagtgaagtgttaaagaccmccactattattgtgctactgtctgtctcatctcttaggtctagtgctaattgttttgtacatctagattctgcagtgttagatgcacataaatttaagattgtaatatgttcttgttggactgttgtttttatcaatattaatgtcctttattgtcttttttaaaatgttgtttctttgaagtctgttttgtctgatataagaatagctactcccgctcacttctgatttccagttgtgtagaatatct

SEQ ID NO: 860085 - DNA, 374 bp, Homo sapiens
aaatgttccataaatatctgttaagtctactttttttcctagtgtattgtttaattttattatttctttgtaggatttctatcttaattatctgtctagtactgtcagtgaagtgttaaagaccaccactawtattgtgctactgtctgtctcatctcttaggtctagtgctaattgttttgtacatctagattctgcagtgttagatgcacataaatttaagattgtaatatgttcttgttggactgttgtttttatcaatattaatgtcctttattgtcttttttaaaatgttgtttctttgaagtctgttttgtctgatataagaatagctactcccgctcacttctgatttccagttgtgtagaatatct

SEQ ID NO: 860086 - DNA, 544 bp, Homo sapiens
acattctcttttgctcttaacggaatggaaatcttagaaatgttgatgggacaatgacatgaatcatgaaaagaaaggaatagtgggaatacraatattagaaagccaatgttttgtggatgtttgaaactctcatatacattcatagggcttaccccactggtatgggcaacaggtaactctggtagtttctaaagatgctcccagtgaattatgcctcctggtatgtggtccttatgcagttcccttctacactgaatcgagactggcctgtaatttgtgttcacaacgaatagaatgcagcaaaagcaaagccctgtctcctagagattctggtatgttgtctctttgttctcattggttttaaggaacttatttatttctgccttaatttcattatttacccagtagtcattcaggagcaggttgttcagtttccatgtagttgtgtggtttcgagtgagtttcttagtcctcagttctaatttgatttctctgtggtctgagagattgttatgaatttcgttgataaaattttatatat

SEQ ID NO: 860087 - DNA, 613 bp, Homo sapiens
ccaagaacttcgggacttcttttcatagtaccagctcttcttttcatcaaaggtcataaatagtaagacaaattctctcatgtccayaggcatgttgctgtccttatgtagtattcctttttggcagattaggaggggacctatcaagcctgagtgaatatctttttcctggaaaaacagagtaaattgtattgcctctttctcaggaatttccttgctcttctgataatcactcatcatatagaaaaggaaactttctgataggctctgaatttgaagatgaagattataaatgaatggcataataagcctggatatttatcacctaattctgttgtattcataatcctccttcctctgattgatctttatcccagtaacaatgatgataataataaattgataatataagggatactatttattgagaatctattactatattaaatgatttgcctgcaatctcccatttaatcctgacaactatcttatatggtaaatataaattcattcattgaacaaatatttaccaagtgcttaccatgcactatgtactgttatctcatttttaacttctgataccaggctaagagaggtcaaggaatttcctagg

SEQ ID NO: 860088 - DNA, 613 bp, Homo sapiens
ccaagaacttcgggacttcttttcatagtaccagctcttcttttcatcaaaggtcataaatagtaagacaaattctctcatgtccataggcatgttgctgtccttatgtagtattcctttttggcagattaggaggggacctatcaagcctgagtgaatatctttttcctggaaaaacagagtaaattgtattgcctctttctcaggaatttccttgctcttctgataatcactcatcatatagaaaaggaaactttctgataggctctgaatttgaagatgaagattataaatgaatggcataataagcctggatatttatcacctaattctgttgtattcataatcctccttcctctgattgatctttatcccagtaacaatgatgataataataaattgataatataagggatactatttattgagaatctattactatattaaatgatttgcctgcaatctcccatttaatcctgacaactatcttatmtggtaaatataaattcattcattgaacaaatatttaccaagtgcttaccatgcactatgtactgttatctcatttttaacttctgataccaggctaagagaggtcaaggaatttcctagg

SEQ ID NO: 860089 - DNA, 394 bp, Homo sapiens
atggtagaaagagggtgagtgagagggtcccttttataagggcactaatctcatcatgagggctccatcctcattacctaaaaatctcccaaaggagsggggagggatagcattgggagatatacctaatgctagatgacgagttagtgggtgcagcgcaccagcatggcacatgtatacatatgtaactaacctgcacaatgtgcacatgtaccctaaaacttaaagtataataaaaaaaaatctcccaaaggccccacctgctaatgccatcacactggaggttagatttcagtatgtgaatttttggaggacacaaacttccaatccattgtagtgatgtatctattccaaaggcgatgaaagtaaataagacttttttggtaaaagtact

SEQ ID NO: 860090 - DNA, 394 bp, Homo sapiens
atggtagaaagagggtgagtgagagggtcccttttataagggcactaatctcatcatgagggctccatcctcattacctaaaaatctcccaaaggaggggggagggatagcattgggagatatacctaatgctagatgacgagttagtgggtgcagcgcaccagcatggcacatgtatacatatgtaactaacctgcacaatgtgcacatgtaccctaaaacttaaagtataataaaaaaaaatctcccaaaggccccacctrctaatgccatcacactggaggttagatttcagtatgtgaatttttggaggacacaaacttccaatccattgtagtgatgtatctattccaaaggcgatgaaagtaaataagacttttttggtaaaagtact

SEQ ID NO: 860091 - DNA, 543 bp, Homo sapiens
aacaaggtttgaccaccctctcaaatcagttggcaaggctttgggctttgacactgaaaaagttctttgaagcttagttaccattcttacctgctatatgtgaataataaatgcagagttgctgcatgtagaagtttgtcttcatcatgtgcttcagcattcaaagatatcttgacgctctctttaagggattatctgacagggattagatgcaattttaactcctgtcccatagataaacacctacttagagcattatcattaaataattttcacaaagaacaagtaatttttaaaagatactattcaaaacatattattaaccagagaagtctttccaagaaggccttaacctgattatttggagaccacattttcttaatgtatgtgtccattttacccacacttccagtaataaagatactcgctctctgtatctctctctctctcactcacacacacacacacacacacacacaatcacatgcacacattatacacccttaggcagaaagaacaarcagagggaaaaaagagtatatg

SEQ ID NO: 860092 - DNA, 612 bp, Homo sapiens
gatctcggtgccataagtgcagtcctgaggagaaaggtgagcagttgaggggcagcgggctctccagycctccctgcccattgaaccaactcatcaagcaagggtaagcccaaccgagaggcagggataggttgattttcccagcaactcactttgaggggatcccactccttgaagtactccttcatgagtggatagacgatggccacagcaaggtccacacggtcggacatcctgtactcctcatagtacttgtcctgcagggtttcgaagatgcgggcacactcgtccagggtgagggggttgctgcagtcgggctgcatccgccgctcgcactcctccaccatctccaggaccttgctgaggttcgagatgacccgctcctcgtggtccaggacctcggtcatcttctccagctcgtggaagaggttgaccaccatgtcccgctcatactgtagctgccggtcattctggatgatctcctgctccgtgaggtcgatgagcagctgcaggttgtgctccagctcgggcagcgcgaagccgggggccttggcctctttgccagactgtggcagctgttgggactgtagcggcagcccatcatcgggaacg

SEQ ID NO: 860093 - DNA, 553 bp, Homo sapiens
ccaccctccccagcttccctgggggcaaatttcttcttccctttgaaaaatcacataaagattgggagtcccgaagactggtcagggccaaagtaatcaaaatgtacctggacttcggatgtgctaatatttacagtaatattggtacaaggtgagttctgaagaggtggcttcctggaggcttaggatcagggctgcagatgggaaattagaaacctaggatggggactcagcgtttgtggaggggagaggattaatgacgagcagagacaaagatgcaattttcaagaaactgtgagggagcaggtgggaagtgccccgcagctgtcaaagagtcaggatgatgcactggggcagaggaggcttgagaaatagcgggtgggacagtttcagggcaatgtgggaagaggagccctcctggacccctgggccctgggcgcacactcccaatgtggagagactggtctagctcaatgttctgggaaggttttgggtgaagtggatccamgagtaggtctgacctaaggcacaaaagactgttttcctggtgatc

SEQ ID NO: 860094 - DNA, 600 bp, Homo sapiens
ggataaagaaaggtaaagcaggttttcacccaaatgtgggaggtctttttctgcagaaggattttctaccttctagaaactgaagccatcctaatgttcagagtgtagagagtgagaatgaggactkgaggggttcatggcaggcccatgaaaggtctgtgcccaaactcagaggggatcaagttggtcaccatccatctcatcaaaatgtccctctgaggcccactctccccctctaggattcaccaggttgggaaagatggcccaggcagctgaaccttcaaagatcaggagaagccattaacatcgcatcccctgtcagtcacacacagacacagtagtgtgtgtcagaaccttgaatgtcttttatttcaggattaggaatggatgattacaaatgatttgtgccatttctagctctccctttcatccaggtacccattaattttttttttctttttcaggtgccagcatttaaaaatccatccctggtcccaacccactaaatgcttccagagctccccagtcacatttccaaatgcccccaggttgggatccatccctggttgtgtccccactgtggcccatgcaggtgggact

SEQ ID NO: 860095 - DNA, 693 bp, Homo sapiens
ctcagtcttggtttttccttgtataacatatgacccccttgagctctactggtcactgattctctgtccccacccgcttgccakttaccccagcatctccctgctccccaaatggcagaccatcaaaccttagagttatcagccacggtcctctcctctctaggcccaccaggcttggggtcctgcagcctgctgggtgattccccctccccgcactcccccaatcctgccgctctgtcatctgctgtaccacgtgcacagtaccagggatccagaagagaaggctggttgccagggcaacggaagataaagcccttgctctgccaggctgctgattggctgagacaggtcccacctcctgccatcctgagagtgggggctagggggaagggtctctgatgggcagggagagataccagggtgctgagccagtccaggactgccccctcctggcccactcagagcccctgggtgtgagaagctcgtctcccgtgggttgcattggctctgccctatctctgcctccagcacccagggcggccgcagatggcagtgtctctggggacagcagctgcgaatgagtccacgggccaatgctgagctgctcaggctgaggcggtgtgctcagcacagagcccccggaactggcatctgcagggcgtgaggtgggtctttgggcacacggagggcacc

SEQ ID NO: 860096 - DNA, 693 bp, Homo sapiens
ctcagtcttggtttttccttgtataacatatgacccccttgagctctactggtcactgattctctgtccccacccgcttgccatttaccccagcatctccctgctccccaaatggcagaccatcaaaccttagagttatcagccacggtcctctcctctctaggcccaccaggcttggggtcctgcagcctgctgggtgattccccctccccgcactcccccaatcctgccgctctgtcatctgctgtaccacgtgcacagtaccagggatccagaagagaaggctggttgccagggcaacggaagataaagcccttgctctgccaggctgctgattggctgagacaggtcccacctcctgccatcctgagagtgggggctagggggaagggtctctgatgggcagggagagataccagggtgctgagccagtccaggactgccccctcctggcccactcagagcccctgggtgtgagaagctcgtctcccgtgggttgcattggctctgccctatctctgcctccagcacccagggcggccgcagatggcagtgtctctggggacagcagctgcgaatgagtccacgggccaaygctgagctgctcaggctgaggcggtgtgctcagcacagagcccccggaactggcatctgcagggcgtgaggtgggtctttgggcacacggagggcacc

SEQ ID NO: 860097 - DNA, 618 bp, Homo sapiens
ccagcactcaagggagagagaaacccacaccttcagagcattgagagggaaaatgactgcaactgcaaggaaacacaggggagctacataattragtgagagtttaccaactgaccaataagcttaagtgtcacctgctgaaccacaccccaaagcttccacaccaaaaatacctcactaacagacacccctgaaaccagaggcaagaagacggcttcaaataaagatcctgcacaaaacctcagcccagtgaaaacatccagaaaagaagtctattgactgtactcaatctacactgcagttaaaggaacacccacacgcagaggtgaaaatgaaccaatgcaagaactccagtaattcaaatgaccagagtgttgtatgtcctccgaatggctgcaccagttctccaacaagagttcttaaccagaccgaactgactagaattacagaagaattcagaatatggataggaacaaagatcatcaagattcaggatggcaaaactcaatccaagataagaatcacaataaagtgaaacaggagctgaaggacgaaataatcaatataaaaaagaacctaacaggtctgacagagctcaataacataatacaagaattt

SEQ ID NO: 860098 - DNA, 618 bp, Homo sapiens
ccagcactcaagggagagagaaacccacaccttcagagcattgagagggaaaatgactgcaactgcaaggaaacacaggggagctacataattgagtgagagtttrccaactgaccaataagcttaagtgtcacctgctgaaccacaccccaaagcttccacaccaaaaatacctcactaacagacacccctgaaaccagaggcaagaagacggcttcaaataaagatcctgcacaaaacctcagcccagtgaaaacatccagaaaagaagtctattgactgtactcaatctacactgcagttaaaggaacacccacacgcagaggtgaaaatgaaccaatgcaagaactccagtaattcaaatgaccagagtgttgtatgtcctccgaatggctgcaccagttctccaacaagagttcttaaccagaccgaactgactagaattacagaagaattcagaatatggataggaacaaagatcatcaagattcaggatggcaaaactcaatccaagataagaatcacaataaagtgaaacaggagctgaaggacgaaataatcaatataaaaaagaacctaacaggtctgacagagctcaataacataatacaagaattt

SEQ ID NO: 860099 - DNA, 562 bp, Homo sapiens
ttacaatctagggctaatttaggccaactgctatggtgcagtacccttctgaggactctccttgatgctccatatatcatataaaaaggcctttcactctggctggtagaaacataaactcttctcagccttgtgctgtctctgagttgtttggtctactttctggcaattctttccccagcctcaagtagtttgctgtacacatgtgacagattagtagccaaagactcatgggaactcctctgcagatcctgtagcttattttctgcatactcccctcatctctccagtattctttcctgaaaataaggctacattggcctccccgaagtgcaatctttgtcttttcaactcagagaacgttgggctctgttgtgtttcctctacctggtctactggtctggaaactgcctctagacagtaagacagagcaattctacagctcacctaatctgtttccatactttcaggggtcatagacctgtgctgccyatcacccagtgtatgaaaactattgtttcgtatattttatctagtttctagatgtttaatatgggagaat

SEQ ID NO: 860100 - DNA, 489 bp, Homo sapiens
agaaagggtcatgattgggaggcatatatagagggcttcgagggtgggcttttgatgtgggtgatgataactgtagatgttcactttaaaattatttaayctgagcatatctgttatatattttaccataaaagtatattttatattttacaatgtaaaatgtattcaatattttacaatttaaaatataaaaattttcagctatatcaccttttccatggccaaaggagtagttgtgatgctttgttgttctcagagaccttactcgcagtaatggttctgaaacgttagtgtgcatcaggatcacttggattaaatatagattcctgggccctgactccaaagtatctgatttggaatatctggtttagagcccaagaatctgcatttgtaataagttcccaggtcatgctaaagatatttttgcatggaccacactttgagaatcaccagatagcaaagctgtacctatctatagaaccatgctgg

SEQ ID NO: 860101 - DNA, 583 bp, Homo sapiens
aggttaaatgatgcactcatcagagcccagcagcaaatagatggcacagttaaatcagtcyggttcaagaagaatttaataaaggtaccattcaaagaggtgctgacagtgtattagttttctattgctccataacaaataaccagaaacttagtggctttaaacaacacccttctattaggtcatagtcctgtaggtcagtagttcaggcacagcatggttttctgctcagagtctcacaagattgaaattaaggtgttgctggggctgtgatgccatctgaggctcaaagttctctttcaaactctctcaggttgttggcagaactcagtttcttgcagttgcaggactgaagtccccacttccttgctggttgttgtccagggattgcttttacctcctagagaccaccctcagtccacagacagttcacagcctggatatctgctccttcagggccagcaaatggctgtctctcacttgaaatctttctgacttctaagggtcacctgattagaccaggcccacccaggataaccttccttttgattaactcaaagtcaacctaagacagtatgaaatc

SEQ ID NO: 860102 - DNA, 595 bp, Homo sapiens
tctgtgaatttcatttcagaattcatgacctgatagattgttayagaaagatgttaggcctagtagtgttgacacccccgattaaaacagacctggtgatgtatctatcccaagctctaaaccactacgttggcctaagcctgttaggctaacagtgtgaaattaaaattaaataaactctttcattttacaggtcagtaagtgcattttaaaaagctaattagagttggtatttctttttcaactgggcacatcctgaatcatacaattatagattattatattattatagattattatattacaattatacaattactgtttgctttctgtttccatgggctttcttctttcacagtcaaggctgtgagctcttttagagcaaaaattccatctcgtccaggtcatggctttccccatattgtaaccagaagagtgtgtgttttgaggatttaaatttattgatcatctcttatgtgttcaaggtctgggtcacattcattcttagtatctgttgtgcacccacctgtgccagggacactgctaggcactttgcagatatgatctccctgaacacttcaaacaactctttgct

SEQ ID NO: 860103 - DNA, 545 bp, Homo sapiens
ttatttgcaaatgctgtcaaaacatgctttccttctccctggctacctctcaggagttcatttgtctctctrtctcagcttcctccctcatcttcctttacccctcttctctgtcttagtgggtggatgggcatggatagaaatcctctgtttctttaggttaggataaacacctgggccctggtgaggcagttgctgttcagcaccagggacagcaactgcagggctgtgaggccggagcccaccttgtgtcctgttcgatgagctttggttactgatgagcaattgccagatcatgtcacccacccagccttttacacctgggagcctcatgcatctgggtttgggagtttggccctgctgatgatagtttgttttctcttcattccctgaattagtcatcagttctccgtggccatttggggattcatgcctgcaactgcttcagtcgaattcttttttaaagatccagtttatgttttataataattttgatcttatggctttcaacgtcaataggatcccctttaaaaataccctgctag

SEQ ID NO: 860104 - DNA, 587 bp, Homo sapiens
gggtggggatttctcatgaatgatttagcaccatactcttggtgctgttctcttgacagtgagtgagtgagtgagttattgcgagatctggttgtttaaaagtatgtagcacatcctcctctctctcttgctcctgctcttgccatgtaagacatgcctgctccccattcaccttctgccatgattgtaagtttcctgaggcctccccagaagccgagcaaatgccagcatcatgcttcctgtgtagcctgcagaaccacgagccaattaaacctcttttcttaataaattacccagtctcaggtatttctttatagtaatgtgagaatggaccaatacatatattttggtttttcggagtttttttgagagagggtctcactgtcacccgggctggagtacagtggctcaatcttggctcactgcaacctccacctccaggttcaagcgattctcccacctcagtctcgcgagtagctgggaccacaggtgcacaccaccatgcccagctaagctttgtrttttttggtagagacagggtttcaccatgttagtcaacctggtcttgagctcctgacctcaggtta

SEQ ID NO: 860105 - DNA, 599 bp, Homo sapiens
tagagcttgaaagtaagtgaagtaaaactaagagaattgaaaggagaaattgacatattcacaatcatagttggaggtttcaacactcctttctcagcagttggtagaacaggtttacagaaaatcaaaaaagrtgcggaagacttaacagtgaaaccagtttgagctaatagacatttataaaacactccttccatcaagcgcagaattcttactctttttaagtacacatgaaaattaaccaaatatagaccatattctggttcataaaacaattctcattaaatttaaaagggttggaatcatatagagtacgttctctggccacaatggaattaaacagaaatcaacagaaagatacctggaaagtctcaaatatttcaaaattgaacaacccatgagtaaaacaagaagtcacaagaaaaattagaaaatattttgaactgagtgaaaataacatatcaaaatttgtgagatatagctaaagaagtgctttgaagatttgtagcattaactgtttatattagaaaaaaataaagctctaaaattgatgatctaggcttctgtctgaagaaactagaaaaagaagagcaaattaa

SEQ ID NO: 860106 - DNA, 611 bp, Homo sapiens
gcccctgatcctacatactcacaacctcacctgctaacagcattccccactacagcagtwcatgtgatacaattgatgaacccacactgacacggcattttgacccaaagtccatagtttacattaagagtcactctgctgttacacattctatgggtttgaacagatgtataatgatgtgaatcctccttcagagtaatgtacagaatagtttcattgccctaaaactcccctaggttcctcctgttcatctctcctcctcccaccccactggcaaccactgtctccatagttttgccttttccagaaggtcacatagttggaaccatagagcatgtggccttttcagactggctttcactcagtaatgtgcatttaaggttcttctctgtttttttcatggcttgatagctaatttctttttagtgctgaataacattccattgtctagatttaccacagtttatccattcacttactgagggacatcttggtggcttccacgtttgggtaattatacagttgctataaatgtccatgtgcagggttttgtatggatatgagttttcagttcatttgggtacatgccaaaaagcacaattgctgaattg

SEQ ID NO: 860107 - DNA, 633 bp, Homo sapiens
aaaggcaaaaacatagtttgaaaacacaagtcagaagcagacatgacagggatgttgaaattatcagactgggaatttaaaataactatgattaatatgctaaaagctctaatgaataaagtagagagcatgtaagagcaatataagcagagagatggaaatcctaagaacaaaaaataaatgctagagatcaaaaacactgtgagagaaatgaagaatgcctttgacaggcttattagtagacaggaccccgctgaggaaagaatctctgagttcaagagcatatcaatagaaacctacaaaactgacaagctaagagagcaaagactagaaaagaaaaaccataacagaatatccaaggattgtgggataagtacaaaaggtatactagatgcataatagaaatatcagaaggagaagaaagaggaaagtaacatcagaaatacttgaagcaagaaagactgaaatgttttccaaattaaggtcaaacaccaaaccacagatccaggaagctcgcagaacaccatgtaggatatatgccccaaaaccccaacacataggcatataatttgtaaactacagaaaatcaaagataaaaaattttaggtcaggcayggtggttcacacctgtaa

SEQ ID NO: 860108 - DNA, 610 bp, Homo sapiens
gtgtacttaattttaccctaggttttatactttcagatgttttctttttatacgtgagtgtttttttctttcagtttgaagagctccctttagcatttcttgtaagacagatgtggtggtggtgaattctctcagcttttgtttgggagagatttatttctccttcatatttgaagttcagttttgctggatacattattcttggatgacagttgaggattttttttttctgttcaacactttcaaaatgtcataccactcactcctggcctgttgagtttcccttaagwattctgttgccagatgaactggagctgctttacatgtctgcctattttctcttgccacttttagggtcctctttttgtccttgacctttaagagttttgattattatatgtgtcagggtagtcctatttgggtcagatctctttggtgttctctaactttcctgtatctgaatatttatctcttcttcaagttttggaaatttttctgttattattttttgaacagcttcctacccctggtgcttgcttaactccctcttaaacaccagtaattcttagatttggtcttttgaggtaattttctatatcttataggttat

SEQ ID NO: 860109 - DNA, 620 bp, Homo sapiens
gtttaatgacttataacaccatctggtttaagtggatattgtttgatattaggcaggggttttgatggatcaagctggatttttataggaggtatattataaagtttgccaatatcaacagttttgcctatacagagacaggtattagattcagcagtgaaagggtgtgatgtagtttgtatatttgtccccaccccaatttcatgttgaattgtaatccccagtgttggaggtgggtcttggtgggaggtgattggatcatgggggcacatttctcaggaatggtttarcaccgtccccttggtgctgtctttgaaatagtgagagctggttgtttaaaagtgtgtggcgtccttcccctcccactctctctctcgttcctgctttcgctatgtgacgtgcctgctcccctattgccttctgccatgatggtaagcttcctgcgacctcatcagaagctgatcagatgtccagcaccgtgcttcccataaagcctgcagaactgtgagccaattaaactcatttttctttataaattacccagtctcatgtattctttatagcaatgcaagaacagcctaacacaagatagcattatttttgttttgtcagtgggaatg

SEQ ID NO: 860110 - DNA, 620 bp, Homo sapiens
gtttaatgacttataacaccatctggtttaagtggatattgtttgatattaggcaggggttttgatggatcaagctggatttttataggaggtatattataaagtttgccaatatcaacagttttgcctatacagagacaggtattagattcagcagtgaaagggtgtgatgtagtttgtatatttgtccccaccccaatttcatgttgaattgtaatccccagtgttggaggtgggtcttggtgggaggtgattggatcatgggggcacatttctcaggaatggtttaacaccgtccccttggtgctgtctttgaaatagtgagagctggttgtttaaaagtgtgtggcgtccttcccctcccactctctctctcgttcctgctttcgctatgtgacgtgcctgctcccctattgccttctgccatgatggtaagcttcctgcgacctcatcagaagctgatcagatgyccagcaccgtgcttcccataaagcctgcagaactgtgagccaattaaactcatttttctttataaattacccagtctcatgtattctttatagcaatgcaagaacagcctaacacaagatagcattatttttgttttgtcagtgggaatg

SEQ ID NO: 860111 - DNA, 450 bp, Homo sapiens
tgcataaatgtcttcttttgagaagtgtctgtttatatccttggcccactttttgatggggttgtttgtttctttcttgtaaatttgtttaagttctttgtagattctggatattagccctttgtcagatgggtagattgcaaaaattttctcccattctatargttgcttgttcactctgatattagtttcttttactgtgcagaagctctttagtttaattagatcccatttgtctattttggcttttgttgccgttgcttttggtgttttagtcatgaagttcttgcccatgcctatgtcctgaatggtattgcctaggttttcttctagggtttttatggttttaggtctaacatttaattctttaatccatcttgaattaatttttgtataaggtgtaaggaagggatcctgtttcagctttctacatatggctagccagttttc

SEQ ID NO: 860112 - DNA, 652 bp, Homo sapiens
tgttgatcctaaccctgtgtcagcctaggctaatttatgtctttttttttaacagaaaagatttaaaagtaaaaaaaaaattaaatagaaataagtttctagaatgaaaatataaggaacaatatttttgtacagctttgtaacatgttggtcttttaagctaagtgctattacaaaagctgaaaagttttaaaaattaaagtttataaagttaaaaaagttacattaagctaaggttaatttattattaaagaaagaaaattatttttaaaatcaatttaktgtagcctaagtgtacagcatttataaaatctacagtagtgcacagtaatggcctaggccttcagttcactcaccactcacttgctgactcacccagagcaacttccagtcctgtaagctccattcatgatgagtaacctatataggtgtgccattgtaaaaatctttttaccatatttttactgtactttttctgtttacatatgtttagatccacaaatacctaccattgtgttacaattgcctacagtactcagtatagtaatgtgctatccaagtttgtagcctaggagcaataagctttatgatatagcgtaggtgtgcagtaggctatatcatctagctttgtgtatggacactttatgatgtt

SEQ ID NO: 860113 - DNA, 633 bp, Homo sapiens
tgtgctatccaagtttgtagcctaggagcaataagctttatgatatagcgtaggtgtgcagtaggctatatcatctagctttgtgtatggacactttatgatgttcacgtaagaccaaatcacctaaggacacatttctcagaacctatcttatcattaagaaagaatgactatatatgtaatgtaagtcctttgaagtttaagcattttcactttcatatatttgtctcatttaagaaatattttccattccagcaggtacagctaaaaaaaaagaaaaaagaaaaaaagaaaaattttcttgctcaaatgttttaaggttatcctcctaataacattggtagtagttttattttttcatatttgtctttaccgcttatataattttttgtttatctcaaggtgtagagatataatttaatcatagggtgtttagtaaaatatcaatgctgggaaagggcttaggagataacgrtgaatcaaaacacagcacaaaggccaggtactgtggctcactcctgtaatcccagcactttgggaggccaaggagggtgaaccacttgagcccagaggttctagaccagcctgggaaacatactgagacctcgtctctacaaacacatgtcaatcaat

SEQ ID NO: 860114 - DNA, 609 bp, Homo sapiens
agataataaaagttaataagataataacaaaacaacaaaaataataataccgaatattatggcacagctgcaaacacctcatagcaactaacagttgtcaatccctgaccacaagaaataagtgctgttagtttcccatttaatatatgaggaaactgaggcatcaagagggaaagtgctggtgagacctgggtagggagttgaatccagtggagccagcagacccaggagctggcaccagagactgaaattccagctgtatggtgccctggtggtctcctgtcccaaccaggtgttgatctgggcttygtaggctcatgtgctctggagaaaagagagaaacagtaaatgctccactgggtgcagagtgctgcttttcattccctgaggatttctccctcctcagaaactccgaaatcagattcaccctttctctgagggaagaactgacgcccccactttttcctccctcccatcctagtttctccagcctccaccagtctcctcctgtgattccctcaacaatgatacctgccctgtgcccaccatccaccatgtggggaatgaaagggcctcatgactaaaggacaagaatcagatccaggaggg

SEQ ID NO: 860115 - DNA, 544 bp, Homo sapiens
tgattgtaacctcagacaagtgtaatagaatagtaaaataaggaactctgtgaaaagggctttttctgctttctcccagaacatctcatttgcatctgtgtttggctggatgaaaagtggcttccatatcccctgacataatgcaacaagcagaaacacttgctcagtaaacaagtacttcggaaaatgcagggtcttgaacactgccctcagggctccacacatcagaaggacatatatatctttccttcaaccccagagatgcccaggggctgcatgttggctcctcactggtcttactcatgtcctactggaagaggacggtgcttctctggaaatgtcagagtggtgtgggayagccagttcctctgtgtgccctgcaggaaaacaaacaattcagcttttcaatcccactcagtatctgaaaataaactgggttttcaatgtattcccctccagagagtaaattgcggaggaaacatgttcaaacgcacacttaattattttccgagtcaagaatgtaagtatgaggccctttaagacg

SEQ ID NO: 860116 - DNA, 544 bp, Homo sapiens
tgattgtaacctcagacaagtgtaatagaatagtaaaataaggaactctgtgaaaagggctttttctgctttctcccagaacatctcatttgcatctgtgtttggctggatgaaaagtggcttccatatcccctgacataatgcaacaagcagaaacacttgctcagtaaacaagtacttcggaaaatgcagggtcttgaacactgccctcagggctccacacatcagaaggacatatatatctttccttcaaccccagagatgcccaggggctgcatgttggctcctcactggtcttactcatgtcctactggaagaggacggtgcttctctggaaatgtcagagtggtgtgggatagccagttcctctgtgtgccctgcaggaaaacaracaattcagcttttcaatcccactcagtatctgaaaataaactgggttttcaatgtattcccctccagagagtaaattgcggaggaaacatgttcaaacgcacacttaattattttccgagtcaagaatgtaagtatgaggccctttaagacg

SEQ ID NO: 860117 - DNA, 662 bp, Homo sapiens
agattttatttcttcctttcctatctattgttttttttcttttaaaaattatttatatttagtaaagacaggggtctaactatgttgctcaagctagtctcaaactcttgaactaaagtgatcctcccaccttggcctcccaaagtgctgagattacaggcatgaggcaccacacttggyccttttattggtcttttatttcattttcttgccatattgcactagttaggatgctcgtaaggtgttttaaacaaaaatgaggagagccacatctttgctttgttgctaatcttaggaagtaagcatctggcctttcataattgaatatgagggtagctgtaaacttttcgtgggtgtccttaaccacattgaagatattcctttcgattttgtttgctgagctattttgtcatgaaatggtcttgattttgcaagtgctttttctgcattgactataataattgtgcaacatttgttctttgttctattaattgggtgaattgtattgtttaattttcagatgttaaaccaaccttactttccctttaaaaaaaccaatatggcatggcatattattcattttatgtatatcttaattggataacgttttgtattgaattgtgagtctgtgttcaagaggaatatttgttcttgattctttt

SEQ ID NO: 860118 - DNA, 662 bp, Homo sapiens
agattttatttcttcctttcctatctattgttttttttcttttaaaaattatttatatttagtaaagacaggggtctaactatgttgctcaagctagtctcaaactcttgaactaaagtgatcctcccaccttggcctcccaaagtgctgagattacaggcatgaggcaccacacttggccctyttattggtcttttatttcattttcttgccatattgcactagttaggatgctcgtaaggtgttttaaacaaaaatgaggagagccacatctttgctttgttgctaatcttaggaagtaagcatctggcctttcataattgaatatgagggtagctgtaaacttttcgtgggtgtccttaaccacattgaagatattcctttcgattttgtttgctgagctattttgtcatgaaatggtcttgattttgcaagtgctttttctgcattgactataataattgtgcaacatttgttctttgttctattaattgggtgaattgtattgtttaattttcagatgttaaaccaaccttactttccctttaaaaaaaccaatatggcatggcatattattcattttatgtatatcttaattggataacgttttgtattgaattgtgagtctgtgttcaagaggaatatttgttcttgattctttt

SEQ ID NO: 860119 - DNA, 474 bp, Homo sapiens
tatcaggggtttctgcttttgcatcttcctcattttctcttgttaccgccatgtaagaagtgcctttcacctcccgccatgattctgaggcctccccaaccatgtggaattctaagtccagttaaacctctttttcatctcagtcytgggtatttctttatgagcagcatgaaaacgcactaatacagtaaattagtaccagtagagtgggtgctactgaaaagacacccgaaaatgtggaattgactttggaactgggtattaggcagaggttggaacagtttggagggctcagaacaagacagaaaaatgtgggaaagtttggaacctcctaaagacttgttgaatgcctttgacaaaaatgctgatggtgatatgaacaataaggtccaggctgaggtggtctcagatggagatgaggaacttgttgggaactggagcaaaggtgactcttgttacgttttagcaaagaga

SEQ ID NO: 860120 - DNA, 479 bp, Homo sapiens
ttcctccccaacccgtctctttcattatacagaaagagaaggcaggtgagaagtgacagatgtcaccctgcaaatattcagaatctcctgcttttaaatttggaggacagtactaagcagtgtttaggactattttaccataatctgtgaaccatttaaaatatataactgaattattattattattgttaattaaattcatataccyagatgccagaaaagcctccacaatttttcatttgatacttattagaattatatgatctagatggaaagggcctcaggtgctagggtgagaagagctcagcccaggggtcagaagacatggtctgctactcttcaatcaactgctgggacgttgggcaggacataagttttttgagcttcctcatgagcaaagcaagagggttgactagatgacccctaagatcattctggagctgaagttccacgaaactatgagatctactagtttacaa

SEQ ID NO: 860121 - DNA, 634 bp, Homo sapiens
ggatccagcatcatgagatatttgggatgcatagaaatagggatacactataaaggattatggcacgacttaaatagcataaactcggtgacaatcagaacctctcttgactttcagatcttttgcttgtaattgaatggcttcagtcaaggaacttgagcccctactctggtactgggggcatatcaatgcacaggagacaaatggaagccctgccttcattagatttgggggtgaggggtaacgtataattacataaatagtaaataacaattttaaatagaagtatattgatgaaagggcagtgggataaagagtgactgggctatgcagctagacatatcaggaaagactggtmtgaaatggggacattgaagctaagaaccaaataatgaggaggcaaaaaagctgaggaaaaggcatactgtgtatgagatatagaaaatgagactattctaaagcagagatctgaaatgtggcctaagatgtgggcaggaagcagattacattacgataaggaattaggaatttcatctagggataatgggaagccactggatggtttcaagcagtggagtgaaacgataaaatatacaatttttaacttactcatgctcctctctggagagtggat

SEQ ID NO: 860122 - DNA, 541 bp, Homo sapiens
gtagggaaaagttagcaataagtctcaggaggtttttttaaaatattgatggtcccatgcctaataattctatgtgtgggaaaacatctaatgtaactgaccaaaactttagatacagacttatgtgcaaagatgttcatcacagacayatgtaattgcataattgcaaagaaagaaaagaaaaaggaaatgaaatagttaaatagttctaattccccaaattataagtacataagtaaatcatggtatatgtatatgttggcatattatgtgattgtattaagtaataattgtgaagatttcttaacaacataaaaaattatgatatatgagctggattaaccaaagaatacaaagttgtaagtaccatacgtcaattccattgaaatgcatagattaaaaactgaaagactgtatgtgaagtattaatattggttaattctgggggctttacagttaacttattttccatataattttctgtatttcccaaagatgcaataatgaatacatattacattttaactaagcaaatacatca

SEQ ID NO: 860123 - DNA, 598 bp, Homo sapiens
ttggaagagaggaattgaggaaatacagtagttaatgagtagtggcataggataggggaggaaaataaattgaatcctggagtttcagtaggaatcaagtgcacttgggtagctgacaaagttgggatttgacttattgctccagtattctctcttagattagcctatgtrcaactattacctccacatcgtaaacttgattggtctctttgcttctagtccattctatactcaaatgttacattaatgtccccaatatttcatcacctggaggactccagactgctaaaatgcccctttagcaattcctgacctcttctccctacaatatgagaagaaaaagttgctgtagggaaatctactaaaagtcaaggatgtgacagtattcctcactgaattaagcactaagtataagagagctattttattgctaagattgatgaatgggcattagtacattgttaatgcacttaaaagggtattgcactaaacttgagctctttgaggacagagaccaggctgtgtggtcttccagaggaggacacaatgtgcacagtggataattgaagaatgcatgcattaagaaattaatgaaagt

SEQ ID NO: 860124 - DNA, 598 bp, Homo sapiens
ttggaagagaggaattgaggaaatacagtagttaatgagtagtggcataggataggggaggaaaataaattgaatcctggagtttcagtaggaatcaagtgcacttgggtagctgacaaagttgggatttgacttattgctccagtattctctcttagattagcctatgtacaamtattacctccacatcgtaaacttgattggtctctttgcttctagtccattctatactcaaatgttacattaatgtccccaatatttcatcacctggaggactccagactgctaaaatgcccctttagcaattcctgacctcttctccctacaatatgagaagaaaaagttgctgtagggaaatctactaaaagtcaaggatgtgacagtattcctcactgaattaagcactaagtataagagagctattttattgctaagattgatgaatgggcattagtacattgttaatgcacttaaaagggtattgcactaaacttgagctctttgaggacagagaccaggctgtgtggtcttccagaggaggacacaatgtgcacagtggataattgaagaatgcatgcattaagaaattaatgaaagt

SEQ ID NO: 860125 - DNA, 659 bp, Homo sapiens
ttagaattagaattagttaacagatacaattcttagaagaatacttggtacatcatgaacatcttgtaaatgttagctgctattattagtagtattaattattattacttgagacacagtcttgctctattgccaaggctggagtgcagtggcacaatcatacctaactgcagccttgaccttccctggtcaagtgatcttcccacatcagcctcttgaatagctgggaccacaggcatatgccaccacccccagctaatttttttattttttatagagacaggctctcaccatgtttcccaaactgatcctgaactcccagcctcaagtgatcctcctgcctyagcctcccaaagtgctgggattacaggtgtaagccacggcacgtagctattatcattatttttagtcttttattcctgaatgacagagctttctgggcttaataataataattactatgtatggagcaccttctatgttccaagcctgtgcctggcactttacattaattatcttatttaatcctcaatgactgtataatgtagtattattatttctatgtttcaaagaagtcaattgaggttcagagaatttatagaactaagtaagctgcaaggctggatctccaagccagcgtcatgtgattcccaagccca

SEQ ID NO: 860126 - DNA, 669 bp, Homo sapiens
caagccacacaagcacattggagcttctgctcatggtgcatccactaacactgcatttatcaaagcaagtgacaagcccaaagtcaatagggtggagatatttcctctgcatactaggagccatggcagggtaagaaggaagggagaactgtggaaaatcacataatatgccacaggtacyatctctaataagacaactacttgcctaaaagccaatgccctgggcccctgtaggcctatgtttgtttgaatggtgtcagaggcttcataaagcttctaggattggccaggctgttttagataatggaaagggagaactgggaataaaaaatctcatttcttgtccagctgctaagtggcctttggcaagtcacttctctctgggcctcaatttaattatctgggacatgagagagatggataggaagatttccaatgtccttttaaactcacacctctgaagactctaagaaagccagtcttcatgatcctaatccaagatctttgagaggctgttgtcttcaagccagtggtgcatgccctgccccagcagagaagtctgggaggaggtggtgtctgcacagccctccccaaaggggaagtggggaggagagggctgagagaagccccaagtatatttctctgtgcacttctaaaagcccttagatc

SEQ ID NO: 860127 - DNA, 674 bp, Homo sapiens
gaaaaagtggaaagtactgaaaggagtagctcagcaaataaaacagattcctggggacaagagttacatccaaataatcttcaaaacatttgtcaacataatcattgttaagtgtagaattcaatggcatgaactatattcacaatactgtgcaaccatcagtgctatccatttccagaacccttatcatcccaaactgaaactttgtacccatgaataactccccatccttccttcccccaccctctgtcaaccactgctatgaatctgcctattctagatacctcatataagtagacacattctgtatttgtccttttgtgttgggcttatttcactaagcatcatgttttcaaggtgcatccatgttgtagactgtgtcagaatttccttcctttttagggctgaattatattccattgtatatacatactgcacgtcagggaatcttctgacagtgggcttgggattcatagacacgcctgagttctgcgtgtccttgggmaacttgctgtgtgaccttgagcaagtcacttagtttctctgagtttcattttccttatctttaagtgcacacacctttctttttatttagaattttattgtgaaaatcaaataaggtaatgtatgtaaagagccttataaatagcaaatgatcacattgagtaatattg

SEQ ID NO: 860128 - DNA, 643 bp, Homo sapiens
caaaaacctggagagagtaattctatgagaaatcatgctgaaaaagcagattgtagtagatcctttagagatttgaatattatgttaggaacttcggattttcttcagtagaaagcaggaagtagaagtaattgaagccttttaagaagggaaattgcagaatttatatatgtgtgtatattatatatgtrcatatacatatatattatatatatatatatatatatatatatatatatatatatatataaaatatcttgatcaaagcatatagtatggattgcagacggcagagagtggagcctgggagatcctaatagtccaacaaggagtactgagtactttaaccagggcagaagcagtgggagagagacatgaagactgacctcaaggatgtggaatgtacaaaggcagggcaagtgatcacaaatgagggagtgaaagtaacttagagagaggccagaaggaagagcaggtggacgtactgatgtgatggattttgccgtgaacttgttgaatgctcactgatgcaagtgaaagtgcccaggactctattgtcaacatggagttgggagtggatgaaatgcgtcagagtgtagaaacaattcatggttgaattgatagcatctgataaaacatctct

SEQ ID NO: 860129 - DNA, 589 bp, Homo sapiens
acttttttcttagttgtttattttaggggtgaaattcagtcagagactctacagggtccctactgggtaggccttcttttgctgtttagatttcatgtggcagattgtagtaaggctctcctaattcttaacatatttccagtttttattaagtttaaaaatttawgcctttcctatcattccataactaaatatagtaatgaaattttatctgaagtcaggaacattatccaaatctgatttgatgtgtgtagggtactgcacattcattgagtggtacagattgtgttaaatgggcctgaaataatgttcaggaaagagaatcactttctgttcttcttgacacaaacagtttgtcacagacatgcattcatctccctatcttgttagtgtagtcgttatatttttcattacaagttttatgcaaatcctctagttttccttgattaggtttacatgaatacattgtaattatagactgggtgttattaatatatgtgattaaacatgtaattaatatgtgtaattacatagagtcatggcagagctgggctctatgctgatttattgtataggtgctgcttacaca

SEQ ID NO: 860130 - DNA, 630 bp, Homo sapiens
ctggaggttcctctttgtggtggcagcagctacaggtaaggggcttcctagtcctaaggctgaggaagggatcctggtttagttaaagaggattttattcacccctgtgtcctctccacaggtgtccagtcccaggtscagctggtgcagtctggggctgaggtgaagaagcctgggtcctcggtgaaggtctcctgcaaggcttctggaggcaccttcagcagctatgctatcagctgggtgcgacaggcccctggacaagggcttgagtggatgggagggatcatccctatctttggtacagcaaactacgcacagaagttccagggcagagtcacgattaccgcggacaaatccacgagcacagcctacatggagctgagcagcctgagatctgaggacacggccgtgtattactgtgcgagagacacagtgtgaaaacccacatcctgagagtgtcagaaaccctgagggagaaggcagctgtgccgggctgaggagatgacaggggttattaggtttaaggctgtttacaaaatgggttatatatttgagaaaaaaagaacagtagaaacaagtacatactctaattttaagataaatattccattcaagagtcgtaatataagc

SEQ ID NO: 860131 - DNA, 630 bp, Homo sapiens
ctggaggttcctctttgtggtggcagcagctacaggtaaggggcttcctagtcctaaggctgaggaagggatcctggtttagttaaagaggattttattcacccctgtgtcctctccacaggtgtccagtcccaggtgcagctggtgcagtctggggctgaggtgaagaagcctgggtcctcggtgaaggtctcctgcaaggcttctggaggcaccttcagcagctatgctatcagctgggtgcgacaggcccctggacaagggcttgagtggatgggagggatcatccctatctttggtacagcaaactacgcacagaagttccagggcagagtcacgattaccgcggacraatccacgagcacagcctacatggagctgagcagcctgagatctgaggacacggccgtgtattactgtgcgagagacacagtgtgaaaacccacatcctgagagtgtcagaaaccctgagggagaaggcagctgtgccgggctgaggagatgacaggggttattaggtttaaggctgtttacaaaatgggttatatatttgagaaaaaaagaacagtagaaacaagtacatactctaattttaagataaatattccattcaagagtcgtaatataagc

SEQ ID NO: 860132 - DNA, 646 bp, Homo sapiens
gaatacatgatttggagcaaggttatttgatcatgtggtgagactaagaatgattcttaaaaagtgccaaaagtttccttcaaatgtttctgtcactccttatcataaagtttattttacagcagttttaggattacaaagaaattgcacaggaggcgtgagaattcccatgactccctgccctacacaggcacagcytcctccactacgaccatcctgcaccgcagtcacaaatcagttacaatggaggaatctccaaggacgcttggttctttctttttctggtgatctcctaatataacaagcctaagtatctcaagattccacggttttttcagtgttttctagaactgatattagtcagagggaaagtgggtaaggctattactatttgaactctttcttccaaaatccacaaaatatatattaatttagagcttatcttacttctggtttacaatgctccttcccagagagtaagatttttaagcttttagaggccagttcatgtctctaaaagaccagaaagttctggggaatcccataatgaacatcctttcattggaattggagaccctggcaatgagagattccatgtataatgccctagagttggattaggtgcactgtgagctcttgggtggtg

SEQ ID NO: 860133 - DNA, 646 bp, Homo sapiens
gaatacatgatttggagcaaggttatttgatcatgtggtgagactaagaatgattcttaaaaagtgccaaaagtttccttcaaatgtttctgtcactccttatcataaagtttattttacagcagttttaggattacaaagaaattgcacaggaggcgtgagaattcccatgactccctgccctacacaggcacagcctcctccactacgaccatcytgcaccgcagtcacaaatcagttacaatggaggaatctccaaggacgcttggttctttctttttctggtgatctcctaatataacaagcctaagtatctcaagattccacggttttttcagtgttttctagaactgatattagtcagagggaaagtgggtaaggctattactatttgaactctttcttccaaaatccacaaaatatatattaatttagagcttatcttacttctggtttacaatgctccttcccagagagtaagatttttaagcttttagaggccagttcatgtctctaaaagaccagaaagttctggggaatcccataatgaacatcctttcattggaattggagaccctggcaatgagagattccatgtataatgccctagagttggattaggtgcactgtgagctcttgggtggtg

SEQ ID NO: 860134 - DNA, 646 bp, Homo sapiens
gaatacatgatttggagcaaggttatttgatcatgtggtgagactaagaatgattcttaaaaagtgccaaaagtttccttcaaatgtttctgtcactccttatcataaagtttattttacagcagttttaggattacaaagaaattgcacaggaggcgtgagaattcccatgactccctgccctacacaggcacagcctcctccactacgaccatcctgcaccgcagtcacaaatcagttacaatggaggaatctccaaggacgcttggttctttctttttctggtgatctcctaatataacaagcytaagtatctcaagattccacggttttttcagtgttttctagaactgatattagtcagagggaaagtgggtaaggctattactatttgaactctttcttccaaaatccacaaaatatatattaatttagagcttatcttacttctggtttacaatgctccttcccagagagtaagatttttaagcttttagaggccagttcatgtctctaaaagaccagaaagttctggggaatcccataatgaacatcctttcattggaattggagaccctggcaatgagagattccatgtataatgccctagagttggattaggtgcactgtgagctcttgggtggtg

SEQ ID NO: 860135 - DNA, 658 bp, Homo sapiens
ttgatggggcttccagaagatttgaaaacctcttctgcctgcaggacattttaaaattctgcactacagtaaaacatctgtatttaatcatggtcttcggtttattgacaagctctagtaagtgcaataacttctgccttctcggctgattttacatcagatagaggaatttatcytaaatgaaagtttgtactagcaatataaattatgagttaataaccaccacctttattatttaggtgttattcatcaagaaataatgttaaatcaaggctctcaacgggaatattatctaagggatgcacaaaatgttttgctaatctagataaaatagatgtgaacacactcttagtatccagtcatgtctcctgtctgtcacattattaaccacacggtaactttgacttcacttcggactcgttctaattttcaaattcgttacatattaagcttaatgtctctagactattctagcagagtgaagaaagacaagctagactgacaaacaacctaggatgacaaacttcttgtcactctctataagaacttgcttctccctgaacttcagacttgtcgcgtgttttgaaacattaattatcaaaagtattaaagaaaatttgcaaagctacatcttctatgtttatgttattgttgatgc

SEQ ID NO: 860136 - DNA, 702 bp, Homo sapiens
tcatctacctgcagactctctgccctcctcacccttttctaaggtcctgcagacatcaccctcattccattccctcccttccctaagtacgacagagtgggctctgcagctcctgctgccttctgtgtgctcagccctggggctccctagtgcttttgttgcaggacgatcaaagatgggagagaccaaacagagttcaggagagtcctttattaaaaggtgatcacctggctcagttggactagcatccaggaaagtctgagccctggacaaagaaagcagccaccttttacacagtcagtggctgggagctacatgatgcaggaagcgtaattacagaasagagaacaaaggcagttatttgttacttcatgtcttacatccttgggaatacatggttctgtaacatatacttaacaatcttatgaccttgcagctgtgctggggaggtaagcaagaaccctctgagcctcaaggaatgtgaaaccaatgagaacagataaggctcactgagcacagaaggaaaaacaggcagttagtattctctaacttagactacgggggaggggctacacactacagtaagccctgaggggaaagttaattttctggctttacatattgtaaaattcataaattacttcttcactttgatgatgaagcccaaatccccatgtgcttacactctctcagaccaccctc

SEQ ID NO: 860137 - DNA, 615 bp, Homo sapiens
ttctacaagatagaacatataataggtcacaaaacaagtctcaatgaatttttaaaacagtgaaatcatatcaagtatcttctcagaccacaggagaataaaactaaaaatgaactctcaaagaaacccttacaactgaacaaatacatagaaattaagaaatctgctcctgagtaatatctgggttaacaatggcataagatgaaaatttaaaaattaccttaattaaatggtaacaagttattgaaaccttaagaatacagcaaaagcagtggtaagaggaaagtttatagtgmctactgcctacgtgaaaaagccggaaagagcacaagttgtcaacctaatgttgacacgagaaaaaagaaaaaattaaagaaagaaaatataaatcaaaaaagagaaagaaacaagctgcctgtgttaggctgactcacgtcaaaggcagtaacacgcaaagtttcaatgatgttatctaagggccggagctcagaggaatgggctctgaagactctcccagcactccctcagcataaggatgaaaagaggtaagttttcctatctctcctttagtgtaagtgaacttccctgtcgaatctcatcccctctgctatgtaa

SEQ ID NO: 860138 - DNA, 697 bp, Homo sapiens
tatgcatatttgaccctgtttaatatggaggaatggcagagggtgacacaggcagccctccggtggctaaaactaatgcacctgcagacacagttaatgcccaggcatatgcacgggtcagttccctgaaacaaaccccaattgggacccaaatgatgcaacccagttgcagcacctgcagcggtactgagaggcaatctttcatgggctgaaggatggtgggagaaaagcagttaatataggaaaaatctcggaggtgctccagggagcagttgagagcccaagccagttgtattagagactttgtgaggcttatcggctgtacaccctgttcaaccctgagactactgagaatcagcatgtggtaaatatgtcatttgtaggtcaggcccagggtgatatcaggcaaaatttgcagaagatggaaggtttcgcgggtatgaatgctactcagcttattgaggtagccaccaaggtgtacattaacaatgatcaggaggcaaagagggaggctgattgaaggcttaagaagaaggctgatttactggcagctscccttacgggaagggaagctggttttgcaaggggatgcgggtatggatgagggcatggaagaggccggactggatggggatttgagagtcagctgagactagaaagagatcaatgtgtgcagtgcaaaaggaaaggacactgg

SEQ ID NO: 860139 - DNA, 529 bp, Homo sapiens
ggaaagggattcaagaggataggttgcttttgggcatgtggtcccttaaaatttcacactaaaaagcgtttcccacactcaatttcaagcagcccaatatatatttgtattttttcttggaacagacaatattttatattccagactctgccttaggtaatttcaaaccctggctttgttactctctacaagaaattgcttctccataagcttcagatttgttgtgtgttttgaaattttatcagaaatattaaagaaaattggcaaaattccatcctccatgtttatctgttattgttgatgcagttgtaaaaaataagaaaaatayattccttttttctgtacatttccaagcttagtagcaaatttttagtaacacccagaataataaaaaattcaaatattgtttagctgcttaataggaaaacaaattatagtaaatttgtttgctagaatgctacccagcatttataataagtaaacatttgatatacccaactacaaggtaaaatatccatttatgctaact

SEQ ID NO: 860140 - DNA, 624 bp, Homo sapiens
tatataaataagtgcaactttggagaaacacactcatcccccgaataagacattcatgtattaaagcctagaaatactttaaattacctctgagccattcaagtgtgtgttcacagtgaagtcctgttctagggaaaattgttctccagggggagaagctttgtcaacatagagcttagggatgtatcaggaggcacatgacctctaaggggattatagcttgaacccttagcatcctcctgttggtaatmcatgtgtcactctccaatctttctcatgcagtatcaggtatgaaataggatcgctcatgaatatgcaaataactgaggtaaatatagatatctttgtgccttgagagcatcatccaacaaccacaactctcctcagaagaagcccctagaccacagcacctcaacatgtactggacctggaggatcctcttcttggtggcagcagcaacaggtaagggacctcccagtcaccgggctgagagagaaaccaggccagtcaagtgagacttcacgcactcctgtctcctctccacaggtgtccactcacaggtgcagctggtgcagtctgggcctgaggtgaagaagcctggagcctcattgaaggtttcctgca

SEQ ID NO: 860141 - DNA, 605 bp, Homo sapiens
tgacccacctcattttcacttcataaacctgtggattgacatgttggagttactgctgcatttgtagataatgataaataataaggccttttaacaatgtttgaagctgctattctctgatatctcttctaaaataaagaatttccaagtgkatgacaatgaaaaaattgttagaaatatttggtggtaaggcatctttaacatcctgttgaatgtttctgcatagcacatcaatcccttaaaatactttgctatatctgcatttaatgaatgagtctaatattgaggtgcaattgaaaatacctgggcctttgatgaatcagctcatagggtgataatgtctgggtccttgagaaagcagaccctgtgttgtaagttttagtagaagtaccttttgcaaagaaagttcatgtgtttctgaacattatgctacttttaacttaagaatgcaatatatgatttatttttacttcaaactgggtatatacccagtaatgggatcgctgggtcaaatggtatttctagttgtagctccttgaggaatcaccacaatgtcttccacaatggttgaactaattttcactcccaccaacagtataaaaatg

SEQ ID NO: 860142 - DNA, 607 bp, Homo sapiens
agtgtggtgtaattggggtgtgggccatttaggaggtgatcaggtgaaaaggttgaagccgtcataaatgagattagtgctctaataaaaagtcacgggagagcttttctctcttgcttccctgtcatgagatgatacgataaaattacggccatctgcaawtcaggaaggaaacctttacatacacatgattggctgtcttgggcttcccagcattcggcactgcacagaataaatatgtcttgttaaagtcatgcactttatgacactttgttaaagcagccccaataaaataagatatctggttttactggctcagagttggagagaaatttgtttcagaaataattctacctcaaatcttactcatgtatggtttagttaatatttaaattatgttttaaacttgtttagagttgatgatgaaatgagttaagagtttggggactgttataatcaaatgaatgaactgcgaatgtgtaaatgccatgcatttgggggatggtcttttctattctgggtctttcatgcctacgtgtgaattgaaggattgcttttcttatttctgtgaagaaggccattattattttgatagataatttatcta

SEQ ID NO: 860143 - DNA, 605 bp, Homo sapiens
tccagaccattttctaaatctaagaaaactaattttatctcactgcttcttagtcttgtttcctgcagctgacaaccaaaactgtcagcgatagagcccagtgtaaatcaccagcctttaattattgcagaactatgattttacaacaacattgtgagttacataatgatcctactttatggccgcggtgcaaatgcttaacttccactaaatcacagagctcagaatggctagcatggaggtgtatatgtatatgtgcattgttctagaaatttccaattactgtatattattgtttgcagtaattaggtcaatctgaactgacaaaagtctccatggccttataagcacagagaccacctccacggcaggtggaaatcaaggctgggaacagkctaccagctgctcccctgggattcctccaattaccctgtttaaagcctctgctcactcatgcgctggaagagggatgtcagagatgcagcctactcttcctaaagggctgacagggcataaagacaagactgattatccatggaacattcctataggaatgcacctatgtgcaggcacactaataagctgtgtgtcttgcagtgtgtaaa

SEQ ID NO: 860144 - DNA, 631 bp, Homo sapiens
tttagaaaaccccatcatctcagccccaaatctccttaagctgataagcaacttcagcaaagtctaaggatacaaaatcaatgtggaaaaatcacaaacattcctatataccaataatagaaaaacagagagccaaatcatgastgaactctcattcacaattgctacaaagagaataaaatacctaggaatacaacttacaaaggatgtgaaggacctcttcaagagaactgcaaaccactgcccaaggaaataagagagggctcaaacaaatggaaaaacattccatgttcatggataggaagaatcaatatcgtgaaaatggccatactgcccaaagtaatttatagattcaatgctatccacatcaagctaccattgactttcttcacagaattagaaaaaaactactttaaatttcatatggaaccaaaaaagagcccatatagcctagacaatcctaaggaaaaagaacaaagctggaggcatcacgctacctgacttcaaactatactacaaggctacagtaaccaaaacagcatggtactggtaccaaaacagagatacagaccaatggaacacaacagaggtcccagaaataatgccacacatctacacccatctgaccttt

SEQ ID NO: 860145 - DNA, 631 bp, Homo sapiens
tttagaaaaccccatcatctcagccccaaatctccttaagctgataagcaacttcagcaaagtctaaggatacaaaatcaatgtggaaaaatcacaaacattcctatataccaataatagaaaaacagagagccaaatcatgactgaactctcattcacaattgctacaaagagaataaaatacctaggaatacaacttacaaaggatgtgaaggacctcttcaagagaactgcaaaccactgcccaaggaaataagagagggcwcaaacaaatggaaaaacattccatgttcatggataggaagaatcaatatcgtgaaaatggccatactgcccaaagtaatttatagattcaatgctatccacatcaagctaccattgactttcttcacagaattagaaaaaaactactttaaatttcatatggaaccaaaaaagagcccatatagcctagacaatcctaaggaaaaagaacaaagctggaggcatcacgctacctgacttcaaactatactacaaggctacagtaaccaaaacagcatggtactggtaccaaaacagagatacagaccaatggaacacaacagaggtcccagaaataatgccacacatctacacccatctgaccttt

SEQ ID NO: 860146 - DNA, 495 bp, Homo sapiens
gggttggttccaagtctttgctattgtgaatagggaattgttctaatttcaaactagttaatttttatcttcatgcagctagattattatgtgtggctatttattccgagagggataaagacaacattaacaattttcactgcaggcatgtctaggcaactccctgtgcactatgaccctgggrcgttggagattctatggggactcttccctacctgcctaggagagttctctgccttctacctctagcattttcctctttgaagaagtacatctaactgtcattagaatagagacaaagacaagtcttaactgcttccagctgaggagggatgctgtttggggaagatctctcttggaggtctaagggaccccaggaaaagggagccattatcccaggcttcagttgcatgaccatttggagtttgatggtctgaaaatgagaagaggcaaatctggttattagaagacatgtatgaaaaccaaacaaggtgg

SEQ ID NO: 860147 - DNA, 639 bp, Homo sapiens
accatgccagcctattttttttttgtatttttagcagagacagggtttcactgtgttagggtggtctcaaatctcctcactgcatgatctgcctgcctcggtttcccaaagtgttgggattacaagtgtgagccaccgcacctggcccctgttggccattcttggggcaatgtctmtgaaaccagccctggtgcctgtaccacaaaattttcttttatctttcatgtggatataacaaatggacaatgaggaccagctgcatggagactgaccactgaacatcttctgctgtctcctaagtaagtcacaggaaaacacaccaacatcaccaacataactgttttccttcaacttcctcgaacgaactatagaaatgatcccttaaagtatagtctattccttcaactttctcaatttgcactgaatcccttcctaaattaggagctacatagggtctgagttttgttccctttctcccagtcttccccaagtatcaaggacagaatagatttaaattaaatttggccgtccatgcccccaacaccacatcggtttctaacatccttgtcatgtacccatccttctgtgggcaccccacatcaggttggccaggaatggccagaaggtgtcatcacctta

SEQ ID NO: 860148 - DNA, 596 bp, Homo sapiens
gtgagtcagacatttctccatgtgggcgacctccagtgcctgtgactgctgctcaggcctaattgttggttaagcattaggacactctttaggtgatcacatctcaagcctattctgaaaatcaccatgatcagagatagttcaatggccattctcctaacataagtttctctttattacttggttccaagtatggagaaaaaygtgaccctatatttgtctgaatccaacatcagcatcaactgcattatgctaggagactcactaattgagcacaagtgagctcgttattctcatagaaatgtaagtatttggaaatttcagtgtgttctccagaacctgtggctgccaacaactgtatttctcggtgcactcttggcctggtgaagccttcacagaacctctccctcacctgtgccatctctgcattctccatcacaaccagtgtttcctgctggagctgcatccatcagcgcccccatgggaggtactggagtggatcgggtgcataggtcatggagggagcacaaattactcccctcttctcaagagtccagtcaccatctccagatccatgtccaaaaagtagttcttct

SEQ ID NO: 860149 - DNA, 596 bp, Homo sapiens
gtgagtcagacatttctccatgtgggcgacctccagtgcctgtgactgctgctcaggcctaattgttggttaagcattaggacactctttaggtgatcacatctcaagcctattctgaaaatcaccatgatcagagatagttcaatggccattctcctaacataagtttctctttattacttggttccaagtatggagaaaaatgtgaccctatatttgtctgaatccaacatcagcatcaactgcattaygctaggagactcactaattgagcacaagtgagctcgttattctcatagaaatgtaagtatttggaaatttcagtgtgttctccagaacctgtggctgccaacaactgtatttctcggtgcactcttggcctggtgaagccttcacagaacctctccctcacctgtgccatctctgcattctccatcacaaccagtgtttcctgctggagctgcatccatcagcgcccccatgggaggtactggagtggatcgggtgcataggtcatggagggagcacaaattactcccctcttctcaagagtccagtcaccatctccagatccatgtccaaaaagtagttcttct

SEQ ID NO: 860150 - DNA, 581 bp, Homo sapiens
gacaaaaaacataaaaaattattcattcatagatcatgtatttggcattatatctgaagtctcattataaaatacactaatagtgattatttattccatgttgctaatctcaggccacaatcaactcatgagtgcttagccttcacctattgattggaggactatccacctgagatatttggaatacttccatgaggagatgtgttcttcttcccatcatttctttatttaatcatctattaacatccgtattggtttatggacatctatttcatactctgaagaagatccatgctacattattcattttcttgttcaaatctccacagctttattaggtgctgggactcatttagtttggatcstgcatcctaacagcaaagctcatcttttgtttttgaacacttccctgtttcctgatattaggatagattctaagcttgtttctttatcacctttttcatacatagaattagccatttatataaagattgcttgtttctgattttaaagagtagtgttaaaataaaatattgtgataatgggtatgtgtgttgttaatgtggtataagtacttctgg

SEQ ID NO: 860151 - DNA, 581 bp, Homo sapiens
gacaaaaaacataaaaaattattcattcatagatcatgtatttggcattatatctgaagtctcattataaaatacactaatagtgattatttattccatgttgctaatctcaggccacaatcaactcatgagtgcttagccttcacctattgattggaggactatccacctgagatatttggaatacttccatgaggagatgtgttcttcttcccatcatttctttatttaatcatctattaacatccgtattggtttatggacatctatttcatactctgaagaagatccatgctacattattcattttcttgttcaaatctccacagctttattaggtgctgggactcatttagtttggatcgtgcatcctwacagcaaagctcatcttttgtttttgaacacttccctgtttcctgatattaggatagattctaagcttgtttctttatcacctttttcatacatagaattagccatttatataaagattgcttgtttctgattttaaagagtagtgttaaaataaaatattgtgataatgggtatgtgtgttgttaatgtggtataagtacttctgg

SEQ ID NO: 860152 - DNA, 321 bp, Homo sapiens
tgcctttcacttttaatgaaaatgtaatgcacatagaattccagtttgcatttcacttgtaatttattttcttgtgtttattattttgttcatggagatgatcacacattacattctgctgggcctttattaaccacatttctatgaayctagtcagggttggatttcaagtgtatggttgccacggctatcagagttgaagtcagcttctcctgttcacaaaaagttcaggttcctccagtgatacccacttttgtgtcccggtttggctcttcccatttctttctccccagagagagcctgtctctttcatctgtggca

SEQ ID NO: 860153 - DNA, 349 bp, Homo sapiens
tgctagctagatttgtcaacaaagaaaaatgcaaaaggagcaattctctgttttggaaccctttctcattttctggtacaattagaaattgtagactaatccctatattctcttctgaagccctagcattagccatttctcaaagacatgctggttccttttttttttttttttttttttgagacagggtccagactcactgcaacytccacctcctgggttcaagcgattctcctgtctcagcctcccaagtagctgggattacaggcatgcgccactgtgcctggctaatttttgtatttttagtagagacagggtttcgctatgtgggccaggctggtccaaactc

SEQ ID NO: 860154 - DNA, 584 bp, Homo sapiens
ccgtgaatagaaaatgaatatctggaatattgtcataaatgatgagtggcttcttgggcccttatacaatctaagagcactttcctgtttttcttagttgcgtttttctaaaagctagatgtttttgtttacattttaattatagaatctaaaaatagctaaatggaaatagtcttgaggcttgatgtgttttgagacttcaaaagttactggtaaaattgaagagtgcttgagcatatttgtaaaatcaaaaaccatggaagccaaggaattagatacatgttcatttaaacgttgaaactggttttgcaccactagttaaattcaagatctttctgttaaaatttttcagtggtagaagaattgagaatcattgggcagatttatgcttcctctgagcaaaaagttttagggaactgatgaagattactttctcagtcttgtytcatgatctgtttaaaaaaagcataagcctggcagctcagttggatttgactggtttattttatttgctctgaaggattttttctaattaattggcaggtgctctaaagtgggtatagttacacattttcatcactaca

SEQ ID NO: 860155 - DNA, 619 bp, Homo sapiens
tgcaacatataatgctgttaattattccacaatggaaatatattatcatcacctgcttctaaaagtactagttcagtctacaaactattttcccacatgaacactttagtcctgctgtatgagctatagctgttagactgttcaaatctgttgtattgcttatatatatacaaaaaatggggaatttcttattcatagtcatgaaagtttaaatactttcataatagaatcgccttctctttgtacaccttggtatttacatgtgtattaccttatttgatcaccacaatgaccataagacataggcacatcctgctttatagcgaaaaaatatggtcctaaatcccmgttttgcccagagtccaacatcccaggccaatttccttaaattctctaaatgcttttattttctcttttgtaaaataaggataatataactccagcctaactactatgcctagagttgccatgagacttaaatgtaaaaatatattggaaaatggttttaaaactatagttttctatgcatagaatatgctagaaaactctagttgttgtgaaaatttttgctttctaacttaacaaatataattggtctgaaatacaaaataaatctttt

SEQ ID NO: 860156 - DNA, 482 bp, Homo sapiens
ttgtagtgaaacctagcaataacaacaaaaactttcgactcacttgtaagcttatctacaaataccttaaatgaaaagttcgcaaattaaaaagaataatatatgaaaaatatatagtattatctgctacaaataagttttatgctagaaatccagttatgtgaaaatcaaaagaattttataaaattcaacctatatttctgaaaaaaaaggaatctttgaaaaggaaccagaggacataatctttgtatcataccaataacaacctcatagttaatattctgtttcctgtaaaattaggaactttgggtaaagtcaatgaaataaaacataaaatagayataaaccaacaacagcaaaaaagatggtaaaggagaatataaatttataatgaatttcagataatacggtcatttgtcagaataaagaaataatagctaacattgagcaattaatatgtcttgcaccgcatgaagctattt

SEQ ID NO: 860157 - DNA, 603 bp, Homo sapiens
tggttcataaaatcttgctgcctcttagcatcactgatgtcttagatttgttgaaatgtgataaatttagtctttagcacataaaagataataattgaagccatgggactaaaaaaggttacccagggcgagcaggcagagtgagaagagatctgaggaaagcccaatgtttaaaggtctacatgaagaagaggaatcagaaaagcacagaaacaaagaaatggacaggcaggaggacaatcaggagattctgctgtcaagaggakagcagagataatattttaagagagagggagtgtctatgtcaaatgctgctgagatggagtaaggcaagaactgtaagtggcccactacattcaggaacatgggggcactggtggtcttagcaggaggggtcctggaagcatgaggatcataacccatgaaagagcagcttgaggtgtcaactcccaggcactgagaaagtagataccactctttgccaaagtggggtttgagcgggcagaagcagatagtctgaccacgcgaactccaccccagagcagcaagagccacgttagcttttcagaagcaactggcacgtcaagacatttgaaggaaaga

SEQ ID NO: 860158 - DNA, 603 bp, Homo sapiens
tggttcataaaatcttgctgcctcttagcatcactgatgtcttagatttgttgaaatgtgataaatttagtctttagcacataaaagataataattgaagccatgggactaaaaaaggttacccagggcgagcaggcagagtgagaagagatctgaggaaagcccaatgtttaaaggtctacatgaagaagaggaatcagaaaagcacagaaacaaagaaatggacaggcaggaggacaatcaggagattctgctgtcaagaggatagcagagataatattttaagagagagggagtgtctatgtcaaatgctgctgagatggagtaaggcaagaactgtaagtggcccactacattcaggaacatgggggcactggtggtcttagcaggaggggtcctggaagcatgaggatcataacccatgaaagagcagcttgaggtgtcaactcccaggcactsagaaagtagataccactctttgccaaagtggggtttgagcgggcagaagcagatagtctgaccacgcgaactccaccccagagcagcaagagccacgttagcttttcagaagcaactggcacgtcaagacatttgaaggaaaga

SEQ ID NO: 860159 - DNA, 682 bp, Homo sapiens
tgtcggtttaaaatactgttatggatggaacgtttgtgttcccataacattcatctgttgaaactttaacctccaatatgactgtattgggagatatggcctgcttggaggtgatagaggttaaataatgtcataagggtcaggtcctaatcccatagaattggtgcccttataagatgaggaagggacaacagagcgctctgtctcttagtcatgtgagcagacagcaagaaggtggctgtctgcaagccaggaagagagcccttgccagaaactgcaccctgctggaccttgatcttggacttctcagcctccagaactgtgagaagtaaactgttgccgtttaagmcactcagtctgtggcattttgttatggcagccctagctgactaatataagtacttagagtggattttattccttgtactgattctgacctgacacagatacatatcgcaatacagcttttatgaaatctaaatacttcagatttcatgaatttatgagtataaagacagtcacatgaatattaatatctaaaatctcaccagcccgaagcctccatcttcatgataaagtcctgttcttcctaatattccctaataaatatttccaacatgtatacacaagccaatcctggtgggtccctgctgtcttgtcagctggctcaggattccatggc

SEQ ID NO: 860160 - DNA, 682 bp, Homo sapiens
tgtcggtttaaaatactgttatggatggaacgtttgtgttcccataacattcatctgttgaaactttaacctccaatatgactgtattgggagatatggcctgcttggaggtgatagaggttaaataatgtcataagggtcaggtcctaatcccatagaattggtgcccttataagatgaggaagggacaacagagcgctctgtctcttagtcatgtgagcagacagcaagaaggtggctgtctgcaagccaggaagagagcccttgccagaaactgcaccctgctggaccttgatcttggacttctcagcctccagaactgtgagaagtaaactgttgccgtttaagccactcagtctgtggcattttgttakggcagccctagctgactaatataagtacttagagtggattttattccttgtactgattctgacctgacacagatacatatcgcaatacagcttttatgaaatctaaatacttcagatttcatgaatttatgagtataaagacagtcacatgaatattaatatctaaaatctcaccagcccgaagcctccatcttcatgataaagtcctgttcttcctaatattccctaataaatatttccaacatgtatacacaagccaatcctggtgggtccctgctgtcttgtcagctggctcaggattccatggc

SEQ ID NO: 860161 - DNA, 599 bp, Homo sapiens
gcaatagaaggaagaggttcctgatattatcagaggtcatttgaaataaaatccaggcaaaatgaaaccacaaaagatgtgatttgtagggccagaagactttgcttgttctgaaatgtgttttgaattcaagaatatgaagagaatcaagaatattagagattgagaagcccagagatgggttagaaatgaactggataaattgtaaaatgcacacaagtgtaytagaaaatgttacatgttttggtgaaggccgtgaaaatcttcagctgcttattgtaggtaaccttcttctattaaatcatgggagatttttctagcttagaggtataagttttaatgtgtgttggaatttttaatacagacttaagtcctgatgcttatctagtatctttctttgttcttaaacattgatttccccgtattgcttacatttaataactattacattttcagttttaaggcagtaatagttcatgaatttgaaaagttaaaatctattggagatgaagttttacaattctgaagtctttcaaatatatttttggtaacatcttgatgaccttcaaattttctttcatcagcggagtgttaggggg

SEQ ID NO: 860162 - DNA, 629 bp, Homo sapiens
tgttccctttggccctgtccctccgggtcagccttcactgaggctgtggagtattgggttcttttcactatgaccttgccatatagttaggtgcttgtttctcattgcctgtggctccctagtctttgcttcaaacccttcacactttttctctaacttttctccatgccatatcatcatctcctttgtttacttcagggtcacttacmtaaagaggatgaaagtttctttggggcttctgaataaaggtggccaggttcctaaatattcacattcatcttgccaagcagacttctgattgcctaaaatattctttatgatgtctcctccataaaaccttctagagtgatccaaggagagcaccctgcttcttcttctgtgaaccctgggaatggattcatttttgttgtctaccagtagaccatctgattgattgaaacatcttattccccaacaatgacttgggaaaagaagagttttctgtgagaaagaattagtgatgatcagagtgaaacatgtatgttaaagctatattatagttagttttgaatgctgtttggtactgattgtagaatttggggcattttgagatttcaataagtgataaaagcatcttaaatcttgaaaca

SEQ ID NO: 860163 - DNA, 629 bp, Homo sapiens
tgttccctttggccctgtccctccgggtcagccttcactgaggctgtggagtattgggttcttttcactatgaccttgccatatagttaggtgcttgtttctcattgcctgtggctccctagtctttgcttcaaacccttcacactttttctctaacttttctccatgccatatcatcatctcctttgtttacttcagggtcacttacctaaagaggatgaaagtttctttggggcttctgaataaaggtggccaggttcctaaatattcacattcatcttgccaagcagacttctgattgcctaaaatattctttatgatgtctcctccataaaaccttctagagtgatccaaggagarcaccctgcttcttcttctgtgaaccctgggaatggattcatttttgttgtctaccagtagaccatctgattgattgaaacatcttattccccaacaatgacttgggaaaagaagagttttctgtgagaaagaattagtgatgatcagagtgaaacatgtatgttaaagctatattatagttagttttgaatgctgtttggtactgattgtagaatttggggcattttgagatttcaataagtgataaaagcatcttaaatcttgaaaca

SEQ ID NO: 860164 - DNA, 649 bp, Homo sapiens
  misc_feature 3: n = A,T,C or G
tgnttatttcagcattgtttataataagatatatttcaaatacaaatattctttagtaaaggactgataaatcatgatataggcataaaatgaaatcttatgaaagcttttaaaaagactgagaaagctctttgtacttttatgagatkatcttcaatctatgtcatgtgcattttttaacacaaaacaattacctaatagtatgctacaatttctactaaaagggaggaaatgatacaaacttgtatagatacatatatagatatgtttgtataagcataaactaagcataagccaccaggcatggtggcttgcacctttaatcccagctatttgggaagtctaagggggaggataatttgaacccaagagtttgagacctgccagggcaacttagaccctgtctctataaaaaatacaaaaattagctgcgcatggtggcatgcgcttatagtcccagctactctggaggctgaggtgggaggatggcttgagtccaagaggttgaggccatcgtgagccatgattgtgccactgcattgcaagctggtgacagagcaagaccctgtgtcaaaagaaaacaaaacaaaaacccataaaatatctggagagatataccagaagcagataacattggttgtgtcttgag

SEQ ID NO: 860165 - DNA, 637 bp, Homo sapiens
tttttttaaaacttgggtataatgtgttattttattttgagggcgagatataatatgcaatcaaaatatggtagcaaacaccaaaaattatgtatgtatgatagattatgaggtctgagatagccatatttatgttgttattacccagtataggggctgactcttaaaagacatttacaaatgtatgttgtatttatttaagacattcagtaaaacaggtatcagattacagtaaaaacacttgaatgaataaatacaggataaatcaggtctttgggttaaaaaaaaaaaaaaaagcctagacaaaagtcttccaggaaaaaaattgtaatttaatgtattctaattcatggagaaaattttgaatagagtaaaaaggacctggaaatggagaagagtgctaaggagaatggtataaattcagtaagctgtgtcctccaaatagcacttagcacatcgttgattgaataacagtgacagaactgctagtataytgaggagataatgtgctaggtgtttgggaatcacctatttcaaggttcaggccttgattttattgtaaaatatttcatgtggtcgtgggatagcaaatacattcctttttttatgacaactctagcacctagagatacatggg

SEQ ID NO: 860166 - DNA, 605 bp, Homo sapiens
tctggctacaacttctagtactattaatatgtataaaagtggtaaaagtggtgaaagtgggcatacttgtcttgttccagatcttagggcataggctttaatttttctccatttggtatgatgttagctgcgggttgtcatatayagcctttattgttgtgagatattttccttccatatccagtttgttgagacatttcaccatgaagggacgttgtattttatgaaatgtttccgcttcagtcaggtagtggtgaagcaggccaggacttgttttcctccagttggggcagtggattctcctctgtcccagggaaggtctaaattctccctctctaggtttggaatcaggcactgtgggggctctgcctgtgctgtgttgcaccgtggcaggcctgactctaaattccaatacaaattcccatacccacttcccattcccttccccaagcaggaattgtctctctcctctctatggtgcctggcattgaggagaggtggttttggcaatgagtgattatccttcttaccttcttcagtgtgtatctcttcttgttattatgctaaaaccaggtactgtgatagctcacctgatttctttagct

SEQ ID NO: 860167 - DNA, 605 bp, Homo sapiens
tctggctacaacttctagtactattaatatgtataaaagtggtaaaagtggtgaaagtgggcatacttgtcttgttccagatcttagggcataggctttaatttttctccatttggtatgatgttagctgcgggttgtcatatatagcctttattgttgtgagatattttccttccatatccagtttgttgagasatttcaccatgaagggacgttgtattttatgaaatgtttccgcttcagtcaggtagtggtgaagcaggccaggacttgttttcctccagttggggcagtggattctcctctgtcccagggaaggtctaaattctccctctctaggtttggaatcaggcactgtgggggctctgcctgtgctgtgttgcaccgtggcaggcctgactctaaattccaatacaaattcccatacccacttcccattcccttccccaagcaggaattgtctctctcctctctatggtgcctggcattgaggagaggtggttttggcaatgagtgattatccttcttaccttcttcagtgtgtatctcttcttgttattatgctaaaaccaggtactgtgatagctcacctgatttctttagct

SEQ ID NO: 860168 - DNA, 610 bp, Homo sapiens
cacactggtaattctactgcagcaagccttgaatgacaacagtggacgtgaaagtagttgctgcctttgaccacatcttcccaaagtggcacgtcaccaacagactttaaaatcatgacgttataacgtaatggctgtgaagatttggaagaaagcactctaaaatgagagctctgagagatgtagagagaaggcagtcaaggaatagcgcytataagcacctcctgcacatccggtccctgcgcctccatcctcaccctgccctcagctcactcccctcctgttagaaattggctgtgcccctgaaaagtcatttgcatttgcctaaagactgagtacacaagctcattccaaagtagaaggtgttgaagttccattttggcctcaggtcaaaattgttttctctatttcagcttaatgagcaagaaagcagaatctaatatgtgtatatttctaacgcctgtgtatatttctcaactgtttcccagctcagaaaggtgaggagtatgacagtcaccctgaaatgacaacagaagccaacaataacaattatagtaataatgtgtgtatagaaagtactaaatgaccattaaatgaagagcagattact

SEQ ID NO: 860169 - DNA, 603 bp, Homo sapiens
tttttcagagagaaaaaactgtaatcaggtgtttggaacatactttcgaaggatgtttcttacctttgtttttaagacctaactttgatgggtttccatatatacatttaaaagctaaatctaaaaatgcttctttggagatgcattatgtactattttctttcaatgaatagaactatctcccaaggagaactctctaagcaagtgtttaaaacatgcttttgagggatgtttcttaccattgttttgtaggtctcaatcttaacttccagtttaatggaatctttgttgtgtctgctggtggcagcattccttcctctggaactaagacctctaggccagcagaacctaatatgggagcaagatgcaaaaattttgctagtggatcaccaggrgtgatggtgagtggtgccacttccatttccacccctcgattcctgtacctgtgaatcctggctatgggagaaacagtatcatatattggatgctgattcagagctcacatgaccttctggagaactttgccccagccctacaaaatattgtcacctagtgggcattgtaattgtgacttcaaaaggccatttcactgttctattaacc

SEQ ID NO: 860170 - DNA, 656 bp, Homo sapiens
cccaacagaaggtacccaagatccaacttgctctgccaccagctagctgaagtggcctcaagccctgaataaatatgagtggcagcaaggccatagcactgtggagcttgggcgaactctggtactggtctcaaagattgtaggcttggagtgtgacccagcatcacaccaggtatggcasccatgggattgcccgtgtcacccttctcctgactctaggcagagcagggtggagagagaccccttctacttggaaaatgagagaaaagagtacagggaatattgtcttgcaattgggtagcagcgcagccacagtaaaacaaagctctgggcagagtcccacagctcctgactccaggccattgctcctggatggtgcttccagacccagaagggaatctgctgtcttgctgggccaaacccatgtcctggaaagcttcaccacctgctgaataaagtgaccttgggcgttgaataaacatcagtgggagtcaggcagtagcagatgtgagccttgggtatgcccaggtactgtactggtctgggacactgtgcacttcgagtgtgacccagcacagtgccagctatggtagccatgagagtgtttgcatcaccccttccgcagctccaaatagtccagcaccattccatgtgga

SEQ ID NO: 860171 - DNA, 411 bp, Homo sapiens
cacttccccttgctgccaccatgcgaagaaggacatgtttgcttccccttctgccatgattgtaagtttcctgaggccactctagtcatgctgaactgtgagtccgttaaacctccctcctttataaattacccaggcttgggcgtgtctttatttgcagcatgagaacggactaatacagatggttaacactacgcttccctaaagcaggaaccctcctcttgyacctgtctatttccattcattccacaatagaatggataaacaaattcatcctgtagactgttttgtttctatctcatgctgtccatctacccagtccatgagcacacacacacacagaaacacacacacacatacacacagacatgcaaattttgtaaatctgctttcctcctactctaagaatca

SEQ ID NO: 860172 - DNA, 411 bp, Homo sapiens
cacttccccttgctgccaccatgcgaagaaggacatgtttgcttccccttctgccatgattgtaagtttcctgaggccactctagtcatgctgaactgtgagtccgttaaacctccctcctttataaattacccaggcttgggcgtgtctttatttgcagcatgagaacggactaatacagatggttaacactacgcttccctaaagcaggaaccctcctcttgcacctgtctatttccattcattccacaatagaatgrataaacaaattcatcctgtagactgttttgtttctatctcatgctgtccatctacccagtccatgagcacacacacacacagaaacacacacacacatacacacagacatgcaaattttgtaaatctgctttcctcctactctaagaatca

SEQ ID NO: 860173 - DNA, 629 bp, Homo sapiens
tctttaaaagtcaaagacagagagaacattttgaaagcagtaagagaaagtacactttaaatgaaatgacccatcacataaaaaggacctgtagttgcagtgtgctgagatcatgccactgcactctagcctgagtgacagagcaagactccatctcaaaaaataaaaataaaaaaggggactctaataagactgtcagtggatatctcagcagaaaccttgcaggccagaagygcgaatgatgatatattcagagggctaagagggggaaaaaaaaatggcaaccaagaattctatacccagcaaactgtcttttcaaaatgaaggagaaaataaagatgttcctagataatgctggtcatggtggttcatgcttgtaatcccagcactttgggaggctgaggatggtggaacacttgagctcaagagttcgagtccagcctcagcaacatggtgaaacctcatcccttcaaaaaatacaaaaataaaccaggcattgtggtgtgcacctgtagtcccagctacttgggaggcttaagtggatagcttgagcctagtaggttgaggctgcagtgagccgagatcacaccactgcactctgacctgggtaacagaggaaacctagtctc

SEQ ID NO: 860174 - DNA, 662 bp, Homo sapiens
cccaactgcaaggttgagaaaatagcaagttgagtttattcaggtttgaagttttacagatgactcataataagataattacaacttaagaaattaaagattttgaagacagtaattaatgtgattatcaataaaatcttagctagataatgagagaagtggaaacaggggagtcctgagaagtaaggagaaagtaaaggagtcggtaaactggaagttcctagaaggcctataaaatagtatattgtggatcagtgaattgggataatgtggccaaagtgaagaaattgagaccataggggatgaagagggcaaggaatctgcaaagctaggttgttgaaaggatcacccaatgccgaaatcaccaataatagcaatgcctgtggtgggagaagatggaaaggcagaggccaatcttcagagaatttagaggattggccaggacataaagtcttttgatcaagtgctaggagtaccccaaggtggaatcacaggcaaacactttcagtaagtgggaactgtwtggaaggagtgaggaaatctaatccagaagtggtgatacaagccgggagaacacggactcccaaccttcagtgacatgggaggtgggaggaggaacatcctccccatgagtggtctattgtgtggcttgaataagtggg

SEQ ID NO: 860175 - DNA, 634 bp, Homo sapiens
gttttatagacattcttttttctgagaatcagaacaaacaacttgatcaagattatgcagcagcattgggcttcaaaaccaggtggtttgtcttaaacttagctcctaatactcagctctatttctctggggacattggatgttattgcagttccccaccatgcagctcactcagcaccagggtatgtgctgtatggggtgaggagagggggaggagaagggacagctgtgattcaattagcacaggtctctgctaattgcagagaaggagcctaaattctagaggggagacaagtgtatgaacmaaatcatcagagcagagtgacagagtgtctagaagtactaaagagggcttagtacaaagtctagatgtactaaggaggaatgagcaattaggtctttctctgagtaaggaaggggctttgtaaaggaagacttgaagagaagatcatccttggacaagaacttcagcatagaagaagtttatctaaaacatgattgacaacgagaccagcaggggcaaaaacacagagagaggtggacgagaatggtgtggcagataaatagaaggagcctagaattgctctagtgtcaactgaaaggtaatagaatgctaatcagtatctattttttt

SEQ ID NO: 860176 - DNA, 628 bp, Homo sapiens
caggtctaaaaaagcttcccatctctgacattaagtgaccactccaactttatagtcctcccacatcctccacctaactaacctttcttgaacacctacattttgccaggcacttttataagcatttagttatagtattccatttacccactaacttgtaagatctgtttcataaacaccatcttgcagatgagacaactgaaaccagaaagtgttaggttgctgcaaaagtaattgtggttttgcattattggaatttgccatttgatattgaaatacatycttaaataaatgtggttatgttatacatcattttaatgggcatttcttgcttttattttttgctaatgacattacttgctgtttattttatgtttatttaagactgtagaaatgatgttagacaaaaagcaaattcgagcaatttttttatacaagtttaaaatggtcataaagcagcacagacggttcacaacatcaacagcacatttggcccaggaactgctaacaaacgtacagtgcaatgatggttcaagaagttttgcaaaggagacaagagctttgatgatgaggagcatagtggctggccattggaagttggcaatggccagttgagagcaatcattga

SEQ ID NO: 860177 - DNA, 628 bp, Homo sapiens
caggtctaaaaaagcttcccatctctgacattaagtgaccactccaactttatagtcctcccacatcctccacctaactaacctttcttgaacacctacattttgccaggcacttttataagcatttagttatagtattccatttacccactaacttgtaagatctgtttcataaacaccatcttgcagatgagacaactgaaaccagaaagtgttaggttgctgcaaaagtaattgtggttttgcattattggaatttgccatttgatattgaaatacatccttaaataaatgtggttatgttatacatcattttaatgggcatttcttgcttttattttttgctaatgacattacttgctgtttattttatgtttatttwagactgtagaaatgatgttagacaaaaagcaaattcgagcaatttttttatacaagtttaaaatggtcataaagcagcacagacggttcacaacatcaacagcacatttggcccaggaactgctaacaaacgtacagtgcaatgatggttcaagaagttttgcaaaggagacaagagctttgatgatgaggagcatagtggctggccattggaagttggcaatggccagttgagagcaatcattga

SEQ ID NO: 860178 - DNA, 673 bp, Homo sapiens
atgaggtactacctagtcctagtaagagattgcagtgggatcgaatgggacaaaaacaaagaccatgaagcagtaagtacttcctaattattcaaagaaggcatgtggagcacttgccatgtggcagacacagtgctgggagctgaaattagaacaggggggaaaaaagaaaagacatactacttgcccatacagtgctagcttcttagaaatttttggctgaatttatgaatgagagtatttttycatttataaaatgtaaataaaagcaaccatgtactagggcagttgtgagagttaaattacatgtatgcatgaatatgagtaaatatggcaaactggttaggaggtcaggctctgaagtcagaatgcctgagtttgaatcccagatctaagcactgaactctttttgcctcaagtttctcttcagtgaagtgagtgatatggtttggctttgtgtcctcacccaaatctcatctctaattgtaatctccatgtgttgagggagggacctgtaatcctcatgtgttgagggagggaggtgattggatcatgggggcagtttcccccaagctgttcttatgatagtgagtgagttctcgtgagatctggtggttttataagtgtttgacatttcctcctacacacattatctctttcacctgccaccatg

SEQ ID NO: 860179 - DNA, 650 bp, Homo sapiens
ccagagacaatggcgttccaaccttgcctttgtccctaccacctatggactttcatctttttgagactaagtttctttatagggaagatgtgatttttaacatccctgcgtggagttgttgtgaatatataatagctttatgtataatgcrtttatatataaaattctcagcacagggctatatacttcttctgggatactcagaaaagatcatttaagataagaagccatcctaaatttggatgttttctaatataccactgagaataactatatttattgaatgcttatattgtgttatgtgctgttctaagatttatagtgaccgtggatttaatcctgccaaagaccctataagatagtgaattctgttattctcactttacaaagaagaaaacagaagcctggtggaaatatgtatgaatttgcatgaagatgtatggccagaggtggtggagttgggactcaaacccaggctgtctgggattgaaatgctttcctatattgctgaaaaaaaaaaaaatggctgtacagtaaataaaatatcacagtgtcatgtatgaagtcagtggttctggcaaccctgatctaatgctgcagtggtcataaactgaactcagggaagttggaagttgagttttgaaacaact

SEQ ID NO: 860180 - DNA, 650 bp, Homo sapiens
ccagagacaatggcgttccaaccttgcctttgtccctaccacctatggactttcatctttttgagactaagtttctttatagggaagatgtgatttttaacatccctgcgtggagttgttgtgaatatataatagctttatgtataatgcatttatatataaaattctcagcacagggctatatacttcttctgggatactcagaaaagatcatttaagataagaagccatcctaaatttggatgttttctaatataccactgagaataactatatttattgaatgcttatattgtgttatgtgctgttctaagatttatagtgaccgtggatttaatcctgccaaagaccctataagatagtgaattctgttattctcactttacaaagaagaaaacagaagcctggtggaaatawgtatgaatttgcatgaagatgtatggccagaggtggtggagttgggactcaaacccaggctgtctgggattgaaatgctttcctatattgctgaaaaaaaaaaaaatggctgtacagtaaataaaatatcacagtgtcatgtatgaagtcagtggttctggcaaccctgatctaatgctgcagtggtcataaactgaactcagggaagttggaagttgagttttgaaacaact

SEQ ID NO: 860181 - DNA, 614 bp, Homo sapiens
atgtcagaggtgcacacataacatgttaggcatgcatgggagcagtagcatgtttgcgttattatttgtttacatggcttagtatctaagggacatgaagtattgtcatttatcagagactaggtctcaagtttgactctggtttaagttttccataatctgctcastacatttcttcatttaggcagctctttcacaacggtaaaagcatcaggtgacaacttccatctggctggtcccaagttacttttcatgtaattcatccttttaataagctatctcctgacatattgggtccatcttgacaagccatgtttttttttgtgagacatcattctaattatcttaatatcttagaaggaagaactccataattatcttttatgggaaggctcgagacacacatttgaaattgtatgcccaggactttatgtgcagaagaatcaaggtatagtattatccagtgtctctggcaagtttttgggactaaatttcaggctacaagatgtttgttgttcattgcaaaggtcaggtttgactgcgtttattaaattacaaacttgcttgtcttgtatcatcggaagatggtatgaattaaggctttctcattccag

SEQ ID NO: 860182 - DNA, 668 bp, Homo sapiens
tttacttgtttattttccatctagacttggagcctttaatgtggtagccattaatagcacgtggctgttgagctcttgaaagatggctagtccaaaatgagatatgctggaaatgtaaaattcacacacaacatttcaaagtcttgttatgaaacaatgtagactgtctcattagtagttttatagtgattacctattgaaattaatatatacattgggctaagtgaaaatgttattaaaattaatttcattttttctctttattttttaaaatgtgtctacatgaaaatttaaatttatgtatagggctcattttatttcatttggacaacactgatttagaccgtgagatacttaaaggtagggacagtgttttattcatctctgcatataaagtcaggcctgtggtaggtgctcaaggacttctctgcatgagataagtgactgaatattaagtcccaaatgaacagtgcagacactgagaacaatgggactacaagggagaggaaatgarcactatttccatacaagtccaggaaaatctgtacaagggatgcagaaggcctcgaagctggaaacgaaggccttgaagctaaattcttgagtagctaaagaagagattgtgctgtgccaggtgcggtggctcacctctgtaatcccagcacttt

SEQ ID NO: 860183 - DNA, 538 bp, Homo sapiens
ctgagaacaatgggactacaagggagaggaaatgagcactatttccatacaagtccaggaaaatctgtacaagggatgcagaaggcctcgaagctggaaacgaaggccttgaagctaaattcttgagtagctaaagaagagattgtgctgtgccaggtgcggtggctcacctctgtaatcccagcactttgggaggcaaaggtggrcagatcatgaggtcaggagttggagaccagcctgaccaacaaggtgaatccccgtctctactaaaaatacaaaaattagctgggtgtggtggcatgcgcctatagtcccagctaatctagaggctgaggcaggagaatcacttggacccgggaggcagaggttgcagtgagccgagatcgtgccactgcactctagcctggcaacagagcgagacttcgtctcaaaaaaaaataaaaaaaaaaaggagagattgtatgatttctccaagtcactgtcggcattcacgtttctcctatgaaaataaaaggccagcataaaatgggctttgata

SEQ ID NO: 860184 - DNA, 538 bp, Homo sapiens
ctgagaacaatgggactacaagggagaggaaatgagcactatttccatacaagtccaggaaaatctgtacaagggatgcagaaggcctcgaagctggaaacgaaggccttgaagctaaattcttgagtagctaaagaagagattgtgctgtgccaggtgcggtggctcacctctgtaatcccagcactttgggaggcaaaggtggacagatcatgaggtcaggagttggagaccagcctgaccaacawggtgaatccccgtctctactaaaaatacaaaaattagctgggtgtggtggcatgcgcctatagtcccagctaatctagaggctgaggcaggagaatcacttggacccgggaggcagaggttgcagtgagccgagatcgtgccactgcactctagcctggcaacagagcgagacttcgtctcaaaaaaaaataaaaaaaaaaaggagagattgtatgatttctccaagtcactgtcggcattcacgtttctcctatgaaaataaaaggccagcataaaatgggctttgata

SEQ ID NO: 860185 - DNA, 670 bp, Homo sapiens
cttgtcctgggtccattcattccattcagtcacatatattctaactcattcattcattcctttagcaaggatgaatagagcacctgctacgttacaagccctactctaggtactcaggttacgtcacagaacaagaaagacacaaacatttgcctctgcagtaagatatagaataaaatatgtataatgtctccctttccattgtcagccatcaccttgygcagcacggctttctacttaaagagtgtttattgtgtaggcgaagtgggcacagacaacggacgataatcacaataccagtttaaatactagataaaaggtgctaagtgatctggaagaaagagaggagggcaaaggagatcagaagtgttaggtagaaggacaattacagttttaagtaggatgactatggtagtcctcattgaaaaggtaaatttgagtttgaataagctccagagaggaatctgggaaagagctttccaggcagaggacaaagcaagagaagagattctaaggtgccaggcatggctagagccttgcctgtgagtgacgggagagtagtggaagctgaggtttgcaagataatggggccaaatcatgggggcccatacaggtcattgtgatgacttaggcttttactctgtaaaaactgtaaagtcactgctgagtt

SEQ ID NO: 860186 - DNA, 601 bp, Homo sapiens
ctgccgtaattctaaggcctccctagtcatgtggaaatataagtccaattaaacctctttttcttcccagtctcaggtatgtctttacaagcagcatgaaaatggactaatacagtcagatagatgatagatatagatatagaagtagatatataggtatggatttaatgtaattgttgttagcaatgaattatgagcaaattgtctgtagaatgcaagacagaaagaagcyttctttctatgctgagtttatccatattcctatgacactgataattaacactgtaccaattaattaattagtacaattaacatgtattgattagtcactgtccataagcaaagccccgagtttgactgaggtgtaaattcagtgtgtggctctagtatgaatgaatgaataaatcatattgatgtgcgtcatgggggcaaggcatagatttactgtgctaatccacgaagatttcttaaagagttaatcactagacataatgtataatgtcaataatggacataatgatggattaaaaatgtcaatggtagaaataatgatggcaatacagaaaagagttacattttattggatatctggtgtttgtct

SEQ ID NO: 860187 - DNA, 642 bp, Homo sapiens
ctatatctgcttaatgggaataccagtcccctgtccttgtcacttggatctcatattaaagatctcctttcatttctattgagacagaaaaacaccctctccttctactcacatttagtcagattccagaatcatttctttggcagtaaatcagtagtgaatgaaaaggctactcacatctatccatatcctattcccaaaggagaaatgggaacagaaagccctggaatgaatacaagcttccttctgctaggattgaatggaaatacttctctccttttaatatrccatctgtgtagattttcatggagttccttttcttattttcctatcctggccttgctgaactctgataggataataataataacaacaataataacagttatgatttaatgagaatgtactgtttaccagcattatgccaaatatcttagtcatgtgtgagaatattctgaatcccattttatggatgaagaaattaggcacaaggagggtaagtcagacatgcaaaaagaggattatgacttcagagcagatgatttaaccctgcttagattcttcctgcaaatagcaaagaggtaaaccattttgatataaacttaacgatgtgtacctatacaattccatttatatgaaatg

SEQ ID NO: 860188 - DNA, 593 bp, Homo sapiens
atgggggtgggcagatatatgttagaattaagcaactggctattatgcagctgactggtgttttacagaccacattttaggaaacattttttctctattgcaaggaacaaagtgccctagaatcttgccaacctcttaccacagggtaaactattcaaacttgagattcacacctactcatataagttttcaggtcatttctcagaggcatttttcctccaagcataatcccatttttccctaaggactcaagaagctatctcaaattttaaatctatgaaaagttgttgacattttaagatatctaatacttaaaaatctatggtctaaaaagtgtagaagtgagaatatatgttycaatattaaaagtaatatacaaatctatcttttcccttagaattttactttttcattgtgaaaatctttttacccatttaattcacaaatttagtgtttttttgccaagttaacacttctgaatgattttttaaaaactgtcaaaagaggaaaaactaaaacatatgatcttaattaagtttaaatgaacgttttaccaattcaaaattatagtttaaaaagttagtactttattt

SEQ ID NO: 860189 - DNA, 599 bp, Homo sapiens
tcacagggcaatgggtgttccaagggactgaaccaaaactcacaaaatctagatcccctattcagtaagacgcagtacctaagtaacataagacacagtacctaagggacagaagcctgatctggggctccaaagagcatagttttgcagacaagaccaaaccatggaaatagatagcttctggcaaaagaaggtctagaaaactcagtgtagataaggtggaaggggttgctgcaatggcccaagcataaagtgggaagagtgtagagaggaaaagcagatctgaacaagattggcttcccccttgcaggctgcatttgccttcattgaaaaacaaaacaaaaaattaattcaagaagcattatctatagaaagtgaactggatgggccgtttgcctagagctaaatatgctgactctatttttgttcatttccagctactttgtatttaaytaatgtttctgtaatggcttgtttgaggcagtaaacctctttagtaataaactacatcttttttgttatatctttgggttcatcaaagagcacaagaaatagttttaaaatgctgaatgattttttagatatgacattcccccagc

SEQ ID NO: 860190 - DNA, 633 bp, Homo sapiens
ggtaactaaaggatatttcatccaaactataacttgtctttcagggataaaagccacaaaaattatagggtgaatttagtggagcaaaaaacagatcaggagaaaaaagaggaacgtcagggataatatttaatccattctgaaattactagcatcaaactgctcctggtacacagtggacattagacattaaatatgtagttttgaaagtgasctaaactgtgctcgtagtcaagttatctgaaataatggggttataataaaaatccagtttctcataagcccaagataaaggtcaaccttttaagtatttctttcaatgacttaaatggacttatttgcagcagcttcatggcaaagccatgatatcactggtgacttctgtgtcatttatttaagcaatgtttcaattgtgctgtccccaaactgtagccaaaacaagctgtccaattccctgaggcaatggccaaggcttggaaaccatgagtatacacatgcctaattctcaaggggaaaaagcatgcttaaacctttaaagtacttacttgtattcaggtcttcaaagttgttgtttggctttatagtaaacaggataaaactgtctggagaaatgtgaacatttagagaaggaga

SEQ ID NO: 860191 - DNA, 584 bp, Homo sapiens
attaatgacaaatctgggactaaacaagtatcttaagcccaaacatgagattatttttttttaaaaaaatgagcagttgctatctagttaatctcttccttggttcactaaacagattcgtcaagagttagatatgagtcaggcgcagtggctcacgcctgtaatcccagcactttgggaggccgaggcgggcagatcacgaggtcaagagattgagacaatcctggccaacatggtgaaaccctgtctctactaaaaatacaaaaattagctgggtgtggtggcgcgtggctgtagtcccatctactcgggaggctgaggtgggagaatcacttgaacccaggaagcggaggttgcagtgagccaagatggtgcctccacactgaagcctggtgacagagcaagactccrtctcaacaacaacaaaaaggagttagatatgttctcaggttaacagctgaataaataacaaagaatgtcattgtgcctagcagctaagactgtgggaagactgagtctcccgttttatgcctcaccctgcagtataggaagatgccacctgggtcagctgggtcatcttggat

SEQ ID NO: 860192 - DNA, 670 bp, Homo sapiens
  misc_feature 60: n = A,T,C or G
tgatcataaatgtagacttggaggtagaactctttaccagaaataaaaaggatcactacntgttgattaaatgtttcttttgccaacaagaaagataatatttgtatgcacatatcatttagtaaaatacagagcacaaattaagaaattttcaaggaacaatggataaagccgctatcatattaaaatatttttaaaaacatcatcttctcacaattattagattagccatttgtttaaagagtctctgaggatacaggaaatgtaaatgtcacaattaacaacctggagctaatggatgagagaagttgtccctggctgtgtgtgtactggtggtatgaagcgtgtgtggatatatcccacacaccccaaaacccaccacaaacccaaaaacygtgtttcatataacatctgaaaatgctagtttaaggcatattttaaaattagtgaaaatattattgaatattagaaatattagtgaatattagtgaaaatcaaccacataccagttcataaaagaagtctgaagaattagcttatataaaccatattatttaatcaaaacacacaaaataaacaaaaataaaacataatcaaatatgttgacaatttgaaaacatacatctaaataacttagattacaaagaaaaatattacagaaattttagta

SEQ ID NO: 860193 - DNA, 670 bp, Homo sapiens
  misc_feature 60: n = A,T,C or G
tgatcataaatgtagacttggaggtagaactctttaccagaaataaaaaggatcactacntgttgattaaatgtttcttttgccaacaagaaagataatatttgtatgcacatatcatttagtaaaatacagagcacaaattaagaaattttcaaggaacaatggataaagccgctatcatattaaaatatttttaaaaacatcatcttctcacaattattagattagccatttgtttaaagagtctctgaggatacaggaaatgtaaatgtcacaattaacaacctggagctaatggatgagagaagttgtccctggctgtgtgtgtactggtggtatgaagcgtgtgtggatatatcccacacaccccaaaacccaccacaaacccaaaaactgtgtttcatataacatctgaaaatgctagtttaaggcatattttaaaattagtgaaaatattattgaatattagaaayattagtgaatattagtgaaaatcaaccacataccagttcataaaagaagtctgaagaattagcttatataaaccatattatttaatcaaaacacacaaaataaacaaaaataaaacataatcaaatatgttgacaatttgaaaacatacatctaaataacttagattacaaagaaaaatattacagaaattttagta

SEQ ID NO: 860194 - DNA, 655 bp, Homo sapiens
  misc_feature 8, 56, 77, 89, 239, 358, 402, 552, 576: n = A,T,C or G
taatggtntttaaaaatagttttataatcagccttctgtaccagtcttttttggtnttctggccttgtttcatttantcataaacatgntcacatttctcatcctaaacacaaaacaaacatgtcctcagacaaaaaaaaacattaactccaaatacccttctccacctccattcaccctcaaaagcttctccataccaacttcacagaagtmtgcaccatgcaccttgtcgcccctantttctcattcctctgtcgtaggcatctgtgtcccccactctgccaagtccttctaatgaaagtcaccttggaattgccaaacccagtggttatgtttttcttactatttgatcaatctntctgttgcatctgatgttgttgacagttccttctttcttcacantctctgctgtatagctgttggtttccttccattcttcccctcatcttagctttcttctttttggtctcaaactttcctatctttccatattgaaaaacaatgtattctatgctctccattcttaattgaaggccctgataacagaatatntgggttcaaagcccactctgccanttcccaacaatgtgactttgaacaagtttattaagattctctatgcctcagtttcctcaactggaaattagagaaaaac

SEQ ID NO: 860195 - DNA, 640 bp, Homo sapiens
  misc_feature 3, 120, 131, 142, 170, 275: n = A,T,C or G
canttcccaacaatgtgactttgaacaagtttattaagattctctatgcctcagtttcctcaactggaaattagagaaaaacatagtccttctctcacagagctgatataaagattaaangaatttatcantcagaacattnttcaaacagcacctaatgccataagtantcaaaagatttaactgatagttgcagtactaaacacaatctaatgatttgtaaatgcttatgtagtaaggttgatgatagaaaataacatattctaatgaaatcntcatgatttttaaaaaattatgttgaatgtatattctactcgataggaaacaatgtccaaayctctagatgtaaaagagtctatgtggttttactcatgtatattacctaaatttagaaactaagattaaaccattgcctaataattcatcaaacaagcaaaataaaacctaacataataatgatttattgtttaattaatattttaactttcaaagtgcttttctcatgctttgattgaaaacaaaaatattggtcttgtgtggtatacactcaaggtttctagaattaaagaacacttctatttaaactggccaaaataatagtaaacataccccacaaataattttttactgaatgcaaaat

SEQ ID NO: 860196 - DNA, 589 bp, Homo sapiens
aacaaatacaacttaacaaaaagtgaccaatacaaatttaaagagctctatatcttttaaaaaccctggttctcaaagttgaatccccaaaccagaactattagcatcatgcagtaccttattaaaatgaaaacctctgcagcttcacctcagaactactgaacctgaaactctgaaaatgatattcaacaattcgtgttttaaagcccctacaggtcattctgatgtatgccaaagtttgagaattgctatttttaacaaattaaaaacattactgtgaaaaatatttccacaaagaaaatctagcttcagctgttgttactgatgaatgttatcaaacatttaaggaagaaatgatagtaattacaaactttcagaaaataggaaagaagagaacactttctcaccccttttatgaggccattgccctgagagaaaaaccygaaaaagatattctaagcaaagacaaaatgtagtacatatacaccaaggaatactatgcagctataaaaaagaaagagatcatgtccattggagggacatggatggaactgtaggccattatccttagcaaactaacacagaaaca

SEQ ID NO: 860197 - DNA, 660 bp, Homo sapiens
  misc_feature 569: n = A,T,C or G
tatggaataaggcaaggagaaaaggcatggggtttagaaataattaaaactatttgcattgttgtgtatagaaagttctaagaaatataaaaagcaattactagaaaaaaatgaacttaataagatcataggatacaaatggatatgtgaaaattatctttctatatgtcagcagcaaacaattgaaaaataatttttaagttatactatagcatccaaaaccatacaatatttaggagtaaatttaataaaatttgtgcaagatatacacattgaaaaccacatttctgtgataaatttaaaaagatctgaataaacagaaaaatataccataatcaatggactggaaatctccatattctaagatgtcaattctcaaattgttctataaattcaaggaattcccatttaaaaactcagcggacatttttkgtaagaaattcacccgtagattccaaaatttacacagaaatgtaaaaaactgggaagagttaaaacaatttttaaaaagaagtacaaagttaaatttgacttcaaattttactatggaactgcagtaatcaatgttngtatgagagcagacctacattagcaggaaacaatacagaatccaggaatgtcacactgatatgttctatttatttttatcaaatgtgccaa

SEQ ID NO: 860198 - DNA, 660 bp, Homo sapiens
  misc_feature 569: n = A,T,C or G
tatggaataaggcaaggagaaaaggcatggggtttagaaataattaaaactatttgcattgttgtgtatagaaagttctaagaaatataaaaagcaattactagaaaaaaatgaacttaataagatcataggatacaaatggatatgtgaaaattatctttctatatgtcagcagcaaacaattgaaaaataatttttaagttatactatagcatccaaaaccatacaatatttaggagtaaatttaataaaatttgtgcaagatatacacattgaaaaccacatttctgtgataaatttaaaaagatctgaataaacagaaaaatataccataatcaatggactggaaatctccatattctaagatgtcaattctcaaattgttctataaattcaaggaattcccatttaaaaactcagcggacatttttggtaagaaattcaccmgtagattccaaaatttacacagaaatgtaaaaaactgggaagagttaaaacaatttttaaaaagaagtacaaagttaaatttgacttcaaattttactatggaactgcagtaatcaatgttngtatgagagcagacctacattagcaggaaacaatacagaatccaggaatgtcacactgatatgttctatttatttttatcaaatgtgccaa

SEQ ID NO: 860199 - DNA, 500 bp, Homo sapiens
gattatcatattagttggtacatattgggtgacaaaaagattcttactgaacaacaaaaaccccccacaaagaaggaatgagagaatactcgagggaccaatttttcagtacagaacctttctgagttctttttctctgtcacctaaacgaacaacatgcaactggtatggctacgccagaaaccaacaatgggcatgcatgtattgtgagcaaaattaaacccctgctgctatcagtggctaagattccagggctgtttgttgtaacaacataacctatcctaatagaagcagtggccacatcccaagttcacttctgctcgctcactcagtaaaatgtgtaccaaatgccayggtgatatctacaggttaattagatgtgggccttgagctcctggagctcacagtcccttcgttctaatcaaatatagccctccctgagttcagaagaaatgctttcttcttacataatatgaaatttcagatatgagttgtgtagt

SEQ ID NO: 860200 - DNA, 500 bp, Homo sapiens
gcaaatgcactgaagatgaagcagtagcacgataggtttacacctgtacctgtacctgaaatataggtggagaggaggagaggatgaccagagacgatgctgaggagcttgccagtaactacatgttgaaagagccctttaattcagcaaagggattaggatcatattctgaaggcaaggggcagaaacccaagggttttaagctgaaggtcagatttttgttttggaaatttgactctatacaaaacaaaatgaaagtatcccaaaacttgcatacaataaaagatacctaaacaaagaagaaaggcaagtaaaataaagaatgccaatacacgtcctaaacatccctaataggaacaggaarttcacagaagagatctcattttatacttaagaaatcatgctcaatctcactagtcctctaggtaatggaacataagacagtaagtaataatttgtgccactctgatcaacatgttttaagacactggaaaacatct

SEQ ID NO: 860201 - DNA, 621 bp, Homo sapiens
acttgaagtcaggtcatgcacaactttccagagaaacagaagataaaaaaaagaacgaaacataataaagaaagcttatgggacttaaggggcactaccaaccttatcaataaatgcatgatcagagacacagaaagagaagagaaagaaagaggaacaaacagttataagaaatcatggctgaaaattcaaatatgaaggaaactgacatccaaattctgaaagccaaagcttcccaaataagwtaaatctaaagatgacaaaaccaagatgcattataattaaattatcaaaagtcaaaaaaaaaactttattccttttttttttttggagacagagtcttactctgtcacccaggctggaatgtagtggggtgatctcagatcactgcaacctctgcctcctgagctcaagcgattctcctgcctcagactcctgagtagctagggactacaggtgcacaccaccatgcctggctaatttttgtatttttggtagagacaggagtctcaccatatttcccagactggtcttgaactcctgagcctaggtaatccgtccgcctcggcctccaaaagtgctgggattataggcatgaaccactgaacccagatgaaaaat

SEQ ID NO: 860202 - DNA, 586 bp, Homo sapiens
tgaaatgaaagcacactaaacatatgaaagcccatgaaagcataaactttgctattgaagcttaatatataagtgaatacagaatattctaatactataatggtggggtataaatcacttttaattctgatgaattatcagactaaagtataagtataaccgtctaaaatatgttaatggatatccagtataaaaacataattttttacgggtgtggtggctcatttctggaatcccagcacttttgtaggccaaggcaggaagattgcttgagcccaggagtttgagaccaaactgggaaacatagtgaaaccttgtctgtacaaataaaaaaaattagcagggcatagtggtgaacacttgtggtcccggctactctggaagctgagatgggaggactacttgaacctgggagatagaggctgcagtgaggygtgattgcactattgcactcagcctggggaacagagtgagatactgtctccacataaataaaataaaatacaaaacatataatttgtgacattaataatataaagtgtgtgtagagaaggaaaagtgtagaatgtttgtatgtgattgaagt

SEQ ID NO: 860203 - DNA, 561 bp, Homo sapiens
  misc_feature 499: n = A,T,C or G
ttgcaaagaccagaatacaagcacacctctgtattttatgtcgttgctgttgttgccatcatactcctctgagagtgtatggaggtccacacccaactttcttggtaaaacagcatcctatttttatctgttggattttcaattctaagattcaaatccaagcatcttcttgcttgtaggcaaagtgaccactagagggaagcaactgccaggcagagcaatttcttcacgccatgggtaatttgatccctgtgtgtcatactccaagggtttggacagaatacctagttctaacaggaagttagtagtcacggagcctggctactgccaagctctttcactgactttgatcaaaccacacttggggctgcgtgcagtggtttatatctgtaatcctagcacttargaaggcctacgtgggaggattgctttagatcaggagtttgagaccagcctgggcaaaataaggagacgttatctctacaaaaaagtaaaatangcatggaggtgcacaactgtggccctagctactaaggaggatgaagtgggaggatcgcttga

SEQ ID NO: 860204 - DNA, 561 bp, Homo sapiens
  misc_feature 499: n = A,T,C or G
ttgcaaagaccagaatacaagcacacctctgtattttatgtcgttgctgttgttgccatcatactcctctgagagtgtatggaggtccacacccaactttcttggtaaaacagcatcctatttttatctgttggattttcaattctaagattcaaatccaagcatcttcttgcttgtaggcaaagtgaccactagagggaagcaactgccaggcagagcaatttcttcacgccatgggtaatttgatccctgtgtgtcatactccaagggtttggacagaatacctagttctaacaggaagttagtagtcacggagcctggctactgccaagctctttcactgactttgatcaaaccacacttggggctgcgtgcagtggtttatatctgtaatcctagcacttaagaaggcctasgtgggaggattgctttagatcaggagtttgagaccagcctgggcaaaataaggagacgttatctctacaaaaaagtaaaatangcatggaggtgcacaactgtggccctagctactaaggaggatgaagtgggaggatcgcttga

SEQ ID NO: 860205 - DNA, 574 bp, Homo sapiens
tgtcttgtagatgcttctgctattgaaataatctcaatgtattacagctgcctttctccttacctgcttctctcagggagctgaatagcctttgggaaaagaactgaatcttagaaatctttgtaactccagagtctactctagtttttggcaaagagtacatgatcaataattaattgctaaattaaattacagtgcattaaattggacctccacattaagaaccacctctctgggcatgtatcatcaggattttaaaatccagatggatttaggaaaaaagcacctattaatagatattgaaggttgaagatctattaagatatttaaggtttaacaaacacttttctaattctgccctccaggtcccactggttagatgagggtatttgaattaaggattaaaccacacagaatyttctaatttagtaatactgtttgagctcctcccatgtgaaaaagtaagcaatcaggtgttctgaaggccacagaattcttataggcagcaacaaatcagggaacaccacctggaagaggagaagtagaaccaggctttaagaggctgaatttggag

SEQ ID NO: 860206 - DNA, 666 bp, Homo sapiens
caatgaaggggtaggcattgggtaaatgttcccattccaaatgggagaaattggctaaaacaaagggaccataggccccatgcaagtctgaagcccaacagggcagtcattaaatcttaaagccccaacataatcttctttgactccatgtctcacatccagggtatgctgatgaaagagctggtttcccaaggccttgggtagctctgcccctgtggctccgtggggtacacccccgtggatgctttcttgggctggcattgagtacctgtggctttttcaggtgcatggtgcaaaatgtaagtggatctactattctgttctctaggggagagtggcgctcttctcacagtgatgctaggcagtgccccagtggggactttgtgtgggggctccaaccycacatatccactctgaatggccctagtagaggttctccatgagggctctgatccttcagcagatttctacctagacatccagacatttccatacatcttctgaaatctaggcagaggctcccaaagctcaactcttgtcttttgcacacccacaggcccagcaccacatggaagccactgatgcttgggagttgcagtctttgaagccacagctcaagctgcaccttggctcattttagccacagctggagctggagtggcttgg

SEQ ID NO: 860207 - DNA, 666 bp, Homo sapiens
caatgaaggggtaggcattgggtaaatgttcccattccaaatgggagaaattggctaaaacaaagggaccataggccccatgcaagtctgaagcccaacagggcagtcattaaatcttaaagccccaacataatcttctttgactccatgtctcacatccagggtatgctgatgaaagagctggtttcccaaggccttgggtagctctgcccctgtggctccgtggggtacacccccgtggatgctttcttgggctggcattgagtacctgtggctttttcaggtgcatggtgcaaaatgtaagtggatctactattctgttctctaggggagagtggcgctcttctcacagtgatgctaggcagtgccccagtggggactttgtgtgggggctccaaccccacatatccactctgaatggccctagtagaggttctccatgagggctctgatccttcagcagatttctacctagacatccagacatttccatacatcytctgaaatctaggcagaggctcccaaagctcaactcttgtcttttgcacacccacaggcccagcaccacatggaagccactgatgcttgggagttgcagtctttgaagccacagctcaagctgcaccttggctcattttagccacagctggagctggagtggcttgg

SEQ ID NO: 860208 - DNA, 655 bp, Homo sapiens
gcaacaataacaactgtatttcaatgaatgtttattttgtgccaagttctttattatgaaatttatatatagcatttaattttatattttcatataaaccttatgaattttgtatcttagtaatctctattttaaagatgacaaaagtgaagctcagcaatatttactaaggtgaataaggtcatatagctagtaaatggaggagccaggatttaatccttatctgtctggctccagagtttattctcttaactatcatgttaattgtggctaggataaaacaataacaaaacaaacctaggaaacaaatgcttctttattacttcaaattcaytgaaagtatataccataagaaatctttttttattcttacatatccacaaatactggcgtgtgtttcttagccaatcagcaatcagatgcttgaagaaatctttaatccctaacattgaaatatgaaaactgcacatctcttatccttacttcgttttacaaagtatacaggaagtatatttggaagaaaaaatatgtaacttgagatatataaaagaaaagactaagtagcagttgagatgcttgcatttaagatctaattctgctcccaattccctgtgtgatcttgggcaaatcgcttcctccctcttggcctcagttt

SEQ ID NO: 860209 - DNA, 637 bp, Homo sapiens
cctttggtggggttctggaacatccctgagatatcagaccaccgaaatgccactatgcccaatgtatacaaatatggtgcacatgttaattacttacctgttaagatataacattgcatatggcatcttgaatacttattaaatacacattacagatgaggaaatagagctacaaataggttaagtaactttaccaagaagcaaagcatacacacaagtccacctaattctaaagcttgtatacccaccctagggcaaattgttccccacccaagtcccgccctgtaatagcttctcgagttttaatttttatatcttcttgtaagtcacctgaagcactttctgaayaagacagaacacaaatcaaaatgaagtaaattatattggtttccagagacaaggcataacagtgcccaacgggataatgagagggttggttattcttaaatcaaatcttcttttttggcttccatttttccattgaatgacaacagtgccttaaaaaaaagtaaacttttttttagaaccattttagatttacagaaaaattggaaagataatacagagaattcctgtataccacatactgtttcctttgtaattaaatcttacacaaagtgtggcacatttgttgcaa

SEQ ID NO: 860210 - DNA, 637 bp, Homo sapiens
cctttggtggggttctggaacatccctgagatatcagaccaccgaaatgccactatgcccaatgtatacaaatatggtgcacatgttaattacttacctgttaagatataacattgcatatggcatcttgaatacttattaaatacacattacagatgaggaaatagagctacaaataggttaagtaactttaccaagaagcaaagcatacacacaagtccacctaattctaaagcttgtatacccaccctagggcaaattgttccccacccaagtcccgccctgtaatagcttctcgagttttaatttttatatcttcttgtaagtcacctgaagcactttctgaacaagacagaacacaaatcaaaatgaagtaaattatattggtttccagagacaaggcataacagtgcmcaacgggataatgagagggttggttattcttaaatcaaatcttcttttttggcttccatttttccattgaatgacaacagtgccttaaaaaaaagtaaacttttttttagaaccattttagatttacagaaaaattggaaagataatacagagaattcctgtataccacatactgtttcctttgtaattaaatcttacacaaagtgtggcacatttgttgcaa

SEQ ID NO: 860211 - DNA, 639 bp, Homo sapiens
tattttcaataatgactattaaaatcagactcagaagcagagtgtagaatggtggttgccaggggctgagggtggaggaaacgaggtgatgttggtcaaaggggacaaactttcagttatgagtacgttctgggggtctaaggcacacatggtgactatagttaacaatactgtattgtatacttgaaatttgctgagagagatcttaagaaaccccatcacaccaaaaataaaaataaaaaacctatatgaggtgatagatatgccacatattaattaatttgattatggtaatcatttcacattatttacgtgtatcaaattatcacaytgtacacaataaatatatgtaagattttgtcaagtatacctcaataaatctggaggtaaaatatagattatattagcagtgggtgggttgtagtttagagtttgttttattttgttttgtcataggatgagagatcacgggatatgaattttgcttatgtttcccactcaaaataccagggacaacagacaggctttagcccttcattataacagcttatattcacatagaactttacttttgtaaagtgccttcacattttaaatgtcccctacaaagcaaagcaaaacaaaacattgcttaatact

SEQ ID NO: 860212 - DNA, 543 bp, Homo sapiens
tcaataattaataaaattagtagatacaaaacattaagaatatataaattagaataaataaacaaataagaatagataaaacttgagcaattttctcaaccaacttaaccaaattgatacttataaaacattccactaagcaccagcaaagaacaatttttttcaagtgcccatacaacttttacctaggtagaccatataatgaaagataagtcaagttcaataaatttaaatatatttaagtaatacaaggtatgttttctgatgacaactgaatgattttaggtgtcaatagcaggaagatattcagaaaattataaaacattaggaaataacattttttgtttgtttgtttctgagacggagtctcgctctgttgcccaggctgcagtgcagtggcacartctcgtctcactcaacctctgcctcctgggttcaagcgattctcctgcctcagcctcccgagtagttgggactacagctgcatgccaccacggatggctaattttttcgtatttttagtagagacggggtttcaccgtg

SEQ ID NO: 860213 - DNA, 646 bp, Homo sapiens
ccctgtgaatggactgatcttgaaacccaggtaaccttactccctggtcccagcctttgttaatggggacacaatcctggaaattttgcctgtgtgtaaacctctaggggctttttctttcatcgttttacatcagccagactctgactcacagctggagaatcagcttccttattatgtagcgaattccatgaacacacaccaagagttgttttctgtaacaggctgaagtagcttcttctcccagtctctttctcccatcaaaattagaatatctttccttggaaaactgtgcccaggttgagggggacttctccctggttttgtgtaractctttgatatgctccaaactcaacgcctttccttcaatccctggggccttaggaacagccaacccacatgtggtgggaagtgaggcgagggggaaagaggaatgtgagggagacacaaacacagcacaatgttttctttctgagaaacttcatcaaggctccgattccagtgacctcaccttcaagcaatgccagctcctttgctttaaatcaaagttgacatgtggtggtggttcacatatttggagtctaatgagcctgcagcttctaatgctgcaaaggaaatcctgagagtaatatctgccctctgaga

SEQ ID NO: 860214 - DNA, 646 bp, Homo sapiens
ccctgtgaatggactgatcttgaaacccaggtaaccttactccctggtcccagcctttgttaatggggacacaatcctggaaattttgcctgtgtgtaaacctctaggggctttttctttcatcgttttacatcagccagactctgactcacagctggagaatcagcttccttattatgtagcgaattccatgaacacacaccaagagttgttttctgtaacaggctgaagtagcttcttctcccagtctctttctcccatcaaaattagaatatctttccttggaaaactgtgcccaggttgagggggacttctccctggttttgtgtaaactctttgatatgctccaaactcaacgcctttccttcaatccctggggccttargaacagccaacccacatgtggtgggaagtgaggcgagggggaaagaggaatgtgagggagacacaaacacagcacaatgttttctttctgagaaacttcatcaaggctccgattccagtgacctcaccttcaagcaatgccagctcctttgctttaaatcaaagttgacatgtggtggtggttcacatatttggagtctaatgagcctgcagcttctaatgctgcaaaggaaatcctgagagtaatatctgccctctgaga

SEQ ID NO: 860215 - DNA, 558 bp, Homo sapiens
caactgtgtattttccctcaaataagtctgttggagatgggagaaggtattggattctccccaaaatttaaagtgagtagatgagaaatctcacagaaaatctgagtattaagctatggaaatgttcaaacatatataaaagttgraaaaaaaattaactgaactcctatatacacaccatttagattccactattaacattgtataatacttgtttcctctgttatgagtttgaactctccaaggaaatccaacctgacttcagtaactgtgacagtgtagaagttatttattttaataaatccaattctgtctgcaagtttcaacttattcctcattttgttcacttaaacattaaatcattaagaaaatatctgttaaatgccataccctaaactgaattattgtgacaaagaaaattaatttagtttccctttgtcaattgtatatgaatttaaataaatcatatttatattaaaatgccggctatggttttaattgagatgccatgaaatctatagatcaaattgatctatatgaaattgaattgacggctta

SEQ ID NO: 860216 - DNA, 590 bp, Homo sapiens
ggataagccttcttcctcaaatgatttcctgttggtcagtgtgggaatattattcctcgatatttggtaagtcacagtgatgttgcgtggagataagtggtgatattgtgcatgtgggaagataactagagtgagatgagcagctacaaacatcaggggctttgcattctggcaccaacagtgccatgtatttgatgtgtaactttgggaaataatcctggattttgtttcagtcacttcctytaaaaaagattacattgcatgaaatcagtggttcccaaatttatattttcccaatgataaacagtggaaaaatattttattaaataaagtcatacatgaaattctcatataaagtacttctcaaaactctttataagggacagaaactcaattcaaacaagcttaaaagtaaaataggaaatttattacctaaaataaccaggaaatctaagtggaagaaccatgtcagacatggctgggtgaggaattgaaagctgtcatcagagatccacatctccatttcctatgtaccaatatctacttggctttcttctcagtgcgctctcaatgtgtggcagcaacatggt

SEQ ID NO: 860217 - DNA, 626 bp, Homo sapiens
aaaattttctgatgggttggtaggagaaaaggtcatagatgcaaccctttggatcaactggaataaatgatgcattttttatttcacaaatattaattgaacacctaatacaactgtaactgctttttaggtactaaaagataagtacacttattttaatgaaatagttctttttgtcagaaatttcatttaaatgtcatatcagtatatatatgtatatgtcttccttataaataaaatttatattccatatcagtatatatatatatatcttccttacaaataattaaaatgtaaactccatattagtatgtgtgtgtgtgtgtgtgtgtgtgtgtgtgtgtrtatatatatatatatatcttccttataaataattaacatgttttatatatgatctgaagacaaacacttcagtgtagtagcagaaacacctgctggagaaaccagcctgggttagatattttctaaatatgtgaccttcagcaagttactttcctttaccaagtatcaattttctttcacatgctttgcagagtagttatgagcattataaataacatcaataaaatacctggcccatagtaggtgctcaataaatcatagctgtcactattacatcatga

SEQ ID NO: 860218 - DNA, 682 bp, Homo sapiens
aacttgctgtctgcctcctaactcagagatcttacttcactctcaaaggtataagaaacagagaaggtataaattgttgttcaaacttttctaataagatcatgaaacctcaaatctaaaagctttacattgtcaaatgtaaagtcccttcaatgtccacttayaagaacaaaaaagaaacccttactctgaaaaattaatgcactgtttgaatttttccttgggaaaggagagacatagacctggtaaagggggagaggagacgttagggcacaggggactctggtctggtcctgcagcctctccttttgtgactccacctattacaggggaagagaccggagttacaccgagttactggcggaagtatccgtccaggtctgcagcaacgtcaattcttgcctcctaagaaggaagaattcgactgaggggcacaaagcagaaagggcgactgagtcaagttccagagcaggaatgaaagtttattttaaaatgccttagaacaggaacgaaatgaaggtgtgcatggaaaagacccacgcaggcacatgaaggttaaagagagaaggtcagtgccccgtttaactgtaatcttgggactttcccaagggaaactcacctctttcccatgattcttcccttagggtgggctgcccgcctgcacagagccctccttagcttt

SEQ ID NO: 860219 - DNA, 682 bp, Homo sapiens
aacttgctgtctgcctcctaactcagagatcttacttcactctcaaaggtataagaaacagagaaggtataaattgttgttcaaacttttctaataagatcatgaaacctcaaatctaaaagctttacattgtcaaatgtaaagtcccttcaatgtccacttataagaacaaaaaagaaacccttactctgaaaaattaatgcactgtttgaatttttccttgggaaaggagagacatagacstggtaaagggggagaggagacgttagggcacaggggactctggtctggtcctgcagcctctccttttgtgactccacctattacaggggaagagaccggagttacaccgagttactggcggaagtatccgtccaggtctgcagcaacgtcaattcttgcctcctaagaaggaagaattcgactgaggggcacaaagcagaaagggcgactgagtcaagttccagagcaggaatgaaagtttattttaaaatgccttagaacaggaacgaaatgaaggtgtgcatggaaaagacccacgcaggcacatgaaggttaaagagagaaggtcagtgccccgtttaactgtaatcttgggactttcccaagggaaactcacctctttcccatgattcttcccttagggtgggctgcccgcctgcacagagccctccttagcttt

SEQ ID NO: 860220 - DNA, 612 bp, Homo sapiens
caaaagcttagattcttgcagcattatctggtatctctgtatttaaacaacttaattataatattctcctagtccatctagtcctctgtgaaagcataaggtctgtgatcaaacccttgaatttccgcttgctacctatttgacattggatgagtccatttatctctcaaagctttwtttgtatacaaataaaagagtgtgaggtatcaagtgtttatcatagtaatggaacagagacggcactcaagtagtaggaattcccatgggttcagacattccctacagttccaggaacttcattgctggcttgccttaaaggagctgactgtattctgctaagaaaatctctcccttactcctgccccgttcccttccctatttggatatatagagagataagtttcaatgattttgcaaagattccattagcattaaatggagtacacatgacccaggagaattgaaactgtcagtggaaatatctaagtggaaatgttcctgtccatgaagctgttgctttagagaccttgtcagtaagagcttttgtcttaggggtttgtaaatatttatatttttaaactactatgagaggaacaacagccattccacatg

SEQ ID NO: 860221 - DNA, 571 bp, Homo sapiens
taagcactttacatatattgactcactcactccttctgacagccgtatagtagatgacaacaactccatttaaatttacaataaggaaacaggtgcatagtatttgagttgtaattaaaatatccattcagatctagtggtagtggctaaacataaggctgtgttgagaagrattctgaagctacatttaataacaatagagggaatgacatgctcaattagtaatttgtacaacaaatattactcagctctttagatgtgcctggcattattatagatgattagaatacactggtaaacaaaagtaggcatgagtccctgcttttttattgctgatattctagaggaagatacaaggaacagcaaacataataaataagtagatcattcagcttgttagacattaaaacacgttctggaaaaacaagacaatgtagaccaaggtaagtggtctctgcaagaaggcacaggtgttgcaagtttcaatgtggtggacaatgtgtgctttgttgagaaggtggcatttcattaaacccttgaagaaggtttaagagttagcaatagcatgaca

SEQ ID NO: 860222 - DNA, 430 bp, Homo sapiens
gcttgagttttctcatctgtaaaatgggcaccaaatatctaactcactgagtctgtgtgatcatttcatgtgctaaggattataaagagcctgacatggggcctgacacaaaggtggagttctgtgattcctgtcactctctctgtaaacttttctggtattaaaaggaaagaaacagtgaatggtttgctttgagtaacccaccacattgtgcaaatgtttccgaaagtgaaaaggcaccatccgtctgtttaattgsattgtctcagaaatatattcaagtattgacatagctttgaatcacttatacttaagactatcagagaaatttttctctcctctgcttcattagtccaaagatgaaagtgacgtgaattggatatttctgtccccttactgtatctctctgtagatgtctattttggggatt

SEQ ID NO: 860223 - DNA, 602 bp, Homo sapiens
gtgaaagagaagagtttagaactctggcactttctaaattcaaaagctatgctttcttctggttggtctgattacttccaataaagaaacagggaatgtttatgttgaaagattaaaatatcatagagggagatgcttttttttcttcaaaactcaagaccagtttataaaggagagaataaatttttccctttgcatcctcagaatactgagcaagaaatacagatggacataatagaagatatatgtataagaaagagaggccattgaaataagaagagttgcatgatatcagattggcctgcctgagaattaacatgctaytctacatgcccatcaataatagactgtataaagaaaacttggtacatatatatattatcatggaatactatgcagccataaaaaggaatgagatcatgtcctttgcagggacatggacggagctggaagctgtcctcctcagcacactaatgcaggaacagaaaaccaaacaccgtatgttttcacttataagtgagagctgaatgatgagaacatttggacacattgtgggggaacaacacacactggggcctattgaggacgcagggttgtggaga

SEQ ID NO: 860224 - DNA, 602 bp, Homo sapiens
gtgaaagagaagagtttagaactctggcactttctaaattcaaaagctatgctttcttctggttggtctgattacttccaataaagaaacagggaatgtttatgttgaaagattaaaatatcatagagggagatgcttttttttcttcaaaactcaagaccagtttataaaggagagaataaatttttccctttgcatcctcagaatactgagcaagaaatacagatggacataatagaagatatatgtataagaaagagaggccattgaaataagaagagttgcatgatatcagattggcctgcctgagaattaacatgctactcyacatgcccatcaataatagactgtataaagaaaacttggtacatatatatattatcatggaatactatgcagccataaaaaggaatgagatcatgtcctttgcagggacatggacggagctggaagctgtcctcctcagcacactaatgcaggaacagaaaaccaaacaccgtatgttttcacttataagtgagagctgaatgatgagaacatttggacacattgtgggggaacaacacacactggggcctattgaggacgcagggttgtggaga

SEQ ID NO: 860225 - DNA, 604 bp, Homo sapiens
tccttcctcttcaacttccaccatgattgtaagttcctgaggcctcctcagctatgcttcctgtatagcctgcagaatcatgagtcaattaaacctcctttctttataaattatccagtttcaggtatttctttatagcagtgtgagaatggacgaatacaagctttattccaaaaacaaaatgaaagagaaagagagtgtttgcttcattatggactaatacaagctttattccaaaaacaaaacaaaagagaaagagagtgtttgcttcattcattagtcaactctaaaactttttagactttatgtttaggtgtctgtcacaaattccttaacgatactctggtttagtagtttcctgccatggctgaccatcagcatgacctaaagatatttctcctaatatgaaagtctaagtcccacccatgaayattccattcaccatatctcagtgagcttgagcacatgtcttttgaaattttctacaaataactttgttttatagatctgattgagaagcaatccaggaatacatcactgtttccaaaattcacagagtgacttagtctattgctcaaggacctccagaacgtgaactttaatt

SEQ ID NO: 860226 - DNA, 621 bp, Homo sapiens
gttcaggagcgttcttatcttcaatgcctataacaataatttaaaaaatggaaatagtgttcatcaacactaagctgtgttatagtcatgaaatattttataacaatgaaaaggagtatgctaaaactttgatgaatctcaaaatgttgaagaaatacaccaggcaccagaaaaagatwcacactatatgatgctatttatgaacaattcaaaaataaataaagctaatttatagtgagataagtggtttgggattctatagctctggattggaatcttgaatttgcaaataagtggttgtagggtttggataagttgaattacctctcaaagtctgtttccccacgcagctcgtaaagcaattaatatagtgcctttcatatgcaaggtatgtggaaaataatgattctcattattagtgttccaaactcttaggtctgctgttcctctgaagtatgttattctagatttggaaaggaatttctgtttgtggctttaggtctctaccatgccccctatcacatacatctttgttcttctttgtttcttcaatccctctttctatccttatgtcttccatttttgcttttttaatgccttcttctctatctttccatcctg

SEQ ID NO: 860227 - DNA, 621 bp, Homo sapiens
gttcaggagcgttcttatcttcaatgcctataacaataatttaaaaaatggaaatagtgttcatcaacactaagctgtgttatagtcatgaaatattttataacaatgaaaaggagtatgctaaaactttgatgaatctcaaaatgttgaagaaatacaccaggcaccagaaaaagatacacactatatgatgctatttatgaacaattcaaaaataaataaagctaatttatagtgagataagtggtttgggattctatagctctggattggartcttgaatttgcaaataagtggttgtagggtttggataagttgaattacctctcaaagtctgtttccccacgcagctcgtaaagcaattaatatagtgcctttcatatgcaaggtatgtggaaaataatgattctcattattagtgttccaaactcttaggtctgctgttcctctgaagtatgttattctagatttggaaaggaatttctgtttgtggctttaggtctctaccatgccccctatcacatacatctttgttcttctttgtttcttcaatccctctttctatccttatgtcttccatttttgcttttttaatgccttcttctctatctttccatcctg

SEQ ID NO: 860228 - DNA, 635 bp, Homo sapiens
tgggagttaagaggatatttatcacaatctgttcattttacagatgatgatattgaggccaggaacaaggcataacctgcctgagcgagttgtggtatagaacataaatcacccaagtactaatcagaaagggaaatgcattacccattattaagcacccaggtaatggaacttgcccctcaatttaacaaagtgtgaaatatgtcaatgtgtattttaaagaatkatcagtataagaaattcaaatatatccaccatgagggcagggattgtgcctattttgcttgccatgtagaagatcctggaggttttttgtctgtttgtttgttttgtttttggaggattggtttatttttcctaacttgcatagatttagatttttcagctctatcattagaagttaatgggggcacaaactactttcccccttatctctcactcactcaattaacaagaagccaacaaatttgggggctgggttgtgcccttactaggaccctggcccaatttttggtactcaggggatgacaaagggacactgaggaccctgccctgctcttatatgtccactgtgaactcacacattgactttcaagattatagaggtggaacagggatgtttgggctgccttaac

SEQ ID NO: 860229 - DNA, 600 bp, Homo sapiens
cctaaataaattcacggacttaatagatcttttaatatattaatgtatattataaatctctaaaatgtggaagggagatcattgtataaagggatccccaaacttttcactgtgtatattagagtcctgtggctgtagtaacaaagtaacacaaacttggtattttaaaacaacagaaatrtattcttttatagttctaatggctggaagtccaaagctaacatatcagaagagccacagttttaacagaatagcctcaaaaaaagtcttctgctaatcaataagtgtgctttaaaaaatgctaagcattcagtaaaccatttcaaaaaatatacaatgaataaaatgtatcttttctttcactaatttagcacatttagtaattgggcaaatgtttttaagaatgtcatatttttcaagaactgagatataaaagttgataagtaagacatggtccttgcctttatgaagcgtagatgtgcttaggaaaatagatgtaaacataaaaagtcatcttcagtgtaataagatagtctgttagaaatataaggcaagaaaacgaaatatgaaaaaaatcatggagataacaggttaacaaaa

SEQ ID NO: 860230 - DNA, 600 bp, Homo sapiens
cctaaataaattcacggacttaatagatcttttaatatattaatgtatattataaatctctaaaatgtggaagggagatcattgtataaagggatccccaaacttttcactgtgtatattagagtcctgtggctgtagtaacaaagtaacacaaacttggtattttaaaacaacagaaatatattcttttatagttctaatggctggaagtccaaagctaacatatcagaagagccacagttttaacagaatagcctcaaaaaaagtcttctgctaatcaataagtgtgctttaaaaaatgctaagcattcagtaaaccatttcaaaaaatatacaatgaataaaatgtatcttttctttcactaatttagcacatttagtaattgggcaaatgtttttaagaatgtcatatttttcaagaactgakatataaaagttgataagtaagacatggtccttgcctttatgaagcgtagatgtgcttaggaaaatagatgtaaacataaaaagtcatcttcagtgtaataagatagtctgttagaaatataaggcaagaaaacgaaatatgaaaaaaatcatggagataacaggttaacaaaa

SEQ ID NO: 860231 - DNA, 607 bp, Homo sapiens
agtgtgtacattcacacttacacatacatttccggttggtgctatataggtgttttatactgtttttagaactttatttattttgtatattaccacattgaagctcttttcttacaatcagagacaaggaaaaaaggaaagaaaaagtgcctaaaggcatctatatttcattwtgacattttcctttttaatgtcataacatataaaaatgtaaagtgaattaaaaagatatcaagcaaagaaaaaagctgatgaaattattaaaccaaatagtcaagaaaaggcaaaggcctaacttgtttacatgcatacctcctgattataagaccaatacacaggcaagcttgactgcctcttaaagctagtttttgctgcattattaactgtttctctagcacatatcaaattcaacattttacccaagctcattagttgaaagactaaatatggagcctttggttctctcctaaaagggcctcattactatgactaaagtttaaaaagagtatcattactaagcctgcaaaaatggtcatgccaattatgagatggaaaaatccagacatgcggtgctttctaaagaaataataattttttaaaagggtaa

SEQ ID NO: 860232 - DNA, 666 bp, Homo sapiens
tcaaaattattatcttctagtcctagatccttttgtctgttatttgagggcagatatattttaatgaactggcatataagctgcctatgctagagcttcaattcactaacggaaccacaaaatacattttatagtgtaaattgcttgtcctgttaaaattgcatttactttcccaacttttaaaaagtgaaaggatgaacacaaaagccagtaaattaaaagtaaaattctctgcaagctgacctgatacatgagagtccagatgttcatcaactactattaaaggccatttacacaagaatttctttgctccacacaagcaaccacatgaattatcattgtaataacaataataataataataataacacttgctttattcattcttcactaaygagccctggtacagaagccaaacagaacattttacttccctcaggtacacattttgatatatgtattttgttttcttaagagttgtcatgagtcctttaaattgtctgaaagagacttctaggataatgacagccaatacaggctaaattttgcattgttacattctcacaaactgtcaccaaatgcctggctctgtgaggcctttgttgatcttggggtccactcataatgctgcccttcagaacctgaataaattcagatgctcagcca

SEQ ID NO: 860233 - DNA, 612 bp, Homo sapiens
agtgatagtggttgttactgtaagttaggttacttcaataatgtgaaataaatgttcatatttcctagtctaaggtttatttctgtattagagaacagacaagcatgagcaaacaaaaagttaagacaaatatagaaacaaaaaatatggcagggatatagctaagtcctttttaaaagttaaagtactactaagttgagttttaaaaagaagaaagtttattaatatatagttcccaagagttattcctgaataagagactcaaaaagactaaaaataaattttgaacaaaagcatttgctaatgacacacacacacatacacacacacacacacacacgcacacactcagcaaatgaacaagaaacaagaaaaataaacaatttctttattattaaataactcacttattactatragctattcttttcttttgagactttcggcgaagtctctgtcgccaggctggagtgcagtggggcaatctcagctcactgcaacctccacctcccgggttcaaacaattctcttgcctcagtctcccgagtagctgggactacaggcatgcaccaccacgcccagataatttttgtatttttagtacagatggga

SEQ ID NO: 860234 - DNA, 612 bp, Homo sapiens
agtgatagtggttgttactgtaagttaggttacttcaataatgtgaaataaatgttcatatttcctagtctaaggtttatttctgtattagagaacagacaagcatgagcaaacaaaaagttaagacaaatatagaaacaaaaaatatggcagggatatagctaagtcctttttaaaagttaaagtactactaagttgagttttaaaaagaagaaagtttattaatatatagttcccaagagttattcctgaataagagactcaaaaagactaaaaataaattttgaacaaaagcatttgctaatgacacacacacacatacacacacacacacacacacgcacacactcagcaaatgaacaagaaacaagaaaaataaacaatttctttattattaaataactcacttattactatgagctattcttttcttttgagactttyggcgaagtctctgtcgccaggctggagtgcagtggggcaatctcagctcactgcaacctccacctcccgggttcaaacaattctcttgcctcagtctcccgagtagctgggactacaggcatgcaccaccacgcccagataatttttgtatttttagtacagatggga

SEQ ID NO: 860235 - DNA, 585 bp, Homo sapiens
gtttcaaatcttggtaggttgtattttcctaggaatttatccatttcctctagcctatttaatttgtttgcatgtaattgttcataatagccctttatgatcctttttatttctgaggcaaatgtgtaatgtctctactttcattgtkgattttatttattgtttttcatttatccttacttagtctagctaagggtttgttgattttatttttgttaaaaaactcttagttctatttgtttttctatggtgtttgcattttctatttgatttatttctgttttgatctttactatttcttttcttttgcgaactttgagtttagtttgctcctctttttccagtcccttgaggtgtaatgttagattatttactttgaatctcccttcttcttattttgttttgagacagggtctcattctgttgcccatgctggagtgcagtggcacaatcctggctcactgaaacctccacttctggggctcaagcaatcctcccatctcagtctcttgaatagctgggactacaggcacgcatcaccatggcaagctgatttttgtattttttttgtagagatgaggtttc

SEQ ID NO: 860236 - DNA, 637 bp, Homo sapiens
gatgctgtagtgaagaatctaaatctgagtcccaaggaccacatcacaaagaggcaggcagtgactcaaacctggcaaacaacatagagtcaaacaggctgtagtcctgtcctgctccttattagtgggtgattggacagagtgttggcttgagagaacttgctgttctttcagtgaaacggagtgtctttctgcccaacacctcaaaacagatgcaaacagcatccacaccaaacaaataactgtatggaaccttcccagaatatttttttcctccttacttagagtggtgatgtggaattcacactacattgtcataacaataaaataataataataacaaactcctggatttsattccagctcagtccttagtgggtgatggaaggtgggcattacaatgaaacactgtaagtctttatttacacacctagaaaatgagaattgttatctgatccacatttctcagggttgttggtaggatttagtgagatgctgtccataaaactactttctaaactgggaaatattgtcccagcagtgagacggtacaattgatacaaaactaactgttagcattgttcaaagaaaaagtctggtttgagaaagcagttaattactgttaatgaggatcata

SEQ ID NO: 860237 - DNA, 582 bp, Homo sapiens
gattaaaaccacatttgacaaagcgtaaggaagaaaataccctgtacttgacggcagcatgtcagaagggacatgaacgattaggtgccttcctctgcattacgatatccaatgctgatccagaaactggcctgctggaattccttctgatgctggactataaggaaagatcatcatgagtcacagaaagcctctacctaaccccttctcactctgttgggacagttaagcaatccatatcttctggtgagctgatgcctttcttctcccctaactgctatgagtgtggcaaagttttacatcctgctttgcctccaataggggaagaaatatagtaaatcactttagagaawaaaaggctgttgtgattaatttacgggaaaagaaaggttaaagaaaatatgcagtgtatagttggacaaagtgttaaagaaaacaacagggaagtttgcagatttgggggacagccctagggtgatgttgaggaaagtggtacaggtgattggaaatagaattcacagggaaaatagtgaggaactaagaagtattgcctgcctaaagatgaggattgtacatatacat

SEQ ID NO: 860238 - DNA, 623 bp, Homo sapiens
cttggaggaccaggcaggtgcttaggtgaaagtagtgttctggatgatggtgtgtaggtgggaaggaaggtgggatcagaggacccacatttgaagacaagtggttgttgtcagtcgctggcaggccaagttgccagatactcatttttttaaaatgagaaatctggatttttatgtgaatcttaccactttccaatgttggcttctgattgaaattcttttaaagcacattgcagtccaaacaaaacagccacgggctgaacttagcccctggaccaccagtttacaagctatgatttaaattttagaatcttcaaaaatacttcatattgcctttcacagtggggagartctcagagctgggtgaccctgagactcagtggtggctcctaggtttaggccactgactagcaaaatgacagaatatagtagacatttaaatgtgctgacctgggaaaattagaagcatattgcacccactcttaatttttaaaaattgttgtagtccatgaaatccagaagtctggaaaccagtggtttagcacaacacccctgttctatggaagaaaagacaaagatccaaagatgttcattggatgagccaagcatcaagtccaggagca

SEQ ID NO: 860239 - DNA, 640 bp, Homo sapiens
gaaggttttgtgtgtgtgtccaggcagggggaaaattctaacagtggagctctgagtataggggccaagtctagttctgctcaaaatttccagcaattatttagagaaggataattaatattacttacctgttctgaaatgaagattgtatagcaagcatagttaataccctagactrgagtcagggtcccagaagattcaatgggtcaagtttaaccagacatgggaaaatcggataccatgctccagtgatgaaaagccacctaccatttactgaactggccaacttcctttctccccttggcatttggcacatagttaccttcatggtctacctcttcactttttaaaaataaataggtcagacagtacaagaacggatttcctgcattcataaaatgaagttagcccttcgcgttaacatggttaactgttgctagttcttcaggtctaattctcaatgtcatttcttctggacagtcttccctcttcactttcctcaagactggaatgaatatccttcctctatgtccccatggtatcctacactttcctccatcatggagttcattacggcactgatgctttctatctctcccgcgattcagtaaaattcttaaggacaaagattacatgttta

SEQ ID NO: 860240 - DNA, 536 bp, Homo sapiens
tataaaaaggcagtttccctaacaagctcttgcctgccgccatgtaagatgtgactttgctctttccttcaccttcctccataattgtgaggcttccccagacatgtggaactgtgactccattaaacctctttcctttataaattatccagtctcagatatgtctttattagcagcattagaacaaactaatagagtaaattggtgctggtagagtggggtgctataaaactacctgaaagtgtggaagtcactttggaatggggtaacaggcagaggwtggagcagttcagaggactcagatgtagataggaaaatgtgggaaagtttgaaacttcctagagacttggagagctcagaagacaggaagatgtgagaaagtttggaatttcctagagactagttgaatggctttgaccaaaatgttgatagtgatatggacaacaaggtccaagctgaggtggtctcagatggagatggggaatgttttgggaactggaataaaggtcactcttgctattcagagactggtggca

SEQ ID NO: 860241 - DNA, 645 bp, Homo sapiens
atgtgcagaatgtgcagttttgttacataggtatacacgtgccatggtggtttgctgcacccatcagcctgtcacctgaactaggtatttctcctaatgctatccctcccctagcccccctttcccagacaggccctggtgtgtgatgttcccctccgtgtgtccatgtgttctcattgttcaactcccacttatgaatgaraacatgcggtgtttggttttctgttctggtaatagtttgctgagaatgatgatttccagcttcatccatgacactgtgaaggacatgaactcatccttttttatggctgcatagtattccatggtgtatatgcggtgtggcattatttctgaggcctctattctgttccattggtctatatatctgttttggtaccagtatcatgctattttggttactgtagccttctagtataatttgaagttaggtagcatgatgcctccagctttgttctttttgattaggattgtcttggctatatgtggtcttttttggttccatatgaaatgtaaagtagtttttttctaattctgtgaagaaaatcaatggtagcttgatggggatagcattgaatctataaattactttgggaagtatggccattttcatgatattgattcttc

SEQ ID NO: 860242 - DNA, 645 bp, Homo sapiens
atgtgcagaatgtgcagttttgttacataggtatacacgtgccatggtggtttgctgcacccatcagcctgtcacctgaactaggtatttctcctaatgctatccctcccctagcccccctttcccagacaggccctggtgtgtgatgttcccctccgtgtgtccatgtgttctcattgttcaactcccacttatgaatgaaaacatgcggtgtttggttttctgttctkgtaatagtttgctgagaatgatgatttccagcttcatccatgacactgtgaaggacatgaactcatccttttttatggctgcatagtattccatggtgtatatgcggtgtggcattatttctgaggcctctattctgttccattggtctatatatctgttttggtaccagtatcatgctattttggttactgtagccttctagtataatttgaagttaggtagcatgatgcctccagctttgttctttttgattaggattgtcttggctatatgtggtcttttttggttccatatgaaatgtaaagtagtttttttctaattctgtgaagaaaatcaatggtagcttgatggggatagcattgaatctataaattactttgggaagtatggccattttcatgatattgattcttc

SEQ ID NO: 860243 - DNA, 588 bp, Homo sapiens
ttagtgtaatttattaaacagctggaattaactgatatattatgagttgtatcacaaattatctcattgaaacagattatttcgctcctgctaccaacatttctctccagagtcatcctcctgtttccattctcctgtatcacccctttcctttccagctttccccctacaaatctgcttaaaaattcacctatgttgctatcaaaaagcagacgcacatgacctattgtccgctatattctyctgttcttaatccccaacagttctcccagtccccacctctgcattcactaagatatcagcatgttctcttctccttcggtaagagaaaagagtagacacaagcctctcatataagttaattcatgcaaatagatgtctatggatctgctaaatctttcattttattaggcagacataaataagactaaattatcttcacagtaagcaaggatctcacaacagaaaaaagaaatgcatataaacataatttatatacaatctgccctttgtatacaagggttctgcatatgcagattcaacaaaccatgggttgaaaatattggaaaacaaaacaataaaaagtac

SEQ ID NO: 860244 - DNA, 588 bp, Homo sapiens
caattacaggaggcagctttgagctgagtaatagatgatatcatctccagtcagaatggtcctttttggggagggctttgtctgtgggtgagtgagctccccttcaccagaagcatgcaagtcagtactgataaccatgcataatgaggccataggtgggattacagttctggtggagacggtggccttgtggtcttggggttgagcactgcacagtaatatcttattccatttcatatcagaaaaccaaatattgactgcttctcttctctttaacaggcatttattgggcatgtctatcccaccagcctttctgctcttcactgggggtgttgcaatgagttggacatgttcctcaccattaaggggcttccactttagtgggaaagtcatatagaaacataagaaactctgatttgtaaatttagagacacacagtakgacaggagactgaaaaagcagagatttatttgactaggaaaacaaggcaaatcagctggagggggcaagatttgagtaggcatttgagaataggcagcctgctgagaggtaaagatgcagactccatcagtgagggtcctagcagga

SEQ ID NO: 860245 - DNA, 601 bp, Homo sapiens
  misc_feature 391, 394, 406: n = A,T,C or G
tgaaggtagatgccacagttttttcttcagactgtagacactgaagactcgggctgatttagaatgaaagaattcaggtgaaacagattctagcctgggctgggcagtttgttagctatgcaatcttgggcaagccttttaatctctctgagcctccaattccacatctatttggaaggaataatagtatctgactgcctggatcacacaattgccatgagggtctcataaaataatatcccagaaagagttctgggaagagttaaccagcatgcagatgaaagggggcattgttatttttcrgtcactttgttcattcttttccagtaatcatgtaaaagaaattgcttggaatttttatcatcagaatatccagggtttattttaatgngantaatattcattnaagcaataacaggagtcaggtctggtgtagtggaaaaattatgcgtgctagagactgacccagggtttgaatctcggctccgctctgcactagctgtctgaccttggcacattgctcagtaagagccgctggtttctcatctgtaataattgggtgatagcagctatcctgtggcatgtcatggcactcaaatgg

SEQ ID NO: 860246 - DNA, 716 bp, Homo sapiens
ccaagctgacatcccacatccggtgccccatcccctcatacaacactgctaaagttccatttttatagcaccttttcttggccagctcaacacacatgggaaatagacaataacataagtttggaagtttgccggcctcttagggggtaggagctgccactagytaccagacccccataaactaaatctttttttttcccctttgtacagatataaagggtgattgatttactattttttttaaaggaacccctcagctcagtgacccattaacagcagaactaattcactgagctacgataacaaacttacacccacaaaagcatattcaaggcaaccacgatctttgaaatgtttgttttccttgggatttctgatagatgaggtgacaaaagcagctggatgcaattcaaaatgcagaacaggactgggttctcagggctatggagagccatgcatgggagctctctccatcaagataattgggtgaagacattgctgggtcaacttcttctcgttgctttatcttcctgggtgcttcttcctcaggcctgatcactggtagggtaaaggtttgtggtgcagcactgccaacagaactttctatgaagatagacatagtttatatctgtgttggccagtatggtagccatgacctctactacccatgtggtaactgaacgattgaaatacaactagtgtgactaatgacctga

SEQ ID NO: 860247 - DNA, 632 bp, Homo sapiens
atggcggctgcggcccgggaactggtgttgcgggctgggacctcagatatggaggaggaagagggcccgctggtgagagcgcggagctgtttctcctccgtagttccggtgctcctagcttcagaaagacctgagctgggtttaggcacaagggtgggaacttggctgctacccgtgatattacctgtttggctccccgtacccttccctgtgatcagacccgaccctgagcgggaccctagtggctgaaactcatgttctggggcacaaaatttcaacttcactccacattttggggtagagtcacgaagtagtatagtgtaaaggttaagaacatggcctctgaagccagactgcctgagttctatctctgccacttacacgctgtgtgcccttgggcaagttaaccagcttctctgtgccatcatttctcacacctttaaggtgaggaagatagaacctattgtatacawcgtcgttaggattagatgaatatgtgtaagattgcacctggcatgcaggtaaacactatgtgttttgacatttctagaaagcctggggttccccagaggtgtgatagaacacccaagatggcaggagtctgagggtcctaaatttaagtgcaagttctg

SEQ ID NO: 860248 - DNA, 624 bp, Homo sapiens
ggaaccattagtgctatgtccaaatttaaaacctctcagagaatccgtattccaaagggaagtaccagagttgaacctgtgggggaaaggggcttgcaggatgtaaggtagaaggaattgtgggaggagctggtgtccagttcatacrataagatttaagagtaggaagtgactgagaatgatgttaggaagggagtcagatggtggtgggaggctgttaggggaggggtttagacctcacctattctttgtttcctgttctccctgcttggagtcttggttgcctgtggaaatatcaggcatgtgaatgggaaggcaggagtagacagtgaatgtggcctacttgatttgagggtagggaggagtgaatacttacctgtattgggggatgaggaattcacccccccatggcggctgtagcagcagctttgggctaccagacctgggggagtccccctgtagaagaaatgggagatgatggggaggaggctactggatgaaagatgggtgggtatggaggaatcagaggagaggagtaaaaggaatagcacaggaacaaagagaagggggtaattatcattcctaacaggttttaatcaaagctgtgccccagaaaagggcggg

SEQ ID NO: 860249 - DNA, 496 bp, Homo sapiens
atattccattatatggtctgtgcatattatagacccctgcccactgcactttggggcttaaaacctattggttggctaattcagttattaaagaattcagtaaatgagaataacaccttgtctctcttgactcttggtccaaatctcttgcaaataggccacaccgtagtcatagagcaagaggactcagatacagtttggttggtcctttaccttcaaaagttcaagtgctggctgccgagacttctccaactcagtgatcagggtcccaagctggaccacctcctcagaacccttgatgacacggctgttcctccttttggtgagytcttgctctagccctaccagctgctccaacaggtactgttccctttctctcaaaaaccgatggccctattcaaacactgatacaatgtcttgcctgtggttctgaaatgttgtctccagtaaatgcagaaagagaaaagtgacctttttgagaggctagggaacacca

SEQ ID NO: 860250 - DNA, 581 bp, Homo sapiens
cagcacagggcatggccctgcggctggaccggacgcggcggctgcaggcagagcaggaagagagcgcaggctgggcagcggcgtacgcttcggcgacgtcagcttccggggccgtggacgggggcgcgcccgagcctcctggaaacctccccaccaaggacctggggaacccaagtctyggcccgctttgtagcctctggtttctaaattcagcgtcgaggagcgaaaacaacccccctgaactgggcccagacccttaagctcctggaacctcagtttttccttccgtcgaatggcgacaatggctgtctggttgaacgttattttacctaggaagtaataattttcgtaaataggtctctgagagtatttgcttgctaaaatcctgctttgtcctggaagcaaatttaggccacgttaggggcggggacttcgtatttaatgttgagcacctggcgagcgccaccttcgcctcaaagcgccctcggaccctggatccagcataaggccagagttgggcagtgaggggtctcgagaggtggaaaggggattattgccctctcaagagtcctacgtaggtg

SEQ ID NO: 860251 - DNA, 581 bp, Homo sapiens; identical to SEQ ID NO: 860250

SEQ ID NO: 860252 - DNA, 626 bp, Homo sapiens
cgcctctgagcactaccatgaaaccaggacaaatctcagggagcctcccaaccagggctgccctggggaccccagacattacacaggactctgtcatctctcccccgggatagctgcaagtcctgcccctcctatgctatggagttgccactgttcctgttggcagccagtaggcacatatctttctggacacagctctcctggggagcccataacaggaaaggcagagggcaggaatggggttgaaggtggcaaaccttggaaactcatgtggtgagagacactgcagaagatcttcccaatattagggggtgatgtatagcttcttccactttaatgattggaacatgagttcctgacttaccatgtcccctgagtcatggtaggtccaacctccagctgccatggctggggaagcgaggagctctctwacatagtctctgtcttagactccctcgcccacttgctgcccctcctccattggagggtcctccattggaagggtgtgaaggctgacctggtttcttcctgttcctaggtcctttcctgctccctcttggagcagggcagggaggcagggggtggagggacctggtcccagtcagaactgggacatggccttggat

SEQ ID NO: 860253 - DNA, 623 bp, Homo sapiens
  misc_feature 499: n = A,T,C or G
gctgggcatgaaaaggatgctccggggccattgttagtgggtttggggctgaaatgagtgatcctgcctctggtcccagcatccagctgcctcgttgtctatcctgggagggtgtggtgcttcggacacgttgaggggctttgtcagcatcaggaaggcctttgcttcttgcacccaggcccagctgagacaggcccctgagtcctggctcatgttctggcagcaaacttcacttttcctaaggaagggaagaaggaggcagcagggaagcaaccctgggttttcagaaggtccttctgatggctaggctaaggggaggaagaattcctgccatgccccagccttctccaggacaacctgctggaacgcagtggtgttttcagggcactgwgtttgccttgcagctgagggattttcacagtgtgctccagatggtgctagaggaagtcccagagcctgtaaggtgagagaaactgggccctggatgagaagtgggcanctgggccttcccccaccttgggggttctcctggggaaggtatcaggtgagggggagtgggcagcctggtccccgcaggctttggggagtgagagcattttttttgccttgccctggcaacccag

SEQ ID NO: 860254 - DNA, 688 bp, Homo sapiens
gtcttatctacaaagctccccacatcaatatagtttacttacaagtacaaaattgagtttgtctgctcttctgaaagtggtgagttaagataagggtcccaacagatgaacagctgttactgcaggtgagtgttctacatcaggcacgggattttcaactcataacggagtgacgttgaaccacatacaatattatgaggattttcccttgaaaccgttaagagctgtaacatgatgcttgtgaatgtcaccactaggtggcactgaaagttaaacagttattgaacaggctgtggaatattgaagttttcctatggaaaaaaatttgattttttatkttgtgtctatatattcttcatttgaccttaaaacatagcagtagcagacatctcttgtaccgtgccttacacctcagcccatttgttttcctccagcccttggtgaggctcttggttacagaacctcagctcagctcactgcatatccgctgcttttttgcactaagtctttattcacaatgtggttgggacacctgtgagaagctacttagcatttatgaatgctcaaaactgcaagtgtgggggaattaagacccaatgggcaatccgtgactattaggggatgggagtcagggctttgtgttcctttcatacccctcaggtggacaattctgaggcaagatcttcat

SEQ ID NO: 860255 - DNA, 617 bp, Homo sapiens
aggggatcatttttgggaattttgacaagctcctggagtctttggaactgaattgaaggtcgaaaagaaattaaattcttgtggctctggtaagtctggagcgcctggatcgccgactcggtgagcttcacatgcagtacggtgatgttgtcctgccccagccgtccgcactagagcccatagcgctgccccgcgacccccccacccccgacatcttaaactcccagaggtgccgccgccgccagtccagctccagcctccactgcggccgcagctrcttgggcttctgcagccgccgccactgctagggccatcccgctgctggcgtactgtcatatactgcgcggagccagacctcggactgccatcgccgccacctgccccaccctctggccccgcgccccgccccaggctagtctcattggtctagttccctcagaaccgtcctcatcggccgccttccactttcacgggggcggggcccaaagtcgctggagttttgctcctgggactggacgtccgagaggtaagagagctatcacaaggttttctaatccttatgtttcttttagtggatctccaggttactgtggtttgtattatcaggctacttacaa

SEQ ID NO: 860256 - DNA, 617 bp, Homo sapiens
aggggatcatttttgggaattttgacaagctcctggagtctttggaactgaattgaaggtcgaaaagaaattaaattcttgtggctctggtaagtctggagcgcctggatcgccgactcggtgagcttcacatgcagtacggtgatgttgtcctgccccagccgtccgcactagagcccatagcgctgccccgcgacccccccacccccgacatcttaaactcccagaggtgccgccgccgccagtccagctccagcctccactgcggccgcagctacttgggcttctgcagccgccgccactgctagggccatcccgctgctggcgtactgtcatatactgcgcggagccagacctcggactgccatcgccgccacctgccccaccctctggccccgcgccccgccccaggctagtctcattggtctagttccctcagaaccgtcctcatcggccgccytccactttcacgggggcggggcccaaagtcgctggagttttgctcctgggactggacgtccgagaggtaagagagctatcacaaggttttctaatccttatgtttcttttagtggatctccaggttactgtggtttgtattatcaggctacttacaa

SEQ ID NO: 860257 - DNA, 529 bp, Homo sapiens
gaaattggggttttaagtggaggaggaaataagaagcacctggtaccctcacacatgcctagaccaggggattggatatatgtagagaggggtcctgtgctgagagacagcctatgttcctccagagcaggtgggagctacacctccatgggcttgattgccttggcagtcctggcgtgcttgctgttcctcctcattgtgggctttacctcccggtttaagaggcaaacgtaagtctcccctttccctttcctcaacctctctccccttcattcctggcttcccttttccttaatggtctttccctttctattctctcacagttcctatcagggcgtcctgtgactygccttgccacatctgtgtctctggaacccaggacctctggacctcaggttcccaagacttcagtcctggtctgctcaggaattgaagatgtaaggaattgaagataggagagataccttgaaaaagtagagaacagtcatgaggcagctttcatcacacccttttaacatttatctaaaag

SEQ ID NO: 860258 - DNA, 571 bp, Homo sapiens
aaggtgatagttggagtggaatgtgattcttcgctaaatgtttttttgaaaataaaaatttacctgaggggttggatattggtttatatggggcactgaaaacagctattatgtgggttgccttctgttagtgtaaatgtgtacttgtcctggcacttggtgagagctgtcttatgayttcaattgtcatcgatctgttcaatgttaaaggatgtcttagaaaatcagtccaaagccagcctcataggctacaaatctagttttagtgctattataattttttgtggccaaggtaacagaaattccataatcctaacttggtataaccttttcttttccctataatgtattcaaaaacatatatacataatagactatgatgaatgggaattcaaaacatcaatttattattattggttgagtttatgcttaaaattcaagtgcagatttctctgtaagctaaacaggcatatgtggcctagttagaaggcctaagggactttactctcttgctaaggccaactacaaatctaaaaatcttacccctctcctgcaaattacatatgactgg

SEQ ID NO: 860259 - DNA, 585 bp, Homo sapiens
gtccaagaaaggaattgtaagagtacagtgttttctggaagttaaggggctagacaatttcaggaaggtgagggtggtgataaaacaagaaaaaagtattaaaataaaaaagaggaagctgtttttacactttttcctattggtgcaaaaaatacacaattgccatttactgarcaatcactgtatactggacattttgctaaaaactttatacatattttatttaattatcttagcaatacaatgtagctataatccaaactgccaagtttagaatggtacaaaaatacaactgcttaaataagatagaatttatttctctttcatatagccctacagtgatgagtggtccataattggcatggcctgtggagcagcttgatttcacaagattgtaaaaagcacaggcagatggttggtcctcccagactcaatagaaggcttctattggaagtccaaggcactgttctgtttttccctgtcctcaccatcaggaaagcagaaagagagaaactgatcttcagagagagagatacagaagtttcacccatcatttccacttatatctcattgattaaaaacttg

SEQ ID NO: 860260 - DNA, 628 bp, Homo sapiens
tgaagtccatcttttagatacggcatctagtcacactctcaccagcagtttttgttgtctgattttctttttttttcatatgggtaacatttttctctttctttgcatagtttatattggaaactggaattttgcataatatattgtagaaactctggttactggtctttctcccttctctccccactaggtctttttttcattatttgctcgtttacttgttcagttgctggctggattatttttgtamagtctatcctcccctatacttctgctgtgttaagtctttgatgttgcttttcagaggatacacatatgcctagtcaccttggggtgacaataattttggcagagcttatgttgtcccttttcctgactacatccagcttttaatctaataattacctgctgattgctccattgtttccaaaatgccctagaacataagtttctctactgagtaatgcaataaaattcagacttctttgaaggaatgattactgaggtcagtgtttgcaatttgttattacccaaagagggttcctcctggctctttctttttcctgtttagaggatgtattaaatgatattcaggtggaacagtctattctgaggatgttggccaaca

SEQ ID NO: 860261 - DNA, 664 bp, Homo sapiens
agataaagaagcctgcagtgcaagcagaggccacaagttgtccacatacaatgttggtcataagcagtggatatcttagagggttacagatggccaggaagcggtcatatcccatcaaagtgagaatgatacagtttgtgccaccaagtcccaagaagaagcacatctgtaagctacaacctgtgactgaaatgcttctgtccttggccagtagatcttccagcatcttggggacgatggtcagygtatagcaggtctcagagaaggagagtgcactaaggaagagatacataggggtgtggagggacctgtccacccaagttagacccatgatgatcagattacctgcaagggtgagaaggtagagacaaaagaagaccacaaaaagaaatgtctgtacatgtgggtacacagaaaagccaacaagaatgaattccttcaggattgtctggttgatcttcatcgtttgaatgtctgaaatttgaaagaaacaacaataaacattcaacaccattatcttttgataccatcaaaggaaaattgtgatgactaagataaatcatcagaattacaattaccaactgctttttcttgtagtttagcaaaactatgtatatgtaggtaatgtgtttttctcatttttcatccattcattttttccttt

SEQ ID NO: 860262 - DNA, 664 bp, Homo sapiens
agataaagaagcctgcagtgcaagcagaggccacaagttgtccacatacaatgttggtcataagcagtggatatcttagagggttacagatggccaggaagcggtcatatcccatcaaagtgagaatgatacagtttgtgccaccaagtcccaagaagaagcacatctgtaagctacaacctgtgactgaaatgcttctgtccttggccagtagatcttccagcatcttggggacgatggtcagcgtatagcaggtctcagagaaggagagtgcactaaggaagagatacataggggtgtggagggacctgtccacycaagttagacccatgatgatcagattacctgcaagggtgagaaggtagagacaaaagaagaccacaaaaagaaatgtctgtacatgtgggtacacagaaaagccaacaagaatgaattccttcaggattgtctggttgatcttcatcgtttgaatgtctgaaatttgaaagaaacaacaataaacattcaacaccattatcttttgataccatcaaaggaaaattgtgatgactaagataaatcatcagaattacaattaccaactgctttttcttgtagtttagcaaaactatgtatatgtaggtaatgtgtttttctcatttttcatccattcattttttccttt

SEQ ID NO: 860263 - DNA, 609 bp, Homo sapiens
tctgaacagcaaagaaaacaatcagcggtggggtgtggtggctcacaccagtaatcccagcactttgggaggccaaggtgggtggatcacctgaggtcaggagtttgagaccatccaggccaacatggtgaaacctggtctctactaaaaatacaaaaataagcttggtgtggtgtcaggcacctgtaatcccagttacttgggaggctgaggcaggagaatcacttgaacctgggagggggaagttgctgtgaactgagattgcgccattgcactccagtctgggcatcaagagtgaaactctgtcttcaamcaaaaaaaaaaaaaaaaaaaagaagaagaagaaaacaatcagaatattattaggtaatttctatgttacaaacaaactactactcttttgtgtgttttccttatattaagaaataactctaataaaatattgaatagaagcagagataatgggcactattgtctcattgctgatattaatgaaaaaatttcctctatttcatcagtaagtttatttattatagattttcaaagatactctcaaattaagacagtttctactattttcagttttatgttttctcagttatatttgca

SEQ ID NO: 860264 - DNA, 563 bp, Homo sapiens
cgatactatcttagtcaaaattcctctgtaaaatgttcagggatcctctgcttcagtgccttccacatatcccaacagtttattccattactgtttatgctatccctttaattaaaaaaaaaactaaatattgaaggtatatacttcatctaaagtcacagaagactagacctgaaacctaaatcttttcacatcaccctaaagatctttcatcttcattttacagcttgaacgtattttgtaggatgagaatttttattttcctggtcttaagtctttctatcagtacagatgacaacacactatggtggtccctaatggcatcttgagcagatgggggctgccttctcagatgcmccatggagctgaatccatagatcataaaaaggcaattatatcgatcacatgattcatttaggctatggatttatattaatactatgtaaaaatccactggactagaatcagctgtcctcatgtgcctgagcaaaaaataatccaaacaattctctttggtatcagttagatacaggtactccttcagaatcagagaattccagctt

SEQ ID NO: 860265 - DNA, 575 bp, Homo sapiens
gaaaatgtgactaattttaagcttatttctcattttgttatgttattgaagagacaaaagagaatttttatgcagacattttataatagatgcattgtaaaacatgttggtttaactgaaaatctgattttgtactcataattgaaagatagttctttgttaggctgagaaggtaaactgggcaatggctttttagagtgaagactgtgctcagaataagctggaggagattcagttcaccgtcttaaccccgagttgattttttctacctttctactccatcatccataaatgaatatagtgtgctgttatatgtatgagacactaaataaacttatgctgaatrttgagtgaataaatggtcgtattcaacaataccccaactacataaatatctcagctaaataaaaataccatcattcattttctgaattccaatatttctgatttccactttcctcatggttcaactggcaattaatataatttcttttttattatactttgagttccgggatacatgtgcagaacgtgcaggtttgatatataggtatatgtgtgccatggtggtttgc

SEQ ID NO: 860266 - DNA, 575 bp, Homo sapiens
gaaaatgtgactaattttaagcttatttctcattttgttatgttattgaagagacaaaagagaatttttatgcagacattttataatagatgcattgtaaaacatgttggtttaactgaaaatctgattttgtactcataattgaaagatagttctttgttaggctgagaaggtaaactgggcaatggctttttagagtgaagactgtgctcagaataagctggaggagattcagttcaccgtcttaaccccgagttgattttttctacctttctactccatcatccataaatgaatatagtgtgctgttatatgtatgagacactaaataaacttatgctgaatattgagtgaataaatggtcgtattcaacaataccccaactacataaatayctcagctaaataaaaataccatcattcattttctgaattccaatatttctgatttccactttcctcatggttcaactggcaattaatataatttcttttttattatactttgagttccgggatacatgtgcagaacgtgcaggtttgatatataggtatatgtgtgccatggtggtttgc

SEQ ID NO: 860267 - DNA, 600 bp, Homo sapiens
tctatatgggcctttaggaaagaggggcaaaaccactcagccacagacactgggagcagggaaacactcagagacttgtgcagaaagagacctggataaaaattcttctctcagttactcatgcattagttgctcaacaaacatttaaaagaggaaataggatagatatatggaaatagctaacaagccaagccaaatgcgatcttacataagagaacaatttgtaaaaatgctttgcagttttaaaggatggaataattacaaacaataagatgggaaggaggaagaaagcatggaaaagtgttcatttgaactgagccttatggagcagaaagatttttgayaggtcaatcataagcataacatgttctaagaagagcaaacagcaatagcaaaggcataggagaaacttagcatgaattgtctgccagaaagtgtgagagctataatttttataagttataaggaaatcattggcaccgaaacaataacagtgttttgggactatacagtttgagaatctacagagggctttgaatgccagattaactcagaacattatgtattacctgtcttatataactgaaattgccacctatg

SEQ ID NO: 860268 - DNA, 566 bp, Homo sapiens
cagggtaagcaaaagagagtggggagctggaaatcctacccagcccagcagtaaggaggattctcttgctgtccctgaagtcgacagaggctgaatggagaatctggacttccagcctaactagtagtaaacgtcagcactcccactttcccctgttgcagcagtgttagaagaagccaggtaaaacagaaggtttaggccgggcgtggtagctcacacctgtaatcccagcactttggcaggctgagacaggcggatyatgaggtcaggagatcgagaccatcctggctaacacggtgaaaccctgtctctactaaaaatacaaaaaaaaaaaaaaattagccaggaatagtggcaggtgcctgtagtcccagctacttgggaagctgaggcaggagatggcgtgaacccgggaggcagaggttgcagtgagctgagatcgtgccactgcactccagcctgggagactgagtgagactgtctccaaaaaatactaaaaacaacaacaacaacaacaacaacaaaaaccagaaggtttaaatgagatccaaagtgtcataacaaga

SEQ ID NO: 860269 - DNA, 622 bp, Homo sapiens
cctgctaattttttgattatttgtagagacagagtttcactatgttgtcaaagctggtctcagatttttggaatcaagcattctcctacctcagcttcccaaattgatggaattacaggtgtgagccaccatgcccwgcctctttccgacttttgagacaatattaaatgatccaacatatgtgtaattgaaatctcagaaaaagacaaaaagaaagaagactttaagatggctgactagaagaatttcatgcctgtatccttcatttagaagaaccaaaatagcatgtagacagtcacactgcacatgcattatccgagagggaacactggaattcaacagagaagcaacaggaaacatcaaaagcagagaaacaaaagggagagtggtagtgtgcctggccaagttcaactgggagccaggagtgacttccatcatgggcaaagggtaagtgagagacttctagcagcccacatttgtacaatggaatcatataaacctggccacaagagaattccttgatcctcccaactcctaaaatgaacatagggagctcctgggagactgtgggatggaactgctccagaaagggaactcatgatgagtcccacaccctgtctga

SEQ ID NO: 860270 - DNA, 622 bp, Homo sapiens
cctgctaattttttgattatttgtagagacagagtttcactatgttgtcaaagctggtctcagatttttggaatcaagcattctcctacctcagcttcccaaattgatggaattacaggtgtgagccaccatgcccagcctctttcmgacttttgagacaatattaaatgatccaacatatgtgtaattgaaatctcagaaaaagacaaaaagaaagaagactttaagatggctgactagaagaatttcatgcctgtatccttcatttagaagaaccaaaatagcatgtagacagtcacactgcacatgcattatccgagagggaacactggaattcaacagagaagcaacaggaaacatcaaaagcagagaaacaaaagggagagtggtagtgtgcctggccaagttcaactgggagccaggagtgacttccatcatgggcaaagggtaagtgagagacttctagcagcccacatttgtacaatggaatcatataaacctggccacaagagaattccttgatcctcccaactcctaaaatgaacatagggagctcctgggagactgtgggatggaactgctccagaaagggaactcatgatgagtcccacaccctgtctga

SEQ ID NO: 860271 - DNA, 612 bp, Homo sapiens
ataccaattcttctgaaactattctaaaaaaattaaagagtatgaaatttttttctaactcatctatgaggccagcatcaccttgatattacaaccagataaggacacaacaacaacgcacaccacaggccaatatcctgatgaacacaaatgcataaatcctcaacaaaatactagcaaatggaatcttggagctcataagaaatatatatatgatgatcaacatatttatactgggcatgcaaggatggttcatcacatgcaaatcaataaacatgatacttcacattaatagaatgaagcataaaaaccatatgatcatctcaatagatgtagaaaaagcatttgctaaaattcaacattgctttatgataaaaactttcaacaaagtaggcataggagcaacatatctcaaaataataaaggctatatatgataaacccacagctaacaycatatgaatgaagaaaatgtgaaaacctttgttctaagatatgaaacaaggatgcccactttccccaaaactattcaacatgatactggaagtttcagccagagaaatcaggaaagagaaagaaaccaaggcatccaaattggaaaagaggaagtcaa

SEQ ID NO: 860272 - DNA, 629 bp, Homo sapiens
tgaggccatgtgagcaaattcatttcaccagttcattcagtctgcccagcataacattgactaaatgcacagtgacgaatggttagtaaggatgtttcaagtattgctaagtaatacttagaggtctaacttccacatgtagtagtcttaagtatggaagggtataaaatcacttggagggatttttccaaataggtgtttttggaatctatctaatttgtttctaccttgaaacaattgatttgggatagggacaacataatagtcttcaaaatctcgtttggtgattcaaatttcctctcttgattaagtatgtgactacgcgcttagaaagggcaaactcttcttccaggtacacacatttgacccactaaatgactaataatttgatttaggccttgaaaatttttggcagggttagcattgggggaatrgaatcacatccacctttgcttgtgattattttcagcacaaatagttttagactatccatatgtggtaagtgtgatattaaacaatgctaattttcgatggcctatatcttttctaactgtactatttttggtaacttataatcaggcaatttagacatttgtgaacattaattttgaaaatactttctgcttgtt

SEQ ID NO: 860273 - DNA, 644 bp, Homo sapiens
cataggagtcatggcagttgggatgcttccaagtgcaaaaggtttgagcatcaccacgaagtacagtcgaagactacatggacaagattattctatcttatggtcttatccaaaaaggtttttaaaacatgttatttgttgccctgtgcatggtgcttccctctaatttattgattactcataataatcaagcagctttgtagaagagaagcgtgatgaggcaggttaaatgggaagtaggcaaaatagtgtaatgtgctaagattttccaaatcatattttacaacaaaaatggaatgagtaatgaaaccttggtagatactttgtaatattctctattgagtgtccaattcagtgtcatataagatatactggatatagaatgacaaggttctgaycagctgtgtaaccaaaaatggaatgagtaatgaaaccttggtagatactttgtaatattctctattgagtgtccaattcagtgtcatataagatatactggatatagaatgacaaggttctgatcagctgtgtaaatgtccaggtgtctctgtgagtattgcatattattcaatgaactacagagcaaatgcagatggcttcttagttttgttcctgtcatgtatgttaactgctcttcacttcct

SEQ ID NO: 860274 - DNA, 607 bp, Homo sapiens
gtccaagaaaggaattgtaagagtacagtgttttctggaagttaaggggctagacaatttcaggaaggtgagggtggtgataaaacaagaaaaaagtattaaaataaaaaagaggaagctgtttttacactttttcctattggtgcaaaaaatacacaattgccatttactgarcaatcactgtatactggacattttgctaaaaactttatacatattttatttaattatcttagcaatacaatgtagctataatccaaactgccaagtttagaatggtacaaaaatacaactgcttaaataagatagaatttatttctctttcatatagccctacagtgatgagtggtccataattggcatggcctgtggagcagcttgatttcacaagattgtaaaaagcacaggcagatggttggtcctcccagactcaatagaaggcttctattggaagtccaaggcactgttctgtttttccctgtcctcaccatcaggaaagcagaaagagagaaactgatcttcagagagagagatacagaagtttcacccatcatttccacttatatctcattgattaaaaacttggtcacttaatagtcaaacccgg

SEQ ID NO: 860275 - DNA, 612 bp, Homo sapiens
tgtctttgaattcatgtaattgagaatttcttgtgtgtgtgacagtgaaagagaggtgagtatgtgttgtaatttaagaattttagatcagttcaaatgtatatattccaaaattgcagttcaaattcaattatattattgggtggacatgtaaggaaaaaactttacgtttaatttggtgtagcctggtacagaagattaaraggaggtttggatattgtaatttggatattgtgctatccaatatttgctttcagatatagaaactgaggtttttagaaatgaagagacttgtctgaggacacacagtcagacaagaatacagctatgatgtaaatctaatttacctaatgtccagtgtaatattatctaaacctcctaatcctgccttttaaagctacatcttaatttctgctaccaatacttttgtctcctttcccaccccatccatgaaatgacatatgtgagggcatggaggacactcaatatatgttaacaaatgagcctgctttaattaagttaatttagacaacaaaaatacagggactatttgggctattgtctttggcctttcctgtagctaattccatactgctgttaccttctgcatgt

SEQ ID NO: 860276 - DNA, 649 bp, Homo sapiens
aactgagaaatattgaattccatgatacttaaaggataaggcaatctcttcatactatttacaaaaaaaaaataattccaaggcacagagttttattgatatgtccatgtccaaattcaagatgctagttaggataatgcattccatccctttctccactctaaaacattacacatttctatgaactcaactaacattttatatgattgactgctttataaccctacatacatgtcttycaatatagccccttaaatttacctccacattttctcacactctctttaagagatcttgcttataaatgcaattacagaattgatgagtaatagcttaagtgtgtgaaacactacagagtatgaatggagggagttaggtcaatggggacaagatattggaaaagaataagtaatgaggaaggctgagaaagaatgaatgattgtgttatagaagatttttcctttaaaatttctcataatctgaagtaactcaggagtggaaaaccaaatattgtatgttctcacttgtaaggaggagctaagctatgagtacacaaaggcatacagagtgatctaataaactttcaagactcagaagcgggaggctgggagggaggtgagggatacaaaactatatattgggtacaatg

SEQ ID NO: 860277 - DNA, 623 bp, Homo sapiens
ctaaagcctcttttatatttcttgcccttactcactaatctactaaaatttcttcagcacatcattctcttgtcttcttaaaggttttcatcttgcttcttctacctgaaaacctcctaatttggtcaaacccatccattttctgggtctcagtgtttgtgttaatgtctccttaggaaatcctgcctttgatcttttctcaggttagtagaaatcttgttggtgtttacttttgtagaagctttttttcttctttttcyatcacttaagacacagtagttaatggatatttgtcttttcaaccaatctgtaagtttcaggagtaggggtacctggctgccttttaaatcactttatcccagttgctagttcattatctgcctcatagtagattctgaataaatacacttaccaaataacataataaatacctgagtgcagtatgccctccatatccatagattcacctaactacccattgaaaatatttgttaaaggaaaaggatttcccttgaactgaacatgtatagaatattttttcttgtcactttttcttgttcgggctgcattccactgttaccgttgttactctcatgtagaacaaccatttacatagcatttat

SEQ ID NO: 860278 - DNA, 623 bp, Homo sapiens
ctaaagcctcttttatatttcttgcccttactcactaatctactaaaatttcttcagcacatcattctcttgtcttcttaaaggttttcatcttgcttcttctacctgaaaacctcctaatttggtcaaacccatccattttctgggtctcagtgtttgtgttaatgtctccttaggaaatcctgcctttgatcttttctcaggttagtagaaatcttgttggtgtttacttttgtagaagctttttttcttctttttctatcacttaagacacagtagttaatggatatttgtcttttcaaccaatctgtaagtttcaggagtaggggtacctggctgccttttaaakcactttatcccagttgctagttcattatctgcctcatagtagattctgaataaatacacttaccaaataacataataaatacctgagtgcagtatgccctccatatccatagattcacctaactacccattgaaaatatttgttaaaggaaaaggatttcccttgaactgaacatgtatagaatattttttcttgtcactttttcttgttcgggctgcattccactgttaccgttgttactctcatgtagaacaaccatttacatagcatttat

SEQ ID NO: 860279 - DNA, 661 bp, Homo sapiens
gaaggagaactttagttctttcctttagctcctgtttattaaagaccaaacagaggggccaggagaaagctaaggaaactggggtgaaactagcctgccctttgcagcccctacaggtcctggccaaaaaaaataactgtccatctcaacctgctgctcctccttgttctccamctcctgctcctgccccagaaaactcatcaccaaatcctgatggaccagcctctataagtgataagggttctctctgtccctccctgtgggtctagggatgggttagaggacctcattgacttacccagacctctcagttttcaaaaataaacaaaactaggggttgggacaatgtccttctgtacctaggggactagagactctaaaccaaggttaacactcaaaagggaaataaaagaaaattgtacatcttaaactttttagctacccattcacaggtgactgtgagtctcactggcaacaaaatgaggataaaacatataatgctttctgttttgaggtcaccaccactggtacccttgcccaggctcaactatgagtgggttccatcaggcccctataaatcttcactgttataatccctactgttaaatatattatcagtacgaatgtgtagtctatgtatacctctgcaaacctttgcccc

SEQ ID NO: 860280 - DNA, 604 bp, Homo sapiens
aactccttaaatatacttttactgaatccctcagaaaaagaattatttattcattttctatgccctcataatatttacatttagcatattggtacctttttaacaagtctgtcttccccaaaaattgttaagatctttgagagcaaatgtagtacttcattaattattatatatttccctgctgatgcctggaacagtaggcatagaattgtgaaatcaattaatgttttattytagcctaaatttaagttacattttctcttttgcacctgaacacatcccttttgttgtcttcttagcaatacaaagcttacagtattctaataaacttagcgtctcacatttagtctggcctcaactttccctaatcctgttgaaagacctatcattgttcccactgacccagagaaattaaattcaagaaatagttttgatcatcttttgtgtgcaaggaactgttgttggtaatgtttcccctttatacaagttagcttttctgaagccaactgtatgtgtagaacaagtaaggcctagcaaacataataatttcaggagcaccctaaaggcctctggaccccaaattattgcatgatcaaatgtcttt

SEQ ID NO: 860281 - DNA, 622 bp, Homo sapiens
gattttagctactctaataaatgtgtagtggtatctcattattcttcatttgcaattccctgtgaatatatgatgttgagcatcttttcatatgcttatttgtcattttattgtagatgtactttatcaggttgatgaagatcccctctattaaggcaacttctttgaagtcaggtaaattgatgcttccagctttattctttttgattaagtttaccttggctatttgggctcttttttggttccatatgaattctaaaatagtttttctagttctgtgaagagtgtcataggtcatttgataggaataatattgaatttgtaacttgctttaggcagtattgcaattttaatgtattgattatttctatccatgagcatgaaatgtttttccatgtgtttgtgtcatctctgatttatttgagtagtgttttgtaattcataattgtagggatctttcacttccctggtycactgtatttctaggtattttattctttttgtgacaattgtgaatgaggttgtgttcttgatttggctctcaccttggttgttgttggtatacaggtatgctactgattttcctacattgagtttgtatactgaaatttttctgaagttg

SEQ ID NO: 860282 - DNA, 513 bp, Homo sapiens
agacaagatgaaagcacctcttctgtgctgtggagctagatacattttgaagttaagaatctggaggcttcagaaaggctatttagtgtatatattctaaatagtgtcttactagaaactccattgggatataaataattactccaaaatcaaaagcactaatattgcaaaacaaaacatgtgagtgttcacatttcagtgaaataaagattatacatagcctactgtcatcccaaatctggttttattttgcaaataaattgtgctgtcacacttgttggaaacaagtgctcagtgccacaaagaaaaaccagcacttaaacaggaaatttctcagcaaagcatatttgcttctayagaagggtgctgcctgcgtcagtcacaatgcacattctaagctgaccggattggctactgctttaaattctataggggtaattaggcgggaaggaagacactgtcctgtaccaattaggcgggaaggcatgtctggggcggcaaaggaaggaaggg

SEQ ID NO: 860283 - DNA, 606 bp, Homo sapiens
ctattaataaatctaagttccagtgaaatttgctcgtgctgctgaacaaatctaagttaaattgtagatagatattagtaacttaaggtaagaattcccaaaactagatgtatggggtgaagagttaactattgataacagtagagaatctcatttccaatttcagggataaatartattaggggaaatcctgagagacaacagtggaagtacagaagtaaagatgagaaaataaattactaactaggaagattcttcaatgaatgcttcctagagtatggtctattatagataaattgagcaaacagaggatggagataacagaaattaaaggtacagagtacagtgctatcgtttaaatgcttttgtcccctacaaaaccaatgcttaaacttagtacgcaaagcaacagtgttggcaggtgaggcctaatgggaagtgtttaaatgatgagggctctgctcttataaatggattaatgccactataaaaagagcttgtgggggtgaattagctattttttggctctcctgtcatgtgaggacacagcaagaaagcctcatcagatactgatgccttgaccttggacttccaacctcaagaatt

SEQ ID NO: 860284 - DNA, 627 bp, Homo sapiens
ctggcacctttatcttggaaccccagcctccagaactgggggaaatgcctgtcatttaaactacccagtctatgttattttgctatagtattctgagactcaagtcgactaagacaatagtcttctctaaaatggggaaactctgcctcatagggttgatttgaaaatctagtgacataaagcacatacattatattttacagtcttctagtgcatcatgagaaatcaatatgcggtaggaatcattgttcttagcaagataaagacatttaaattattgatactattgagtatcagtagtatcaatagcattgagaactatttcacactattgagtatttaggacatcaaggtcttcaggatgtgattggtctcctttaaagaaaaggcaccagatctctctctctcaaaagtgtgaaataacttttcacrcttctcaagatactcaaaagtgtgaaataacacaaatagttccacacaactgaaactttggtatatgcagaagggtatggaaaatgaggtcagaatggtaaaacagtaagctaccttttttcataaagggaggaatggaagtttcactgtgaaaaaaacaggtacataattgggagattttatgcaataagagga

SEQ ID NO: 860285 - DNA, 628 bp, Homo sapiens
tgtagagtttttactagttttcttgttgcttgtttgtttatgcaaacagtgttaagctgttatcagcttaaaataatgggttatggtaacctcgaaccaggaaacctacaacagatatgcaaaaaataaaaagcaagaaactaaattataacaccagagaaaatcaccatcgctagaggaagataggaaggaaaggaagaaggaagagaagaccacagaacaaccagtgaacaaataacacaatggcaggagtaagtccttattatcaataataacattgtatgtaaatggactaaattctccaatcaaaagacatagagtggctgaatcrataacaaaacaggacccaatgatctgttgcttacaagagacatacttcaactctaaagattaaaattgaaaataaagagatggaaaaagatattccattacaatggaaataaaaacaacagcaggagtcactatacttctatcagaaaaaaaaaacagatttcaataaaaaaataaaaagagacaaaggtctattgatattatagaccttgtataaggtcatataaatgataaaggggtcaattcagcaagaggttataacaatcgtaaatttataagtttccaactttggagcacc

SEQ ID NO: 860286 - DNA, 639 bp, Homo sapiens
tgttcctgatgtacattatctcattccttcttcataaccatcaagaggatgctactttctgtcccaattgacatagaagaaaatagacacactcaaacataaaaaaaaagtcttcctcaagttctcaaagacagtgttagagtcaggattcatatccagccctattgaaatgtaaaacttgaacaatttatgattatatggggctttagattaaaagttgagatatactaatgtcagcaatttattttacaaatttcagaattgacagtgtcatttaatgaatatgtttgcrtagcccaggctctgcagggcttctcaaaaataatgaggtacccagaatgaacaaagtgtactgtcatacagaagccactctccagaattagagtcctctcattcttctctataacagagtgctttttatatattacataactgaattctagaagtggtagaactatggaaagtaacctattaatgaatggtaaaaaatatcagtgaaaatagagaaaattatatgattgaggagacctatgtccttgcttttggaaaaaaatgttaaaaaacatttactgcaaatgctcaagtagattgttaagtatttctaaatatgattaacagccctgaggattctggctaact

SEQ ID NO: 860287 - DNA, 364 bp, Homo sapiens
tggaattccagtaaccaagaaaggaataggcagacaggtaggggtaaggtaggtgccaaagggagcatggaattgatttaaaattgtctgcagggggatgtaggaagtaagtttcttggtttccttagttttccttgcaatacctcaagaaaggcgttaggagccaccttatakgaagagaggtgaggaggtgacgcaggccctggaaaaggggtttgttgtcccagaggaaggagcagactcagtcatttagaggggctaagggtagagtagggaaaaaagataatttgagtagcccatagaaggtagcaatctgggaagacatggtacaactttcagccctaaccatgatctgtttcttcaa

SEQ ID NO: 860288 - DNA, 584 bp, Homo sapiens
aaggaataggggaagagatatggtgcagggggaggagatacagtgtgattgaagggagaaatgtaggatcatcagcatctcaactggtctgtctttatctctttctccttcaaggtcatcaagaccaggaaaaacaagaaagacatactcaatcctgattcaagtatggaawcttcaccagactttttcttctaaaatctggatgtcattgacgataatgtttatggagataaggtctaagtgcctaaaaaaatgtacatatacctggttgaaatacaacactatacatacacaccaccatatatactagctgttaatcctatggaatggggtattgggagtgcttttttaatttttcatagtttttttttaataaaatggcatattttgcatctacaacttctataatttgaaaaaataaataaacattatcttttttgtgaaaggaatgcttccccagcagtctctttaatccatccatgagttgcttaaaagcaaatagtctgtggtctgcaaatcagggtggggcacacaggcctcaagcaatatttggatttatactttgggtgtgatctttaccgggt

SEQ ID NO: 860289 - DNA, 635 bp, Homo sapiens
agagaggagacccagagtgagtagttcctatctggaggcacgtcatcctgatgagctgaggagacccgaattgggtagctccttccgcagctagtagtcccgatgtctatgtgagtctagctgaatctgtggtttttatgggctcagaagagagaaagtgtgtagttattggtccatgggtagtcataggtgggcctgaaaaaagcaccgtaagttctcactccaggctgcagactccacccaacactgacagcctggcccccatgcttcsggccatccttggtttgaagatggggcttcactgaggacccacccctttctgcccgggatcctgtcttcctcctgtctccattaatcatgttgtccacaggcacccaggctgttcatggcaaggtcatgacagtgcctgggctcagctacaactttgctccacactggagcagatgccaggtgcagggagaggccagggagtgagagcaggcacttctgagactgcagggggagagggggcttccaaacccccaagagcacagcaacgctgggtccggagctgcagctgggtggctgcagccatgcccagggagtgccggtctcccactccgccaactcagaagcaggcagggctcccacctgtt

SEQ ID NO: 860290 - DNA, 629 bp, Homo sapiens
tggttgctgaacactgtgtgtagaacagaagagactgaggtaaatcagaattgggcatgctttttattctgtcaagccattactgtggagagttgagtcaatctagtcagcagtttagctgggcttgagttttgttttcctttggttaccttcctttggttaccttaagtgcaccacagaattcaasttcttctgggggtgaatggctgttaccttatactttgttagtagtccaggatgctgaaggttttttctcagtttacacatcgtacctacaacttttagcaggtccttgtggtgtgataggctcaacaaaagttacagttttgtaaactaaattattacttttttcatgttcttagggtgggaacaacattctcttgtggttttctacatctgaagcggttttctatatctactacacttggtattcttttaataaacccccttttctgtttaaatcagttttacaccactaatattttttcctaatagaggagacaaagtatggtaatagttaagggcgtacaaaataggattcagacacaactggttttgaatcctactctgccacttaccttatcactaactttactagtcagataattgagcacattatttaactctgt

SEQ ID NO: 860291 - DNA, 679 bp, Homo sapiens
tttaagtcattttgatagtgaagttaacttcttattttttactttttaaatgcattttggtgttgctatttttcttttttacttatttctttattttattttttgtagagatgggggtctccctatattgcccaggctggtggtgttgccayttttgcctcattgtaatggggataaagaagatggagttaagtcccccaaagacaaaaacatttcaccttagacaatgaataagacttagttagactttaaatggacgcagaagtcgctaaaaatatggaagttacaaatgtaagaaatactgcttttgcttttatcttccctctgagcaataactttttttctaattacagtacctcttaaagatcctggtgccccatttgggaccttggagtgatggaattgagagcaccttgttaattgtcccattttgcgatgagaaacaaatcaggagattctgagtgtggtgcctaagactgtatagccagttactggcaagatcagaactagtccgtttctgggcacttattagtatacaacacagcctgaatgctcaatcactttcctgaacatagcagcaaggactgctgtttattgacaaatttggacctgagttttgtgaacagatcatgagacataaagcaagtgcaggaggtttttggttgatgatgggcttttt

SEQ ID NO: 860292 - DNA, 679 bp, Homo sapiens
tttaagtcattttgatagtgaagttaacttcttattttttactttttaaatgcattttggtgttgctatttttcttttttacttatttctttattttattttttgtagagatgggggtctccctatattgcccaggctggtggtgttgccacttttgcctcattgtaatggggataaagaagatggagttaagtcccccaaagacaaaaacatttcaccttagacaatgaataagacttagttagactttaaatggacgcagaagtcgctaaaaatatggaagttacaaatgtaagaratactgcttttgcttttatcttccctctgagcaataactttttttctaattacagtacctcttaaagatcctggtgccccatttgggaccttggagtgatggaattgagagcaccttgttaattgtcccattttgcgatgagaaacaaatcaggagattctgagtgtggtgcctaagactgtatagccagttactggcaagatcagaactagtccgtttctgggcacttattagtatacaacacagcctgaatgctcaatcactttcctgaacatagcagcaaggactgctgtttattgacaaatttggacctgagttttgtgaacagatcatgagacataaagcaagtgcaggaggtttttggttgatgatgggcttttt

SEQ ID NO: 860293 - DNA, 640 bp, Homo sapiens
taatatctccaaaataggaaatatgggagtgctattaaaaagtcaaaaatgaggccaggcaccatggcgcatgcctataatcccagcactttgggaggccaaggcaggacaattgcttgagctcaggagtttgagaccagcctgggcaccagagcaagatcctgtctctataaaattaaaaaaatcagatgggcggagtggcctctgcctgtagtcccagctacttggaaggctgaggtgtaaagatcacttgagcccaggaggttgaggctgcagtgagccaagatcatgccactgcactccaggctgggcaacaaagtgagactgtctccaaaaaaaaaagtaaaaaatgagtggacctgaatagacacatgataaatgtcycttcctctcactttccccatgctgttttcacttctctctatcagctatcattcctgcgttactatacaaatgttaagtttatgtatgtgaactcaacaatgtaacatcccgaagtctagcatggactttgatgtgaatcttggctccattaagtagctgtgcaactaggtaactcagttaatcctttatgcatctcaattttttcgtcaaattactagaattggttttacaaatgaaatgtggtaatacatatgaa

SEQ ID NO: 860294 - DNA, 631 bp, Homo sapiens
ctggacagtgtaactgggtgctcagaagcaagccctgggctccctctgctggggtcagatgggaacaggggcaatttcatccagagcacccctgggggtgtccaacaacactctcaggcacagcagccaaagctgctatggcctgaaggggatgtggactctaagggcagtctaaaacccaagagacaccagcatcatggagaactggcaggggtggaaagagccctgctctamcaggcaccagagctgtacctccctaagcctcagtggtctttctgcagctgacagtgggactaggtcagggcagtgctcttgtgaatggaagctatttcaccctcagccccgcatgacccttcttcccgcccatgtttgcagaagaagaatgccatgattgggccaggtatggtgactcatgcctggaattccagcactgtgagaggcagagacgggaggagtgcttgaggccaggagttcaagaccaccctgggcaacacagcaagaccccgtttctataaaataaaaatagaaagtcagccaggcatggtggcatgcacctgtagtcctagttactcaggaggctgaggtaggaggatcactacagcccagaagtttgaggccacagtgagctatg

SEQ ID NO: 860295 - DNA, 587 bp, Homo sapiens
atagagggtcttttgataagtgggcatcttggaactggggcactctgggaacaaaagtggtgatgggactctgtgggtgagtgttaacccccattctcctattgggatagggttacatgctcccaggagtggggtttgggtctctgcatgcagattgggaccctgcttgagtagtgcccacttctagttgggtaaagaggcatgtggaagctgagcttccatctggggctgagctggacttcatgacacccagactctccagcccgggccttggctagttcccagggggctctgaggccatgtccaaggggacaatgatggccctcagtgtgacagggtggctgggaagtgggaagaatccatggaagggggggttggcatctggcttgcccgaggggtctcccacatcgagcagggcaaattccccacgcaaagcagcmagctgcacctgtcagagctctcagtgctgtggctcatccgctctaccctgggcagctggtggtacgaagctggttagtgccatctgagaccaccactggggctgcactcatgggggtgtgggaaggctggagatggcaggcctcagc

SEQ ID NO: 860296 - DNA, 605 bp, Homo sapiens
acaaaatttagccaggtgtggtggcacacctgtggtcctggctactcaggaggctgaggtgggaggatactggagccagggaagttgaggctgcagtgagctgtgatcgcaccactgcactccagcctgggcaatagaatgagaccttgtcttaaaaaaaaaaaaaaaaaaagatgtccagttcagaaacacacacacacacaaacacacacacacacacacacacacacacacgcatccctcccctccatccagacacaggctgcccactgaagaagcagagctcaggagaggttttctttttttttctccttttaaaaacctttattttgaaacaattatagactcagaggaagttgcaacaacaataagtagaatccccagaaccctccccrgcttccccaatatgacactttgtataactatagtgcattagcagagtcaggaaattgacattggtgcaatctgttcactaaacaccctgttgggttctcaccagtttttacaggcacacatttgttcgctgtgtgtgtgcatctgtggtgctatgcagctttcttccatgtatagatttgtgcaacaatcaacacagtcaggatacaaaa

SEQ ID NO: 860297 - DNA, 638 bp, Homo sapiens
gggatgaaagctttcttaaccatatatctccctttaactattcccacatctctcttttcagccaaacttttaggaggagaagccctcagttgatgtctttactttctcacttctagttcactctttccccactgctgacactcagcttactcacacacatccccaatcactgagttgccacaggcaatggcatttgtggcttttctgccttcttggcaacatatggctctgttgattggggtattaggtataaagtacctactgaccaggccctgtgctaggtgaggccattacagaaatgagaagcagacaccacctccattccgatgagtctcaccagatcagccattgctgatgaacactcaggtgccctgactctcacttttcacttttgcagkctttacttcatgccacatacatttccctattccccaagcctcctttctctccaacccctccccttattagacacagctttttaaagcagtcacggtcttacccatggcttcaattgttttctatatgctgttatgacaatagaatttaaatgttgttcttatataacagttttattttacgtgacacctcattcgctacaaccataaattcaaagtttccctaagaaagtaatcactaaa

SEQ ID NO: 860298 - DNA, 514 bp, Homo sapiens
tggaggcttctgggcaggtgcagccacgatgacagccggcatcaaggcccttcctctgcaggccccaggtgcaggccctggtggtttgggttcagggtttatgggtgatgggcgcccagcccagtcaggttcagcggggagaaatccaaagccattctgaggggcaggctccaggccggtgcgaaacagtggggaatggcttccsgagaagccactggagctgcgcctcttgccctctgtccggtcctcctccacactccagcagaggggggtcttccagggtcctttcctcctgtggcctgggcgtgcccgtgtgcagaaggaggaaggcgaagctgtccggcatctcggaaatggagcctccagggtctgcgtcactcggaaaggcgcgggctttcccaggccagagtctttcagtcccaaaaggctttgtccacctcctccctgagtcattgcggctttgtgtgggtccaggggcagagaccagcaggaaggacactgctcctgcctgcgt

SEQ ID NO: 860299 - DNA, 514 bp, Homo sapiens
tggaggcttctgggcaggtgcagccacgatgacagccggcatcaaggcccttcctctgcaggccccaggtgcaggccctggtggtttgggttcagggtttatgggtgatgggcgcccagcccagtcaggttcagcggggagaaatccaaagccattctgaggggcaggctccaggccggtgcgaaacagtggggaatggcttccggagaagccactggagctgcgcctcttgccctctgtccggtcctcctccacactccagcagaggggkgtcttccagggtcctttcctcctgtggcctgggcgtgcccgtgtgcagaaggaggaaggcgaagctgtccggcatctcggaaatggagcctccagggtctgcgtcactcggaaaggcgcgggctttcccaggccagagtctttcagtcccaaaaggctttgtccacctcctccctgagtcattgcggctttgtgtgggtccaggggcagagaccagcaggaaggacactgctcctgcctgcgt

SEQ ID NO: 860300 - DNA, 646 bp, Homo sapiens
aggaattttactaacaattgttatgattattatcactattttaatcccaacttgtacaccaccaggagttccagtggcagcttgctttgtgatcaatttctctctctcacaatcaccttaggtcaccatggctctgctcctgttggttctcatactcaacgctttactggcagcacactgccatcctgatttcctgttatgagaaaaagctcagcaattgctccaaaacacaggatccccttactccaccaaatgctggttatktactagctcttcctctaaaacaccagggagagcttatccagcctgtaccagagattggacaagcatagacatagaattacgtatttcctctcaacaggaccctaatctgaaagagctatttgggtctgcaaataacattttttgcaaaagcaaagcagtatttacttgacatccacaaggcacctctcatttttggatcaatcttttctaatatcactttaatgggaataacctctatttgtcttatggccaaaagaaaaagatggattggatgtaggctctttcccagtatagcttgtaatgttactctctctgtagattctaaccaacagactgatggaacatacaccgaaaaccaattccaccatcaaccaagattccc

SEQ ID NO: 860301 - DNA, 652 bp, Homo sapiens
catgtataaaactctttctctattgcaattcccctgccttgataaatgataaatcagctctatctgggcagcaggcaagaagaacccgttgagtccttacaatatccttctttctaccctcctctgcctaattactctgaatctactaactttttcactcagttatttttccactttgaagacaaaaagttagaaaaaaaaatgccttatgaaattagtccctcagaataaaccagctgggctttctttagccacctgtatgctttagtcaaaatctaagctcagaggcaatagtgaaaggctttcttatcccaaaggaaaactctcagaaatttgctgaagctatccacactgagtstaggtatagaacatgctttgccctatttattcatgggcaccatcctgaactcagtaatctagcttttttcttttgaagctggatggggaagacacagatctagctgaattagttgccaaaatatgctatctggcataaagattattttgagagagttattttgagactctttgtaagagaaatttatatctacaaaggaagtctccatttataagcttgtctctctgcatcaggaagaaaagaaggactaaatcaccagacactcttaaccaatggagaaggagtttaagtaac

SEQ ID NO: 860302 - DNA, 556 bp, Homo sapiens
ggaggtgaagaccctcccacctggcctgcatccagagtacttggggtgtggcactggcgtgggccccaggaaggatcccagccagttttggtgctggaggcccggccaaaggaagggctgctctcccgtcccgcgggctccgaggtcgccgcacccgggcgcgcctgggcctcgtcacccgcgctcgtgacgcgtgcttacaaaggaaacttttacaggtttcggtgggcagggccttttattgcccttctgctccacagcscccgtgcttaatcggttggttgggaggtttctttcgtccgtggttttggaaagtccccgcctccaaaccgcagtcccgcagtcagttctgcagcctcagggcctcgaacagccatgcttagaatccgtccttctttcctgctccatctacccttcccctctggcttcttttttttcactggagaaagcccacccgagtctctcagcctgcttcggaggttactgcggcctcctccacgggtagttctgggacccgggtctagtccgcggttccggagcaggtccctccctggag

SEQ ID NO: 860303 - DNA, 546 bp, Homo sapiens
acactgctctcacagatctttgcaaacctcagatcaggagatccccttgtgaactcactccattaggcccttcacacacagccacgtggagtctcagcagagcagccactcaggcatgcatggagacccaagagctttagctactccagctttctgggtgtctgggcaaaagtagctgcgactttggcaaagctggaggttagacccccaaacataccccaggaggttagactcccatacataccccagaaaagaggctgaawccagcgagatcagcagagaaggtctacaggccccacttccacagtgcctcacaggataagacccactggcttggaattccagctagccaccagtagcaacattgtgcctccctggtacaaagctcccaggaggaggggcaggcccccatctctgctgtttgggcaacttagccattatggcctttgggctttggagagtccaaactaaccaggggccaaagagatcccccagcacagcacagttgctctattaaaatgtggccagactgctgctttaagttgg

SEQ ID NO: 860304 - DNA, 587 bp, Homo sapiens
gcccttcacacacagccacgtggagtctcagcagagcagccactcaggcatgcatggagacccaagagctttagctactccagctttctgggtgtctgggcaaaagtagctgcgactttggcaaagctggaggttagacccccaaacataccccaggaggttagactcccatacataccccagaaaagaggctgaaaccagcgagatcagcagagaaggtctacaggccccacttccacagygcctcacaggataagacccactggcttggaattccagctagccaccagtagcaacattgtgcctccctggtacaaagctcccaggaggaggggcaggcccccatctctgctgtttgggcaacttagccattatggcctttgggctttggagagtccaaactaaccaggggccaaagagatcccccagcacagcacagttgctctattaaaatgtggccagactgctgctttaagttggtccccgatcccattcatccttacaggcgggacctcccaactggggcctccagccacacctgccagtgttctccagctgacagagatctgaaaactccctgggacaga

SEQ ID NO: 860305 - DNA, 647 bp, Homo sapiens
aagcctgctgttcaagcaagccaaacaaaataatcagtaacaaacttggttacaggccaccatcttgtttcatgtccttgggaacatgacctgtaaccacatggcagtactttgttttagtctctgccattttacaatggtggctgtcttcttgtgctaagtcaattcctgggtgagggccacaaaatcagataagccagtttgtcaatctgggtrgtgccagctgatccatctagggtaatgtttataaaatatcttaagcactgatcttgagagcagttaaggaagggtcaaaaatcttgtagcttccagctgtatgactcctgagccatggtttccagtcttgtggctagttttttggtctggtccccaaacaagagggaagtatatcttaggaaaggactgttatcatctttgttttggactacaaacagtgaaccaggcccctcccaaagttggttcagcctacacccagggatgggcaaggacagcttgggggctggaaacaaaatgaagttggttgggtcagatctcttctactgtctcagtaacaattttttaaacacagtttcaaaagcgcttatcacccccttaaaaatactttgtacactcgcggttaagtcataacctaattaaggcttgttggc

SEQ ID NO: 860306 - DNA, 521 bp, Homo sapiens
ctctcacttaggaaactgagacctatgtcctgtccaagggcactctgtgggtcaggggacagcaaagcacagacattcaacccagcatggaggcccctccccacccaggagcaggagcctgccttggaatgccagacctgagataggattactgccacctgggaacagcatacactggtgagaggcaggggcagggagaacaccaccacaggggcagggagaacaccaggatggggaaagggaaccacagggcctactcttttaatyaagcagtagaattgtaagaaaattgcaactttcttttaaaacctgtctttcaaggttgttaaaatggggttttaataacaaaactgtgggagaaagaggtggctgatgtcaaaaacatctcaacccactcccctgggggacctgcagttctctagttcgtgagtttctgctaacaaaaagcacactaaaagaggggccaaaacaaatggaaatcaagcttatcaaacacagatgacatggagttgaccaaagca

SEQ ID NO: 860307 - DNA, 647 bp, Homo sapiens
gtgaattgcagaaatatacagggatagtggatttaagttttgcataacattagtcatggaattcccctgtgatgtttctagaaaagatgtgatttggtttttaattttttttttgtgggggtaggcagaagttgatggaccttaaacaattttttttgtagttactgccaaggtgtaactataaggcacccagatttatatgcttacctaaagaaagcatcaggtatcaaatacagtactggtmgattccaaaatgataaatatttaaaagcaagaaggcatgtgtatttgcctgtgtgtgtcgtaggggatggtatacaagattgtgcagtgtgggttctagaaacattgtttctgtatcaggtgacattctatggctgacttcctaggattagattaagaagtatcaacaaattattttctgtatcttcagcagcactctactggtggaataaaagtcgggtctgaaagctggtggaataaatgctcaacagtgtaaaggggctggatctgcaagtagtctattggcagtgggtggcatggccaacaataatacaattaactttcaattgttcttgaagctgattgtctggttcctaggcatgtatattcctctgagaagatacctgtgagatctccttaggtca

SEQ ID NO: 860308 - DNA, 620 bp, Homo sapiens
aattagatcagctctaggattggaacattttgacaaaaatcagcctcctgtcatccttaaaactaatatatggcaaacgttttgttctttagaatgtttttaaaggaagaaatcagatattattttatatcttaggcttttcaactaaagaaatatgggctactctatttattcctacagggtaggttataggtttacccaaaccaatatttggtttcttattctccttttaccaaggcttgcctctttttcatgtcttttgattattcatatgttactagtctgcaagttggcacaaatattaactaataacctttctaagacggagggtcttctcaggtcacagcagaagaaacactaagaaacagaaggcatatttagctatcagagaaagaagggaacatcagaactgtgacttctaaaatggagtcctamatttgggaaacaggagggtttcctgtacctattgatgaggtaaccaaaagtactcagaatgcttttcctttactggtagagcaacgtaagtgcacaaaagagtgttttagaagctattcctcctatgagtgtcagctgaatgaaactcaatatttaactgttaatgagtatctattactgtcagc

SEQ ID NO: 860309 - DNA, 553 bp, Homo sapiens
ctctaaccattagtgatgttgaacattaaaaaaaatgcctgttggccatttatatgtcttcttttgaaaaatgtctattcatgtctcttgcccacttttaaattggattatttactactgagttgagtttcttgtatagtctggatattagtccttttatggatgaatagtttgcaaatattttctcccattcaagaggttatttcttcactctgttgattgtttcctttgctgtgcggaagctttttagcttttgccccatttgtctattttttatttgcctgtgcttttgaggtcttagccataaattctttgcctaaatcaatgccctgaatgttttgcttgttttcttctagcaactgtagagctttaggtcttagatttaagaccttaatccatcttgartttatttttttaatatggtgagagacaggggtccaatttcattcttctgcatacagatatctagttttcccagcaccatttattgaagagggtgtactttccccagtgtatgttcttggcacttttatcaaaaaagagttggtgatcc

SEQ ID NO: 860310 - DNA, 646 bp, Homo sapiens
catttctctctgcccctattccctagaaacaaccaatctgatttccatctctatggagtggcctattctggacatttatataaacggaatcatacaatatacggcttttagtgcctggcttattctacttagcaagttgttttctaggtccctccatgttgtagcatgaatcagtactttactcctctgaatggtaaaataataaattccattgtatggatatatcacattaatggattaatatttatgaagccattgatagacatttgtattgattctactttttggttatatgtgaataatgctgctataaacatttatatacaagttattcaaacactagttttaaattcttttaggcatatactgaggaatgggattgctaacttatatggaattatgtttaaaatttggggaaattgctacactgttttctgcagtggctgcatgacttyaaccatgcaacattgtatgagggttccagtttcttcacatccttaccgccacttgttattttctctgtttcatagtacccattctaatgagtatcatattgtgttttaatttgcatttccctaacaattagtgatattggactttttgtgtttttttttttttttttgacagggtctcactcagtcacaca

SEQ ID NO: 860311 - DNA, 601 bp, Homo sapiens
ctagagtgcagtggcatgatcacagctcactgcagccttgacctcccaggctcaaattatcctcccagttcagcctcctgagtagctgcgacttcaggcgcatgctaccacaactgactaatttattttgtattttttgtagagatggagttttgtcatgttgcccaggctggtcttgaactcctgggctcaagacatttgcccgccttggcctctcaaattgttgagattacaggcgtgagccacratgcccagctgaactatttttcatgtacttattaactatctgtattttttctttgaagaaatgtttattgaaaccctttgattttttttagccggattgtttatttattgtcattgtttagcttgttctttatatatttcagacactaaacatttatcagacatatgatttgcaaatattttctccctttctgtgggttgccttttttactcttttgattgtgtctcttcatgcacagaaattttgtattttggtataaactaatttatctgtttattctgttgttgcctctccttttggtgtcatattcaaatagattaatcctcttttttaacgtaggaatttatagcttta

SEQ ID NO: 860312 - DNA, 601 bp, Homo sapiens
ctagagtgcagtggcatgatcacagctcactgcagccttgacctcccaggctcaaattatcctcccagttcagcctcctgagtagctgcgacttcaggcgcatgctaccacaactgactaatttattttgtattttttgtagagatggagttttgtcatgttgcccaggctggtcttgaactcctgggctcaagacatttgcccgccttggcctctcaaattgttgagattacaggcgtgagccacaatgcccagctgaactatttttcatgtacttattaactatctgtattttttctttgaagaaatgtttattgaaaccctttgattttttttarccggattgtttatttattgtcattgtttagcttgttctttatatatttcagacactaaacatttatcagacatatgatttgcaaatattttctccctttctgtgggttgccttttttactcttttgattgtgtctcttcatgcacagaaattttgtattttggtataaactaatttatctgtttattctgttgttgcctctccttttggtgtcatattcaaatagattaatcctcttttttaacgtaggaatttatagcttta

SEQ ID NO: 860313 - DNA, 601 bp, Homo sapiens
ctagagtgcagtggcatgatcacagctcactgcagccttgacctcccaggctcaaattatcctcccagttcagcctcctgagtagctgcgacttcaggcgcatgctaccacaactgactaatttattttgtattttttgtagagatggagttttgtcatgttgcccaggctggtcttgaactcctgggctcaagacatttgcccgccttggcctctcaaattgttgagattacaggcgtgagccacaatgcccagctgaactatttttcatgtacttattaactatctgtattttttctttgaagaaatgtttattgaaaccctttgattttttttagccggattgtttatttattgtcattgtttrgcttgttctttatatatttcagacactaaacatttatcagacatatgatttgcaaatattttctccctttctgtgggttgccttttttactcttttgattgtgtctcttcatgcacagaaattttgtattttggtataaactaatttatctgtttattctgttgttgcctctccttttggtgtcatattcaaatagattaatcctcttttttaacgtaggaatttatagcttta

SEQ ID NO: 860314 - DNA, 653 bp, Homo sapiens
tcatcctcaagctccaattctcttttctaaacaagttcattactgatttcttgactaaacaaccccagttggatcaaacatcactaatgtgacatattattcaatcctcaacaacatttctaattgctttcctttgacatttttaacttgttactattatcttaaagtatgagaatgaaactatatactcccaggatgacttgaaggtagaagagatggcctgaagcatatatgctgtttttctcacactttattctagtcgcctctatctgctatatttcaatttatcaaatgtttacactgagatagaacttatagcttgttaattttaacttattctttatrgctgaaaaagtgaaatgctgaattatttgcccaagttcacacaattaattaacagtagaattcaccagtgcctttcaaattaggagtgttattgattagatagggagtattttggaaaagtctgtcaggatgcttactggagttaagtgggtaagagccagcaatgctaaaattgaacaacatccaggaaggtttgccccatctgaaatgaaaatagaacccccaatgagaaactgcaagctcaggtatgatgactcttacctgcagcatcattcaaaatgataattttgagaactctggtaaattga

SEQ ID NO: 860315 - DNA, 657 bp, Homo sapiens
agccatgcatggtggcactcgcctataaacctagctaccagggtggggtgggagggtggttgctgaggcaggagaatcacttgaacccaggaggtggaggttgcagtgagctgagattgcgtcactgcactccagcctgggcaacaagagcaagactcagtctaaaagaaaagtaaaaagaaaaaatatgtatattgcatactctagggcaacaactaaaaaaaawttaaaaatggaaatgtaacttatatgctaaaaaaaagagagaaaatggaatcatataaaatgtccaattaaaaccacaaaaggcagaaaaaaggtgaaagacaaaaataggagcaaagaacaagggcaacaaataatagcaactatggtagatattaatctaactgtatcaataatcactttcaatgtcaatggcctaaaggcaccaactaaaaaacagaagttgtcacaatagatcaaaaaagaagacccacttctatgttgtctacaagaaacccaccttagatataaagaaaaatacatattaaaagtaaatagataaagaaatatattccatgctaaaactaaagaaaagaaagcagaagtagttttattaatttcggagaaggtagagttcagagaaaggaaatagagaggagcattatataaaaa

SEQ ID NO: 860316 - DNA, 648 bp, Homo sapiens
aatattaagtgtaaaaatattttacatagaccaaaaacatgaagagatgggaatatagagggaaaagataagagatttagaagaaaattccagaagtcctaacttgccaataactgcaggtctagagaattagctaacatttactgagcacttgaaatttgcccgacaatcttcctaagggatttatatgtattaactaatttaaacttcaacaaaacaaagcaaaacaccatatgaggtaggtactgctatgatcattaactctattttataggtaagaaaacaggagcatagagaagttaagcaaaatttccagagtcaaagagtttttaagtggaaaagttgagatttgaaccaaagtggtttgtgcacttaaccagtgtactatacttttttgtgcaagagaaaaatgaatagatggaagataattgatrttaaaataaataataaaatataactttttgatataaaaatactccagtttgcagattgaaaaggctactaggcaggattgatgaaaacccaaattcctggtaaaattccctaatttcaaagaaaaaatataaaaagctttcagttagcaagatctgtctgctcacaaagcaaaagaatcagactagtatcagacttttcattccaaaaggggaa

SEQ ID NO: 860317 - DNA, 615 bp, Homo sapiens
actgctgttgctttaaagtttgttttctctgatataagaataactactcctgctcacttttgcgtgtctgtttgcatggaatatctttttccacccctttaccttaggtttatggaagtccttatgtgttaggtgagtctcttaaagacagcaaatacttggttggtgaattcttatccattcagccattctgtatcttctaaatggagcatttaggtcatttacattcaacattagtattgagatgtgaggtactattctattcatcatgctatttgttgcctgartaccttggggtgtgtgtgtgtgtgtgtgaatgttttacaggtcctgtaagatttatgttttaaggaggttctattttggtgtattttgaggatttgtttcaagatttagagccgcttttagcagttcctgtagtgctggcttggtagtggcaaattctctcagcatttgcttgtctagaaaagactgtatctttccttcatttatgaagcttagtttcactggatacaaaattcttggctgataattgttttgtttaggaggctaaagataggaccccaatcccttctagcttgtaggttttctgctgagaaatctgctgttaatctg

SEQ ID NO: 860318 - DNA, 615 bp, Homo sapiens
actgctgttgctttaaagtttgttttctctgatataagaataactactcctgctcacttttgcgtgtctgtttgcatggaatatctttttccacccctttaccttaggtttatggaagtccttatgtgttaggtgagtctcttaaagacagcaaatacttggttggtgaattcttatccattcagccattctgtatcttctaaatggagcatttaggtcatttacattcaacattagtattgagatgtgaggtactattctattcatcatgctatttgttgcctgagtaccttggggtgtgtgtgtgtgtgtgtgaatgttttacaggtcctgtaagatttatgttttaaggaggttctattttggtgtattttgaggatttgtttcaagatttagagccgcttttagcagttcctgtagtgctggcttggtagtggcaaattctctcagcatttgcttgtctagaaaagactrtatctttccttcatttatgaagcttagtttcactggatacaaaattcttggctgataattgttttgtttaggaggctaaagataggaccccaatcccttctagcttgtaggttttctgctgagaaatctgctgttaatctg

SEQ ID NO: 860319 - DNA, 628 bp, Homo sapiens
gaactgctgtgtccttactttaacagagaagatggttttaccgattttattgtataattaagaaagttagttaatttacatttttatagccatattaggctctcactatattccaacctcagagtccccttggatgggtccaagttctttgacgctatctcattaccagattctcctctgtagatctatgttgaagagtcagatactasgcaagctaagctcattttacaaccacagggcattccatgagttaacgtttaaagtactttctgttacccctaagaaatgctgataaattaatactagaaatagcagtatccagatgattaagagatagcatagaaacataatttagccaaaagcaaaaagaggagctaaaggagtcctgtcggcataagaatttgggactccggattctccacctgctgctaatctcaatgggcttttcaaaaggtgagggctttttgtggggggagggcattgagtctttttaatgaaacaatatgtactttcctatgccaagactaattctacaacattgctttgtgggttgagaggatggagatgttgcaaacagccatgactattttccagtttgatccacttgactatagctcaacagcttgta

SEQ ID NO: 860320 - DNA, 595 bp, Homo sapiens
gcctcccatagtgctggggtttacaggcatgaaccaccatgcccggccaacagtgcttttaaatatttaagataatagtcaacttttaaaactatgtagattttacatgaaaataatttttttctgcatctcatttttttrttgttgttgttagaaaaaggaagattagaccactttgggcattctctaacagcagtgatcagtagggctgagtagtggctgccttctttagcaaaggctgtgacctgaagtttgccacagtccctgccactccttcttgtccccctgccactcagactgagaagcaattgctatttaccttcaccttctgtgttgtttaactttcagtggaggaaaagaaaagtgaaatatttcttgtagccatgtctctgttgtccgtgtcaaatgtaaaaatagcccagaggagccttttgttgtaagaagaattgacaagagcctatttccttgtataaataatctaggccacttcactcaagttgccttcttggcccttattgagctgctgtctgagaactcataataattgtatggcatttaatcaggtttattattatatgtgtttagcttccatttc

SEQ ID NO: 860321 - DNA, 595 bp, Homo sapiens
gcctcccatagtgctggggtttacaggcatgaaccaccatgcccggccaacagtgcttttaaatatttaagataatagtcaacttttaaaactatgtagattttacatgaaaataatttttttctgcatctcatttttttattgttgttgttagaaaaaggaagattagaccactttgggcattctctaacagcagtgatcagtagggctgagtagtggctgccttctttagcaaaggctgtgacctgaagtttgccacagtccctgccactccttcttgtccccctgccactcagactgagaagcaattgctatttaccttcaccttctgtgttgtttaactttcagtggaggaaaagaaaagtgaaatatttcttgtagccatgtctctgttgtcmgtgtcaaatgtaaaaatagcccagaggagccttttgttgtaagaagaattgacaagagcctatttccttgtataaataatctaggccacttcactcaagttgccttcttggcccttattgagctgctgtctgagaactcataataattgtatggcatttaatcaggtttattattatatgtgtttagcttccatttc

SEQ ID NO: 860322 - DNA, 712 bp, Homo sapiens
tttcaaccaatattctaccaacagtctgtggattcccattgtctagattacactgggaatgccactttatatataatgaccaaccaacgtataggtttttagaacaaatgtaagaagaaagacataagaggaaagactgtcatgcattcttttaatccccaatgtttttaacactatgccccaaaatccaaaaacaagtattagtcattttttaaatgtttaacccagaatttagggagagtaccagacacactattgttctttaattattatcatcctgaatctatactccattgtaactctaattcactactagacagaaactaccagaaggaatgaagaaccaatcgcatttatcaaaaagaaactaccccygattcagaaatgctaaacatatcatagttaccatatgacacatcaattacactcttaggtatatacccaaacaaaatgaaaccttatttctccataaaaaaacctatgtatgggtgtttatagcagcactattcaccataacaaaaaaatgataacaacccatatctccagcaaccaaatgaataaacaaaatgtgtcctatccatatgatggaatattagtaaaccataaaaagaaagcactgatacacgctacaacaaggatgtaccttgaaaacatgttaaatgaaagaacacagtgacaaaagaccatacagtggatgctaagatctgaacat

SEQ ID NO: 860323 - DNA, 587 bp, Homo sapiens
agttactaaaaaaacttcatgtttatgatctttataaataattgcaaaaaaactataaagttgtttctcatgtttattgtcacacaagatgctctaactacatggagaataatgcagactggaatgcttccattaagtgggcacaaccagatcaagaagctctagacagtcttcagaaaaaaggagaaggcggggcgcggtggctcacgcctgtaatcctagcactttgggaggccgaggcaggcagatcacaaggtcagaagttcaagaccagcctggccaatatggtgaaactccatctctactaaaaataaaaaaattagccrggcatggtggcacgtgcctgtagtcccagctactcaggaggctgaggcagaagaatcgcttgaacctgtgaggcaaaggttgcagtgagccaagactgctccactgcactccagcctgggtgacagagcaagattctgtctcaaaaaaaaaaaaaagaaagaaagaaaaaaggagaagcaccagtccactctaatttaggttaaggaagattctgggctaccatgcatgacgtatttagtttcaggtatcaaaataataat

SEQ ID NO: 860324 - DNA, 573 bp, Homo sapiens
aagtgattaatcaagcctaagtatgtctggcaaggaagtcagtatctgcccttaactgtgactagtttaaataaaccccttttcagaaatcacatttttccaggctgttttttttttaaaccgatagaccatctcgaacttcacatgcatcttaaatcctgggacaccagtacaaaatttacatccaaacacaatcctgcactacatacttacagaagctttattcataattgccaaaacttggaaacaatcaagataggtaaatggaaaaacaaactatgttacatcamtgggtaaatggagaaacaaactatggtacatccatacaatggaataccactcagtgataaaatgaaatgagctgtcaagccatggaaagacatagaggaaccttaagtgtatactgctaagtgaaagaagccagtttgaaaaggctacagactatttgacttcaaccatataacatctggaaaaggcaaaactatggagacagtaaaaggatcagtggttggcaggagctcagggcagagaaggagaaatgaataacaggtgaagcacagggaattttttagg

SEQ ID NO: 860325 - DNA, 578 bp, Homo sapiens
attggtcaaacctggctagaaccaaagggcaagagtgttcactggtgtaatccacacaggtcagccaacccagggtacagagcaggatggaaaagaaattcaggggagcaaatacaagatatctagcatatttgaaaacacacatgcaaacaagcaaagacacagctgtatgcaaccttcacttctatctatcatgatcattagactcaggccaacytaaggtttaaatcctaacttccgtcactttgtagatgtgtgtctttgggcaaatgatttaacctttaagcctcaggtttatcacttacaaattacaactaactagagtaactatttcagaattgtaagaattaaagaagacaacataaataaagtgctcagtgcctgtgtacaggaagtaccattattatctgccccacaacacatatttaaatacagtttctagcacatcgtctcacacttattttggtcccttcactatttaatgtatcttttctatatcccaagtacagagcaaagtctttcaaggcaggcaagagctgagtcattttactcctttgctatccctcaatgcacctacc

SEQ ID NO: 860326 - DNA, 563 bp, Homo sapiens
ggcacgaagtgggtgaggcaattccagatgacaagaaccaacccgaaccatctaatggaacctttgtcaaggttttcaaatactctagtgccctttaaaaatcattttctcctctgcccttatgtttttgtccagacttagaggtgaaagtgaaataatcgagggtgagatgctggctctattgactttttctcaaagggatgcgagctacaaatttcatgggaaatcctcttgctgagtaaaagcccttaagaacaggattggctacatgatttgcagaggccagtgcaaaatgaaaacatggagtttcttgttcaaattattaaaagggtcaaggagacaggcaagcatgaaacccaatgtagggcccttctgagcctgggraccctgtgtgactgcatagatcacacacccatgaagctgaccctgcttagggggtctctgaagtttcacactattctcattttctgacttaataatgtttcttcttccattttcaaagcttcagggatgtggtaattgtgtgtgtgcgcactatttttaagcacttgagttgattttca

SEQ ID NO: 860327 - DNA, 530 bp, Homo sapiens
tttgaaactctgttccacaaagctctgaatttacatactgccaactggttcttgtacctgtcaacactgcgctggttccaaatgagaatagaaatgatttttgtcatcttcttcattgctgttaccttcatttccattttaacaacaggtactatgaactcattaactttagctaagcatttaagtaaaaaattttcaatgaataaaatgctgcattctataggttatcaatttttgatatctttagagtttagtaattaacaaatttgttggtttattattgaacaagtgatttctttgaatttccattgttttattgttaaacaaataatttccttgaaatcggatatatatatatatatgtatatatatatatatatatatatatatatayatatatatatatagtattatccctgttttcacagttttaaaaaccgatgcacacagattgtcagatagcaattctgtgattgaaggggaaatatgtcacctcttcatactcatattggtgaagggtcctagcttca

SEQ ID NO: 860328 - DNA, 578 bp, Homo sapiens
catgaaaaaatattggtgtgtagttttttgtgacatctttatctgcttatggttttaaggtaatgctggcctcatagcatgagttagggagtatttcctctacttttacatttgagaagagattgcagagaattagtaaaattcctactttaaatattttgtggaattcaccagtgaacccatctggacctggtgctttctgttttggaaggtcattaattattttaaaatagatataggcctattcagattacctattttttctcatgcragttttagcagattgtctttcaaggaattggtctatttcatttaggttatcaaatatgtcaacgtagagttattcatagtattcttttattatccttttaatgtgcaagggatctgtagtgatgtccccttttttgttttattgatattagcaatttgtgtcacatcttttattttgctttgttagccaggctagagatatctctatttttgatgtttttgatgaaccaactttttgttttattgattttctctgttgatttcgtgatttcaatttcatgatttttaaattatgcttacatttgatt

SEQ ID NO: 860329 - DNA, 628 bp, Homo sapiens
aaaaatgcatacttcttacccatttagtttattttgctagtttacaaattaaattgagataagacagattaataggagaaaatcaactttaattatgtgtgtatacatgggagtcccacaaaaatgtaagactcaaggaagcagccagatgattgagacctatatattatcctgagctacagaaagggataagggtttggggcttttgcggggttgtggaggcaaattttgggaaggcgaggagaggaaatgtatgatcaataaaygttgccttgttgtgcagataaaagtgtcttaggtgataaagatgtttccaaagagtagttctcttcatggtacagatattttactcatgatcatttcctttatagatataaatttcctttacgaaagggggaattttattttatgtagttagtggagaagtcggtaaagagcttttcctgtattggctgattctcagttttttttagctcaaaatgatcaatatgccgaagtggcatgttctgaaatgacatattctgaatcctttcagctggaatatatttgtatatcaacagtgtttccatctgtcagcccttagggtctgcttatggaagatataagcacctggatgaccatgacgaaa

SEQ ID NO: 860330 - DNA, 632 bp, Homo sapiens
accatactcacacagttaatcctcctgacaacacaacgaggccagtattgttcttactcccattttccagaaaaggcagtgggaacacagaatgatgttcaccaagcaagatccacccgtggccaggatgcaagcaagacagtctgagccctcatgatgctgcttccacagggccactgccattcccaccttacacaggagaaaccagggctcagagaggctaagccacttggctgaactcacacagctaacactggtagaactgggttttgcctttgggaccagctagctcagccaccaccatcaccacttctgcattacaccaaatttaagcaccccactctcctgagtgaggagatggaggtctcccaggagtcaaggaccaggtacccatggccctaaagccaccttctgagctattaccamctctggaggagtcaaggggccggaggtgcatacacacaggtgcagacagccaagagcccactctgaggctcactgtctcccaagctgcagggtgaaagatgcctttatgggctggtgagatttttatcttggcggtttctctttaaattctttacgattacgaagcagtgggggctgccaaggaacatgatttactccttgagcat

SEQ ID NO: 860331 - DNA, 585 bp, Homo sapiens
cttactatgtgccaggcactgtgtaagcccttcacgaggtgttttaaatgactttctcaaagttgcagagttattttgccaaagacttagggttctcattttctattttggtgctccaaagaaaaatgagatgtgtagcataccatccttcgcccaggaaaacaaaacaaaacaacgcagaaccaacctgggtgaccaaggatactcagtggggacaggaagctcactggacaaggatgggtacttggtcaccaggcatcccatctctgatggtgggtgcttttgaaatgaccacaagcagaaaatrtatttgaactaaaagaactggagctcagccacacgaagaaagaggagcagcaaaaagatccacacaagcaacatacaagcttccagagcagagcagttagggctctgcataaaacggcacttctaccatgtctccactcaccacacaaatagtaacactgtctgcagcagctgcttgaagtaagaaagacaagagataaacacatgatatgcatgtcagaggaaagtcactgtaaatgttttaatgctatggacactggtgtaaaattataattatta

SEQ ID NO: 860332 - DNA, 569 bp, Homo sapiens
atattgattttctttcttttgaatatgtcccagtaggggaattgctggatcctgtggtagttctatttttagttttttagaaatcctccatacagttttccatagtgtgtgctgatttacatttctgttaacagtatacaagggctcttctctctccacatcctccccagcatctgttattccctgtctttttgatgaaagtcagtttaactgcagtgagataatatatcgtggtggttttgatttgcaattctctgatgattagtaacattgagcattgtttcakatacttgttgaccatttgtatgtattctcttaagaaatgtctgttcagatattttgcccatgttttaatcagattatttgctcttttgctgtccagctgtttgaacttcttgtatattctggttgttgttaactccctgtcagatgaatagtttgtagctattttctcccattctgtgggttgtctcttcactttgttgattgtttcgtttgctgtacagaaactttttagctttaaaaacattttttaaattatttattttttgtagagatagatctatgtc

SEQ ID NO: 860333 - DNA, 569 bp, Homo sapiens
atattgattttctttcttttgaatatgtcccagtaggggaattgctggatcctgtggtagttctatttttagttttttagaaatcctccatacagttttccatagtgtgtgctgatttacatttctgttaacagtatacaagggctcttctctctccacatcctccccagcatctgttattccctgtctttttgatgaaagtcagtttaactgcagtgagataatatatcgtggtggttttgatttgcaattctctgatgattagtaacattgagcattgtttcagatacttgttgaccatttgtawgtattctcttaagaaatgtctgttcagatattttgcccatgttttaatcagattatttgctcttttgctgtccagctgtttgaacttcttgtatattctggttgttgttaactccctgtcagatgaatagtttgtagctattttctcccattctgtgggttgtctcttcactttgttgattgtttcgtttgctgtacagaaactttttagctttaaaaacattttttaaattatttattttttgtagagatagatctatgtc

SEQ ID NO: 860334 - DNA, 641 bp, Homo sapiens
aatttgttgattttttatttgtagtgaatttattatagtttttggcattgtggtcaccatgagacttaaaaagacataggttcaagcagttattttaatgatatgacaacttactttagatcacaaagaaaataatggaaacaaaagaaaaaaaaaccctctatactctaactccattccctccacattttgactttactttgtctcaatttacatgtttttatattgcctatttcttgataggatgctgtagctattaatgtttttggtaggtttgtcttttggacttcatcctagagttatgagtgggcgctacaccacaattacagtattagagtattgtgggtttgtccacgtacttaattttactagtgggttgtatacctttacatgttttgttttttcacattagtgtttttttctttcagattgaagaactctctttagcttttcttgtcagacaggtmtgtgttagtgaattctctcagcttttgtttgtctgtgaaagactttgttcctcttctttgtatttgaaggatagctttgctggatacagtatccttgggtggctgtttttttccttcagcactttgaacatgttgtcccacatcctcctatatggtttcttcctcctgtatgac

SEQ ID NO: 860335 - DNA, 634 bp, Homo sapiens
acaaaagcacacacaaaagaaagctataagccaatatcttttaagaatttaaatacaaaaatcttcaacaaaatactagcaaacaaaacccagcaacatatacaaaggattctgtactatgagtcagtagcatttatgtcaggagtgcaaagttggtccaacaatcaatcaatcaagtcaatcacattaataaaaagatgggcaaaaaaacacatgagcatattaataaatgcagaaagcatctaacaaaaatccatcaatctttcatgataaacactcaacaaactaggactgtaagggaatttctcaacctgataaaaggcatccataaaaacccccacagctaacatcataatggtggaagactgaaagctttccccctrtgatcaagaacaagacaaagatgttcactcttactacctctattcggcattgtaatagaggttctaaacagggcaattagataagaaaaaccacccagattataaagaagcaaaactatttctatttgaaaatgatgtgattttgtataaagaaaatgctaagaaatccaaaacaaaagaaaacaattactaataaactagttcagcaaggttgcaggatacaagatcaatatacagaaatccattgtatt

SEQ ID NO: 860336 - DNA, 591 bp, Homo sapiens
ttaagcaaaagtttgctaactgcagaagggttaacactggtaacatactgtggcagacaagtttcttttttaaaaaaacttttgaggttccccccctttaaattaaccctttccggtccatatgccactaagcaggtaccaacctagagraaaaaaaaaaactcatccactcagcaatagtggccctttcaaattaacagaggggtggggtaaggttgagggggaaggaaacagacagggggagaggaagggcctggtagaggaggggatctttcttgtcattcaagttagggcagccacgaatgtcccaaatctgttggagatgtcagaatgcagggaccgccaggtgggcacggaggctcgagccttggcgtcacccacgtcgtctgtgcagtggacagacaggcactgcaagtggctgccaggctgggatgctgaggccttgtttgcagggaggtcgtgggctgtggagagagaaggaagagaggacattagtggcacactcgtctctgagggacaccataatgggggccaaagtggcagaggcatacaagacaggcaccgtccacgccctctttccatggctaaagc

SEQ ID NO: 860337 - DNA, 618 bp, Homo sapiens
gggcacgggggctcacacctgtaatcccagcactttgggaggccgaggtgggcaaatcacaaggtcaggagtttgagaccagcctggccaatatggtgaaaccctgtctctactaaaagtacaaaaatcagccaggtgtggtggcgtggtggcgggcacctgtggtcccagctacttgggaggctgaggcaggagaatagcttgaacctgggaggcagaggttgcagtgagctgagatcgcaccactgcactccagcctgggtgacagagcragactccatctcaaaaaaaaaaaaaaaaaaaaagactcctagcatggaagagaaactggctgttgaaaacctgaatgtgagagtcagtcaaggatagtttgagggaagccaagtagaggaagctctcacaagcagattggtgagagaatatgattatacaatgcatttattatgataagaaattcacaagcattcattcaaaatactcttgattcctaggcagctctgggcatatttccaccaacaaattgaggcatatgtcagtgcagcctaggtcagactaccttttttcattaaacctcacaaaattaaaggacatacaggagaagtcctggtactcatgttg

SEQ ID NO: 860338 - DNA, 666 bp, Homo sapiens
catatgaaatttaaaataatttttttttattctgtgaagaatgtcaatggtagtttgatgggaatagcattgaaattataaattactttgggcagtatagccatgttcacaatattgattctttctatccgtaaggacgrcactttttccatttgtttgtgttctctcttatttccttgagcagtggtttgtagttctccttaaagaggtctttcacatcctttgttagctgtgttcctaggtattttgttctctttgtagtgattgtgaatgggaattcattcttgatttgcctctctgctgcctgttgttggtgtaaacaaaattcatttcttgttcttatttgtgaaattttggaaccaaatctattttcaaattagaaattgcttgtgataatggttttgcaacttagactggatatgagacgatgagatattagttctttcattcctttgtaggaatatggtgcatcttgcattattttagctaactagtgtcctttaatgactaatgaatatgacatggtgaaacaaagtaaaatatatatgatgcactaagtatgcattgtttccaaaggttcagcattttttttttgttaactctgctgggatctgctttatgcactgataacataacttattttatgatcttaagcaaataaaaaca

SEQ ID NO: 860339 - DNA, 615 bp, Homo sapiens
aaccgctcaactattttttctcctaaagtacatactcacacctcagcgtctctcatttttaaaagttaagaaaaaggaatgtaccctactaaccatacattccctctaattactattctatctttccctgtcatcacagaaaagattcttaaaattgttgtttatacttgctgattacatttctaccatattctatttaaaaaaaagctttcccataagccaggaaaagcctgcttgccaaatccartgtacttatgtcagtgcttcccttgcctaacagctctgtgacaacttggttcagcaattacattccctctctttttattttatcttacattgattgtaagcctcatttggaaagctcctctccctgtgctcttttcataggcattggcgatctccagctttcattctcctttacacttattaaccacgcagatttgttcacctgggtgactttttcactttcagtgctcttgctataacctatgccatgataatggctggaattgcctcacatgttctcatcaattcaaggatctcttcctttctgacagcaacactgatattaacccaccaccaccaacactgatactaacccaccaccatagattg

SEQ ID NO: 860340 - DNA, 678 bp, Homo sapiens
tggacacacggcttggaagccaatgcaaatattacacaatgttgacatgtccccacagcctgcccatgccaaaagcagaaaacttgctactttgggacaatgtcacaaaagtcatcaacctcatggaattgtgattccataataatgagaaaacctgcaacagaaacgctaacagtgaacatttctttagcatgcactgactggcaaacactctgctaggcactttacatgtatcatctcatgtggttcccatagcaacactaagagatttcggttgtactcttcctttatcttacaaatgagaaaattcagacccagagaagcttaatagtttgcctgcrgtcacatagattcctgggtccatccagttccagagccccctactcttcaccaaggtgctataaagatccacctctcccccttactcagtcacactaccgagacccctgcctctgtctccagcctggacaaccccaagatgggttgtcataaaagaaatgctggcctcctgctgacaccctggttattgtaataattgtaataattggtgcaatgggaaagatgagtcaaaaaagcagccatagacctccacctcccatcttcagaaaaatatctgaacatgccacagtttcccaccaggcaaaacccagaaagatcttaccttgccagtgacggaga

SEQ ID NO: 860341 - DNA, 628 bp, Homo sapiens
actgaaacaacactagtctggtgagagctcagaagtaagggacaattgtgttgttaatgagttaatgttctataggaccgctgactcagacctaaaagtatggtgtggagatgggctggtgctggctgagagagcagaactgtgaaagagcttagagatctgtggggaactgtagtgccagagagaggaggaaagcttgcataacaatgagaaatgctttttttcttaagttgtttgccaaagagttcagagtctggtttaggaacctggaatgctactgcatcagaattttgtataagtaatgatagcatgtttgacctagaaaggaaagatgaaatatataagggtcagataaaaaaaaaaactttgcattcttggggacaggrgggctgaaacagaattgcagcatttgacttggaatatgaaagtataagtaaatttaacaaaccaatgaaaactgtaagagcacaatttacattttaatctacaataagctgaaatcaaaatagagatcatgtacatttaattttcttaattggcatttaccttgaaccagatattcctattcatgttagaagtacagctggccatccatatccatgggatcttcattcatggattcaaccaa

SEQ ID NO: 860342 - DNA, 649 bp, Homo sapiens
ttggtgtgtgtgagagagggccgaaagcaaagataaatgagagaagtgggagccataagcacacattctaaaaggccagcatacagggcaagtgaggagtaagagagtaagagcataaaggagctggatgctatgaggagatctagtaaaaagtggcagagcaggcctttgagccctggtctgttggagtcccgaaacacacactcttcatctctagaatgctgaaagtgcaatctaaagacctgctgcttcacaagctctaggaagcttgttaaaatgcagatttctatgtttttggaagtatttatggtaagctttcttaaaaattattagggtacatayttctgacatctagcatacttttttttaagctttgtcatttctattatgatttttcatggtgaaattttggtactgagatgggcattctctgtacctttatagtactactccaaaggcaaagagccatgattgacaacagtcaagctgtggatgaaatgaccgggaacagagaatgaagtatgtaaatcccagcttcatacgacctcttctcatattgcttttctgattaaaatggctgtttacctggtctctgaatgttaatgcctgactaatttaattaagtcattgcccaaatcggttttccctt

SEQ ID NO: 860343 - DNA, 649 bp, Homo sapiens
ttggtgtgtgtgagagagggccgaaagcaaagataaatgagagaagtgggagccataagcacacattctaaaaggccagcatacagggcaagtgaggagtaagagagtaagagcataaaggagctggatgctatgaggagatctagtaaaaagtggcagagcaggcctttgagccctggtctgttggagtcccgaaacacacactcttcatctctagaatgctgaaagtgcaatctaaagacctgctgcttcacaagctctaggaagcttgttaaaatgcagatttctatgtttttggaagtatttatggtaagctttcttaaaaattattagggtacatatttctgamatctagcatacttttttttaagctttgtcatttctattatgatttttcatggtgaaattttggtactgagatgggcattctctgtacctttatagtactactccaaaggcaaagagccatgattgacaacagtcaagctgtggatgaaatgaccgggaacagagaatgaagtatgtaaatcccagcttcatacgacctcttctcatattgcttttctgattaaaatggctgtttacctggtctctgaatgttaatgcctgactaatttaattaagtcattgcccaaatcggttttccctt

SEQ ID NO: 860344 - DNA, 649 bp, Homo sapiens
ttggtgtgtgtgagagagggccgaaagcaaagataaatgagagaagtgggagccataagcacacattctaaaaggccagcatacagggcaagtgaggagtaagagagtaagagcataaaggagctggatgctatgaggagatctagtaaaaagtggcagagcaggcctttgagccctggtctgttggagtcccgaaacacacactcttcatctctagaatgctgaaagtgcaatctaaagacctgctgcttcacaagctctaggaagcttgttaaaatgcagatttctatgtttttggaagtatttatggtaagctttcttaaaaattattagggtacatatttctgacatctagcatacttttttttaagctttgtcatttctattatgatttttcatggtgaaattttggtactgagatgggcattctctgtacctttatagtactactccaaagrcaaagagccatgattgacaacagtcaagctgtggatgaaatgaccgggaacagagaatgaagtatgtaaatcccagcttcatacgacctcttctcatattgcttttctgattaaaatggctgtttacctggtctctgaatgttaatgcctgactaatttaattaagtcattgcccaaatcggttttccctt

SEQ ID NO: 860345 - DNA, 577 bp, Homo sapiens
ttggtactgagatgggcattctctgtacctttatagtactactccaaaggcaaagagccatgattgacaacagtcaagctgtggatgaaatgaccgggaacagagaatgaagtatgtaaatcccagcttcatacgacctcttctcatattgcttttctgattaaaatggctgtttacctggtctctgaatgttaatgcctgactaatttaattaagtcattgcccaaatcggttttccctttgccccatcaatatgttctcttgcatatattggcatgctgccatataaagtaaaaatattggagatattctatattttatgtgtaggtttaggtattgttggggatgtttttgttgtgctcttttggacatataaacaattctctgttgaggctacaacctttttctwcttcttcttttcttttttattttagaggatggcatctcactctgttgcccaggccagaatgtagtggctcagtcgtagctcactgcagcttcaaactcctgggctcaggcaattctcctgcctcagcctcttgagtatctaggattatgggcatactctaccacacct

SEQ ID NO: 860346 - DNA, 619 bp, Homo sapiens
attgtgagattaggtatagatatatttatagatattgtttggctctgtgtccccactcaaatctcatcttgaattgtactcccataattcccacatgtcatgggagggacctggtaagagataatttttgaatcatgggggtggtttcctccataccgctcttgtggtagtgaataagtttcacgagatctgatggttttatccagggtttctgcttttacatcttcctcattctctctttgcctgctgccatccatgtaagatgggacttgctcctccttgcctcctgctgtgattgtgagacttcctcagccacatggagctgcaagtccaattaaacctcttttgtaaattatccagtctcaggtatgtctttatcaacgcatgaaaacaggactaatacwgtaaattggtaccagcggagtggggtgttgctgaaaagatacccaaaaatgtggaagcgactttggaactgggtaacaggcagaggttgcaatggtttggagggctcagaagaagacaggaaaatgtgggaaaggctggaacttcctagagatttgttgaatggctttgcccaaaatgctgacagcgatatggataataagatccaggctgaggt

SEQ ID NO: 860347 - DNA, 615 bp, Homo sapiens
atgttgttgcaaataacagtatgtaatttttttggctaaatattacttcattatgtataagtaccatattttcatggtccattcatctgttaatggacacttaggttgtttctaaatcttggctattgtgaacactgctgcaacaaatatgtgagtgcagatatctcttggatatactgatttcccatcttctgagtatatacctagcagtaagattgctgggttctacggtagctcaatttttagttttttgaggaaccttcaaactgttctccacaatggttgtactaattccacattcccacaaacagcgtacaagggttgccttttctycacatccttgacagcattttttattgcctgtcttttggatataagccatttaactagagtgagatgatatctagttgtagttttgatttgcatttctctaataatcaattatgttgagcatcttttcgtttgcctgttttctatttgtatgtgttctttggagaaatgtctattcaaattacaaaataaacatgtatctcagatgagaggtagaatgattgtagaagatggagaagtttgcaaaatctatttccactatgcctttaccacagcatatcagat

SEQ ID NO: 860348 - DNA, 615 bp, Homo sapiens
atgttgttgcaaataacagtatgtaatttttttggctaaatattacttcattatgtataagtaccatattttcatggtccattcatctgttaatggacacttaggttgtttctaaatcttggctattgtgaacactgctgcaacaaatatgtgagtgcagatatctcttggatatactgatttcccatcttctgagtatatacctagcagtaagattgctgggttctacggtagctcaatttttagttttttgaggaaccttcaaactgttctccacaatggttgtactaattccacattcccacaaacagcgtacaagggttgccttttcttcacatccttgacagcattttttattgcctgtcttttggatataagccatttaaytagagtgagatgatatctagttgtagttttgatttgcatttctctaataatcaattatgttgagcatcttttcgtttgcctgttttctatttgtatgtgttctttggagaaatgtctattcaaattacaaaataaacatgtatctcagatgagaggtagaatgattgtagaagatggagaagtttgcaaaatctatttccactatgcctttaccacagcatatcagat

SEQ ID NO: 860349 - DNA, 632 bp, Homo sapiens
taacagggggtgctatttaaacaaagggtcagggaagaccattccaagaagataagcctggaatgaagtgagagccacacagaggtctggaggataagcacaaaggcaaaggccttgaggtgaaaccaagcttggtgtgctcacccagtgttgctgtagcagtaggtggcagtgataaagttggagagttgggcagggggcggatattgtagcaccttgtaggctatgtcatggaactgtggctgcattctagttgtggtgaggagtaatccactggtgaatttggcaagwggggatggtgagagccactttcaaagttctataagatcgcccaggtttctttgtgcggcagggatgatgtggcccaagtaggagctaaataattgagtaggagttcatgaaagtgtgttcttacgtgggagcagtggaggtggcgaggtgtggacagatttgggataaaatttgaagggcaatgcactcgattggagaccaaggggaacagagtttctgcaagaagaggggaggaactagtgttaagaatccccagaaataggaagagtgatgactgagaaaaagccttcaaattggacaataggtcagttcttatgtttaagtggaaagaagaatatcgg

SEQ ID NO: 860350 - DNA, 681 bp, Homo sapiens
tttaaaagattactttgtctctttgcatctaatatttgtattgagaaatactatttcattcagatttttgtctctttggagatcataaactctttctggaaggcttagggttttcctctgtcttagatttccctatcatgtcaatctccttggtttgtggtctgccagtcctggaggtttgamtgggagaggaggtagaggaataaatgtccaaggggccaatgaaccttgctggtatactccagttccctaccccactgggctttgggctgcctaatatttaatatcataccacaggaacaaggctgttgctgctggtttctgtgattttccaaggcaatgcaggtggagactagcgtgaagtttaaatgctctccctcagcctgctctctccctctgctgtctctggctgctcatagcaccaggctccacttggcccttccaactcatgacatcctctggcctccccaagagtttctccatttttatgtcagtagtactttctgcctgtacatcctgtagcttctgtagtttcttcagggttgattttggggaaggaagtcaatagccagggttggctcattatcttgtcaagacctagaagactccctctcatcagtgttttactctgctgacttgtgcctccttcctaaaacactcttaccttgacttccccatagc

SEQ ID NO: 860351 - DNA, 661 bp, Homo sapiens
ctcctagttttgccaaaaattgagggtgcttttggatggcttccaagagaagaggtagaaatactgagtaacagaaacatgtacatatcaaaattccctgttgctctttagggaggactgctcttttcattggttcacttttccttggagagtggtaagatctttgagataaaagggccargaaggcagtcataccactttttatctggtccacttgatttttggatcccaggacatatattttcactttagaagtatgattgtataatctgtctctctctctctctctctcatcttcagatcctaagaatttaaaggtccaggagctgaattatacctagcctgtcatcccctctgtgggatgtcatttggtcaagggataagagtaagttcagctgaccatgaaggaggtccaggatgttcagacagtgtagagcatctagacggatagcaacagactgcaagcgtagttgaggtgtgaatgcagggtcaaggaatcacagccacaaggacgcagcatgttgagaatccagagcacacagcaaagttcaaagcaggcaaagtctgttggcactaagaaggattcagattttgccactgagaatgagtagaaagtggcaagagaaagcaggttttgagttcttggaagtctaggatttca

SEQ ID NO: 860352 - DNA, 661 bp, Homo sapiens
ctcctagttttgccaaaaattgagggtgcttttggatggcttccaagagaagaggtagaaatactgagtaacagaaacatgtacatatcaaaattccctgttgctctttagggaggactgctcttttcattggttcacttttccttggagagtggtaagatctttgagataaaagggccaagaaggcagtcataccactttttatctggtccacttgatttttggatcccaggacatatattttcactttagaagtatgattgtataatctgtctctctctctstctctctcatcttcagatcctaagaatttaaaggtccaggagctgaattatacctagcctgtcatcccctctgtgggatgtcatttggtcaagggataagagtaagttcagctgaccatgaaggaggtccaggatgttcagacagtgtagagcatctagacggatagcaacagactgcaagcgtagttgaggtgtgaatgcagggtcaaggaatcacagccacaaggacgcagcatgttgagaatccagagcacacagcaaagttcaaagcaggcaaagtctgttggcactaagaaggattcagattttgccactgagaatgagtagaaagtggcaagagaaagcaggttttgagttcttggaagtctaggatttca

SEQ ID NO: 860353 - DNA, 669 bp, Homo sapiens
ttatttaaaaaattccttcagatgattctgatgccgtcaattaatctgtaaacaggtgtttaggaacgatttatatcaattaatataatagaatcttgacagacttaataggattgcttttctcttttgccctacactccagcagtattatatttctgttaaataacaattattgagatgtatttatggaatttagtcacagtatctagcacagaggtagatgataggaatggtgagagaagttagacaaggcaagaaggatggcaggccaagacgcaggattgatggcaagagaaggaaaaggtagacatacccaacacaaaaccttggagctgaagcatggcctccagaaagagtcaaactctcgggaagacagtcaaggaaggccgggcaagggactccaaagttaaagagatcttgacctcgagaagctgaggcttaaagcatgcaactcataggaagmcactttgcttcctaattttatgggggccagcaagtggaccggctggtactaacatcagtgaaaccatctgcttatcaatctatactttccagtcagcttggagtgtctaaagtacaaaccctgtatctatctcttcctttatcctcaggcctagcccagtgcttctcaagtgtttgttgaactgaactagattgatccaaggactc

SEQ ID NO: 860354 - DNA, 669 bp, Homo sapiens
tcaaagaacatctttatttctgccttaattttgtcatttatccagtaatctttcaggagcaggttgttcagtttccatgtagttgtgtggttttgagtgagtttcttaatcctgatttctaatttgattgcactgtggtctgagagactgttatgatttccgttcttttgcatttgctgaggagtgttttacttccaattatgtggtcaaatttagaataattgcgatgaggtgctgagaagaatgtatattctattgatttgggatggtgagttctgtagatgtctattaggtccacttggtgcagagctgagttcaaatcctggatatcgttgttaactttctgtctcgttgatctgtctaatgttgacagtagggtgttaaagtctcccattattattgtgtgggagtctaagtctctttgtaggtctctaaggacttgctttatgaatcttggtgctcctgtattgrgtgcatatatatataggatagttaactcttgttgaattgatcactttaccattatgtaatggccttctttgtctcttttgatccttgttggtttaagtctgttttatcagagattaggattgcaacccctgcttttttttgttttccatttgcttggtagatcttcctccatccctttattttgagcctgtgtgtgtc

SEQ ID NO: 860355 - DNA, 602 bp, Homo sapiens
tatgacttcaatttaacttaacaaattttatctgcaatgactctatttccaaataaggtaaccttcttaggtactgtcggttagtacttcaacatatgagtttgggaggggagacacacaattcaacacataacacataataacaaaaacaaaaaagaagatacaaactgataatatcagaaatgaaagagaaatcatcactactgttctcactgacactaaaataaataaataaataaataaataaataaataccatgaacagctctatgtccacaaatttggactcagatgaaattaatcaatttcttgaaaaacacaaactatccaaactcacacgagtagaaatagataatctcaatagatctatgtctatcaaagatattaaatcaatagttaataatctttcaaaaaagaaagcaccaggctcagttggttatactagtgaattctaccaaacatttaaakaataaaaagatgtaattacatatagtctcttcccaaaaatagaagctgaaggaacacattctaacctattctatgagtcagtatcaccctaataccaaaacaagaaaaatgcttaatcagaaaaggaaaactgta

SEQ ID NO: 860356 - DNA, 611 bp, Homo sapiens
cccaacctacatctttctcccatgctggatgcttcctgcccttgaacactgaactgcaagctcttcaggtttggcactcagactggctctccttgcttctcagcctgcagatggcctattgtgggaccttgtgatcatgtgagttaatacttaataaactcctctctgtctgtctgtctgtctgtctgtctctctttagagaaccctgactaacataccaccttcctgcyattgtcactggagcattgacagacacagagcctgccagccccaccagtgccccacccctgcactgacactgctcctggcatgaaactaggcacaaaaacagcagacttgcccccaacctgagtatccatcaccaccagcatgaatgcacagagggcacacacagtcctattcccaccagcaccctgcccccctgctaacaccacaaccagcgcaaaagtgtgcacagttgccagaagggatgccctgtccccccaagctgtactgcttccactgttgctgtgaacacctgcaaagaggctggcaccccagtgcctgccagcaccctgctgcagctgatatatgtgtaccccaccacactgccattgccactgctgctgtta

SEQ ID NO: 860357 - DNA, 465 bp, Homo sapiens
atgggcaggtacataatccaaactggatgagtcatagtctctttttttctggctttgactgagactacaggtgttaatatttgcatcagagattggtgactgactgactcaagctaggacagttagagcctttcctagaagaggcagatagaaacccagagacttgagctgaagcaatgcgatataaaaaccyggttgctgtgaatagctgtgtttcctgccacgtggaaagaatcagtctgggtgaacaagaatgaaactgacaagcagagcaaaacagagactgcagcaagatgcaggggttacttaaagccctggttacagttgtccttaaggctgatgtgaatctctgccctttccaatgtgtcatgtgattgctccaaattaaaacacctattattattattttgcttatgttggtttaagttaggtttctgcacaaatctttaccactttttctttttt

SEQ ID NO: 860358 - DNA, 533 bp, Homo sapiens
gtgtggcccaggttctaagaggccacgcaccagtacctgtctgtggcctggggattggggacccctgctatagacattaaaataataaaataagggtgacttatgtctttatgacagtactggaaaaattgggtaaacatagagtaaaaatgatcctcagcttctacctcacataatatacagaaattaatcagacggattattacagatctgaacctaaaacctaaaagttgaaagttactaaaagaaaacataggacartattggacccattaattaaaaacagtaagccatagactgtgagaaaatatttataatacccatatcctacaaaggatttatatagagaatacataaataactcttacaagtcaataattggaaaaacaaataagaagtgtaatagatagacaaaatgcttggacagatacttctcaaaagatatgtacaagaataaatgctcaaatatcattaatcatcagggacataaaaattaaaactataataatatatcattttatatcaaatgttgg

SEQ ID NO: 860359 - DNA, 471 bp, Homo sapiens
gcagaaactctacaaaccagaagagagtgggggccaatattaaacattcttaaagaaaagaattttcaacccagaatttcatatccagccaaactaagcttcataagtgaaggagaaataaaatcctttacagacaagcaaatgcygagaaattttgttaccaccaggcctgccttacaagagctcctgaaggaagcactaaacatggaaaggaaaatccggtaccagccactgcaaaaacatgccaaattgtaaacaccatcgatgctaggaagaaactgcatcaaataacgagcaaaagaaccagctaacatcataatgacaggatcaaattcacacataacaatattaaccttaaatgtaaatgggctaaatgctccaattaaaagacacagactggcaaattggttagagtcaagatccatcagtgtgctgtattcaggagacccatctcatgtgcagagacacaca

SEQ ID NO: 860360 - DNA, 623 bp, Homo sapiens
tttttctcagatctgtctctagttcagtatactaattctctcttcagttgtttctatatttttacctttatagttaatacttaatttctatcactgtatttttcattttaaaaagttttctttgatttttttattttttatttatttattttttttgagaaatggtcttgctctgttgttcaggctggagtgcagtggtgcaattcatggctcatggtagccttaacgtcttgggctcaagcgaaccgcccacctcaggctctcctcagagtagctgagactacaaggaggcaccaccatgcccaggtaatttttgtatttttccttttagagatgatgttttgtcacgttgcccaggctggtctgaaactcctgggctcaagcaatctaccgatgttggcctcttaaagtgctgggattacaggtgtcagccactgtgccccacttctttgattctttwtaatatttgcttgttcttttctcatagtaccctcttctttcaaaatgacttagatttaaaaaatcttttaaatcatttaatcatatttatctcatatctctcttatctcaattggaatgcacttattcttctgtttgtcatatctgatgactgtcctttttgg

SEQ ID NO: 860361 - DNA, 650 bp, Homo sapiens
ttcagatcctaaatgtttactacagtccttggcataaagtagttgctcaagtgtagatggctgaataaatgagtgaatggaattatatgtaaagaaatttaaaagtccaataaagatgaattcactaatatttattcattccatatgttctaaatataatctattcttgatgactctggatgaataaactcagcttatgtagaaaagtatatcttttggaaaggttctcattcaacagagtttcattattaagctttagaacttaaggcaaaactgctgataccaagtaaaaagcttaaagcaaaactatgttgaatatgattctctcctaagatgctgaatatatgagaagctacatagtgaaggccctataaaagatraggcctcaggcctcaacgtgtgcacaattccaacagagacagaattattccaaggccaagcatagagatacaattattccaagccccagtgtaagaaccacctttcccaaaaagctttttgtggaaaatgcccaaaaataatatttagaccaggaaaaaaatctagtaagctgttatttgattggaatttcttcagaaatacaaatagcctccatgagacaagtgtgacactaaaactgctttgattgaatcattgtcaagcctggtccc

SEQ ID NO: 860362 - DNA, 412 bp, Homo sapiens
agcagaaaccctacaatccagaagagagtgagggccagtattcaacattcttaaagaaaagaattttcaacccagaatttcatatccagtcaaactaagcttcataagtaaaggagaaataaaatcctttacagacaggcaaatgctgagagattttgtcaccaccaggcctgccttccaagagctcctgaaggaagcactaaacatggaaagaaacaattggaaygagccattgcaaacacatgccgaattgtaaagacgatcgatgctaggaagaaactgcatcaattaacgggccaaataaccagttaacatcataatgatgggatcaaattcacacataacaatattaaccttaaatgtaaatgggctaaatgccccaattaaaagacacagactggcaaatttgatg

SEQ ID NO: 860363 - DNA, 593 bp, Homo sapiens
caaaaatcaactcaagacggattaaggactgaaacctaaaacctgaaactataaaaattctagatgataacattggaaaaacccttctagacattggcttaggcaaggatttcatgaccaagaacccaaaagcaaatgcaataaaaacaaagataaatagctaggacctaattaaactaaagagcttttgcatggcaaaagaaactgtcagcagagtaaacagacaacccacaaagggggagaaaatcttcacaatctatacatctgacaaaggactaatatccaaaatctacaatgaactcaaacaaatcaataagaaaaaaacaaacaatcccatcaaaaagtgggctaaggacataaatagacaattctcaaaaraagatatacaaatggccaacaaacacattaaaaaatgctcaacatcactaatgatcaggaaaatgcaaaccaaaaccacaatgtgatatcatcttacttctgcaggaatggccataatcaaaaaatcaaaaacagtagatgtcagcatggatgcagtgaacagggaacacttctacactgctagtgggaatataaattagtatagccgccatgga

SEQ ID NO: 860364 - DNA, 692 bp, Homo sapiens
ctctacccacctatgaaccattggagaaaatgaactattttgatgctgcctttaaagagttgtatcttcagagaagccaaaattcactgctgaaagattccttcttgaatctgtctcagaaacaatcttggatttagaatgtayatgtatatacttgtgtatgtgattatacttaacaccatcagttctaccttatattataaatataccatgataacagaactttcttttcagattgtgtcaaaaaagaaaaaaaaaaagggtctcactctgtcacccaggctgcagtatagtgatgccatctctgctcactatgatctgcctctcaggctcaagcaattctcatgcctcaacctcccaagtagctgggattacctgcgtgtgccaccacacctggctaatttctgtatttttagtagaaacagggttttgccatgttggccagggtggtctcgaactcctggactcaagtgatctgcctgcctcggcctcccaaaatgctgggattacaggcatgagccacctcacccagactcttttcagattcttaatgcattctacgtatttacaaataaatattgctaatagctaccatctattgaatacctactgggtgccaggcagctaagcacttactgtacatattcctagttgtcacaataatcctacatggtactttttactgatcctca

SEQ ID NO: 860365 - DNA, 587 bp, Homo sapiens
ctaagaaaaaaaaaaaaagagacgatccaaacaaataaaatcagagagaaaaaagaagacattacaactgatacaacaggaatttaaaggatcattagtgactactatgagcaattatatgctaataaattggaatatgtggaggaaacggataaattcctaggctcaaacaacctacccagattgaaccatgaagaaacccaaaaatggaacagaccaataacaaagtaacaagattgaagctgtaatgaaaagmctgccagtaaagaaaagcctgggaaccaatggcttcagtgctgaattccaccagacatgtaaagaactaataccaatcttactcaaactatttcaaaaatggaggaataaatacttccgaattcattctataaatccagtattatcctgataccaaaatcagacaaagacacatcaaaaaagaaaactataggccaatatccccgacgaatgttgatagaaaaatcctcacaaaatactagcaagctgaattcaacaatacattaaaaagatcattcatcatgaccaagtggggtttatcccagtttcaacatatgctaatcaatcaatgt

SEQ ID NO: 860366 - DNA, 574 bp, Homo sapiens
ttaaatccaaagctgccaaattcatgacatgcctggcaggtctgcatgggtgcacaacctgagcagctgcccagggcctgtacacagaagggaggtacacttagctaatgatctactgtcaatgtcttaaaagtgtcaataatttttgaacactgggccccacagattatgcaggtggtcctggagactgscacataatggtgactgagatatgaaaagcaagcaagtaaaatgtatacacaccggcaaaatctaaaaatagctccatttattaatgaaaaacaatatcctgtaatcaagacacagcctgttggttaacgttataaagaattactttgcttgtttaatgtgtaaaccaatgataattcacaaatttgctaattgtttttctgtagatgtgagctgtcaaccggtggagcttaagtattcaaaagtaatcaaccaccatttcaaattccatcaaaaagtcatgtatcactttcaggagacatgaaattttggtacatttttactggagttgcagaaggagtgataaagcaaaagtgaattttaaaacaacaaagcaatctcctca

SEQ ID NO: 860367 - DNA, 639 bp, Homo sapiens
ataaattacatgtgtagatgtttactctagggaaaccctgacaaaggtacacagggagccatgcaagaatgtcccctgcagaaatattcacaatcgcaaaaaaatacaaaacctaaatattaataaataagcaattaataaatacatggtggtatattccaatttatagcattttatttctttataaaaggaaaatctctatgttacaaatatttctattacttaatcagagtgatggatatagaagtttttatttgtgttttctgtattttaaaacattattttayacaggttgagcatccctaatctgaaagtttgaaatccaaaattctccaaaattcaaaactttttgattgccatcatggtgtcacaagtagaaaattccacacctgacataagacaggttgcagtcaaaacacagtcgaaactttgtttcatgcccaaaattgttaaaacatactgtataaaactgccttcagtctatacatataaggtggacatgaaacaaatgaatttcatgtttatacttgtgtcccatccccaagatatgtcattatgtatatgcaaatattctaacatttgaaagaaattgaaatccaaagcacttctggtcccaggcatttcagataagggatatac

SEQ ID NO: 860368 - DNA, 639 bp, Homo sapiens
ataaattacatgtgtagatgtttactctagggaaaccctgacaaaggtacacagggagccatgcaagaatgtcccctgcagaaatattcacaatcgcaaaaaaatacaaaacctaaatattaataaataagcaattaataaatacatggtggtatattccaatttatagcattttatttctttataaaaggaaaatctctatgttacaaatatttctattacttaatcagagtgatggatatagaagtttttatttgtgttttctgtattttaaaacattattttatacaggttgagcatccctaatctgaaagtttgaaatccaaaattctccaaaattcaaaactttttgattgccatcatggtgtcacaagtagaaaattccacacctgacatawgacaggttgcagtcaaaacacagtcgaaactttgtttcatgcccaaaattgttaaaacatactgtataaaactgccttcagtctatacatataaggtggacatgaaacaaatgaatttcatgtttatacttgtgtcccatccccaagatatgtcattatgtatatgcaaatattctaacatttgaaagaaattgaaatccaaagcacttctggtcccaggcatttcagataagggatatac

SEQ ID NO: 860369 - DNA, 669 bp, Homo sapiens
gcatgtccctaaagaagagaagatgagaggacccagttaggaaaggaaggatagcagtgggcggctagtccgtgcctgctgctctttcctctagtctctgttggatttccttcactccagcctcaatgtgccattcatcatcaatgacgccatcccctggggaagcgctgtagacactcgggattctcagatgggccagcccaaggaccacagcctactgccactcatggctggctcagtgcgtaaatgctgtcctgaacccaagagaagcatgaacttgggggaaccccagagacccacagtaagattcaaccacrgatgagtgtggttgagtgacactaaggtagtaaatattctaacagatataggttaaatttcaacaggtggtttactaacttggtaactgtgtgacttcaacaaggttatttcacttctccaagtctgaaggtcctcacctatcaaatggagataacactaacacctaccttgtatcctggatttattgaaagaaattatgcaattaattatatttcatctgtgcattcctggaacatggcaaatactcagtaatccataattataattattaacatttagcatcatgcagtcaagcaccttgcctatttctagagaagcttggaacctgagacatggtcctaaaagaactct

SEQ ID NO: 860370 - DNA, 640 bp, Homo sapiens
agttattctgaacgacatctttctgtaaaagttcaggaaaactactttttcacaaaacaaatgagcaacaaaaatgagcaacttaaagtcgaatttatacaaagttattataagaacaaagaaaataaggtacatgcaatacaaatgtgaaaaataatctaattttcaaaatgagctaaaagacattaaaaagatacaaatatgaaagcaatataactcaaaattagaaaacaaaagtaaagtaacataaattcaaagaattacaaataaagaaaaaaatacagaaattaagaagaaattacaargaatgtaagagcaaatgagcccaacagatcactccagagaaataaaactgtgaaaagcaacaaaatcttaaaaattataatgaaataaaaatattaaaatgattcaagaaaaagcaacatgtattgaaggtagacttaaaaaaagacttaacctatggataatacgagtaccagaagaaatatcaaaacaagagagaagaaaatactaaaaattataattcaagaaaactttcatgaaatttaaaaaaagattaagagaagatttcaaaatacatattctgtacataccagacaatgttggcccagatacataatctagtaaaatgactagattt

SEQ ID NO: 860371 - DNA, 629 bp, Homo sapiens
ttgcagtatgagacaatggccctttttttcttaatggccttgttttcttcctatcccttttattgtattaacacagaattttccagtaatgaaatggtcggctgggaccaaaagtcacaaggccagttgatcaaagagaagaggaagctaaggtgtatgtgaaaggcagggggaaaatgataaaacagcctatcattttcctagccctcaagcagagtacactgtgattaaaagtcagatatgagagtttaggtttatttatcacacacactgggctttggcttaaacacggggatgtaacaattaaataactgagggaaaaggaagacccttgattctactctccatgtagaacctggagatgatgccatctccctcaacctagcaccagaggtttaggtgtaggtttaagatacaataaattatatctccctyttcttcatccttctctagctaagcctcaggtcagggaaagaccctgcagctaataatactcttatctaacagcttgaggcaagtatttttaagatctctgagcatcagtttctagactggccaaataaagagattgtgcaatatcctttttaatatgtcctgcaactttaaaatctgatgatgagtttaattct

SEQ ID NO: 860372 - DNA, 642 bp, Homo sapiens
ataaattacatgtgtagatgtttactctagggaaaccctgacaaaggtacacagggagccatgcaagaatgtcccctgcagaaatattcacaatcgcaaaaaaatacaaaacctaaatattaataaataagcaattaataaatacatggtggtatattccaatttatagcattttatttctttataaaaggaaaatctctatgttacaaatatttctattacttaatcagagtgatggatatagaagtttttatttgtgttttctgtattttaaaacattattttayacaggttgagcatccctaatctgaaagtttgaaatccaaaattctccaaaattcaaaactttttgattgccatcatggtgtcacaagtagaaaattccacacctgacataagacaggttgcagtcaaaacacagtcgaaactttgtttcatgcccaaaattgttaaaacatactgtataaaactgccttcagtctatacatataaggtggacatgaaacaaatgaatttcatgtttatacttgtgtcccatccccaagatatgtcattatgtatatgcaaatattctaacatttgaaagaaattgaaatccaaagcacttctggtcccaggcatttcagataagggatatacaac

SEQ ID NO: 860373 - DNA, 642 bp, Homo sapiens
ataaattacatgtgtagatgtttactctagggaaaccctgacaaaggtacacagggagccatgcaagaatgtcccctgcagaaatattcacaatcgcaaaaaaatacaaaacctaaatattaataaataagcaattaataaatacatggtggtatattccaatttatagcattttatttctttataaaaggaaaatctctatgttacaaatatttctattacttaatcagagtgatggatatagaagtttttatttgtgttttctgtattttaaaacattattttatacaggttgagcatccctaatctgaaagtttgaaatccaaaattctccaaaattcaaaactttttgattgccatcatggtgtcacaagtagaaaattccacacctgacatawgacaggttgcagtcaaaacacagtcgaaactttgtttcatgcccaaaattgttaaaacatactgtataaaactgccttcagtctatacatataaggtggacatgaaacaaatgaatttcatgtttatacttgtgtcccatccccaagatatgtcattatgtatatgcaaatattctaacatttgaaagaaattgaaatccaaagcacttctggtcccaggcatttcagataagggatatacaac

SEQ ID NO: 860374 - DNA, 610 bp, Homo sapiens
ggccataatcctaagcaaattaatgcagaaacagaaaacaaaatatttcacgttcttacttataagtgtgagctaaatcttggctacacacagacataaagatgggaacaatagacactggaaactccccaaggatggagggagtggggcaagggctaaaaacttcctattgggtactatgttcatcatctggctgatgggatcaacagaaacctgatcctcagcatcacacaagtatacccctgtaacaaacctgctcatgtacccccccaatctaaaataaaaatagatgcttttttaaaaaagaaaatcataattaaaaagaaaaggaccttggcacagagagcccctctcctgcctgtctgcagatgtactctcagagagatgctgtgatctggaggtggatcgggtctaggtaggttcacagggtcagcgtccacrctgggctctcactcagccacaactcaccaccgatctggaggtctgctcagaggaacagaggagtggggtgaatatgaatctcgtctctagggtcagacttcctaggtccaaatcctggcccttctcttcttagctatgtgagactgggtaagtgaggtggcttctttgt

SEQ ID NO: 860375 - DNA, 610 bp, Homo sapiens
ggccataatcctaagcaaattaatgcagaaacagaaaacaaaatatttcacgttcttacttataagtgtgagctaaatcttggctacacacagacataaagatgggaacaatagacactggaaactccccaaggatggagggagtggggcaagggctaaaaacttcctattgggtactatgttcatcatctggctgatgggatcaacagaaacctgatcctcagcatcacacaagtatacccctgtaacaaacctgctcatgtacccccccaatctaaaataaaaatagatgcttttttaaaaaagaaaatcataattaaaaagaaaaggaccttggcacagagagcccctctcctgcctgtctgcagatgtactctcagagagatgctgtgatctggaggtggatcgggtctaggtaggttcacagggtcagcgtccacgctgggctctcactcagccacaactcaccacygatctggaggtctgctcagaggaacagaggagtggggtgaatatgaatctcgtctctagggtcagacttcctaggtccaaatcctggcccttctcttcttagctatgtgagactgggtaagtgaggtggcttctttgt

SEQ ID NO: 860376 - DNA, 651 bp, Homo sapiens
ctatgtatcctgtataaggtacatgcctctggagaagctgcacttttgcttgtacagggtgacccagtgaaccaatccaggaccttcatgatccatgttttagatatgggatcttctagacaacctatgcagtgtaaacagaaaccccaatctcctgtgagagcaagtctaagtaacatatattgagaagagagttttattttataaaataaaactgtctttatttgcagaagacatggttatctatgtagaaaatctgatgaacatgcaagatgaccactatgactaatatatgagtttagtaaggtggcagatacaagattartatgcaaaaatcaattccattcatatattcttgcagcaaataaccagaaattgagatttttaaaatacaggcgtgtctcattcttattgactgcactttgctgataatgcattttttacaaattgaaggtttgtggcaaccttgctcaagttgaagccagtactcacgtaccatttcaacaatcctagggcccttaagaattatgctaaatctactctgcttatgctctataatgaagcaacaaagcccgatgacagtacatctgttgacaacatggtttactgaatatgttgagcccattttcgagacctattgctcagacaaaa

SEQ ID NO: 860377 - DNA, 641 bp, Homo sapiens
cccaggacccatatgcagcaaacagtcttgtgtctctgtctgctgccaaattggcctcaggctctatcaataccagatctgaataggggctattctttcttttagtgtccttaatgttgtattactttccaatattcacactttaactttacagatgagtagaatggaatagatgtgtttcagtacagaacttttttcttatgtttgcttgggctcccctcctctctgttacctatgttgataatctaggatttgttgtcttacatttttcctgatgttcatataatattcaatgaaataaaatacatgtgacataatgaaggcattatcattgttttccaaactcacgggatcatatcatacctgctttctgcatcttgtttttctcaatcagtaaaatagtaaaaatgcytctaaggctgctgaaacaattttattttgatttaattctatctctaattgaattttatttctatttcaattctattctaaaatttataatctctgcttaatttcctttggtgtacatactctgtgatgttctctatcgcttaaaattcattttgttcaagaacataggttcttgaacctgtttctatgtacagaacttttatttctatgtgttaactttccaggatgta

SEQ ID NO: 860378 - DNA, 657 bp, Homo sapiens
gtagattttggatattagaccttgtcagatggatagattgcaaatattttctcccattctgtaggttgcctattcactctgatgctagcttcttttactgtgcagaagctctttagtttaattagatcccatttgtcaattttggcttttgttgcaattgctcttggtgttttagtcatgaagtccttgcccatgcctatgtcctgaatggtattgcctgggtattcttctagggtttccgtggttttaggttttacatttaagtctttaatcatcttgagttaatttttatataagttgtaaggaaggggtccagttwctgttttctgcatatgactagccagttttcccagcaccatttattaaatagagaatcctttccgcattgcttttttgtcaggttggtcaaagatcagatgattttaggtgagtggtgttatttctgaggtctctgttctgttccattggtttatatatctgtcttcataccagtaccatgctgttttcgttactatagccttgtagtatagtttgaagtcaggtagtgtgatgcctccagctttgttctttttacttaggattgtcttggctatatgggctcttttttggttccatatgaaatttaaagtagttttttctaattctgtgaagaaagtc

SEQ ID NO: 860379 - DNA, 684 bp, Homo sapiens
gtcaaactatttttctcctgaaaagtacagctaatttgcatttattcataggactgacattcttggtctcaactctgtcattgtcttttataattacgtgtattttgtcacggttgctgttgtagttttctttacaatatgtgtattattttcttttaaaaacatttgggtaattaggaggttgtattatttatttatttatttttgcgaaacagtttccctctgttgcccaggctagagtgcagtggcatgatctcagctcactgaaacccccatctcccagggtttaagtgattttcgtgcctcagcctcccaagtagctgggattataggtgggcgccaccacacctggctaattttttttgtattattagtagagacggcgtttcaccattttggccaggctggtcttgaactcctgacctcaagtcatctgcccrcctcagcctcccaaagtgctgggatcacaggcatgagccaccgtgcccagcctgtatttttgtcctaatagttacctttatacatatgcctttcaaagtttccttggtccctggtttctcatttaaccctttacagtctggcttaccgtttttattaatctgccttaacttctacttagtgcctataccacaaacaataagctgactccatttccatcttttataagttcagacccccacaacc

SEQ ID NO: 860380 - DNA, 684 bp, Homo sapiens
gtcaaactatttttctcctgaaaagtacagctaatttgcatttattcataggactgacattcttggtctcaactctgtcattgtcttttataattacgtgtattttgtcacggttgctgttgtagttttctttacaatatgtgtattattttcttttaaaaacatttgggtaattaggaggttgtattatttatttatttatttttgcgaaacagtttccctctgttgcccaggctagagtgcagtggcatgatctcagctcactgaaacccccatctcccagggtttaagtgattttcgtgcctcagcctcccaagtagctgggattataggtgggcgccaccacacctggctaattttttttgtattattagtagagacggcgtttcaccattttggccaggctggtcttgaactcctgacctcaagtcatctgcccgcctcagcctcccaaagtgctgggatcacaggcatgagccaccgtgcccagcctgtatttttgtcctaatagttacctttatacatatgcctttcaaagtttccttggtccctggtttctcatttaaccctttacwgtctggcttaccgtttttattaatctgccttaacttctacttagtgcctataccacaaacaataagctgactccatttccatcttttataagttcagacccccacaacc

SEQ ID NO: 860381 - DNA, 756 bp, Homo sapiens
gaaacccagggccctggtggtataggcacatgaaggagtctcctgatctgcagattgcaaaacccatgggaaaagcatagtatccaggccgggtatcacagtcccgggtatcacagatgacgggttgatgggtgcagcaactgcatgcaaactgcatgtttgcagttccctcggctgggggagggaggtctcccggctcctkgcacttcccaggtgaggcgatgccccacctgcttctgtgtgccctccgtgggctgcacccactgcctaatcagtcccaatgagatgaacttggtacctcagtcagaaatgcagaaatcacccagtgttgatctcactgacagctacagactggagctcttcctattctgccatcttgccagatgtaaagtgtagaatttttgattttgtttttttgcttgtttatgcaattagtgttaagtcatcatcagtttaaaataatgagttgtaagatattttcaagcctcatggtaacctcagatctaaaacatatggcagacacacaaataaaaagcaagaaattaaagcatgccactagagaaaatcaccttcactaaaaggaagacagaagggaagtaacaaaggaagagaatatcttcaccagaaaacaaataataaaatggcaagagtgagtccttacgtatcaataataatattaaatgtaaatgggctaaccttgccaatcaaaagacagagtggttgaatggacccccgcccccacaaaaaaagacccaa

SEQ ID NO: 860382 - DNA, 756 bp, Homo sapiens
gaaacccagggccctggtggtataggcacatgaaggagtctcctgatctgcagattgcaaaacccatgggaaaagcatagtatccaggccgggtatcacagtcccgggtatcacagatgacgggttgatgggtgcagcaactgcatgcaaactgcatgtttgcagttccctcggctgggggagggaggtctcccggctccttgcacttcccaggtgaggcgatgccccacctgcttctgtgtgccctccgtgggctgcacccactgcctaatcagtcccratgagatgaacttggtacctcagtcagaaatgcagaaatcacccagtgttgatctcactgacagctacagactggagctcttcctattctgccatcttgccagatgtaaagtgtagaatttttgattttgtttttttgcttgtttatgcaattagtgttaagtcatcatcagtttaaaataatgagttgtaagatattttcaagcctcatggtaacctcagatctaaaacatatggcagacacacaaataaaaagcaagaaattaaagcatgccactagagaaaatcaccttcactaaaaggaagacagaagggaagtaacaaaggaagagaatatcttcaccagaaaacaaataataaaatggcaagagtgagtccttacgtatcaataataatattaaatgtaaatgggctaaccttgccaatcaaaagacagagtggttgaatggacccccgcccccacaaaaaaagacccaa

SEQ ID NO: 860383 - DNA, 756 bp, Homo sapiens
gaaacccagggccctggtggtataggcacatgaaggagtctcctgatctgcagattgcaaaacccatgggaaaagcatagtatccaggccgggtatcacagtcccgggtatcacagatgacgggttgatgggtgcagcaactgcatgcaaactgcatgtttgcagttccctcggctgggggagggaggtctcccggctccttgcacttcccaggtgaggcgatgccccacctgcttctgtgtgccctccgtgggctgcacccactgcctaatcagtcccaatgagatgaacttggtacctcagtcagaaatgcagaaatcacccagtgttgatctcactgacagctacagactggagctcttcctattctgccatcttgccagatgtaaagtgtagaatttttgattttgtttttttgcttgtttatgcaattagtgttaagtcatcatcagtttaaaataatgagttrtaagatattttcaagcctcatggtaacctcagatctaaaacatatggcagacacacaaataaaaagcaagaaattaaagcatgccactagagaaaatcaccttcactaaaaggaagacagaagggaagtaacaaaggaagagaatatcttcaccagaaaacaaataataaaatggcaagagtgagtccttacgtatcaataataatattaaatgtaaatgggctaaccttgccaatcaaaagacagagtggttgaatggacccccgcccccacaaaaaaagacccaa

SEQ ID NO: 860384 - DNA, 756 bp, Homo sapiens
gaaacccagggccctggtggtataggcacatgaaggagtctcctgatctgcagattgcaaaacccatgggaaaagcatagtatccaggccgggtatcacagtcccgggtatcacagatgacgggttgatgggtgcagcaactgcatgcaaactgcatgtttgcagttccctcggctgggggagggaggtctcccggctccttgcacttcccaggtgaggcgatgccccacctgcttctgtgtgccctccgtgggctgcacccactgcctaatcagtcccaatgagatgaacttggtacctcagtcagaaatgcagaaatcacccagtgttgatctcactgacagctacagactggagctcttcctattctgccatcttgccagatgtaaagtgtagaatttttgattttgtttttttgcttgtttatgcaattagtgttaagtcatcatcagtttaaaataatgagttgtaagatattttcaagcctcatggtaacctcagatctaaaacatatggcagacacacaaataaaaagcaagaaattaaagcatrccactagagaaaatcaccttcactaaaaggaagacagaagggaagtaacaaaggaagagaatatcttcaccagaaaacaaataataaaatggcaagagtgagtccttacgtatcaataataatattaaatgtaaatgggctaaccttgccaatcaaaagacagagtggttgaatggacccccgcccccacaaaaaaagacccaa

SEQ ID NO: 860385 - DNA, 717 bp, Homo sapiens
agagattcattcattcataatccaagagagaaatgtgattcacagggattcttttatcatgtgatacatgataaatacacccaatgttatatgtcaatttaaaaagtaagtaacttaaaaaatgataattactttatacctagcttgtccaacccacaggtgacaggccgcatgcagcccagaacagctttgaatgtggccccacacaaatttgtaaactttctccaaacattatgagagttttttgtaatttttttttagctcatcagctagttctagcgttagtgtattttatgtgcggctcaagacaactctccttcttttaatrtagcccagtgaagccaaaagattggacctccctgctttagaccaagaaaaaagacaccccatatttgcaatgcttaaaaacactaccagccacgcaagaaacatgagactgtcaacttccaatccttcttgaagcagtggaattcgctggtgatatctgacgggtgcggttacttcttggaggaggttgagggtttctaaggatgagtctttgtgactgaaatattgtcaatgtcattgagccttctcattatttcaactattattattccgggtcatcgatgttctgcctgaccattttcgtcctgggcctgactttcctggaattccctggatgcttgttattattgttgtttcgctgggaatttgttcacttggcatttttcttcc

SEQ ID NO: 860386 - DNA, 717 bp, Homo sapiens
agagattcattcattcataatccaagagagaaatgtgattcacagggattcttttatcatgtgatacatgataaatacacccaatgttatatgtcaatttaaaaagtaagtaacttaaaaaatgataattactttatacctagcttgtccaacccacaggtgacaggccgcatgcagcccagaacagctttgaatgtggccccacacaaatttgtaaactttctccaaacattatgagagttttttgtaatttttttttagctcatcagctagttctagcgttagtgtattttatgtgcggctcaagacaactctccttcttttaatatagcccagtgaagccaaaagattggacctccctgctttagaccaagaaaaaagacaccccatatttgcaatgcttaaaaacactaccagccacgcaagaaacatgagactgtcaacttccaatccttcttgaagcagtggaattcgctggtgatatctgacgggygcggttacttcttggaggaggttgagggtttctaaggatgagtctttgtgactgaaatattgtcaatgtcattgagccttctcattatttcaactattattattccgggtcatcgatgttctgcctgaccattttcgtcctgggcctgactttcctggaattccctggatgcttgttattattgttgtttcgctgggaatttgttcacttggcatttttcttcc

SEQ ID NO: 860387 - DNA, 628 bp, Homo sapiens
aaaagaggttggcgcagagccaggcgactgacgacacccggctcatctggcaagtggatatctaattgttgtatctcgttctgccactcacagctcctgctgtgggactgggtcatctgccagctctccaaggagctggcggaaaaccgctgcaatcagagcgaacccaggtcccgggtgagcccgcctcggcacagcactccagctgcccccagtgccttttggggacacatctgctttgccaggcagggctgtgggagggccgcctacctcctgtccatcacagggaaaacctactcttgtcccgcgtcccttccagkcagcctgtgtggagattgctgcattcacctttaatatggctaaaatgttttccttcaatgacagtaatgctgccagaatccatcaagacacccaggaactgatgtgctttggcagatggtgctggaaagatgggattcccggcagcctttgcatcccttgctcacagcccatgagcatctccactgtccagcaggtcagggcacggtctctctctctctctctcacgatctttctcacggtctctctctctcacgatctctctctctcatggtcagggcagaaagagagagagtccatccggagcaga

SEQ ID NO: 860388 - DNA, 628 bp, Homo sapiens
aaaagaggttggcgcagagccaggcgactgacgacacccggctcatctggcaagtggatatctaattgttgtatctcgttctgccactcacagctcctgctgtgggactgggtcatctgccagctctccaaggagctggcggaaaaccgctgcaatcagagcgaacccaggtcccgggtgagcccgcctcggcacagcactccagctgcccccagtgccttttggggacacatctgctttgccaggcagggctgtgggagggccgcctacctcctgtccatcacagggaaaacctactcttgtcccgcgtcccttccagtcagcctgtgtggagattgctgcattcacctttaatatggctaaaatgttttccttcaatgacagtaatgctgccagaatccatcaagacacccaggaactgatgtgctttggcagatggtgctggaaagatgggattcccggcagcctttgcatcccttgctcacagcccaygagcatctccactgtccagcaggtcagggcacggtctctctctctctctctcacgatctttctcacggtctctctctctcacgatctctctctctcatggtcagggcagaaagagagagagtccatccggagcaga

SEQ ID NO: 860389 - DNA, 600 bp, Homo sapiens
ccctagggcaaataatttttaaaaaaacaaatatatattaaaagagaaggaaatcaaaatggtacacctccaagtatccaatgcaaaagaagcagtggagggggcaggtgtggtggttcatgcctgtaatcccagcactttgggaggctgaggcgggaggatcacctgaggttagaagttcgagaccagcctggccaacatggtgaaaccctgtctctactaaaagtacaaaaattagccaggcgtagtggcaggcacctgtaatccctcctaacttgggaggctgaggcaggagaatcmcttgaaccagggaggcagaggttgcagtgagtggagatcatgccactgcactcctgcatgggcgacagagtgagaccccctgtctcaaaaaaaaaaaaaaaaaaaaaaagaagcagtggaggaacaggggcatgaaaaaagttaagatatttgggagttgctgcggctgccgcatgacgtggtgcagccgaagcctaaaggctagagctggagctgccttgccagtggcccagaaggtcctctccccgagaattcgtgtcctggagcttcattagcacagcggccagtgagatgttcctg

SEQ ID NO: 860390 - DNA, 596 bp, Homo sapiens
cacaggggatgttaatactaagagatgtcctaagggatcttctgtacttcacacatactcttccttacctccattgtgaatagtaaactgatttcatcttgatagtctgggtcagttacccagccaacactgtaactcccttcttagtctgttgatttgaggtasgagaagcccaaagtgtccaggtggcaaccttaacttccagtttaatggaatcgttgttgtgtctcctggtgtcagcgttcctccctctggaaatgagatctctaagccagcagaatgtaatgtcggaggaacacgaagcaaaaattttgctagtggatcactaggggtgatggtgagtggtgccatgtccacttccaccttttgattctgggacctgtgaatcctggtgatgggagaaacagtaccatacattgaatgctgattcacggcatacacagccttctgaagaactttgccccagccctgcatagtattgtcacctagttggcattgtaattgtgacttcaaaagtccattccacagttctatcaatccagctgcctcaggatgatggggaacatgacaagaccagtgaattccatcaggatgag

SEQ ID NO: 860391 - DNA, 596 bp, Homo sapiens
cacaggggatgttaatactaagagatgtcctaagggatcttctgtacttcacacatactcttccttacctccattgtgaatagtaaactgatttcatcttgatagtctgggtcagttacccagccaacactgtaactcccttcttagtctgttgatttgaggtacgagaagcccaaagtgtccaggtggcaaccttaacttccagtttaatggaatcgttgttgtgtctcctggtgtcagcgttcctccctctggaaatgagatctctargccagcagaatgtaatgtcggaggaacacgaagcaaaaattttgctagtggatcactaggggtgatggtgagtggtgccatgtccacttccaccttttgattctgggacctgtgaatcctggtgatgggagaaacagtaccatacattgaatgctgattcacggcatacacagccttctgaagaactttgccccagccctgcatagtattgtcacctagttggcattgtaattgtgacttcaaaagtccattccacagttctatcaatccagctgcctcaggatgatggggaacatgacaagaccagtgaattccatcaggatgag

SEQ ID NO: 860392 - DNA, 662 bp, Homo sapiens
tagcaagtggattcctgtgtcagggtctggggaagggattggaaattgattgctcaggggcacgagagacctttctggggtagtgggaacgttctaaagccagatcgtgctggtggctgcacaggcctgcagatgtactaagagtggttgaattgtacagtggataagcattgtgatgtgtacactatatgtcaacaaagctgggaaaaggaagygatcagaggtgatccagaagcgatgctgcccccaactgaggcaaaggaagaagaaagaacttagaaatgttcccagagcaaaaacagccgttttctaaagaatgaccccacaattggttcaagtcgaagagcctccctgaggaataacagcttcgtcacccatctagtttgggggttgtttctatagtaacctgtgacatggcccccttcccaaaaacaaaacaaaacaaaacaaaaaacagaaacaaagacaatgaatccctgagaacagtgagaaagagaaagctcttgcttcttttggcctatggaagggtgtggctgttgagctgagccttggagttcctgggtttgccggtttccccgtctggcagtgctgggggctttgagccagcaacctcaaagaacgcccacgccagggaggccagtgtgcacgcaggtattgatgtt

SEQ ID NO: 860393 - DNA, 662 bp, Homo sapiens
tagcaagtggattcctgtgtcagggtctggggaagggattggaaattgattgctcaggggcacgagagacctttctggggtagtgggaacgttctaaagccagatcgtgctggtggctgcacaggcctgcagatgtactaagagtggttgaattgtacagtggataagcattgtgatgtgtacactatatgtcaacaaagctgggaaaaggaagcgatcagaggtgatccagaagcgatgctgcccccaactgaggcaaaggaagaagaaagaacttagaaatgttcccagagcaaaaacagccgttttctaaagaatgaccccacaattggttcaagtcgaagagcctccctgaggaataacagcttcgtcacccatctagtttgggggttgtttctatagtaamctgtgacatggcccccttcccaaaaacaaaacaaaacaaaacaaaaaacagaaacaaagacaatgaatccctgagaacagtgagaaagagaaagctcttgcttcttttggcctatggaagggtgtggctgttgagctgagccttggagttcctgggtttgccggtttccccgtctggcagtgctgggggctttgagccagcaacctcaaagaacgcccacgccagggaggccagtgtgcacgcaggtattgatgtt

SEQ ID NO: 860394 - DNA, 610 bp, Homo sapiens
ccctgaccacagccccaccctcgggacaccccaacccctgcaccctctgtgcttgtcttggggcattcacttttcaactccatggaaaatattgtgacagtaacgtgggagcagcaagaacccaaataaaagaacgtgtcattcacgctgcctccctttctcctgagctgcaggtaccagcacatccgggcactttytccatggtccgctgtcctaatcctgactatttcagcacccagagagcaagccgaaaacaaaaacacccatcacccatgcccggcattagaaaatctcattggtatatgttcagattattttaaaaggaaattaaactcacagatatagccaggagtagatggagtttgtggggcttaaaatatacgtaaactttaggggttactttaaataataatagcaatatgaatccaagttagatatgaaaagaaatatttatttgaagtgataaaaaatcacaaggctcgcacatgaaaaagctgataggtgcaataaacatcaccaaatggaagaaaaaaaatttgattagttactcccaggcatacctctatcaaacttattttttctatatctcttggctgctaccccttgatta

SEQ ID NO: 860395 - DNA, 610 bp, Homo sapiens
ccctgaccacagccccaccctcgggacaccccaacccctgcaccctctgtgcttgtcttggggcattcacttttcaactccatggaaaatattgtgacagtaacgtgggagcagcaagaacccaaataaaagaacgtgtcattcacgctgcctccctttctcctgagctgcaggtaccagcacatccgggcactttttccatggtccrctgtcctaatcctgactatttcagcacccagagagcaagccgaaaacaaaaacacccatcacccatgcccggcattagaaaatctcattggtatatgttcagattattttaaaaggaaattaaactcacagatatagccaggagtagatggagtttgtggggcttaaaatatacgtaaactttaggggttactttaaataataatagcaatatgaatccaagttagatatgaaaagaaatatttatttgaagtgataaaaaatcacaaggctcgcacatgaaaaagctgataggtgcaataaacatcaccaaatggaagaaaaaaaatttgattagttactcccaggcatacctctatcaaacttattttttctatatctcttggctgctaccccttgatta

SEQ ID NO: 860396 - DNA, 561 bp, Homo sapiens
cttataaaaatgaaaccatttttatggtttgggcctttttttttttttgcctcatctattaaatttttgcctaccccaagttcatgaacattttctcttattttcttcagaattccataatttttgtgtattgtgtgaaaggctaaagtccctttcttccctcaatggatatccagtcatttcagccatttgaattgaaaatactttcctttctctatcacattaccttagcacccttatcaaaaagcaactmttaaaaaatcaatggactatttctgtgtaggtctatttctaaactctgcattctattccattgaactatctgtctatcctaatatcaacctattctgattactatgtaaaattttagaatcagctgtcaactttacaaaaatttcttctggagttttaagtgagattatgtggactctgtagatccatctggggagaagtgacagtttagcaatgtaagtcttccaatccatgagcatggtatatttctccatttatttatgtcttctttaatttttgtcatcaatattttgcagttttctgtttttt

SEQ ID NO: 860397 - DNA, 561 bp, Homo sapiens
cttataaaaatgaaaccatttttatggtttgggcctttttttttttttgcctcatctattaaatttttgcctaccccaagttcatgaacattttctcttattttcttcagaattccataatttttgtgtattgtgtgaaaggctaaagtccctttcttccctcaatggatatccagtcatttcagccatttgaattgaaaatactttcctttctctatcacattaccttagcacccttatcaaaaagcaactcttaaaaaatcaatkgactatttctgtgtaggtctatttctaaactctgcattctattccattgaactatctgtctatcctaatatcaacctattctgattactatgtaaaattttagaatcagctgtcaactttacaaaaatttcttctggagttttaagtgagattatgtggactctgtagatccatctggggagaagtgacagtttagcaatgtaagtcttccaatccatgagcatggtatatttctccatttatttatgtcttctttaatttttgtcatcaatattttgcagttttctgtttttt

SEQ ID NO: 860398 - DNA, 561 bp, Homo sapiens
cttataaaaatgaaaccatttttatggtttgggcctttttttttttttgcctcatctattaaatttttgcctaccccaagttcatgaacattttctcttattttcttcagaattccataatttttgtgtattgtgtgaaaggctaaagtccctttcttccctcaatggatatccagtcatttcagccatttgaattgaaaatactttcctttctctatcacattaccttagcacccttatcaaaaagcaactcttaaaaaatcaatggactatttctgtgtaggtctatttctaaactctgcattctattccattgaactatctgtctatcctaatatcaacctattctgattactatgtaaaattttagaatcagctgtcaactttacaaaaatttcttctggrgttttaagtgagattatgtggactctgtagatccatctggggagaagtgacagtttagcaatgtaagtcttccaatccatgagcatggtatatttctccatttatttatgtcttctttaatttttgtcatcaatattttgcagttttctgtttttt

SEQ ID NO: 860399 - DNA, 590 bp, Homo sapiens
atccactctccacatcctttccaggtgatgatttctttctttttttcttttctgtttttttttttttttttttttgagatggagtctcactctgttgcccaggctggagtgcaaaggcacaatctcatctcactgcaacgtctgcctcctgggttcaagtgattctcctgcctcagcctcccgagtagctgtgattacaggcatgtgccaccatgcctggctaattttctgtatttttttagtagagatggggtttcgccatgttggccaggctggtctcgaacycctgacctcaggtgatccacccaccttggcctcccaaagtgctgggattacaagcaagagccaccgtgcccggctttttttttttccccagacagggttttgccctgttgcccaggctagagtgcagtggcatgatcatggctcactacagcctcagcttcccaggctcaaacaatcctcctacctcagcctcctgagtagctgggactacaggtatgcaccatcatgcccagccaatttttttaatttgttttttgcagagacagggcctcactatatttcctgggctggtcttcaacttacaa

SEQ ID NO: 860400 - DNA, 603 bp, Homo sapiens
gtcgaatgaaagaagccaaatataggagaacatgcagtaggattcccatttctatgaaactctagaataggaagactggcctatggagagagaaatcagattggaggttgctttggggctgggggatggacagggaatgggcatgagggagatctccagggtgaggtcaacgtcctgtcttggatccatcacgcctcttcccctccatgccttccgttcaggtgaaacagaattctttcctgtccccatgctaccaggcttctgtttyagctcatgtcattcttccccctggaaagccccttcacagccagtctctgcaggcccagagctttctaacccaggagctattatcaccttctccaagaaggcttccctctctgctccctcttagcaggagctgccctgcccttccagcactgaccttacagggtttttcttttctatttttcttagagccctgattactctttgtgtgtgtgtgtgtgtgtgtgttttaaacagttggttgtgcctatctcttaactccctggctgtattctgacctgactgacagcctaggctatgtggatttcagccaccccaactcttaacaaagggtcccca

SEQ ID NO: 860401 - DNA, 685 bp, Homo sapiens
ttgcagattattgaccactgactatcagcatccagggagtaggaaaatatgacatacccacatactttctattgaaatgtcagttcttagtcacatttccccttaacactcaagacaaattctcatgtgtaatttccatctcacagataaaacgtcatcactttccatgcaagaaggcaaaccttggagactgttatagagatcaccttgaattctctctaatttttatttttttaaaaaagatgaaagcatttgcaaatgccagtcatttattattagtaacaaattactagcagcgtggcacatatgcacaccggcatgttgaggtacttccttgaggagcamcaggcttgaaataagtctcttggggcaaaaggacgcctgtgtgtggataggtggtggctgagatgttagacatgaccagaggtactgctatgacaagtcctgatccaccagcccagatgcagattcaaacactgtggtctccagattcctcctcgtgatggtatccatgcccaacagctgtagtgagtcatggacatcaatcaccacccccaccatccttcatgcctccttctcttgctgtctctttgcaggagcctgaggccttgaggagtcttaaatcttcatagccctctaccagacaggcaggatgttgaggatccaggtgtcatggcatccggtc

SEQ ID NO: 860402 - DNA, 685 bp, Homo sapiens
ttgcagattattgaccactgactatcagcatccagggagtaggaaaatatgacatacccacatactttctattgaaatgtcagttcttagtcacatttccccttaacactcaagacaaattctcatgtgtaatttccatctcacagataaaacgtcatcactttccatgcaagaaggcaaaccttggagactgttatagagatcaccttgaattctctctaatttttatttttttaaaaaagatgaaagcatttgcaaatgccagtcatttattattagtaacaaattactagcagcgtggcacatatgcacaccggcatgttgaggtacttccttgaggagcaacaggcttgaaataagtctcttggggcaaaaggacgcctgtgtgtggayaggtggtggctgagatgttagacatgaccagaggtactgctatgacaagtcctgatccaccagcccagatgcagattcaaacactgtggtctccagattcctcctcgtgatggtatccatgcccaacagctgtagtgagtcatggacatcaatcaccacccccaccatccttcatgcctccttctcttgctgtctctttgcaggagcctgaggccttgaggagtcttaaatcttcatagccctctaccagacaggcaggatgttgaggatccaggtgtcatggcatccggtc

SEQ ID NO: 860403 - DNA, 685 bp, Homo sapiens
ttgcagattattgaccactgactatcagcatccagggagtaggaaaatatgacatacccacatactttctattgaaatgtcagttcttagtcacatttccccttaacactcaagacaaattctcatgtgtaatttccatctcacagataaaacgtcatcactttccatgcaagaaggcaaaccttggagactgttatagagatcaccttgaattctctctaatttttatttttttaaaaaagatgaaagcatttgcaaatgccagtcatttattattagtaacaaattactagcagcgtggcacatatgcacaccggcatgttgaggtacttccttgaggagcaacaggcttgaaataagtctcttggggcaaaaggacgcctgtgtgtggataggtggtggctgagatgttagacatgaccagaggtactgctatgacaagtcctgatccaccagcccagatgsagattcaaacactgtggtctccagattcctcctcgtgatggtatccatgcccaacagctgtagtgagtcatggacatcaatcaccacccccaccatccttcatgcctccttctcttgctgtctctttgcaggagcctgaggccttgaggagtcttaaatcttcatagccctctaccagacaggcaggatgttgaggatccaggtgtcatggcatccggtc

SEQ ID NO: 860404 - DNA, 672 bp, Homo sapiens
actaaggaatgagagctcagtcataaaccccagagacagcacgaggtgacctacaagggagctaatgccctgcagttaaaactacacttgaatcttaaaaataaaatggaagccccaaagacaaagtcatcctcagtagaaatattctcaagttctgtgacgaagagtaaaacctccccccaaaaaaacccaccccttttagtaggcagkgatctgcccgatgatgactttcattcatctcttggtgggggcacactggaaagctcatctctgtagctaccacaactcatctacagccctcaaactgataatagaaggtaagaacctcagaacattccaaatgttgcaatagtagggggaacagctctcagactctcacaaactctctgtaagatcttgcatgaaccacttatgctctctaggcctcagtttccccatctgtaaaataagatgctctttcctactgacagcctgtggacagatctgtgatctatgagctcaagagtccctcccttatgtgcacaacatctggagagactgaagccagactctgtttccacagttgcttttgggtggccccccatagagcaccctcagcccccaaacagtgggggctttaacctttgcaaaatgccgagatagtacttgaaggctcatttttaacacttctag

SEQ ID NO: 860405 - DNA, 667 bp, Homo sapiens
ggaaacctttaacattatttagcgtcatttcatgagaggacaatgcagttaatgttccccactggaaggaccgtcttgtggttcgcagcgctaggcagtttctctctttctctctattggtttaaatgtgaaagagaaagaaaagggggatttcagaaatggagggaagaaagaaataaaccatctaaggagcacagccaattatataggttggctttaattttcaaactagtgcttaaataccaatggtattattgcctttagctctctggaaactacagtgtaattaggttcactcaacttaacttaaaacatgcccagtcattaaaatttttcttgatccagccaagttatctcgcgcgtgcacacacacacacacacacacacacgcagcacagatctytaagccaaaagtacatcacgtccccaagaaacggcaaaaacatgtcactgctttttggaaatcatgctcatgttttgtgaccttccttaaagataatgttctcacgattaattaatttatgaatagttttccccccaacatgcacaacaggttccatgcaaattcttgagcttttaaattatactgttaatgaaagcaaataaaggcagttaaaaggcaatttgctcaattggtgttaatatttaagcacagcatgtgtaaaaa

SEQ ID NO: 860406 - DNA, 629 bp, Homo sapiens
tccctcaaatttaaaaatagaaaagaacaccagacagagaaaaaagaaacaaaacaaatacattaaaaactgaccctgctgaagcagatgccactctttgaaataacaaagaaactgctgaacacgcctttaattcagtgaggcagtaggtgtttttttctttgtttgtttttgtttcttttytttttttttttttttttgagacggagtttcgctcttgtcacccaggctggagtgtagtggcacaatctgggctcactgcaacctccgccttccaggtccaagcaattctcttgcctcagcctcctgagtagctgggatcacaggtgcacaccaccacagcctgctaattttgtattttttttagtggaggcggggtttctctatgttggtcaggctagtctcgaactcccaacctcaggtggtctgctcacctgggcctcccaaagtgctgggattacaggcgtgagccaccacgttaaaaagggaaacttcctatttgccctctaaaggtttgcagaaaatgaatggacaaaacataaattaatagaagaaagaggcaaaaaaaaattctgtaaaatgtaggcgaaaaatcacagggtctcactcagttacccagcatgaagtgc

SEQ ID NO: 860407 - DNA, 469 bp, Homo sapiens
cattcctatctgccatggacacgtcggggggacccagcctccccttcattcaaggggttctgggtccataacctggctcaaggctggaaattgattgaggggccatgaatctctgtttttataattccaattagtcttttatctgtttgaccttaagtttcctccttacgtaaattaagtaggaatgcattagtcttcctgtcagtttcacttctaggaacactgtgattagttagccaatgtcagagctctacrtgagtcagactgttcagattgctgctttgtcttttctgcccattacggtagctacgcccaccgtgcctttgagggttgagtgctaccacttggcccctgccacttcaggatccaattattccaaattgtatttaacttttgtaactgagtgactgcagttctcaccattagatctgacatacagagaagagcctttacagggctcttcaaagat

SEQ ID NO: 860408 - DNA, 589 bp, Homo sapiens
atcctcacaaacactgcgtttattatccccaatttgcctttgaggaaatggaggctcagagaggttaaataacttgctcaaggtcacgtgggcaatgagtggtggagtggagatttgaactcaggactgtctgtgaccctcccagccctgcagtctccaagtctccagtactatctggctctaaaatccgtactattccctctgctatgtttttgtggcgacttgaactcttccttcaaagtcttggctgctgctatgaactgaacgtgtaccttgtgaagttgtattttttccatattgtaattccatccttcaaaagtaagtcttgttactgmaagactgtttcaaccgtcctggggtaggagtggctaacaggttggcttgggtcccacagtgaaatctgttctgagccagaccctcccgaggggacaggggacgagcaggagagattgtagctgaagtagacatctcctgggttcccagaaatgtggaagaaccttgtgcaaaaacagcttcctgcagagctgcaagatgggatccaggttattggtatttgagcactgtgtttaggggctatgagagaaaccta

SEQ ID NO: 860409 - DNA, 622 bp, Homo sapiens
ttgtgcttcaaaggacatcatcaaaaagtgaaaaggcaacccccaaagcggggtagtcatagtttttgcaagtcatatgtctaataaagaacttgaaaaactctttatatacaagcatgtatataaaatctctttatttttatacatttaggggtacagtgtagctttgttacatggatrtatttcacagtggtgaagtctgggcttttggtgtaatcaatagtgtacattataccaaatagataatttttcatccctcaccaccctcccaccttgccaccttttggagtcttcagtgtctattcttacactctgtatgtccgtgtgtacacagtgtctagctcccacttataagtgagaacatgtggtatatgactttgacttatttcacttaggataatggcccccagttccatccaagttgctgcaaaaggcatgattttattcttttatatggctgagtagtattccatggtgtatatatatatatatatatatactacattttcttcatcctatcatggattgatggacacttaggttgattccatgactttgttattgtggatagtgctgcgataaacatacaagtgcaggtgtttttttatacaatgatttcttt

SEQ ID NO: 860410 - DNA, 626 bp, Homo sapiens
tgttggtaggaagtacctgggtgtttcatttgcatgatatgttggtaatcttagaattatcatatcttgcaagtcatttttaagtatgttgtaatgtagtcagaagctttttaaatatgaaatttaattcttgctggtgtcaattacatttaaaaaaatacaaaatagctatataagattctaggatctttcagaattttataatgtttataatggaaagttggttaaataaaaattgtaccctacacaattttgttgttggcttaaaatagcatttaatttattagtgctcagataatagttatcccctcaatagcatttttactttcatatgttgatatcaaacagtgaagtgagacagcaaatcagtacaacgtggtgattatcaaacatcataaatccatgaaggatagcgttgatcttactgagaagagtttaatyttaaaatgcatacctggaaaaggcaagttagattaacatttcaaactcatatagcattatctgattgattatagttatgattgatcattttatgtttggaccatcactttgaatccaattgggataattataaattaaggatttattatttgctttgaattttagattaaaaaatttaaaaccat

SEQ ID NO: 860411 - DNA, 642 bp, Homo sapiens
ctttcaatgatgagaatctcaggacatgcgttgtcctcagtgaataactttgaacatgggaatcactgtgaccattaaagaaaacacatataaggccatggaagatgccagagttatctttcaggtaattctctgaatgttgctctaaggtttttgcagcatttcaatacaagttaggtcatagatgaagaatatgtgtttctaatattgatttacaatatcacctttcgtatgttatcttataatctacctaatggttgtttatgaaatacttctgtcttatcttcaataatatttttcatcaagtgaatgtgtattgctgtttttaatacatggcaaatgaagcatgaacatatttatcaaaataatatttcattgaaatagtctattaattagaaccaaacattatgttgcatgttgtaaatattatcctccactctgcrtctattgatgtttggggaaaggaaggcttttctttttagttaatggtcattttataaaaatttatatttgaatatactttcatttttcctaagcaaaactttgtatgggtagttgatgcttatttctagtatcgtgggtcagaaacaacacctaaatagtacagagtttttattgcatacaacatatttcagagtcagt

SEQ ID NO: 860412 - DNA, 492 bp, Homo sapiens
cgtatgtcttttaagaaacagaaacgtgccatttgtttttaaattgagtagactttgtatcctttagaatttgggcagagttttcttgctatattgtagagaacctatcaaccatatcttaattttcttcttcttgaggttttcaaaattaacattggcattggtccactaattccttgttttctatttttggrtgagtgtgcataattacctccatcttaattttcaacataaatgtttagcagaatctttcatgtttcattgccatgtaagcagatgtggtttttattctttttccttttcattgaacagttacttcatttgaaatttttcacttgatttaacttttttttttggtggtagatacatctgttgccacctgtgtctggttggaattttaatgtgttgcctcgaagctgtaaccacaatagtggcacattttcctgctgttcctttattctttgtttcttgtgtatctgttttcaagaaatt

SEQ ID NO: 860413 - DNA, 594 bp, Homo sapiens
tttagaagcattttttcagaacttctataggtcaacctttcagaaattcctcattatcaacagtcaaatacagatgtattttctttggctctcgcaacaggcttagaggaatttctagtctgttcttgtgacgtttcattatatgcatcttttgctcaggcctgttaaacctactcaacgtgtgtatcttctactccatgtctttattcttactgttgtcttaacatgaaatccttgcaacccaattcatagtttttgttctttggaaaaatccagattatgtatcatcaatacrtattttttctctattgagattttcctgtttttatgtatcacagccagaagtaatcactgcatagagtatttctgcagaaagatggaagagttctattttaacacaatatttactatacacccagcaaaggtctaggtatttatagatactattttatatattcatcccatcaatgctatgaagaaatattaataaacccattatatatgctaaaaggtagcgacacatatatgccacatgtgcaggttttctcaggtattattagctagggaagctgtgttgtaacagtcttcaaaaac

SEQ ID NO: 860414 - DNA, 621 bp, Homo sapiens
ctaatttaaaattaatgtttaagtgtatgattttttatagtgaatgatgttttaaaacacagttcctaagaagccagaatctacggctgatgaagaaaaaattggaaacgaagagagtgatttagaagaagcctgcattttgcctcatagtccaataaatgtggacaagagacccattgcaattaaatcacccaaggtgcagtgttttctgtgattctgaggttagctgaatagaatcatagcatgtagcaaaggaatccacagtcttgtacctcygtacctgagcatccggagggagggacgggcggttgttagaaatacggccccagtgatggttcatgaacttgacttatgatgtcctggtcagagctgtagctggagaagggtttccttttatttttggtactagattgtatcattaattattcaccattcattccttaaatatattctttgttccagaaacagtgctgggccctgtggctattaatatgaaccacaacttaacttcgtatgccaagctagcctgttccaacatatattagtatagagataagttcacttatatttatagcatagttttaaaaccatgtattaattactaaatttaacatattttaa

SEQ ID NO: 860415 - DNA, 658 bp, Homo sapiens
tgatttaagaatgaggtgttatagtgtcccttaaaatgttttaaaatggttttgcaaaatgcgcatgaagcatatatggcaaaatgttaatgaatctaactggtgtgtatatgggtgttcaatgtgctattttttcctattttctgtatgtttaaaagtatatatatatttttaaattaaaaaggcaacactgaaacaagaataaacagttttcttgcttacgctagaattgctacaaatttgattatgtaaaagaaactttaaaaagttatacttggtgtgggtttgctgaatcasgacagaccaaagctttcagtgccaatagttgtctccctcagagaaaattcgattggtgcattcttctggtttactgttgtccagattgagttttatctgatttgactttttcttatctacagtgctttagaggacttcttcatctttttttattgataacttaccagacaacctaacaggcaactatatctactatccaggcagccatcaacacacagaaaggctgaggagaatcaatcagggaccaaaacattccatgccaccagcatataaccttgcccttcatacactcccaacccagcctcaggaatactggccacaagggaaaatcagccaaatgctggagctgagaatgcgggtt

SEQ ID NO: 860416 - DNA, 658 bp, Homo sapiens
tgatttaagaatgaggtgttatagtgtcccttaaaatgttttaaaatggttttgcaaaatgcgcatgaagcatatatggcaaaatgttaatgaatctaactggtgtgtatatgggtgttcaatgtgctattttttcctattttctgtatgtttaaaagtatatatatatttttaaattaaaaaggcaacactgaaacaagaataaacagttttcttgcttacgctagaattgctacaaatttgattatgtaaaagaaactttaaaaagttatacttggtgtgggtttgctgaatcacgacagaccaaagctttcagtgccaatagttgtctccctcagagaaaattcgattggtgcattcttctggtttactgttgtccagattgagttttatytgatttgactttttcttatctacagtgctttagaggacttcttcatctttttttattgataacttaccagacaacctaacaggcaactatatctactatccaggcagccatcaacacacagaaaggctgaggagaatcaatcagggaccaaaacattccatgccaccagcatataaccttgcccttcatacactcccaacccagcctcaggaatactggccacaagggaaaatcagccaaatgctggagctgagaatgcgggtt

SEQ ID NO: 860417 - DNA, 600 bp, Homo sapiens
ctgctgttgcaagaaagatatctgcctctccccaccttttaagtattaaaaggtggaattaaggacaatgactcctggcttctaatctcatgccactgtttttcctgtccttgggctgttcatgtcaggtttctatgctcctcgcttatatatgacacgcatcttatcccaaatttagctgttatgaaatttaaaaaaaaaaaagtttttggcgaaacttctcccctggtttataaactctgatatcaggaatcctgtcattcttacagtcttagggcctaactctctgcctgagacgtggaatgattttgtgaataaacacatggatgcagtacacagaaaaaggtgcacaattayggaagaagaatccttaattactttgagtctgatttttgcaaaatgtctatttagagtctggcacattttctagttttttccatgcttcttcttcctcttttctccccaagtctatacagcaatgacgggaaataaatggtaaatttttattgatttgaatttgtgcatcaattatctatcacaacaaatagataagtttattttaggatgctccttaacactctaattacacgttaaaggccc

SEQ ID NO: 860418 - DNA, 470 bp, Homo sapiens
aaacaatagcttatagttaatgcttcttgacagagtatcttttttaggttaacatcattgattcagttcattttctgtgttagaatggctagatttgttcatctttaccccacattttgagaagtatgtgatagataaaaatacatcactgaaaagatgggaagraatactatcgtagaatgttaatataagtgatctctgggacgtgggatatcaggaacttcttattgttgtcagtaaaattcgttggctttttcaagttttcttgaatgactcatattatgtgaaagtaaaactagtatttaaatgtatgtatgggcacatttacaataagatttttagttttttctacaagtaatttggaacatgattaagactgtctttcccaagaaacattttcaaattttgctatttgacatttttgccaccttgtcgttttgagtcttttcctttaatgttactatgagtat

SEQ ID NO: 860419 - DNA, 648 bp, Homo sapiens
ttactaattgtttcagaatgtaatttagttttccttcagaaattctgaaggcatttgaggaactttatgtcttaggattgtatttataaatattagtcatcattgcatgatactcaaagaaaattctcttttttttttttttttggagacagagtcttactctgtcgcccaggctgacgtgcagtggcacgatcttggctcactgcaacctccatctccctggttcaagtgattctcctgtctcagcttcctgagtagstgggactgcaggcgcgtgccaccatgcccagctaatttttgtatttttagtagagacagggtttcaccatgttggctagcatggtctcgatctcttgacctcgtgatctgcccgccttggcctcccaaagtactgggattacaggcgtgagccaccgcgcctggcctactcaaagaaaattctaatgatttgagtcctctggatacgtggaaatttggcacatctcttaatcattgaatattgtgcttttccctttaatttttgtttccctttcttaacctaatcagaagcctaaagcagcagaatagggtttgaggaaagtaactctaatttggaaaagaaaattggaaacttatgttgtgatttgcttaaattgattagcattgcca

SEQ ID NO: 860420 - DNA, 600 bp, Homo sapiens
ctgctgttgcaagaaagatatctgcctctccccaccttttaagtattaaaaggtggaattaaggacaatgactcctggcttctaatctcatgccactgtttttcctgtccttgggctgttcatgtcaggtttctatgctcctcgcttatatatgacacgcatcttatcccaaatttagctgttatgaaatttaaaaaaaaaaaagtttttggcgaaacttctyccctggtttataaactctgatatcaggaatcctgtcattcttacagtcttagggcctaactctctgcctgagacgtggaatgattttgtgaataaacacatggatgcagtacacagaaaaaggtgcacaattatggaagaagaatccttaattactttgagtctgatttttgcaaaatgtctatttagagtctggcacattttctagttttttccatgcttcttcttcctcttttctccccaagtctatacagcaatgacgggaaataaatggtaaatttttattgatttgaatttgtgcatcaattatctatcacaacaaatagataagtttattttaggatgctccttaacactctaattacacgttaaaggccc

SEQ ID NO: 860421 - DNA, 615 bp, Homo sapiens
aaaaggttaagtaagcaaattggggtgtgatttacatgcttgcatgtagtaaaatgcacaatctaggcatacagctcaattaattttatatatttctacacccatgttactgccaccagatcaagatacagaacagttcacctgttggcaattttggacaayggtttgctaggtgatttgctggatttcttgcttggtcctaccaactcccctggggaattgggtagaaaaaaattttaaggcaactcaattgacatcaatcaatcattttgtaggaataaaatcacatctaagtgactgattatctgtgtttagaaaatccttgctaatttctaggacagggaaaagcagagggaaaaagaagagaaggaaatggaacaggtgcctgaagattgtgatcaacaaggtaaacaagataaggtaaacaaggtagtaacccagggggaactgtactcattcttcccatatttattttgtaaggaaggctgacagtatgagggaattattactttaaggcatgaaaccagaaagccctcaagctagatctaataggcaacataaagtgagcctaggcggatcaaagagcagcctgaaacacagggaatcatcatctca

SEQ ID NO: 860422 - DNA, 581 bp, Homo sapiens
ggtcttttgataagtgggcatcttggaactggggcactctgggaacaaaagtggtgatgggactctgtgggtgagtgttaacccccattctcctattgggatagggttacatgctcccaggagtggggtttgggtctctgcatgcagattgggaccctgcttgagtagtgcccacttctagttgggtaaagaggcatgtggaagctgagcttccatctggggctgagctggacttcatgacacccagactctccagcccgggccttggctagttcccagggggctctgaggccatgtccaaggggacaatgatggccctcagtgtgacagggtggctgggaagtgggaagaatccatggaagggggggttggcatctggcttgcccgaggggtctcccacatcgagcagggcaaattccccacgcaaagcagcmagctgcacctgtcagagctctcagtgctgtggctcatccgctctaccctgggcagctggtggtacgaagctggttagtgccatctgagaccaccactggggctgcactcatgggggtgtgggaaggctggagatggcaggcctcagc

SEQ ID NO: 860423 - DNA, 662 bp, Homo sapiens
tttcatagattaggaaacataaataatgaataaatacacacacatattcattatttaattgcaggcaggaaagtgcaatagggttaatgaaaatgtgactctagggggttatatggtaaagcaaaggcctaagatagctaaaattctcctaaagaaggccagattcagtgactcatgcctgtaatcccaacatttggggaggctaaggcaagaggattatatgagcccaggagttcaagaacaacctgggcaacatagtggggccatgagatgtgcacttgtacccatcaggtcaaacattaagaagtctgacaatatcaagtgttggagactgggtgtggtggcttatgcccgtaatcctagtgctttgggacacaaaggcaggaagatcacttgaggctaggagttcaagactatccttggaaaggcccctactccacaattttttttaactgggttgagtatggtgccatgtgcctgtagttccagctacttgggaggctgmggtgggcagatcacttgagctcaagagtttgaggttccagtgagctatgatcccaccactgcactccagcctgggtgacgtgagactccgacttaaaaaatatcaagtgtcaagtgttggtgaacatatgaagaatgttagtcagggttctccaaag

SEQ ID NO: 860424 - DNA, 662 bp, Homo sapiens
tttcatagattaggaaacataaataatgaataaatacacacacatattcattatttaattgcaggcaggaaagtgcaatagggttaatgaaaatgtgactctagggggttatatggtaaagcaaaggcctaagatagctaaaattctcctaaagaaggccagattcagtgactcatgcctgtaatcccaacatttggggaggctaaggcaagaggattatatgagcccaggagttcaagaacaacctgggcaacatagtggggccatgagatgtgcacttgtacccatcaggtcaaacattaagaagtctgacaatatcaagtgttggagactgggtgtggtggcttatgcccgtaatcctagtgctttgggacacaaaggcaggaagatcacttgaggctaggagttcaagactatccttggaaaggcccctactccacaattttttttaactgggttgagtatggtgccatgtgcctgtagttccagctacttgggaggctgargtgggcagatcacttgagctcaagagtttgaggttccagtgagctatgatcccaccactgcactccagcctgggtgacgtgagactccgacttaaaaaatatcaagtgtcaagtgttggtgaacatatgaagaatgttagtcagggttctccaaag

SEQ ID NO: 860425 - DNA, 685 bp, Homo sapiens
tattgatgtatattaatgtacattgacaaataaatgtaaggtgatgttaacagaatttcatgtttattgaattctttggttttaaaacaaagcagcatttcacaaaaattattctattttattataagcactgcttacaaacaaatttgttcaaaacaaatttgggggtttggggaataggttaggtaaaatgtttttaccrtaggaattttcagagcctttaatttattaacatacattgtggatctctaaaatgaagagatttctcttattgtttatctcaaaatctactatttacatcacgacttacatttattttgtgtaaataaatctgcataaatcttatttgcacttgttactaatttatcgttttcaccaaactgtaacttctatcaggacaggtaaatatatctgtcttcttcaccactgttcctagagtgccagccagggcatatagaagtggctcaatatttttgaagtgaatgacttgctagagcagcatttaggcaaactagtgcctaaagtcacacattttgggaactaccactctaaagttatttaattgtataataacttcaaaggaaaaaaatgtgttaatgcccctaggccactagagatccatttaataattattgcttcgcttcagttgagtcacttactactttagggaacagaagagatttct

SEQ ID NO: 860426 - DNA, 685 bp, Homo sapiens
tattgatgtatattaatgtacattgacaaataaatgtaaggtgatgttaacagaatttcatgtttattgaattctttggttttaaaacaaagcagcatttcacaaaaattattctattttattataagcactgcttacaaacaaatttgttcaaaacaaatttgggggtttggggaataggttaggtaaaatgtttttaccataggaattttcagagcctttaatttattaacatacattgtggatctctaaaatgaagagatttctcttattgtttatctcaaaatctactatttacatcacracttacatttattttgtgtaaataaatctgcataaatcttatttgcacttgttactaatttatcgttttcaccaaactgtaacttctatcaggacaggtaaatatatctgtcttcttcaccactgttcctagagtgccagccagggcatatagaagtggctcaatatttttgaagtgaatgacttgctagagcagcatttaggcaaactagtgcctaaagtcacacattttgggaactaccactctaaagttatttaattgtataataacttcaaaggaaaaaaatgtgttaatgcccctaggccactagagatccatttaataattattgcttcgcttcagttgagtcacttactactttagggaacagaagagatttct

SEQ ID NO: 860427 - DNA, 606 bp, Homo sapiens
ccacactacactgtgtggtcatttttacttaatctatcctcaaagaatctttttgaaaacatgagtaataaaagttttaaataataagtagatctacgatacagaaattgttggtcagaattagtcatcttagcaaaacagcttaataaaaataattcacatttatttcccaaatccctaaaattsagcttcacactaccctgaaattatgttagtaagaaatacatttcgtataatttgcataacatgccatattttttaaggttatacaaagaaattatctaataataatccctgccacgataacagtttgtatacacaatttcattacttataccacagcaaggcaggcaagggtaatgaccactctaagtaagatataaatgttttctagctctgaagtcctctaaaagtatttaagtttactttttagaaacaaactatggtgttactgactttcatgggcattttactttaagaaatgatttgcaaatgagtataactctcctttatacataacttttcttggagggtcctacagggccctttacaaacctcacttgctagactggaggcatcctccattaaatcagcgagctccaacca

SEQ ID NO: 860428 - DNA, 606 bp, Homo sapiens
ccacactacactgtgtggtcatttttacttaatctatcctcaaagaatctttttgaaaacatgagtaataaaagttttaaataataagtagatctacgatacagaaattgttggtcagaattagtcatcttagcaaaacagcttaataaaaataattcacatttatttcccaaatccctaaaattgagcttcayactaccctgaaattatgttagtaagaaatacatttcgtataatttgcataacatgccatattttttaaggttatacaaagaaattatctaataataatccctgccacgataacagtttgtatacacaatttcattacttataccacagcaaggcaggcaagggtaatgaccactctaagtaagatataaatgttttctagctctgaagtcctctaaaagtatttaagtttactttttagaaacaaactatggtgttactgactttcatgggcattttactttaagaaatgatttgcaaatgagtataactctcctttatacataacttttcttggagggtcctacagggccctttacaaacctcacttgctagactggaggcatcctccattaaatcagcgagctccaacca

SEQ ID NO: 860429 - DNA, 606 bp, Homo sapiens
ccacactacactgtgtggtcatttttacttaatctatcctcaaagaatctttttgaaaacatgagtaataaaagttttaaataataagtagatctacgatacagaaattgttggtcagaattagtcatcttagcaaaacagcttaataaaaataattcacatttatttcccaaatccctaaaattgagcttcacrctaccctgaaattatgttagtaagaaatacatttcgtataatttgcataacatgccatattttttaaggttatacaaagaaattatctaataataatccctgccacgataacagtttgtatacacaatttcattacttataccacagcaaggcaggcaagggtaatgaccactctaagtaagatataaatgttttctagctctgaagtcctctaaaagtatttaagtttactttttagaaacaaactatggtgttactgactttcatgggcattttactttaagaaatgatttgcaaatgagtataactctcctttatacataacttttcttggagggtcctacagggccctttacaaacctcacttgctagactggaggcatcctccattaaatcagcgagctccaacca

SEQ ID NO: 860430 - DNA, 606 bp, Homo sapiens
ccacactacactgtgtggtcatttttacttaatctatcctcaaagaatctttttgaaaacatgagtaataaaagttttaaataataagtagatctacgatacagaaattgttggtcagaattagtcatcttagcaaaacagcttaataaaaataattcacatttatttcccaaatccctaaaattgagcttcacactaccctgaaattatgttagtaagaaatacatttcgtataatttgcataacawgccatattttttaaggttatacaaagaaattatctaataataatccctgccacgataacagtttgtatacacaatttcattacttataccacagcaaggcaggcaagggtaatgaccactctaagtaagatataaatgttttctagctctgaagtcctctaaaagtatttaagtttactttttagaaacaaactatggtgttactgactttcatgggcattttactttaagaaatgatttgcaaatgagtataactctcctttatacataacttttcttggagggtcctacagggccctttacaaacctcacttgctagactggaggcatcctccattaaatcagcgagctccaacca

SEQ ID NO: 860431 - DNA, 649 bp, Homo sapiens
cttatggaaaaaaattctcaaagaaagcctaaaggtcttctattccattagttacttcaaattaatagactatcttagcacaagaaaacaaaattacaaatattatctgtgtcatctctgaaaacagtgtccatgtgctaacacctagaagaaattatgtctacaagatatgaaggaaattaaagcaatatacccaaaataaatttaatataatctgggaaatttaatatattctgcttctctcttccattatgattttgtctcaagagaaactgcgaaggaaaataataccaagtgcagacatatacaatgctcgtttccttgcrgtattggtctagaagcaatagaaggaaatgtagatactttggagggagtgacagtagaatgctggagtagggcaaggacaatattttcagaagaatttacagatttttggcaaagttattaaaaatatttttaaagttatattaatagtgtttcatttattaattccctctttatatgctagttaaaatgctcactatactgtattacatacatatttcaaaaattaaacttaactaaatattcatgacattgttactgtcatctaaattcaattctgattcaggtgtgaataagaagtcatctcaacactgtttaacattta

SEQ ID NO: 860432 - DNA, 649 bp, Homo sapiens
cttatggaaaaaaattctcaaagaaagcctaaaggtcttctattccattagttacttcaaattaatagactatcttagcacaagaaaacaaaattacaaatattatctgtgtcatctctgaaaacagtgtccatgtgctaacacctagaagaaattatgtctacaagatatgaaggaaattaaagcaatatacccaaaataaatttaatataatctgggaaatttaatatattctgcttctctcttccattatgattttgtctcaagagaaactgcgaaggaaaataataccaagtgcagacatatacaatgctcgtttccttgcggtattggtctagaagcaatagaaggaaatgtagatactttggagggagtgacagtagaatgctggagtagggyaaggacaatattttcagaagaatttacagatttttggcaaagttattaaaaatatttttaaagttatattaatagtgtttcatttattaattccctctttatatgctagttaaaatgctcactatactgtattacatacatatttcaaaaattaaacttaactaaatattcatgacattgttactgtcatctaaattcaattctgattcaggtgtgaataagaagtcatctcaacactgtttaacattta

SEQ ID NO: 860433 - DNA, 620 bp, Homo sapiens
atagttcatagataaaatatagttgggtcttgtttttttatccaccctgacaatctctgtcttttaattggtatctttagaccaattacattttaagtgattttgatatgtctgtattaatatctgtcacgtttgtaacttatctgttcattgtttttgtgctctctcacttttcacatacccccttgattcagtaggaggaaaggagaggaccctatcccagagagagcaaaaattcacacctacttacaacttgagggagggtgccaaaccctggagggactcagatgtgacccamcagcagatcccagtacaatgagaaaactatgagtcctaccatacctcaaaaaataaaataaaattagctccttcatttggtataaaacacaccaagctctttctcacctcagggcctggcatgaaacactcttgtgcctgctctttacctgcctggtgacatctcctccttcagacctatgcataaatgtcctctcctcaacaaggcttccatttccatccatccaatgtatatttactatctatacccctctcttatgcaaatatacataacccactactctcggtcttaattcttcctcagctctcttttcctttacata

SEQ ID NO: 860434 - DNA, 569 bp, Homo sapiens
ccatctggggattactgacttctagaattcttcaaactcctcctgatagtgtttcaatgaacttgacctttagtgcaagcagtaagaactgcatctttaatctcacatattgtgaaaaggtggttaactgctgctgcctttcttcttgcgctgctgcttgttttaattaatagcatttcttcccccctatttctcctggggttttgaagagctctttgaactgtatttagtatatttcagtcttggtttggtgtagtctctcaatttatraggtcgtttaattcaagttcaattattctgcacaaattggcaggatgaaatgctaaaagaagattggcactttcaatcacataaatctcatgtcacataaagtgagcaaattccttcattgttctcattgacctctgagataacaatttatggctggcacaaaccagtgtgggcaggcttttctttggcaggctcctgcagaagtaatgctttggcatcttcacctcaacagaaactgaacataagcagagaaagtgaccagagatcaggatcatctgtgggacaacttagtctgaata

SEQ ID NO: 860435 - DNA, 631 bp, Homo sapiens
ttctgagaatctgtctgctttaagaaggtttttctaatccatagttaatgtctccttatacccttagtagctattttgtaatttattatttttttgaattaggttttcataggcactatgtcacaaaccatatataaaataatgcctttagcgaatttattatttaatgtctaagggcactcctcttgtaagacagaattatttgttttgatctgagatgtatgaaggatgattataggcattgctctatgactgtaaaaaaaatgcactgaggctgggcatggtagctcgacgcctgtaatctcagcactttggaaggctgaggtgggcggatgacttgaagccaggagtttgagaccagtctggccaacacaatgaaaccccgtcyctactaaaaatagaaaaaattagctggacatggtcacatgcctataatctcagttacttgggaggctaagccatgagaatcacttgaatctgggaggcagaggttgcagtgagccgagatcaggccactgcattccagcctgggtgacagagtgagatgctttctcaaaataaaatacaattttaaaaaagaaaaatgcattgaatttctatagccatgtttgaattacaaaattgatttgct

SEQ ID NO: 860436 - DNA, 547 bp, Homo sapiens
ctgttctatgaatgttgcaagtgtttattctatttctgtaaaaaccctgatgtagtatatttttttcatttttgttataaaaactctctcacaatgagttcatttagaagactcaatgtttgtctattttttatttatgtttctaagkttttgatgatttctttttttttcttgagaaggaagtataggcatttctagtgcaaatgctatgtttcaggtccagaagaacagaatattactcacgatgacagttacatgatttccatttcctaatctttctgctccattttctgggccagatttcaacctcaaacattttgtactgagataaatgaatagctcgcaggagatttttttgctaactattatagtttgttaattgagatgagaaataacatgattcatcaagtgttaaaatttgctacttatagtctttggggaaaaaatacctatcaatgtatccagaaccattttgcttttaaagtaattatcacttcattttaggagttgagatgggagagaaaaagaaagtgataacttcacctat

SEQ ID NO: 860437 - DNA, 600 bp, Homo sapiens
taaataataacttttaagtgttgctttgtgctcccccatatccagccagttgtgatattataacattgacttatgcaagtgatttcttcttttattaattattataattttcacctgctgaagttgcctataagcattaacagcagaatatttattttcttaatgttaccatctgttgctttatgtgatcaaggtctaccttctactggtaacttaaaatcagatagttacaaatagctcttaataatatctatcttcgtgaaatacaatctccaactttaagtttccttgagactgatacacaacaaataggtttgacaacaaaaccacacatagagatttgtgtttctttctgatctgtgaatcagcctgatacaaaaaatgatctstagcgaggcaatatgaatagtgttaacagacatacatgatacatttaccaatctccacatttcatggattattatcccaatattaaatataaccttcctagcttccatgaaatcctgagagcaaaagcttttacgaactgaagttctgtatgtttgacaagaaatatttgaaaacaatgtgagtaggcagaccaacttagtaggtccatat

SEQ ID NO: 860438 - DNA, 588 bp, Homo sapiens
atagtaccacaactattttagtatgctgataataatcatgcttcaatgtaatttctttgtaatcctatatattttatataaaggcatcaattttttttttgatatggagtctcgctctgttgcccaggctggagtgcagtggcgcatgctcagctcactgcaagctctgcctcccagattcacgccattctcctgcctcagcctccaaagtagctgggactacaagtgcctgccaccacgcccagctaattttttgtatttttagtagatacggggtttcaccgtgttaaccaggatagtcttgatctcctgacctcgtaagccgcccgccttggcctcccaaagtgctgggattacaggcgtgagccaccacgcccagcctargcatcaaaatttttaaacattatcctgagaagggtttcacagacttcatcagactgccagagaggttcttcacacaaacaaggttaagcacatttgctcctatgcaattccactaaaaatcttaagtatctacccaagacaaataaaaatgtatgctagtacaaagacttgtatatgaatgttcgtggcagtattatttgtaat

SEQ ID NO: 860439 - DNA, 570 bp, Homo sapiens
aatgttggtcctcccttgtctcagatggggagaatataggtaacaggttttgtctatgttgaagtgttatttgtcactcactattcaattacagtactcatatatggctttaacctcttttaacctgcacaattacattttcacaactatagctatggtgccacttaaaatgtggttatttgtcttaaaattgttcaccaaatttcatgtggaattctaagcctgatctccttggagatttgagtcatttgataggtagaagttcataagtagttagcctggttctctcctgctgtgttcttctcttctctggcatttgccctgtattttaggaaattaattgctgtcttatatgtgcctattatacaagaataaaataattctcatatattcatatatacttatatawaatataaatatatattattactaatatatatttatatattatttgaaaccttatatattcttactatatatgaataaaacactttctggagagaaaaaaaacagacatcagagtcgtgcctgggatagcctatttgataaatatttgttgcattatttcct

SEQ ID NO: 860440 - DNA, 599 bp, Homo sapiens
gaaattaattgctgtcttatatgtgcctattatacaagaataaaataattctcatatattcatatatacttatatataatataaatatatattattactaatatatatttatatattatttgaaaccttatatattcttactatatatgaataaaacactttctggagagaaaaaaaacagacatcagagtcgtgcctgggatagcctatttgataaatatttgttgcattatttcctacatgaatgatggcacaatacattttcttttaaagattagcatttcagagagatgctcagaccataccacttctaaggaaatgattgtggcttagaaaggaaggaaagaggaacaagaagtagtaaaggatggttaagcactgagtaagcttttttttcatttttgttatctggcataaagcattaggaaawaacaactctatttttccagatgtcccagtctttcaactgacatatttacagctagagcacgcttattcatttatttatttatttttggagtggaggaagaggaggtagtcaggtggtttacaaaaggtggatttctaagtctctgtcaacatagaccaaccctgctgga

SEQ ID NO: 860441 - DNA, 661 bp, Homo sapiens
tggagatataagaagtagactgtgtaatttctagattacatccttaaaggaagatgcttgttctttttccatccaccacttgaaacataatcatggttgtaaaccatattgggctgtgcagataatggcagcatcctagcagatcatgaagatggaaggcatatggctctctgaaagattgactggtgcagagaaatcatattagctgtragacagacacctccttacacatttttacatgtttgagaaaatgaacttctctcagtttaaccactgtttttgagtttcttttacgtttagttgaacttatattttaaccagcacagtaagtttaattttgacttattttcttaactagtcaagagtttaatcaatgtcatgggtactcatgggaatatcatgtatatgaatttcatcagttctggatgttgcaatgaaaaacaaagcaccattgaaagcacctatgtattcttctattgttttctcacattagtgaagccaaatcattttgggagtattttttttcattctttctagttattatgtatttctgtagaatatgaacacaaaataattcagcaatctcactaagtcttaccttctttaagcagttagtcattcccttttttgttactattattgctactattaatacataaag

SEQ ID NO: 860442 - DNA, 585 bp, Homo sapiens
gagatataagaagtagactgtgtaatttctagattacatccttaaaggaagatgcttgttctttttccatccaccacttgaaacataatcatggttgtaaaccatattgggctgtgcagataatggcagcatcctagcagatcatgaagatggaaggcatatggctctctgaaagattgactggtgcagagaaatcatattagctgtaagacagacacctccttacacatttttacatgtttgagaaaatgaacttctctcagtttaaccactgtttttgagtttcttttaygtttagttgaacttatattttaaccagcacagtaagtttaattttgacttattttcttaactagtcaagagtttaatcaatgtcatgggtactcatgggaatatcatgtatatgaatttcatcagttctggatgttgcaatgaaaaacaaagcaccattgaaagcacctatgtattcttctattgttttctcacattagtgaagccaaatcattttgggagtattttttttcattctttctagttattatgtatttctgtagaatatgaacacaaaataattcagcaatctca

SEQ ID NO: 860443 - DNA, 651 bp, Homo sapiens
agcacaaaaagagaaaaccaaaagcacatagctgatttgaaaataagctaagcatctctgtgaacccgaaacatctctgtgaacccaaaacatctctgtgaacaaaaacccaccaagcagtaagcaatggtgaagtcacagtggcttacagggagctatggcccccgccacgcagaaacacagccttaccattttaaatactatcagaagacaggaccaccaaccaccattatagagcctaattctgaactggcggtcctgaagcccaaataaggtaaaatcaaagtcaaaagatagggaaaacaaaggggagaaacaaaaagstagagaaacaaaaatccgctaatcgaaaataaatctgcaaaggaaaacacattttacagaattactgaaaagaaagaaagtcaaacaaattaactatcagaatactgattcattctagataaattatagtcccaccactaaaatatctattctagaacactcaaagagggataaaaattaacatcattttttaattgaaaaacaaaatcaatgagaaatgaagcaagaactgtagctacagaaataaatttaaaagattagaaaaatataatcgactttaaacacattagcagtaagtatgaaaacagttttcctaatgtcaatatt

SEQ ID NO: 860444 - DNA, 646 bp, Homo sapiens
gcatttaggataaagtccaacgtttcaagtatgacctatcaggccgtgctggacctgggcctgattgcctatttctgtttgatttcttgtcactcttacttttgcactgtatactgcctgatggttttagcttttcccaaatgccaagcaccattccctaggtttggaaaactattccctatgccttcatctctaacaacttgtcgtctgcctaacttacattccaggtttaagattaaatatcacttcttcagaggcctcaggaaagttttccacagtcctccttgtttcttgttgtgtggtctcatagctgcatctttctcttgataagtggatttttaaactatgcttaagtaatgggtaagtacatcttcagttctgttccctcctrcacactataaatgtaaattcctgaacttgtttaattctagatccccagtgtctaacacagtttctaatgatggtcaatcaaaatgcttcttctatccttgcttattttcctccaaagtaaatttctttgtggatgaaatatgcagtctttgtggtaggaataactatgaaggcactcaaaggtctaagtttattagggagagatttcaggcaaagacattaagagggtagatgtcacctgggaagatatcatgcg

SEQ ID NO: 860445 - DNA, 547 bp, Homo sapiens
tagcaagccaacacaaaaggaaatcattttgtgagacacttttaccttgaaaaattgactcttcacctcttagaattgttctataatttttatgacttttcaattccttgagccaaggatttaagcatacacatgcgtgcacgtacacacacacacacacacacatcttgcactctcttcatctccatttttactatctttctctataaaaagaagaatgagagtagggaatattgcagggtttaagaatattttaaagaaggctttatcttagttcttcagtagtacggggtcaaagtatcttttacacagggaattgtttgttctaatcgggataatggactttgaagctcaaatccagctcagggagacatagaatatctttaaggcaaaaaagatcacatcaccttgcatataagtaggtagcttgatatagtttggaatgtttggttttgttcgtttttgcctgcggtttagttttatttggtgtgacattatgtaacgyagtttggtttgtttttaataagagaagttttatactttatct

SEQ ID NO: 860446 - DNA, 578 bp, Homo sapiens
tttgaagctcaaatccagctcagggagacatagaatatctttaaggcaaaaaagatcacatcaccttgcatataagtaggtagcttgatatagtttggaatgtttggttttgttcgtttttgcctgcggtttagttttatttggtgtgacattatgtaacgcagtttggtttgtttttaataagagaagttttatactttatcttgggaatggccaattaagaagttaacatatttatgcacatttaaggggaacacaccctctgttctgaattggggcatgtttgaaggatactactaccatagctcttgtactcagaaattgttgataaggcaaaataaggtcaatgtgtgggacccagggatcttttagaatagagagtatttagatcytaatgcccactcactaaaacttgaaaccagggaaaattgttagagtatattagataaccctgaccacagtctggtagcagattatggttatgagaaccctaaaataatcagaccatttcagctggtgatgataatttcatactgagttcaggggaagaactgatttctgaagaatgtatgtccagt

SEQ ID NO: 860447 - DNA, 666 bp, Homo sapiens
atgaagcaagaactgtagctacagaaataaatttaaaagattagaaaaatataatcgactttaaacacattagcagtaagtatgaaaacagttttcctaatgtcaatatttaattaaatttactgaatttttaaaaagtcaatttctgaattatagcattattcttatattcatggtttttcagtgggtttactttcttactaattatatccttgttgagagtytgtggctttaagttctatcagcctttgcatacctgatatcgtctacattttgccctcttctggaaatataatttagcttagaaaaaactgtaaattgataaatatattccctctaaacttggaatatttaacttcattgttttcagttttagtataactgctaaaagacctgctgtcagaaagtataaatttaagtactcattttcaaaaactaaaaaatactatacataagtaaaatagaagaaaaacatgaaccaatataaaaatcatatgaatgataaagaaataatattaacaaggtggtttcttagagaaaattttaagaagtaacaaatctctacaagtattgacaaagcaaaaaggcacaataagcaacatcagaagggacaatggggatacattatggaaatagaaatcgatgtttaaacaatgaattgtcatg

SEQ ID NO: 860448 - DNA, 609 bp, Homo sapiens
acataccagtgaattcaaatgagttgatattgggaaagacttgacacttgccagacacacagtcctgtaaaagtatttgctattagatgctacatttattttctcataccatcatgggttgaaaactgtccacaatgctcaattaagtcactgatgtgttttaaaatagaaagacataaaacaaaatagagagtcatagaaacccatcagttgtgctctgctttgcatgtactggagcatatctttatcattaacatgggtggaattgagtgtgccatgtaacctgataaatcagtaccactcaataaatttccattccattatttcttaacaggcactgaaataaacacaaaatatttccaaatgattacctaggctttaccttatcctacctaggattaccttatgttttttgaatacaccaaaaatgtgtatgaggaaagagaaatgagttycttccaaattttaattaacttacaccagaaaggtaaaatcatctctggactattgtacattatgaactatctgtgagtatcctaaatggatgtaataaccctggtactagatgaaagatttcataatttgctgaagtcctaaaatgctatatac

SEQ ID NO: 860449 - DNA, 650 bp, Homo sapiens
tttgcctatatgtacaacagcactctccttgccttcatgcttaagactaattccttgagattactgtcttctctctatgattctacttactcttctgactcttaaacaagtaacaggaaagggatggatgaaacctgtcctgaataagagaaaataacagtctataaaatggtttgtcctcagagcgtgtgaagatasagggacacacaaagaatctggtttgaatgtttacttgctgaaaagttttaaattccccatggccaaatggctcatctaataaacatattcaacacttcaataaatagcatatatttctacttgcttcttagtgacttttttcatcagacttactcaaagctcttcaaagaccctgagctggattttttcacagttctaagtcactgcctgaaggtaatttgagcagttaaagaggtgcattaattctttccggccacaagtggcccatttactgaatatatagtgaaaaaccaagagggaaacagtattcccctgagctctagagatgggtgagagcctttccctgggcttgtctggagcatcaggctgtctgcaacatgttaattagcacagagggagtagaattttgattttagttttactgaacccaagcagaatgttcaccagtgaca

SEQ ID NO: 860450 - DNA, 631 bp, Homo sapiens
cggttttttgtggcttactcagttaccctgcttttgtctcgttttaacatggcctcagagtgaccttgtctgatggtgatgtttcatgagttcattcatgtccagcaggagaataacatggcccagctgtgagcattaaaccagttaccagatgtcaggggttgcttttattctttctcaatatatacaaaccttatattcataatatatacctcaaataacatatcttttctgctctaccttctagtaactgattatggtgacagttaccacttaaacacattcttttcccaccatccatttcacatctgtagccagcaccttgacagtagagattctctacctggtggagtgatcgacacattcttctttaaagaggctaagcctctactagtccagccyttattggattgttctaatctcccattgacatttgctcttccatatagaagtactaagtggatcctctgggtcccagacgtcttcagatgcaagaacaatccaacttttccttgtcaattggaatcagttttcccagccagtttagcaacctcctgtctgtcagtttagtggaataataagcccaaaatagccaggtggtaatctgaattctaattcaatccaataatct

SEQ ID NO: 860451 - DNA, 631 bp, Homo sapiens
ctcccattgacatttgctcttccatatagaagtactaagtggatcctctgggtcccagacgtcttcagatgcaagaacaatccaacttttccttgtcaattggaatcagttttcccagccagtttagcaacctcctgtctgtcagtttagtggaataataagcccaaaatagccaggtggtaatctsaattctaattcaatccaataatctatctttatgccactctacatctaaccccaaaggaagcattcttctctgataacaaagacatttcaaatatctaaaacaaagtttgtgggaattagggcaaaaagtcaccacagacagaagttgtgggaaagggaaaggtcatcaaatataatagaggaactgctcctactactttctactactacctctaccccttggatttagctatgggggaaagagaactatacacttgctgcccattcaaagcatatacagtatcctgtaatacagcatcaccaacttattgtcctcatgtgtgaataatattgagtttttagcaggccattccacatgcctatgaggccaactttttctgggtgataaggtatacatatgactaatagattctgttgcctatgggctcacttctactgtgaaatg

SEQ ID NO: 860452 - DNA, 642 bp, Homo sapiens
aatagaggaactgctcctactactttctactactacctctaccccttggatttagctatgggggaaagagaactatacacttgctgcccattcaaagcatatacagtatcctgtaatacagcatcaccaacttattgtcctcatgtgtgaataatattgagtttttagcaggccattccacatgcctatgaggccaactttttctgggtgataaggtatacrtatgactaatagattctgttgcctatgggctcacttctactgtgaaatgatttcctttgccagaaacactattgtgtgagataactttaggttgaatgaagtcattccaggagtctatcaattgtgcattgtcagaagcatttttcagagggaagctgggtgaagggtatgcagaactctgtattatttttgcagatttttgtaagtttaaaattctttcaaaattaaaagtttaaaaaagggagaagtcatacaggataaaagaatttgcttctgctgacaagaagattcaagaggaaagcaaggatgtaatgtttaacacagacagtgagaaacttattatattaatcaaaatcatgtattttctttatgttcaaaataagtaattattagatatactgatgcatcatagtattttaa

SEQ ID NO: 860453 - DNA, 601 bp, Homo sapiens
aaattacatgctcttagatgtcattccattatatttcaataaaactctaaacacatgaaatggattaaaaccaatgttgtctcactttttaaaacatgttcccaaaatgtagacattgtgaaatctgaagaaactctactacagccctcaggraagcttaaattcttatattctttatatccccacacagcatgagttctgataccgtctttcccacctcacctgtatcacccatatccctactgcaggagaagtggagaaaagggaaatactcacagaaaagaaattcaaaaaatttctcactacaggtgacatgggaagctacaggattatttggtggtgagctgcactcaggaaagtcaatgcagagttaggtaaaggtattcttgccagtggttggcactgagtgcttagggaaggtctgttaaatgactgaagggacccatcacactggtgaaaaaggtgaggggaaacccgggttcaacctgtgtgagtgagctggaatgcttccatgaactgacttctactgtggctttgttttcattggtgtttctaaagggtgctttatgtcttttcatttaagggctctgtatcatagaaa

SEQ ID NO: 860454 - DNA, 584 bp, Homo sapiens
taaatgttagctaatattgtgcatagaaaaaaaaagacattatataaccaccttatacattaaagtatatttatttattcaaatatatttggtactaactacctatatgacaaatattacagatattagacacaaagagtgatgattcacaattgcactcagatgccatataaaatacaaagtaggataagaaaacatagactgatactatgaaattctaacagtagaaattatttaaacaagcatttttatgaaagatttggttaggaagcgctctttgagcttartgttgcaatatattgccatgtggaaatggtagaaaatatttcaagtgtagggaacaatataaaagcatacagacacacgaaagggtagaacttaataatacaatgaacataatgtagtttcattggcagaaatataaggcttagaaagtaacaatgaaaaagaagtttggaaaaacatgctagagatacaatatggagaattttgctttatcacatcagattattgaatcagacctaattacaagcttaaaaatcacacaaagaagcctcaaagtttataaaaatgagaagaatatt

SEQ ID NO: 860455 - DNA, 639 bp, Homo sapiens
tggctaaaggatggccagcatgcctctgagccattgccccggtggccctactggtcccagaagcctccaaattaaacttgggaaatgacttgactgtttataccccacataatatggcgggtttcctgtcctctaagggaagcctttggtgaacagacagcagtttccttaaatatcaagctttattgttagagggttccaccatccagttaaaaactttctctsacttaaacccagacactttcctccctgagggagctgggaaacctaaatgtgactgtgaacaagtcgtggtacagatctatgcagccagggaagatctcagggaaactcccctagaaaaatccagattggaccctcttcatggatggaagctcctttgtagagcaaagaatccataaggcaggatatgcagtagtcactctgaatgatgttattgtctctctctccaggcacaagtgctcaactaactgaactgacagctcttacacttgagttaagcaagggaaaggtagctaacatttacactgactcaagtatgctttcctagttctccatgctcatgctaccatttggaaggaaaggtactttcttaccaccaatgggtcttctattaaataccatcaggaaattaacaag

SEQ ID NO: 860456 - DNA, 659 bp, Homo sapiens
tgaatatataaagaataaaaatttacaaaaaacggggaaaagatttgaatagacagtccaccagacaagatattgagatggtaaataaggacacaaatgtatactcagtggaattagtcagcctcaaattcctgggctcaagaaatcctcgtgccttagcctctcaagtagccaggactatatcacacatcactgcacccagctgattttttattttttattttttgtagtaacagggtctcactatattgcccaagctggtctcgaacttctggcctcaagtgatcctcccaccttaacctcccaaagtgctaggattataggagtgagtcattgtgcccagccagaattttttaaattaaaaattctcaccatgcaaagtgatgataaggctgtggagtcactagaactctcacatattgctgatgggtatataaaatggcamaaccgcttttgaaaacagttgggaaatttctaaaaatagttaaatatacacataccccatgacctagctatttcaacccctgtatttacctaagagaaatgaaagagtatgtccacagaaagacttgtacctcatttagagtagcttcattaatataagccaaaactcaaaatatttcaaatgtccataacatttatatgttatccatcagcaa

SEQ ID NO: 860457 - DNA, 606 bp, Homo sapiens
tttctatatgtcaataatgaacaatctgaaaaacaaacaaagaaagtaattctatttacattagtgacactaaaatgaaatacttacgattaaacttaaccaaatacataaaagatctgtataatgaaaaccataaaacattggtgaaattgaagaggacacacataaaaaaggaatgatattccatgttcatggattgaaagtataaatattgttaaaatgtccatactacccaaagctatttgcatattcaatgcaatctctatcaaaataccactgacattyttcacataattagaaaaattaatcctaaaattaatatggaaccacaaaagacgcagaataaccaaagctatctggagcaaaaacaacaaagctggaagcattccattatctgactttcaaattacactacagagctatagtaatgaaaataacatggcactgtcataggaaaaaaaaaaaaaaccacatagactaatggaacagaatagagaacccagaaataaattcatgcatttacattcagctcatttttaacaaagcaccaagaatatacattggggaaaaggcagtctcttaaataaaaagtgctgtgaaaaccag

SEQ ID NO: 860458 - DNA, 599 bp, Homo sapiens
ggcctcatgaggcccaggagagcttcaaatgtggcccagaatgaattcttaaactttcttaaaacactatgagatttttttgctatttcttccttgttttttttttttttttaagctcattagctactattagtgttagcatttttatgtgtggcccaggacaattcttcttccaatgtggcccagggaagccaaaarattggacgcccctgctctaaggtaaaggaaagacccgaggctaggacctcaacaaaaaagcaatttgtagctgtccagtgagagttaacaggagactgagttgggatagtttttgttggaatggaaaagaatgaacttggtaccattggctcacctaaaaggatatttccctatccccaaaacaaaagctgaaaactcatttgactactaaaagttcactgtagtttcgtgaagcataaacatttttttgctcagatttgtcaggttcagtctcagggttggataattcttcgagtctgggaagacataggaatgttgcataaaaatcattttattaattagattcaccatcatatatttcaccaagaagtatcttttgacaatctacttcctctgtgaaa

SEQ ID NO: 860459 - DNA, 495 bp, Homo sapiens
agaccatcccaatgaagaagcactgtaggatgatgcaaattgatataaacatggatgtgtggaacatactgacaaggctcaaaataattagtttccagaatggtaaaaaaaaaaagagccaacaatctcaaaacaatcaatgcttaaatatttattacaccaagcctgagaagctttctataaaatcaccaaattagagtaggtgctggcaaagaaaactactttggaaaaatacacattcaagaagagtgttcttcgagtggtggatttctgtgttctttctaccaccccatgtagaaccaggggagtcctggggtcctgggggttagsaggtggcacactacagacaagctctagtccaacatgtcatgtggtattggatgttgatgggtcaagcattgtcagggacacagaagtgtttcttcctctatatattgaaagtctgtttattgaaagcatacttaacctcaatttgagggacgcatgtctcaagaa

SEQ ID NO: 860460 - DNA, 616 bp, Homo sapiens
agtcaaatattactagtgattttgaaataatttcttgtttgtcattgccatttttatgcattcttttatgaattgtagctgtatgggaataacaaaactgccatttctctactaaagtgttcacattttattgatttttcatttttatattaaataatcatttttctataatatctgctgcaaatatttttaataataaatttctgattttgcataatgcctagataggcctttccaatcttgagatcagatgattatcagtcattcttttttattgtctaattttatttatttggctttattttggctaagcaatattgataatatcattgtgatattttgcattttcatatatattttatgtaattgtcaaaataaatcttctcaagagttctgctatgtgggcacctttattttcctataacccattccttrgaagaacaatcattttaggcagtggagcccagcaataacctgaattttgtatcttttattatttccctgcattcatactacttttattgatttgaggccactgtagagacctcaggtcacgtaaaagtcctgttagtacctgttgaatatgccactaatgaaaaaaaaaaaatgagtagaa

SEQ ID NO: 860461 - DNA, 647 bp, Homo sapiens
gaaaaatgttaatgataatctaagccttcaccaagttgtaattttttttgatggtggagggtcttcccttgatgttaatggcttctgactgatccggttggtggttgctgaagggtaaggaggctgtggcagttccttaaaataaaacaactatgaaatttgtcatatcgatagacacgttctttcacaaacaataatttatttgcatatgattatgtttaatagaattttaccctcagtagaaattctttcaaaattggagtcagtcctctcaaaccctgcttctgctttatcaaaaaagtttatggaatagtctaaatsctttgatgtcatttcaacaatgttcacagcgtcttcaccaggagtagatttcatctcaataagccactttatttgctcaactataagaagcaactcctcattcattcaagttttatcattagattgcagcaattcagtaatatcttcaggttccacttctaattctaattttcttcctattccaccacatgtgcaattactttctccattgaagtcttgagctcctcaaagtcatgcatgaggtttgtaatcaacttcttccaaattcttattaatgttgatattttgacctcctctcatgaatcacaaatgttcttaatgacatc

SEQ ID NO: 860462 - DNA, 681 bp, Homo sapiens
tatatatagagataacttttgtcagacttcaaatgccaaagagcagagcatatcttccagcttatttctggtttgagctggaggtcgcagcttgtgcaatttggtagacagcaattcgccttggaacaagctcataaacatggaataggcagatagattgattcagaatttctgatttttttaaagggcaagagagcaaatgtctagtttctaaggcaaaaaggtagcagcaaaaacaaaagccacacacattttaactgagcactattgttattaacgcattgcactagtatcacactttacagtttacaatgaccttttacagccgttatctcatttgatacacccaccctgtggaacagatgtgcattaatataggcacttgacagaygaagaaattcgggcacaaaaaggttaagtgacttacctaaggttgtactgtaagttggtatacatatgttgccttttgtgctagatagataaggaatggaggcatctgaagaactctcaattctgttttttatgagtcccgattgagaagaaaatcccacagcagtgcgttgcatgctcatctttatttcaactaatgttttcagtatgtaaaacgtgcagaagcagcacacttgcaggttgctcagtgaaactggcatgatgcaaatgtgatgggtaatgttcaataag

SEQ ID NO: 860463 - DNA, 704 bp, Homo sapiens
tgtattgttaatttgttggaagatatactattattagcaagactggccttacacaaagatggggtaggcagcctgttagtgttatttcagtgacaatgggaaggcgccctttgccaaaaatatcgctccagcctgttctctgaggcttaaaatcatttaatgaggactttgcattctctttcagaattagagataaagatgataaatcagatactcttgagagagagaattggactcccacagcatttgtctcatatctcagtaatagcacttaactatgttgctttataatttatctgtttgcttgtctgtctgcccccacaaggctgtgaattccttgagggcagtgaccatgccacactcaattctgactcctaagactttttacaagtgcctggcagaaaacaaatactcagtaaacaaaatgacaaaggaacaaattagtgaatgagaaaattcatatctaccatgagatctaaaggactgagaagaaactttttcttaggaatagggaataaaagrgaaacaaaagtgctatcagagccccagaagaggtatgagagaataatgatagtcctaactatagaaagcccactgttaaagagattgtcatctattcctgattcagggctgcttcatctatttactttgcaagatacatctgtcctattttgtttaagaaaaaagtaaaaccactgtcaaaa

SEQ ID NO: 860464 - DNA, 632 bp, Homo sapiens
tgcatgtgtgtgtatgtgcatatacatgtataaagttggtgcaaaagtaattgtggtttttgccattaaaagtaatgggaaaaaatgcaactacttttgcaccaaccctgtgtatggctacaatctatttaagagctagccattcttaagtagaattttgccacttcaagtaaaacatagaagccatacaaccatataggttttttttcccatttattttctatttttcgtaagtttaacatctacctacattgaaaactccaccaaatcttatacctttgatttcaatattaatatatattttaaagaatttcagagaaaaacaggcttttatacttaatcgtataatgttgctctttcttcaaacttaaggatttcagtttccctttggtataattttccttcatcctgatgaacttcctttagcatttcttgtaaaacacatctgtgagtaacagattctctcattytccctttttctgagaatgtctttatttcaccttcaattacaaaatatattttcagcagatataaaactctgggttgacagttatttgctttcagcactttaaagatgttgtcccatcgtcctccagccttcatgatttctgatgggaaatccataggtgttc

SEQ ID NO: 860465 - DNA, 605 bp, Homo sapiens
gcctttgcaaaaactgttggctggaattttggctgatgttttacttagttcagcacaaggaaaatttcaacttggccttctccttgaggaacatttatgaagaaataagagttatatgaagatgtgaatgaggagtcaactcacatatacccttacttaaagtgaaagttagcagctaagtgccaccaagtaaatcamctgtcttctaaaagctctgccctctccccttcaaaacaattagagtctaaaaacccacattgatttctcacttttttttttttttttttttttttaccattttatgctctaagagtaatttgggactgtatctgggactgtggtatctcctctatagcaactaaaaggctttcaatctgataattaacctaccatgccatttcacccaaataatcttctggaaatttaccaatgtacttccaaatctttcataggctggctttgcctcagcaccactaaatcactcaggatcatgtttctcacaggcggcggctgaaataaaatatgcatactatgtaattggaaaaagattctgtctcattttccccggctgttcttccttgttggcaatgcagagggaaagaagg

SEQ ID NO: 860466 - DNA, 625 bp, Homo sapiens
gaaatgaagcaggttcagagaatccttcagagcatgtgctagaagcagtcagtgctccctgaatacctgctcttcccttaatttgctagctttccttgaagttggatgaacccatgtcactagttctgagcaatggtcttcaagcagaagtaaagccaagtgaaaaaatgtacctggaagacagagtgttcaacgatatcagatgccacrgatagatcaaataaggtgagaattgagaattgattatggggtttggtaaaatggaggtcatcatcgactttgaaaagaatagtttttctatagaaattcattacgagcatcactgaatcagactataaggaactacttcactagtgagtatagaacttaggtctatacaagttagtcaattattgacatggagttagagagcctagatccttccccactcaaacctatgctgttctctcacctaacccaccagaagcctggtttgctttccttgttccattacacatccatatacatataggtcacattgtcaaaattttaattatcggcccaaattctttactctcctctagtagtgctacacatctgtacccttgccatggtcttatggatgtgtaatgtactactgagcccc

SEQ ID NO: 860467 - DNA, 641 bp, Homo sapiens
ttgtctatgtttgttttggttgcctgtgcttgtagaatattgctcaagaagtctttgcccagaccaatgtcctggcaattttctccaatgttttcttgtagtagtttcatagtttgaggtcttagacttaagtctttgatccattttgatttgatttttgtatatggtgagagagaggggtcaagttttattttttwgcatatggatatccagttttccaagcaccatttattgaagagactgtcttttccccatctttttagcctcttttctgtgtctcttctactttccaatcttaacaacattatctttctttgtgtctacctttgtacccttatatggttgagcttctactacttaatttgtcagctttaaacaatatactttgacttgaaacactacatcttttcttcccttatcatgtcaatttcattagttgccatttctgtattttcagattattcaccatttacaaatcattctgctacttttatcgcagtatttttagtgaaaattttactattaaatatattcatcatttatagccacctctttaatgagtttttcctatcactcactagatgaatgaaaattgttctgtactaaatttttcagaaaggctcatcaatacaatgttccct

SEQ ID NO: 860468 - DNA, 641 bp, Homo sapiens
ttgtctatgtttgttttggttgcctgtgcttgtagaatattgctcaagaagtctttgcccagaccaatgtcctggcaattttctccaatgttttcttgtagtagtttcatagtttgaggtcttagacttaagtctttgatccattttgatttgatttttgtatatggtgagagagaggggtcaagttttatttttttgcatatggatatccagttttccaagcaccatttattgaagagactgtcttttccccatctttttagcctcttttctgtgtctcttctactttccaatcttaacaacattatctttctttgtgtctacctttgtacccttatatggttgagcttctactacttaatttgtyagctttaaacaatatactttgacttgaaacactacatcttttcttcccttatcatgtcaatttcattagttgccatttctgtattttcagattattcaccatttacaaatcattctgctacttttatcgcagtatttttagtgaaaattttactattaaatatattcatcatttatagccacctctttaatgagtttttcctatcactcactagatgaatgaaaattgttctgtactaaatttttcagaaaggctcatcaatacaatgttccct

SEQ ID NO: 860469 - DNA, 584 bp, Homo sapiens
ggctctccagactgtacaggatggagagcaggttcataggaacaactctaaataatggaaaggaaacataatatctgatgctatctattactgttctctttatcattctataaggttcccaggagaggtgggaagattcagaactaatttgctagaaagaaaatccccagaataaggtttaatgtagtcaaaagtaagaagccatctgtcttaaatattccttgaaatattagtgttttattgttttgtttctgctattaattgattttcttatcatgaagsactcaactggtgctttgcttttcttccacatacaaatgttatatgccacagagactccaaagagaactcaataatcactaccgttttaaagcgtgaatctcaaattttgtggggacaagctaagcattagcaacgcatgctgaaagctccttttttggtgtgtgtactttgtaatttttaatataaaaacataatttaaaaaaaacttttattttagattcaaggggtacatgtgcaggtttacaacaagggtatactgtgtgatgctgaggtttggtgtacaattgaacccaccacccagg

SEQ ID NO: 860470 - DNA, 549 bp, Homo sapiens
gagtattcaactatatttccaatagcaaactgacaagcccttggcactttttttttgtttttttttgttttagatggagtcttgctctgtcactccagctggagtgcagtggcacgatctcggctcactgcaacctctgcctcctgggttcaaacaattctcctgtctcagtctcccgagtagctaggactacaggtgcatgccaacacgccaagctaatttttgtatttttagtagagatggggtttcaccatattggacaggctggtcttgaactcctgacctcaggtratccaccggcctcagcctcccaaagtgctgggattataggcatgagccactgtgcccggccagcagttcttatgtagatactgacttagaaaatgcttttttgtcttatcccaataattaaaaataatcaaaagaatgccaatatagcaggaagagcagcatactttcattgtcctacctcagagtgatgtcagctctcttgttctctaatattatattgtccagatcatttggatatcttacagaatattataccac

SEQ ID NO: 860471 - DNA, 549 bp, Homo sapiens
gagtattcaactatatttccaatagcaaactgacaagcccttggcactttttttttgtttttttttgttttagatggagtcttgctctgtcactccagctggagtgcagtggcacgatctcggctcactgcaacctctgcctcctgggttcaaacaattctcctgtctcagtctcccgagtagctaggactacaggtgcatgccaacacgccaagctaatttttgtatttttagtagagatggggtttcaccatattggacaggctggtcttgaactcctgacctcaggtgatccaccggcctcagcctcccaaagtgctgggattataggcatgagccactgtgcccggccagcagttcttatgtagatactgacttagaaaatgcttttttgtcttatcccaataaktaaaaataatcaaaagaatgccaatatagcaggaagagcagcatactttcattgtcctacctcagagtgatgtcagctctcttgttctctaatattatattgtccagatcatttggatatcttacagaatattataccac

SEQ ID NO: 860472 - DNA, 544 bp, Homo sapiens
cttcttaagtgtcttaaatcttgattcccatctaaaaaatatggaataaaaggggaaatgcaggcacattacagtgaagaaacctgacaaatgctacctctgccaagtgatcaagactaatatcaacagtaagtcctattgacagtgtatacccttgatatatgttgagaatagcactaaatctctgtgaacttcctcccaagaactcacaaccttagtctgatcctcagaaaaacatcagataactcccagtgagggtcactctagaaaacagtgggccaatactcctcaataatgctaaggccatcaaaaacaaagaaaatccaaggaactgttatgatctagaggaggctaggaagacatggtgactaaatgtrttgtgacaacttagttggttgggatcctggaacagaaaaaagacattaggtaaaagctaaagaagtttgaataaagtgtggactttgattaataataatgtattgcactggtttattaattgtgacaaatgtagcatattaatgtaacatgttaatcacaggaaaaa

SEQ ID NO: 860473 - DNA, 616 bp, Homo sapiens
aaaattcactcatggagaaatagataacccaattaaattattagttaataacttaaaaaaaaaagcaccaggcccaggtggtttcactggtagattcttccagacattaaaggacaacataataccaattctacacaacctctttcaaaaatacaaaaaaaaaaaaagaatctttgccactcaattttattaggtcagagttatcctaatatcaaaaccagactaaaacattacaacaaaagaaaactaaagaccaatatcactcatgaacatagaagcaaagatccttaacaaaatatttgaaataaaatcctgtaatatacaaacagkataatacctcacagcaaaatggggttcatcctaggaatacaaggctagttcaacatttataaatagatcaatgtaatttatcatctcaatggactgaaaaataaacactatattattatatcaataaacaaaagaaattattcgataagcttcaaaactcattcatgattaaaaaaaacttggagtgaagtgcaattttaccttacctacatacctaacaaagagtatatatggaaaaccaatagctactatcatacttaaggccaagagactgaatgctttatct

SEQ ID NO: 860474 - DNA, 650 bp, Homo sapiens
actaatttaggatcacttgatgagtttaataaaaggactttttcataaatatagccagtatatagagaaatgagacggtatagtccaagaccttggggctagaaagggggaggaagatttaccaccctaaatctgaaaagagatagagagagaacatgactcagatttggacggagctaagaaatgacagccacctgtcagaagctgaagctttagatggaaggcctcacccagccctcacaaacctcacaggaaagagcaaaggggacaaatatcctgacctccctttatgccctctcctccctccttctgacctcctgctggtgtttctgaatggcccaatccaatgcttaatctgagtctagaagacaatggcatattggagaggcaagaaaagatattcagcacactcacttactaagaggaagggatggaaggcaccttactcctgagggtcagagaaaagcaagaaagcaagaccaaaattatamtgcttgaagtgcctcagagcattgacagtcaaatcaaaactgtcaagcaagatgaaaccacatgtgatctgcttgtgctttctccgtagaaaagcctcccgaaaactgaggttttccttttgcttttgccaaatgactcttttaattgatattggatac

SEQ ID NO: 860475 - DNA, 681 bp, Homo sapiens
tttaaagaactttaagcaatatttttttggcaattatgtgttaaaccctgtgccagctatgttaagaaaaacatagaatgatgggttaccacaccccaatttttattaaaagtttacatctataaatttaaaaattcatgtacatgcwtagtagtagcattatgtgtgaaaaaaatccatattgttgttaacgtttgagatatttccaagaatttgtttaattttttttcttttttttttggtattttgaaatcacacagcctcctttgagctctttgaagggatttttgtcctctgggatgccctttaccagtggatccttgccagatcattcttcaacgtaatctcttcttcacaacatttggataccttaaggggaaggaaaaacggatgactcatttggtttaaaacagaatactccagatgccaagaatttatttactgcaataagttttcaggtcgtataatttcagtttgattctctctgctttccaccaatgcatacgtactttgtaggaaagaagaaagttgcacccttcccactccttctggatatatctccagacaaaggaaaaacagctggccatgctccagctaaagattccccgtagacactgcctccaacatcaaaggagacaagacccaggaatcagaacacaactggcaacggaagtcaagaat

SEQ ID NO: 860476 - DNA, 681 bp, Homo sapiens
tttaaagaactttaagcaatatttttttggcaattatgtgttaaaccctgtgccagctatgttaagaaaaacatagaatgatgggttaccacaccccaatttttattaaaagtttacatctataaatttaaaaattcatgtacatgcatagtagtagcattatgtgtgaaaaaaatccatattgttgttaacgtttgagatatttccaagaatttgtttaattttttttcttttttttttggtattttgaaatcacacagcctcctttgagctctttgaagggatttttgtcctctgggatgccctttacyagtggatccttgccagatcattcttcaacgtaatctcttcttcacaacatttggataccttaaggggaaggaaaaacggatgactcatttggtttaaaacagaatactccagatgccaagaatttatttactgcaataagttttcaggtcgtataatttcagtttgattctctctgctttccaccaatgcatacgtactttgtaggaaagaagaaagttgcacccttcccactccttctggatatatctccagacaaaggaaaaacagctggccatgctccagctaaagattccccgtagacactgcctccaacatcaaaggagacaagacccaggaatcagaacacaactggcaacggaagtcaagaat

SEQ ID NO: 860477 - DNA, 712 bp, Homo sapiens
cacagcctcctttgagctccttgaagggatttttgtcctctgggatgccctttaccagtggatcctcgccagatcgttcttcaacgtaatctcttacttcttcacaacatttggaaaccttaaggggaaggaaaaagggatgactcatttggtttaaaacagaatactccagatgccaggaatttatttattacaataaattttcaggttgtataatttcagtttgattctctckactttacaccaatgcatatttactttgtaggaaagaagaaagttgcacccttcccactccttctggatatatctccagacaaaggaaaaacagctggccacactccagctaaagattcccagcagacactgcctccaacatcaaaggagacaagacccagggttcacaacacagctggcaacagaagtcaagggtgtcaccagagttcatattgattaaatctttttcctcatcccaaaaatgtgactagtaaaggtggaggagaatgaataattattaaattcctggcttatcaccatccctaaattctcagaagtatacacatgtaatttttctttacactcatctacaatgattgagcatggtggtgcactaggtgagcttcaaggggtcagggacctttggctgatttgttcagtgtatcccagccatctagaacagaggctgtgttctttagtgctcagtgaataatttgct

SEQ ID NO: 860478 - DNA, 617 bp, Homo sapiens
taagattggtttaattaattgaacttaataaatgttgctaccatttgtttcaattgccaattccatttgtttcaactgccaatacaaaaaaagattggctgaacttgtctataaagggtaacatttacagatctttgacccatgtgtttgggaaaattgaaatgaatggtttttaaatgtctaaattacttcccaccccaaattgaaaaatctaaatagtaataaatattaatttattctacctcatatctgcttttacattcaaatattatatgtaagcaaaaatcagttggaaactcaattgcatacagtctttcaaagatttgtggaaacaaaaaagagaaaagacaaggctggatattgacaaagagcatacacatccatgttgtaatgttcctcattgacacataattttaattataaggaaggaacaattaacgacaatggactttgaactgttctcaagtaatcagtgarctatatcaatatcagagttttcaggttaagttttcaaatattgaatataagtttaaatatttctcttctctcttcatttttctctcttagattaagacctgtataggtttcaataccatttcaaaaaacttaataaggca

SEQ ID NO: 860479 - DNA, 595 bp, Homo sapiens
gcgcgcgtgcacgcttttctctctgtgtgcgtgtgtgtgtgtgtgttcctctgcttctcttactaaatcatttatttaacctttgaggaatttctgtgatattaacctttgaggaatttctgtgatatgactctggtagtagttgtttttaaaaatctccttaaaacaaaattgattaactataagtaacagaaaaaaaaaaatctcagacgacattttctacaaattttacacgcaattcagaatccagcatattactttatggggaaatactagagactttccaacaaaagacaagagagcccactatcagcacatctgcttaacatggcattgaagctattatccaatgcaattagagaaatccgttaaaggacaaatagtgaaaagcaagagataaaactagtattattaacagytgttatgatatgattgaacttttcaaaaatccaagagaatctatgaaaaaaattgtttttatctatgggaacttagtgaaggagaaggttataaaattagcagttagaaattattagtctttatgtatacaagcaatagcctgttagaaatacgagaaaagtctcatttataatag

SEQ ID NO: 860480 - DNA, 656 bp, Homo sapiens
ataagattgtttacattccatgaaagaacaccaggcccagcggggagggtcaggccagctcctggatgtcaagggttaccttgttctttttcaggagcttctaagagaaatcaactgaaggccactaacagacccaaattgccttctgaggggctagaagtggaaaactttccatttcagtctttttttttttttttttttttttgctgcttattgagaagttgctattatttatcagattaraaaatttgtttccttcattccaagaaatacatcaggatttggttcagagcacacaagcaacacatatagcctgtaacaaatgaattagaatgtgtgcagttccaagtgtcaagaggattttcatcactctgggaattgtcaaaggagctgatggcagtgcatgtttcagtcacaagccagacttttggtgtgtgcccaggaggcctgtggcatgtgacaagtctctggggcagccagttggacacacagctctctctgccatccagagctgttttgcaaagagtttcctttactgtctcataggtgaactgccgtaaaggtacattcactttgtgtcatgactatgcactacagaaattacaaccctactttcctcatttattgcacccttgtctaggctcacacatgtgtct

SEQ ID NO: 860481 - DNA, 656 bp, Homo sapiens
ataagattgtttacattccatgaaagaacaccaggcccagcggggagggtcaggccagctcctggatgtcaagggttaccttgttctttttcaggagcttctaagagaaatcaactgaaggccactaacagacccaaattgccttctgaggggctagaagtggaaaactttccatttcagtctttttttttttttttttttttttgctgcttattgagaagttgctattatttatcagattagaaaatttgtttccttcattccaagaaatacatcaggatttggttcagagcacacaagcaacacatatagcctgtaacaaatgaattagaaygtgtgcagttccaagtgtcaagaggattttcatcactctgggaattgtcaaaggagctgatggcagtgcatgtttcagtcacaagccagacttttggtgtgtgcccaggaggcctgtggcatgtgacaagtctctggggcagccagttggacacacagctctctctgccatccagagctgttttgcaaagagtttcctttactgtctcataggtgaactgccgtaaaggtacattcactttgtgtcatgactatgcactacagaaattacaaccctactttcctcatttattgcacccttgtctaggctcacacatgtgtct

SEQ ID NO: 860482 - DNA, 604 bp, Homo sapiens
aaaaagtccatattgggtacagtgtacactactcaggtgacagctgcactaaaatctcagacttcatcactagacaattcttctgtgtaaccaaaaaccacctgtaccccaaaagctatatatatatttgtgcgtatatataaattaatgtgtaatatgttgttgctgttaggtgacttgttgtgtaaagtcaactaggtcactggctgttagtgttttatcaatatctcgggcagggattttcaaatcacttaccatgtttgtaagtctgtctactgcacttgcaattctatcagtttttacattttgcattttcaagcttaatatttggatacataagcatttgcgattgttaggctttcgtgatgaattgacacctttatcattatgaaatgaccctctttatccctagtactatttttctttagaaatctactttttctgatattaatayagccattccagctcaaatttaattaatgttagcattaattaatggcatttctaatccagtcctatgcttataacctatttttgtttcatacttaaagtggatttcctctaggcaacatataaagagatctttttaaaaataaatccaatt

SEQ ID NO: 860483 - DNA, 635 bp, Homo sapiens
caaacccctagtgatgacatattgaactttaaggttttgtggaaaccaaattgagaaacattggaccagagtctctgtattccaaaagattatctttcatttgtataatctaaaactcccttaagtcttattcttctccaaaactcaaagatctacccttcttcaaagataaatttaataatcactggcagaattaaaacagattgttctcactctcagccatcaatattttggaaaacatcaagtgcggaagtaagcatcgtgactctgttacagtaacagctcaaatatccggaagaatgtggtaagtctataaacacgttaccactaaagtgctctcagagtccatggggaagtgagatcactagatagaggaaatcaggaagggtgtcataagtgaggtagcacttaccacagatctcagggaagggaagcacttctatggtcaacatgacaggaaaacatttagaatgcagagaatacaatttctaaawgcatggaggcagaaatttatggagcaggttagaacaatagtatgtggtcccatttggctaaagtataggtgacatgtagcggggaagggaaaggaatattgtattaataaagtgccatgaagcctgaatgacagccggaag

SEQ ID NO: 860484 - DNA, 623 bp, Homo sapiens
gtgaggtagcacttaccacagatctcagggaagggaagcacttctatggtcaacatgacaggaaaacatttagaatgcagagaatacaatttctaaaagcatggaggcagaaatttatggagcaggttagaacaatagtatgtggtcccatttggctaaagtataggtgacatgtagcggggaagggaaaggaatattgtattaataaagtgccatgaagcctgaatgacagccrgaaggcctacaatgctaagataaggagtttgattaagtcgtgagagctattggaggtttctgagcagtaagatgacataacctcatgaaaagtatgagatatgattaatataaacccatcccatattgtgcccctttgtaagctacctgtacggaagaatgtgaattgtttctggcaggatttttgttgaatatataccttttctttcattttctccagtgagcagcaacacacccttgtaagacagctggtagggttaggagtattgcctatgtcagtggaacgagttcctctgtctcagaacagatggaaagcatcacagaagtaggaacagaatgaggcccacagatggcagagtggtcaggatttgtcaaattctcattaatgt

SEQ ID NO: 860485 - DNA, 508 bp, Homo sapiens
cacaattttgtttttaaaaattccccccttttggtcaggttctcacttaggtgagagtatgatcaaaacttagagccttagtaccactctcagttaccatcattttgggtttctggtctcagcatgccattcataggttacagtgtccttgtggtcacatatttcwttcagcttttgtcattccacttgaagagagaccatttgacattctagagatggctgcatgcaagcatgtaaaacctttgagagaatacaatgcaccagggagactattattatgactatcaaaaggataataccaagagtttgaagtatgttccttatccagggtccccataaaccaaaccacctaaaatcaaatagatcaaagaatgagctagataagcagtctactcacttaactaaacagtctctttgttaatccactacaactgaaactctataatacctgatgttttccaccataggccatgactgccagcagctgcatagatacttttctctttgg

SEQ ID NO: 860486 - DNA, 652 bp, Homo sapiens
aactttcacaagataatttaaagtctgttgtgtaactatagactttacagtagaatctgctatagaacctattgtgagggatacatttttaatcattacctcttttattccaaatccttccaaatggaaaatagacctaataaatgatgcccttctmttatagaagagtgaaggcctcctgggaatgttctttttaacccatgagtgggttaataggagtgaaccaatcttctgtttctgactgattatgaggcaacgtatgtagcattaaagtttctcacctacactgggtcttcatcttttatctatcagagtataagattatccatgtataaggctggctgcaaaatccttcacaaataaaagtataccccataagtgcacaaaacagatccctttttcatttctattgttcatagaggcataaacaaaaaatattcaaggataagagtctcatgatagtagaagtcttaatctgtgatcttggaaaaagatgtttacatcaaagatgaatcttcgtccagggcaatcttggctcactgcaacctccacctcctgggttcaagtgattcttctgcctcagcctcccaagtagctgggactaaaggtgcatgccaccacacccagctaatttttttgtatttttggtaga

SEQ ID NO: 860487 - DNA, 605 bp, Homo sapiens
tcatccgccctcctttcccgctccaggggggtcgctgatgctcaaagcagggagcacacttcttaccggacttagtttttggtcttttgctaaatcttgacagttcatcacgactccctgctgatggcttccagagtggagggccaagtctgaccggaatgccgtctgaaatgggaatgaaggatcgaaattgtgggagaagtctctgcccgcgacccctgtcccctggccgtagtcctggtcacccgggaaaggacctcagctgattgctgagaggaagattcagatactgaaggtagcgctgcagctactcggctctgcctctagatgtcacccttggagtcaaaataacaactggctcccgagagctgctcacatcacaaggaaaggacccagaatgtgccttgcccctcagggatttaacaaaccccaamtggtgaattagacatatccgaaccccaaaataaaggacctggggtgcaaggggaagcaaataactgctcactctctctcctcccgtgtcaggtatgtgaggagagctgaggttagaggatggaatgatggtaccgcaatgaaagtaactgatagagattccaggactctct

SEQ ID NO: 860488 - DNA, 684 bp, Homo sapiens
tgagtctcattctgttgattgctttgtctttgtcagaggcttttttgtacttaaaaaaattatatgtctcataagtttttattgaatgctatacatcatgtgtagaacagtagagattgtggtaaatacatgttgaatactccttatctgaaatgattgggaccagaaatatttcacattttggattttttcagatttttgaatatttgcattatacttacgggctgagcatcccaaatctaaaaatcagaaatcagaaattatccaatgggcatgtcctcagagattcagattttaaatgctcaaatttggaatgctcaagtagatattaatgtgtgactgcatcaagtcaaagtagttctgagtgagctgcatctggggcttgttgttgctatggttactttcagcttcaraatttctgtagtgtttccttatccttagggtgggagctgggtgatgccagggtttgctgcctttctgtcaaaggcttaggactttgttttataaaggacaaaggtcaaggcagggcttcattcatttctcagtttccaacattttcccacattcattttccaaaggagaggtttccactccttttcttccagacttgcacatctgagggaggctttctcctgctctgccctcaatctttcttgtgagtatccagtgaaggttcgtggagat

SEQ ID NO: 860489 - DNA, 583 bp, Homo sapiens
gctcaagagtcgtgtagccagaagtcacaagatgtgtattctctccaactgctcctacaaataatatcactattgtaaaacctaggattggtctttgagatatttcacacttttgtattctgacaactagctgactccacccagatccatgactcatatcaaggaactgactcaactggtcctgggatcacactcagaaactgactcagtgcacaagaccgttttcaacactactatgatttcatccccaaccaatcagcagcacccattccctagccccctgcccatcaaattatcctgaaaaaccctagcgtctgagctcttgagaaggcagagaaacattcccatccttctacttggctggtrctgagattattaaactttctctactgcaagttctgctgttctcagcgtttggcttttctgggcagcaggcaagaagaacccatagagtaattactctatagtcatacaatacattgttactattattattttggtaaacagctatctctattagatcaattaagaatgaaagtaaaagatattatgttgttttcattcattcttctctgatgtgctc

SEQ ID NO: 860490 - DNA, 579 bp, Homo sapiens
atattgtggtgagacattgctcccagggtctctcagatttctgcatgtcttgtgagtaagccattgactgccctttctttaggactatgtcttccaggatatttatctaccaaacagttttggaagctagagataatgtttccctctggagaaaggggagcagagakgcatttctgtccagtatggtaaagataatgtataccatataagccaagagcaggcctgtttatgtttactgcccattgtaaaagtttcaggttccccaagctcaaggtttcgtctcttgtaacaaaatccactgcacatgcaactgtcatcatatttattttgttgccctgtgggaatcgaggtttggagaactgacacaaaaatgctgatactgggacatggaaccaaatgcatagatcatagaagacttcctagaggaaatgatctctattatgaataatgaaatatatgtaggagttactgaatgagagaataatgcgcaaaggttcaatgcttagaaagagcatgaaaacattgggatacctgtgggggtttcagcagagcgcaagcgttgggtacacagtagagaaa

SEQ ID NO: 860491 - DNA, 579 bp, Homo sapiens
atattgtggtgagacattgctcccagggtctctcagatttctgcatgtcttgtgagtaagccattgactgccctttctttaggactatgtcttccaggatatttatctaccaaacagttttggaagctagagataatgtttccctctggagaaaggggagcagagatgcatttctgtccagtatggtaaagataatgtataccatataagccaagagcaggcctgtttatgtttactgcccattgtaaaagtttcaggttccccaagctcaaggtttcgtctcttgtaacaaaatccactgcacatgcaactgtcatcatatttattttgttgccctgtgggaatygaggtttggagaactgacacaaaaatgctgatactgggacatggaaccaaatgcatagatcatagaagacttcctagaggaaatgatctctattatgaataatgaaatatatgtaggagttactgaatgagagaataatgcgcaaaggttcaatgcttagaaagagcatgaaaacattgggatacctgtgggggtttcagcagagcgcaagcgttgggtacacagtagagaaa

SEQ ID NO: 860492 - DNA, 584 bp, Homo sapiens
agttctacttaattaatgtattttaaagtttagcaagcaaagttatgtaatttctctgccttttttccccctaagagtaaggccttggaaaatacacacaaaaaaagttatatatttaagatcactataaaatatatgaagaaacattttgataagttcagtgatttaattggggatatgagtccaggcgtgatagagcgagaccctgtctcaagagcacgagaacccacttacttaccacccaaactcacctcacctatctaattttagcagtggctcatgcttgtaatcccagcactttgggaggccaagatgggtggatcamttgagcacaggggttcgaaacaagcctcgtcaacatagcaaaaccccgtctccactaaaaatacaaaaagttagtcccgcgcggtagcctaagcttgtaatcccagctacttgggaggctgaagcatgagaatcgccagaacctgggaggcagaggtcacagtgagctgagctggagtcattgccctccaacgtgggcaacagagcaagacactgtctcaaattaattaattaattaaaaattaaaaattaataaattt

SEQ ID NO: 860493 - DNA, 565 bp, Homo sapiens
cattattttctgctcttacttattagtacaatgttttttctttccggatagttcaaatagctgaatggttatcaggtgagaattttcattctgctggtgacgtttttatgaaggaatttttttttttaccagattaatattccctggcctctatcagtcacccaagctccctcacttagtctttcccatgaggaataaacactttatttgtggacttcattgcacaattcttaattatttcttcagacatttgttaatgtttgtgaaaggtgctaagaatagcaaaaaaaaaaaaaaaaaaaaaaaaggaattcttatcccaacttgccacaaataaatttacacttgaaggagaatgctaagcttaraaatctgcctttgaaagccgcccgtccacttaccaccatgaagtacaaaacacagtcagctgaacagagggtctcaaagacaaatgttattcttcctagttcagaacccgtggctccagtcatagatgttggtggtctatttgacagattaaaatggcaatatttatactatgttctaaatacaatttagaataaaa

SEQ ID NO: 860494 - DNA, 546 bp, Homo sapiens
aatggcaaagctgaaactcaaattctggtctgtctgattccaaaggtggggcctcagagaaaattcagttcaaaaaattattacaaccaatacaaaaagggcaaacaattccaaccaaattaatcatcatacatcacatcattcttcattcctatcctgaactgttaatgttcatgtgcattatacagcaataaccattttagcaataacctcatatttyttgtggatttttaatgtactactcctaaaacatgcattaaaaatattttagcaagtttctatcttccataagtctaatgactttgcctataaaaggaaaataataacaatagctatctcaatgagttgtgggaataaaggagatatatcatataaagcatttagcatattacctggcatgcagcacacaataaatattaaatacaattattaatagtttaggctggactcagtggctcacacctgtaatcccagcactttgggaggctgaggcaggcagactgcttgaggtcaggagtttgagaccagcttggacaacaaggtgaa

SEQ ID NO: 860495 - DNA, 630 bp, Homo sapiens
tggggatctaagaattggagtaaggtagaatagaacacaccatagttaagaacacaagtgctggagtcatgtagacctgagtttgattctgagactttcacttactagtcacatggctccaccttttctatgctcagttttcccatctgtaaaatatcagtaagaacccatttcattgggttaagctaaatgagatgatgtatgtaaagcacaagcactgatacatagtaggtactcaagtagatgcatatgcagcaataatcatacatataccttatgatttattccttatgtgattagaaggaacaattgggaaagtatccagtagactaaagatattattaagtaaaaaataaaagtgcatatataccaaatgtgtcaatacccagcagatacctatagtcttagttacttcctagcaaaattccccaaattcccaaaattcaagaaagtaaatacaacaattagcaagggaagagaaatatctgatscaacaatgccacacgatgtgggccaatttcctggacatgcagatgtacgctgttgaccttaaacttcttttctgggttccaaatttcaacctccctcatcagatctctaatcagaagtgggcagagaggcctcatatct

SEQ ID NO: 860496 - DNA, 663 bp, Homo sapiens
gtctcacaagaaaagaatcattgaatgaagaagtcactgctttcatacagttctactccccatttggaaactaaatcttggatttgcagatttttatcccacagtataatgaatatgatgatcttaaatctactgttaacagtttaaaaccattatttgggtcataaagaggaagcagtcactgagaattcagtctatgtattttttcttttttcttgtttttgaagagacctttttcactgacaggatctcattctgtcacccaggctgcagtgcagtgacatgatcctagctcactgaagcctcgaactcctcggctcaagtcatcctgcgacctcagcacttgaggcacatgccatcctgcccagytaaatttttttagagatggggtcttgctacattgcccaggctggtctcaaactcctgactggcctcaaatgatcctcctactttggcctcccaaggtgcagagatttcaggcccaacccactgcaccaggcccagtctatatttcttaataatgaattatttgccttcccctgtgaaatctctgacatagcaagaataccaaaccaatgggtagtagtagtgtcttcatctgcccagataacatctattattcaatcaccagatacaattctcctgaaatggaaccaagggacc

SEQ ID NO: 860497 - DNA, 615 bp, Homo sapiens
cattattttttaaatgaatgctattcaatgagctgtttagggctagcttttgatcatttttcatgttaactattatggaaaatttaaagtacaactaaggctgaaggtcagtgcaaagaagagaaaatatttctcagattttctgargcttgtcaagtctcagctgtcatctggttgggttttggaactcatttatccttgcagtaatattaaagcacatactacatgtgaggccctataccttctagcctacattaaagctagaaaggtttcagctctgccttcatggaagttacaatctgttagagaatgcacatgagtaaatgaaattatcaatacaacaccactaaatctatccagaagcaacttataccacaaaagcaactacctgaggtgcaatctagaggcagaaagagaatttgaatctactgcagtagatcaatgcaatacatgcacacacacatgcacacatatatacaacatacgctgagcctacctccttagacattatcttatgttgcagaccagagcattccttcttgtctggatcactgctttgtgtggtaacaagaaaaatgaattccttctcaaacgatccatctatagaaatcctca

SEQ ID NO: 860498 - DNA, 615 bp, Homo sapiens
cattattttttaaatgaatgctattcaatgagctgtttagggctagcttttgatcatttttcatgttaactattatggaaaatttaaagtacaactaaggctgaaggtcagtgcaaagaagagaaaatatttctcagattttctgaggcttgtcaagtctcakctgtcatctggttgggttttggaactcatttatccttgcagtaatattaaagcacatactacatgtgaggccctataccttctagcctacattaaagctagaaaggtttcagctctgccttcatggaagttacaatctgttagagaatgcacatgagtaaatgaaattatcaatacaacaccactaaatctatccagaagcaacttataccacaaaagcaactacctgaggtgcaatctagaggcagaaagagaatttgaatctactgcagtagatcaatgcaatacatgcacacacacatgcacacatatatacaacatacgctgagcctacctccttagacattatcttatgttgcagaccagagcattccttcttgtctggatcactgctttgtgtggtaacaagaaaaatgaattccttctcaaacgatccatctatagaaatcctca

SEQ ID NO: 860499 - DNA, 615 bp, Homo sapiens
cattattttttaaatgaatgctattcaatgagctgtttagggctagcttttgatcatttttcatgttaactattatggaaaatttaaagtacaactaaggctgaaggtcagtgcaaagaagagaaaatatttctcagattttctgaggcttgtcaagtctcagctgtcatctggttgggttttggaactcatttatccttgcagtaatattaaagcacatactacatgtgargccctataccttctagcctacattaaagctagaaaggtttcagctctgccttcatggaagttacaatctgttagagaatgcacatgagtaaatgaaattatcaatacaacaccactaaatctatccagaagcaacttataccacaaaagcaactacctgaggtgcaatctagaggcagaaagagaatttgaatctactgcagtagatcaatgcaatacatgcacacacacatgcacacatatatacaacatacgctgagcctacctccttagacattatcttatgttgcagaccagagcattccttcttgtctggatcactgctttgtgtggtaacaagaaaaatgaattccttctcaaacgatccatctatagaaatcctca

SEQ ID NO: 860500 - DNA, 512 bp, Homo sapiens
agtccaggaccagacatattagcaactgaattggtatctaccagaggtacaaagaagagctggtaccattcctactgacactattccaaaaaattgaaaaggttggattcctctctaagtcgttaaatgaggccagcatcttcctaataccaaaacctagcagagatacaacaacaaaaaacttcaggccaatatccttgatgaacatcaatggaaaaacgctcaacaaaatactagcaaactgaatccagcagcacacacaaaagtttatccaggaygatcaagtagacttcatccccgagatgcaagggtggttcaacatatacaagtcaacaaatgtgattcatcatgtacacagaactaaagataaaaatcatatgattatctcaatggatgcagaaaaggcctttgataaaattcaacatccttcatgttaaaaactctcaataaactaggtattgaaggaacatgcctcaaaataataagagccatagactacaaacccacacagc

SEQ ID NO: 860501 - DNA, 512 bp, Homo sapiens
agtccaggaccagacatattagcaactgaattggtatctaccagaggtacaaagaagagctggtaccattcctactgacactattccaaaaaattgaaaaggttggattcctctctaagtcgttaaatgaggccagcatcttcctaataccaaaacctagcagagatacaacaacaaaaaacttcaggccaatatccttgatgaacatcaatggaaaaacgctcaacaaaatactagcaaactgaatccagcagcacacacaaaagtttatccaggatratcaagtagacttcatccccgagatgcaagggtggttcaacatatacaagtcaacaaatgtgattcatcatgtacacagaactaaagataaaaatcatatgattatctcaatggatgcagaaaaggcctttgataaaattcaacatccttcatgttaaaaactctcaataaactaggtattgaaggaacatgcctcaaaataataagagccatagactacaaacccacacagc

SEQ ID NO: 860502 - DNA, 512 bp, Homo sapiens
agtccaggaccagacatattagcaactgaattggtatctaccagaggtacaaagaagagctggtaccattcctactgacactattccaaaaaattgaaaaggttggattcctctctaagtcgttaaatgaggccagcatcttcctaataccaaaacctagcagagatacaacaacaaaaaacttcaggccaatatccttgatgaacatcaatggaaaaacgctcaacaaaatactagcaaactgaatccagcagcacacacaaaagtttatccaggatgatcaagtagacttcatccccgagatgcaaggktggttcaacatatacaagtcaacaaatgtgattcatcatgtacacagaactaaagataaaaatcatatgattatctcaatggatgcagaaaaggcctttgataaaattcaacatccttcatgttaaaaactctcaataaactaggtattgaaggaacatgcctcaaaataataagagccatagactacaaacccacacagc

SEQ ID NO: 860503 - DNA, 687 bp, Homo sapiens
taagatgttaacattagagaaactggatgaaaggtacatgggaactttctgttttatccttaaaactgttctgtaaattttaaattgttccaaaatgtaaagcttattttaaaaaattttcaggaaaattcacattttaaagagtaactaaaaacagacacagacacacagacacatagacacacagatgcatagacacacagctgcatagacacatagacacacagacgcatagacacctacatcccaatgtggtaacatgattttgaagtatcccttgttttcacacttaaatctcccacaaacactggagtctgaccatattcstctgagtaataccacccagcacatcaatggatttttctgacctcttgcttctttatggattatgtagaacttttcacagctggctatagtggtggtgggcttgcaagcagctctccagcggccctcacttccatttgcagtctgcatgcctgtgtgcaatccatcctcacatttaatcagagttggctctgtgttatcaattaaattctatggacatgtggctgtatctttaaaagcatggcagcttccatcttgttttcttaaattgctttctctgtggtaaactagacaccgttctgtaagtgtatttaaacaccctcgtggagaggcccacacagagggagagaaatgcaggtccct

SEQ ID NO: 860504 - DNA, 676 bp, Homo sapiens
gtttccacaacttgatttaaataaataaataaataaaaataaaaatacaaaaaaatcaagtcacataatacttgatagtaaaaaactggacattttccctgagattggaaacaaagcaatgtgctctatcactactgctatccaataagagaagtcttgctagtgcaacaagacacaraaaagaaataaaaggtttatagattgcaaagggagaaatacggctgtctttattcaaagatgacgtgattatctacagaggaaatctcaaagaatttatatcaaagaagctaaaaaaatttaacaatccctggaactaataaataaatatagcaaggtcacaaaaaacaaatctaatataaaaaatccaaatgattttgagcaaggaataattataattttgttttttttaaaagcaatgccttttacaagtttgcaaaaaagttagggacctttttttaaaaaaaatttgaatttacagaaaatatgtgaagctagtacacagagtttccataggcacccaatctctcctattattaatatcttatatgggtaaagtacaattgtcaaaattacttaactaatattgatacatttttattaactaagtatgtatattatttggatttccttggtttttacctactattctttttctgacccatgatcccattcagaa

SEQ ID NO: 860505 - DNA, 676 bp, Homo sapiens
gtttccacaacttgatttaaataaataaataaataaaaataaaaatacaaaaaaatcaagtcacataatacttgatagtaaaaaactggacattttccctgagattggaaacaaagcaatgtgctctatcactactgctatccaataagagaagtcttgctagtgcaacaagacacaaaaaagaaataaaaggtttatagattgcaaagggagaaatacggctgtctttattcaaagatgacgtgattatctacagaggaaatctcaaagaatttatatcaaagaagctaaaaaaatttaacaatccctggaactaataaataaatatagcaaggtcacaaaaaacaaatctaatataaaaaatccaaatgattttgagcaaggaataattataattttgttttttttaaaagcaatgccttttacaagtttgcaaaaaagttagkgacctttttttaaaaaaaatttgaatttacagaaaatatgtgaagctagtacacagagtttccataggcacccaatctctcctattattaatatcttatatgggtaaagtacaattgtcaaaattacttaactaatattgatacatttttattaactaagtatgtatattatttggatttccttggtttttacctactattctttttctgacccatgatcccattcagaa

SEQ ID NO: 860506 - DNA, 676 bp, Homo sapiens
gtttccacaacttgatttaaataaataaataaataaaaataaaaatacaaaaaaatcaagtcacataatacttgatagtaaaaaactggacattttccctgagattggaaacaaagcaatgtgctctatcactactgctatccaataagagaagtcttgctagtgcaacaagacacaaaaaagaaataaaaggtttatagattgcaaagggagaaatacggctgtctttattcaaagatgacgtgattatctacagaggaaatctcaaagaatttatatcaaagaagctaaaaaaatttaacaatccctggaactaataaataaatatagcaaggtcacaaaaaacaaatctaatataaaaaatccaaatgattttgagcaaggaataattataattttgttttttttaaaagcaatgccttttacaagtttgcaaaaaagttagggacctttttttaaaaaaaatttgaatttacagaaaatatgtgaagctagtacacakagtttccataggcacccaatctctcctattattaatatcttatatgggtaaagtacaattgtcaaaattacttaactaatattgatacatttttattaactaagtatgtatattatttggatttccttggtttttacctactattctttttctgacccatgatcccattcagaa

SEQ ID NO: 860507 - DNA, 676 bp, Homo sapiens
gtttccacaacttgatttaaataaataaataaataaaaataaaaatacaaaaaaatcaagtcacataatacttgatagtaaaaaactggacattttccctgagattggaaacaaagcaatgtgctctatcactactgctatccaataagagaagtcttgctagtgcaacaagacacaaaaaagaaataaaaggtttatagattgcaaagggagaaatacggctgtctttattcaaagatgacgtgattatctacagaggaaatctcaaagaatttatatcaaagaagctaaaaaaatttaacaatccctggaactaataaataaatatagcaaggtcacaaaaaacaaatctaatataaaaaatccaaatgattttgagcaaggaataattataattttgttttttttaaaagcaatgccttttacaagtttgcaaaaaagttagggacctttttttaaaaaaaatttgaatttacagaaaatatgtgaagctagtacacagagtttccatakgcacccaatctctcctattattaatatcttatatgggtaaagtacaattgtcaaaattacttaactaatattgatacatttttattaactaagtatgtatattatttggatttccttggtttttacctactattctttttctgacccatgatcccattcagaa

SEQ ID NO: 860508 - DNA, 642 bp, Homo sapiens
taaaattcagatgaagcctgctgtactggagcataggaatgtgcctagaacatctgaaattcagatgaaacctgctaatctcacagtgctacattggagcagaggaatgtgatcccagagatggaggccagtggctgcagttacacatgccttaatgargaaattggagacggaacagtttccaaggtctatctttgtattctctaatcatctctgtgcctcatttctgctgccctgtgtcctcctggatcgtcctctttagaacattcttcctcagcttaattccaaagagtattccacaaaaaccaccttttctgtctagttttacaaaaccttttcaatttgaatccaagggcttggatactatgtgctttttcaatgtgattccaagagcgtggatactatatgattccaagactatggatactgtgttaatttgtaacagatgaataaagatggataaaagacagtataacgttactacatgaacaagttcacaatactggatgaggaagtagcctctctgctatatttggggttcacaaatcttggggaagaccctaaaatgaataaggaacttgctgggagcaaatcctgtaaacctttgcttccctaacctctgtcattaaaatgtgccttctg

SEQ ID NO: 860509 - DNA, 642 bp, Homo sapiens
taaaattcagatgaagcctgctgtactggagcataggaatgtgcctagaacatctgaaattcagatgaaacctgctaatctcacagtgctacattggagcagaggaatgtgatcccagagatggaggccagtggctgcagttacacatgccttaatgaggaaattggagacggaacagtttccaaggtctatctttgtattctctaatcatctctgtgcctcatttctgctgccctgtgtcctcctggatcgtcctctttagaacattcttcctcagcttaattccaaagagtattccacaaaaaccaccttttctgtctagttttacaaaaccttttcaatttgaatccaagggcttggatactatgtgctttttcaatgtgattccaagagcgtggatactatatgattccaagactatggatactgtgttaatttrtaacagatgaataaagatggataaaagacagtataacgttactacatgaacaagttcacaatactggatgaggaagtagcctctctgctatatttggggttcacaaatcttggggaagaccctaaaatgaataaggaacttgctgggagcaaatcctgtaaacctttgcttccctaacctctgtcattaaaatgtgccttctg

SEQ ID NO: 860510 - DNA, 642 bp, Homo sapiens
taaaattcagatgaagcctgctgtactggagcataggaatgtgcctagaacatctgaaattcagatgaaacctgctaatctcacagtgctacattggagcagaggaatgtgatcccagagatggaggccagtggctgcagttacacatgccttaatgaggaaattggagacggaacagtttccaaggtctatctttgtattctctaatcatctctgtgcctcatttctgctgccctgtgtcctcctggatcgtcctctttagaacattcttcctcagcttaattccaaagagtattccacaaaaaccaccttttctgtctagttttacaaaaccttttcaatttgaatccaagggcttggatactatgtgctttttcaatgtgattccaagagcgtggatactatatgattccaagactatggatactgtgttaatttgtaacagatgaataaagatggataaaagacagtataacgttactacatgaacaagttcacaayactggatgaggaagtagcctctctgctatatttggggttcacaaatcttggggaagaccctaaaatgaataaggaacttgctgggagcaaatcctgtaaacctttgcttccctaacctctgtcattaaaatgtgccttctg

SEQ ID NO: 860511 - DNA, 645 bp, Homo sapiens
ctatctgtgataccagtagtgatatcccctcttcatttcagatttctgtaagatggatgttctctttttatttatttatcaggcttgcaagaagtttatccatttcattgatcattttgaaagaccactttgagtctattaatcgttctctgttttcttattttaatttttatcattttttgctgtatattgttattttcttctttcttcctgattttggtttattttgctcttgctcttcttttctagtaagttaaagtgttgacttcagaccgttcttcatttctaagtgctatgactttccttttcagcacagcttattttcattctgcatactgtgatatgttgcactttcattgtcattcagttcaatayatttgtatatttcctttgagacttcctctttgatccatgtgttattagtcatatgctaattaatttccaagtatttgatggaatacttgaaaaaatgggaagattatgaataactggaacctcgttttttgttattgagttctcatttatttacattatagtcagagagtatacttttattatttataaaattttaaacatattgaagtttgttttatgaactgataatgtctatattggtgaatatccctggggcacttaaaaagaaag

SEQ ID NO: 860512 - DNA, 645 bp, Homo sapiens
ctatctgtgataccagtagtgatatcccctcttcatttcagatttctgtaagatggatgttctctttttatttatttatcaggcttgcaagaagtttatccatttcattgatcattttgaaagaccactttgagtctattaatcgttctctgttttcttattttaatttttatcattttttgctgtatattgttattttcttctttcttcctgattttggtttattttgctcttgctcttcttttctagtaagttaaagtgttgacttcagaccgttcttcatttctaagtgctatgactttccttttcagcacagcttattttcattctgcatactgtgatatgttgcactttcattgtcattcagttcaatacatttgtatatttcctttgagacttcctctttgatccatgtgttattagwcatatgctaattaatttccaagtatttgatggaatacttgaaaaaatgggaagattatgaataactggaacctcgttttttgttattgagttctcatttatttacattatagtcagagagtatacttttattatttataaaattttaaacatattgaagtttgttttatgaactgataatgtctatattggtgaatatccctggggcacttaaaaagaaag

SEQ ID NO: 860513 - DNA, 611 bp, Homo sapiens
gaaggaaaaatagaagcaccatttcactcagcaatcctattacaggggatatgctcaaagaaaaaaaacagttctaccgaaaagaccagtggactgatacgactgatatgtttattgcagcactattcacaatagcaaagagaaggaatcaagctaggtgctcatcaatggtagattggataaagacaatgtggcacatatacaccatgaaatactgcacagccattagaaagaatgaaatcatgcccttacccttttcagcaacatggatacatctggaggccattatcctaagtgaattaacacagaaaccgccaacaaaatattgcatgttccagtgggagctaaaccttgagtatacagggacacaaagatggaaamaatagacactggggacttcaaaagaaggaagaaggggaaggaagtgggggagggctgaaaaacttcttagtgagtactgtgttcactatctgggtgacgtgatcaacagaagcctaactctcagcatcatgcaatatatgcctataataaaactgcaaacatagcccctaatttattatttgggtgtgtgtccctgcccaagtcacaagtcgaattgtaatccctagtgt

SEQ ID NO: 860514 - DNA, 611 bp, Homo sapiens
gaaggaaaaatagaagcaccatttcactcagcaatcctattacaggggatatgctcaaagaaaaaaaacagttctaccgaaaagaccagtggactgatacgactgatatgtttattgcagcactattcacaatagcaaagagaaggaatcaagctaggtgctcatcaatggtagattggataaagacaatgtggcacatatacaccatgaaatactgcacagccattagaaagaatgaaatcatgcccttacccttttcagcaacatggatacatctggaggccattatcctaagtgaattaacacagaaaccgccaacaaaatattgcatgttccagtgggagctaaaccttgagtatacagggacacaaagatggaaaaartagacactggggacttcaaaagaaggaagaaggggaaggaagtgggggagggctgaaaaacttcttagtgagtactgtgttcactatctgggtgacgtgatcaacagaagcctaactctcagcatcatgcaatatatgcctataataaaactgcaaacatagcccctaatttattatttgggtgtgtgtccctgcccaagtcacaagtcgaattgtaatccctagtgt

SEQ ID NO: 860515 - DNA, 525 bp, Homo sapiens
cacaaatcagaatagctataaagaaaaattcaaaaaacaacagatattggcaatgatgcagagaaaagggaatgcttacattgttggtagaaatgtacattattacagccactataaaaaaccctcaaaggactaaaagtaggactaccatttgatccagcattctcaccccaaggaaaataaatcgttatatcaaaaagacacttgcatttgtatgcttatcatggcrctattcacgatagtaaagccatggaatcaacttgtgcccattaatggttgattggataaaaaatataattttatatacatataatatataacatatatatatatagtgtgtgtgtgtttatgatggaacactacacaaccataaaaagaatgaaatcacatcttttgcagcaagatggatggagctgaggccattattctaagtgaaataactgggaagcagaaaatcaaagaccacttgttctcacatataagtttaagctaaacaatgggtacacagggacatacagagaagaa

SEQ ID NO: 860516 - DNA, 575 bp, Homo sapiens
ctcagagatgttctctttgatcacattcctaaaggcgggttatcagctcagggaggtcaactctggggcactgtctgatttcatgcacagcctagaaaagcttcagccactgcccatggtgtattctcttaggatccaaatcactgaaacttgggcaaaagcaagccagtaatgagcgcgaacaaggactcagagtcaaacatcttgtcaaagcgccacacttgtgagcctcactgtatttataatgacaaatcacactggtatgacagctagacaactgatcaatgtcctgttatttctgcagtcaggggaaaaatcacttaattatatgtgtaatgagattaagacattcaggaggtgaggkttatgtgcatttgaactataaatcaactttacttcttatgctagaaatgaagtaagtctgatcttcattgacaaatgtagattttactgttgctttgactttgaagattacagcgaaattcatcagtttcaaagggaaaggaaaacttttgtctgtctttttaatctctcaataaatgcagcatttttatttttccttttacatataaaga

SEQ ID NO: 860517 - DNA, 630 bp, Homo sapiens
tttgtacacttagcatgtaccaagccttgagtgaaaatacaggatgagtatgacctgtgatggcacatattaggtagaaggggagcacctagtctagcaggaaggttaaggcaaggccttaactaaggagaagtaatgtctgcctcaagtcttgaaagaacaaatgctagtcagrtaggaagcagaagcagaagagcacacacatttataaaattactagaattagacgtttaaaaatactttggtaacatttggagcaacagtttctttatccatggcaagagagtattatgttttttaccactgttcagctatttttcacattcgttaggaaagataaataaaaacagcataaagattatgaactccctcatgttgaagataaaatattcagtgtagtatatatatttttgataaatatttttattaataaataaataaattctttattaataaataaaattttgaaagaatatatatttaaaatatatattttgaaatacatacctttttttgcacaaagctcgctgtgtagcattgatgattaaataagctgcctatctgtgtttgagaatatcttttcttggagacagaggaagagactaactgaatcttccataaaattccaaa

SEQ ID NO: 860518 - DNA, 601 bp, Homo sapiens
ggcgatgtcttgttgggtcccagcttttacattttgggggttctttatagatttgtaactctttggtaatatgcttaaccacacctcagattaaagggtaactttctagatttgatccagataaattctcatgtcactattaggattttgtgggaaataggtgyctattgtccaaacatgaaagttatggttctgagaatacaacttcaacttagagagacacataaatctcaacactgatgttggaatttgggggaagaaaaccagatttatgtaatgttatgtataattttcaaaattcagttgtaaagttgtaaaatcaaaactaattttaacctcaacctctatggacatctagtttggatagagagatgtcagtgttggagctactcaaattggtttagggatgctgccccatacagccacagaaatggaagccctgggacatggctgccctcttgtggcttgcaattaagcaagctttggaaccactcacagtggcttcgctctgccagaaaccaaagaattttaggcaatattgtgcctggaataggagcagagacttaaatttctgggtagttcatggaatccacatgttgaa

SEQ ID NO: 860519 - DNA, 653 bp, Homo sapiens
tgattaaaaaatagggaactttcagcactgaaactcaataaatgaattgataacaattcttttttgctcttatgttggaagcagtgaaatcaaattagatttcatagaagctttcagtataatatgatacagtctatctaactgaactgtaattcactaattcaaaaaaagtcttaatcctattttagatgtggtaagcagggaggccagaaactaatgtgtcaatcaagtaataagaaatataacgattggtatatttcctgaagaaaataacagcaactagttcttcttaaatgttctcttacactgaattttgactttggctgttgtcaacttttacctgttaacagaaacacctggraagcagcaaatgaggttgtgcttctcttcctactcagaaggagtttcccatagtatagagttagggagtagccccattagaatctcctgaatttttctagacaaaggtaaattatcaattcaggagctaagagttcaaagagctctgacaacaggtctgaggccagagatgtgtcatggaagacggtgtgtgtcatttgcttggtttctgaatgtgccactctgcaacactgccctcctgggcttttataatatatctcatagaacaaatgcctgatgccaacacagtgtca

SEQ ID NO: 860520 - DNA, 553 bp, Homo sapiens
aagaagtatgaagcactgtcatggataatatatttccagtaataacctttttttaaaaaaaaaaaaagtttcaaagatgacttcagaatttttttgtatatttttgtttttacatgtgtgtgtcttttagaaaaaccggaaataaaacaaatgctaaaagataaagaaaaagaatatgsaaacaaatcattttctcaaaacttttcagactaagcttcaaggtcctgcgatatgacatatcaatgataaatgtccttcctccatctcataaactaaaacatgaagcatgcttagaaaagtaatcaagataatttccatccgtattctaagcatttagagcagttgttctcaatcctggctgcacaatataatcatctggaaaacttttaaaaaatttctgagccgcacctctgatcaattaaaatcagatactgggtgagactgggcattcctactgtttttaaagctcccttagggattctaacgttcgctggggttgagagcattgatttagagtaaaccctattatacagtgcagtaagaaatatatatt

SEQ ID NO: 860521 - DNA, 591 bp, Homo sapiens
aaaaaaaaaaaaaaaaaagaaagagaaaggggtggacttgtgatggttaatactgaatgtcaacttgattggattaaagtatgcaaagtattgacctagggtgtgtctctgaggtcgttgccaaaggagattaacatttgagtcagtgggctggggaaggcagacccacccttcatcctgtgggcacaatctgatcagctgccagcgaatttaaagctggcagaaatatgaaaagattagactggmctagcctcccagcctacatctttctctcatgctggatgcttcatgccctgaaacatcagactctaagtatttccgttttaagactcagactgtctctccttgctcttcaagcttgcagatagcctattgtggaaacttgcgattgtgtaagttaatacatatatacatatatatatatatgtatgggagtttatgtatatatataggggatatatatatagatagatataggatatatatataaaagcataggatatatatatagatagatactaataggatatatatatcctattagttctgtccctccagggaatcctgactaatacactcacctatgagatt

SEQ ID NO: 860522 - DNA, 622 bp, Homo sapiens
tgagaatttttatttctccttatctttgttgatgaaaagagttgaactatgtaaaatatttgaagggatttattctgagtcaaatgtgaggactatgacctgtaacacagcacccaggatatcctgggaacatgtgcccaaggtgatcaggctacaggcaggttttatacatttaagagagtcataagacatcaaataaaatatgtggggcatgcattggttcagaaaggtggaacaactcaaaaggatagggagtttayaggtcataggttcatacatggattcaaagattttctaattggcagttatttgaaagttattatctaaaggcctggaatcaatagaaatgagtgtctgggtcaagataagggattgtgcagaccagggttcttattatgtacatgaagccttatcagtggcagccattagagacaacagatggcaaatatttcctattcttcctctaaaaggggctagactcccagttaatctcttcagaattgggagggcctagaagcgggagagatctagttatgttagcagagattctttacagaaccaatttttcccaacaagaacagttttgcaggacattttaaaagaagacaaaaaacgtatttgg

SEQ ID NO: 860523 - DNA, 569 bp, Homo sapiens
tggttaaatttgtataatttgttatgcagcaacaggaaactaatacagtctctgttgattgtctttctcttgagaaaatcacagtttcctggttctttttatgtcaaataattttagattatattctggatattgtgaatgttatgttgtggaaactctagattctatcatattcctttgaatagtgttgatatttctgttttggtaggcaattaacatgatttgaattgaaactgcaaacactgcctcacctgtggaatcccaaatcttagttcagttttttktttgtttgtttgtttgttttttgtcctgatgcatggttcagaaacgtgggcagaattaatacccctccaaggtgtatcacttctaagaggaattggtctttcacttctctggctgttttcttttcaggattatccttcgttttctcatggcagtgaccacttgagctctgcatttttattttttagtccagaaagaccgtgagctttttcttggagtttcaactttccaccttcagtccaaagtttgtaaatcccaggaactcataccatgcccttttctttttc

SEQ ID NO: 860524 - DNA, 588 bp, Homo sapiens
ccttggctatctatgccagccgaaatcaagattgggttgagtacacttctttgctctgtgtgtgtgtgtgtgtgtgtgtgtgtgtgtgcttaaaatatattttaatatatcaaatatatttaatatatgtaaatatgtaatatataaaatatttaatattttattatatataataatctatatttaatatatttattttttttggtaaggataatataggcatgattggatgtmtatttaccagtcttgattcctgccatatctcagcacctgaacaatgtttggtttccatttgttggatgaaaatggataaggttttgctttgagcatcatctgggtacctggtccaagctccaccccccattctgcctcagtaggtctgaggtgggactcaggaatctgatgtcttcctctcctgagcttcctttgatgttcatttgagctgagtctgacagttcttcagtgcagtggggaaggggtacagtaatatagagtgactttttttttatcctttctccatcctcccttcgtgccttaaggaattgctttgataattataaagatatagcactaaagctctttctaaat

SEQ ID NO: 860525 - DNA, 588 bp, Homo sapiens
ccttggctatctatgccagccgaaatcaagattgggttgagtacacttctttgctctgtgtgtgtgtgtgtgtgtgtgtgtgtgtgtgcttaaaatatattttaatatatcaaatatatttaatatatgtaaatatgtaatatataaaatatttaatattttattatatataataatctatatttaatatatttattttttttggtaaggataatataggcatgattggatgtctatttaccagycttgattcctgccatatctcagcacctgaacaatgtttggtttccatttgttggatgaaaatggataaggttttgctttgagcatcatctgggtacctggtccaagctccaccccccattctgcctcagtaggtctgaggtgggactcaggaatctgatgtcttcctctcctgagcttcctttgatgttcatttgagctgagtctgacagttcttcagtgcagtggggaaggggtacagtaatatagagtgactttttttttatcctttctccatcctcccttcgtgccttaaggaattgctttgataattataaagatatagcactaaagctctttctaaat

SEQ ID NO: 860526 - DNA, 566 bp, Homo sapiens
atgaaaatctgtatttttaaccatcacttcaggggtttctaatgatcggctagattggaaaacacttcattaaactgtaattcatcatccccaagttatatggatgtggaaagtagctttgcctgacccttaattctaaacccttttcatggcttcatggtgcctccttagaaatgacaggtccaattaagacacagacaagatgggtttaaaatttgcctctgctttgcatatcagttccttagagctttgagagtcagtgtggtggagaggacatgaccgctgtaactggagtccaaggactgagttacagctctgtaatttattagctctgtgaccttagacaagttastaaagctctcctggtcacagttttttcttctgtaaaatggtgattaaaaaaatctcacttgctccgactgcttccagatccattgtgtggaccaaatgagataatcgacgggaaaacgttttgcaaatggtaaagccgcctgtgaggtcttaatattatccattcctgatggagttgataccccaattatctgtgtaaccagtttcttttttgt

SEQ ID NO: 860527 - DNA, 580 bp, Homo sapiens
ctttttaaatttgaaatttgtgatcgtttggattcttattggactaaatgaatgggggcatgcgacactgaaggagaatgaagctaccaaaataatactgtcctaagatgttagaggaaagtgttttatatgcagtgttctaataactgttccctcttacccacttaagaagcctctttgyacttcattggtcactagtttagccacttgaaaacagcataaaatctctttttaaaaaataatgctggcttaatgaaattgggtagataataaaataagaatactactttttatttaattgggattctgttaattaatgccaattaattaacacaagaaaaatggagggatattagccttattccaatacactacgttaaaaaattaaaatacttcaagtaaattaccaatatctcctccagaaaatccattcggaaaatctatttttcaatgtcatgattttagtcttaacccccagtctgttgaaggggaatttgactttaataaaatgggttttctttagaagactttctaaattcagcccgaatttagttcaggctagtttttttcattgtcagtc

SEQ ID NO: 860528 - DNA, 608 bp, Homo sapiens
aaaaggcaggaggagacttaggggaagtactctcccagaaagaagacaacaaggtcaaatgcctccgcattaaaggagacctagccctagagcagtccctttgatttggtgacctttgaaagcaccttttgtaaaagcattgagggtaaaagccaaattgcatgctaaaattaataaaaagattaaatggaagtatagtctgatctttagagtattatctctttctattacaaattctgttatttcaaactcaaaagctaatttttcatactgcacaagttcaggaaacccagttccgaggatctgttctgtaggtgagaacctgaaaatctaactgtgggtatgtcctaaactcggccagctagtgctgattcccagatgagcagggttctgaagttattattmtatcaggtgaaagtagtaaccttgtaaatgtgggtgtttgatcctgagaagatggggtatagtttcctaaccttatacacatagggaatctgatatgccatgccccttggggcccattacctatgtgaccctctatgatttgatggcaatttattggacctctggtgggttgaataaaagaacttaggaccattaacaaaggg

SEQ ID NO: 860529 - DNA, 532 bp, Homo sapiens
gagcaaaactctgtctcaaaacaaacaaacaaaaaattcatgaaggtgtacacttcagatttgtgcattttactacaaataaattataccccaatggagtactataaaaaggtcataagagaatattatgaataactttatctcaatagatttgcaaatttagatgaaattgaataatccctaataaaacataacttaccaaagctgacacaataagaaatggaaaatctgagtagtccttgatctgaatctgtaatttaagactttctcacaaacctccctcccattcccaacatttaaaaaaagaaatcatgtacaaaaacaaaaattaaaaacgacaaaataaaaaaagaaaagraagataacaagtcatgtacaaatttacacaaagagaatggaaaaagagagaacacttttcaatttattgtataaagctaacataaaccttgctgtacaaaactggcaaggactttacaagaaagaaaaattacaggctagtctctctggaagacctctaaaggtgaatatacta

SEQ ID NO: 860530 - DNA, 694 bp, Homo sapiens
aagccatttgacaagtctctaggaagttccaaacttctccacattttcctaccttcttctgagccctcaaaactattctaatatctgcctgttacccagttccaaagtcgctttcgctttttcatgtatctttagagcagcatcccactgctggtaccaacttactgtattagtctgttctcacactcctgataacgacaaacctgagactggataatttatacagaaaaagaggtttaatagactcacagttccatctggctggggaggcctcacaaacgtggcagaaagcaaggaggagcaagtcatgtcttacttacatggatggtggaaggcaaagacagagtgagagccaagtgaaaggggtttccccttataaaaccgtcagaactcatgagacttattcactaccatgaaaasagtatgggggaaaccaccaccatgatttaattatctcccactgggtcccacccacaacacatgggaattatgggagctacaattcatgatgagatttgggtggggtcacagccaaaccatatcagagaggcttccatgaagacctctgacatgtcctggagacatgccttgatggttaacatttaactctttgttacttacacaaatttttgtatcaggcttgaatttctccccagaaaatgggtttctcctttctattgaattgtcaggctgt

SEQ ID NO: 860531 - DNA, 694 bp, Homo sapiens
aagccatttgacaagtctctaggaagttccaaacttctccacattttcctaccttcttctgagccctcaaaactattctaatatctgcctgttacccagttccaaagtcgctttcgctttttcatgtatctttagagcagcatcccactgctggtaccaacttactgtattagtctgttctcacactcctgataacgacaaacctgagactggataatttatacagaaaaagaggtttaatagactcacagttccatctggctggggaggcctcacaaacgtggcagaaagcaaggaggagcaagtcatgtcttacttacatggatggtggaaggcaaagacagagtgagagccaagtgaaaggggtttccccttataaaaccgtcagaactcatgagacttattcactaccatgaaaacagtatgggggaaaccaccaccatgatttaattatctcccactgggtcccacccacaacacatgggaattatgggagctacaattcatgatgagatttgggtggggycacagccaaaccatatcagagaggcttccatgaagacctctgacatgtcctggagacatgccttgatggttaacatttaactctttgttacttacacaaatttttgtatcaggcttgaatttctccccagaaaatgggtttctcctttctattgaattgtcaggctgt

SEQ ID NO: 860532 - DNA, 615 bp, Homo sapiens
acatggagattcactacaaaataggcagaagaaatatttttgggttgaaggacctgctctaaaacttaattgtggtgatgatgatatgattatataaattttctaaaaatccttggatgacacattttcactgggtagagttttggcatgtgaattagaactcaataaagttgttaaaaatcrtagcttaaatataaccacagaaagttaattgtttgatagcggggattctgtctttatcaccattgtattctgaaagcagtgcattctaatgggaaaatggaagcatcagattcatcattaggcttctgctcaaattacatcattcatttctccagggattcagtcagctactatttttgagcttgttctttgtgccaggcattgtgagcagagttctggaaatgtggcagtggagcagagaaacttagtcactgcctttatatggctaacattccagtgggaaagatagaaaactttaaattaaaacattaaccactggagaaaagtatgtcgaagaaaagaaaatgtccttttttaaaatagtcataggaatctcatttttaaataggtgaacagtagattcctcactagagaggtgatttttggacagag

SEQ ID NO: 860533 - DNA, 701 bp, Homo sapiens
ttgactttttaataatcatctgactggcacgagatactatctcattgtggttttgatttgcatttctctaatgatcactgatgttgagctttttttcatatgtttgatggccacataaatgtcttcttttgagaagtgtctgttcatgtcctttggccactttttaatggggttgtctttttcttgtaaatttaagcatcttgtacattctggacattagacctttatcagatggatagattgcaaaaattttctcccattctgtaggttgtctgttcactctgataatagtttcttttgctgtgcagaagctctttagtttaattagattctgtttgtcaattttcacttttgttgcaattgcttttgatgtttttgtcacaaaatctttgcctatgcctatgtcctgaatggtattgcccagattttcttctaaggtttttatagttttgggttttacatttaagtctttaatccatcttgagttaatttttgtgtaagttataaggaaggggcccagtttcaattttctgcatrtggctagccagttctcccagcatcatttattaaataggaaatcctttcttcattgcttgtttttgtcaggtttgttgaagataaggtgattgtagatgtgtggtcttatttatgagatctctattctgttccattggtctatgtgtctatttttgtaccagtac

SEQ ID NO: 860534 - DNA, 569 bp, Homo sapiens
tatttgccaaagtatccaaacatgagtgatcggatagtaggcaatacaaaattgaatacatttggctttaaattgttattttaaaaatattttcttttgaaattatattccatgtaggaaaatataaaaatggaatttcatgtcctaaacataaaaatacactaataattgtgtttttaaaaatcatttccaaagagaattttttccctcctctcctcctcctcctcacttgcctttggtaacatccatccagaaacatctttctaaagctatatggtaagactgtgcacttagtctgggtgagaaatcttaagatctsctggaagcaaatgccaagtctatgttatgtacaattcgtgacattgcttaggtaccataaaatattcatgtttatgcagttttgggttgtataatccactatcatttatatttccatgacttactggtaatgacactaattatacagttggcaaagaggcgcgaagtgacaattatgatgattttgtcaacaatgggatgtttgattgtaaactgtttccatccagaaatcttccatgtttattttttcc

SEQ ID NO: 860535 - DNA, 568 bp, Homo sapiens
cagttattctcaggtatctaattggaaaggctttaagctatgtttcacaaatgaagaatcaggcttagaaagcactataatctcactgcaaatttcataacaggaaagttgtcccatgcagactgaattcacatccctcaatgaaaatgcatggtcttttctagtccacccactgccttttgaagtgatcaattgatttactccctatggactgccmgtttgcagcatttaatccattaggttgcattataaaatcatatctccatctaagttctgagaatctatgatttcctatggttattagcaaggctacagaggataccaatgtagttagcacctagggattcatggttctttatttttcctttctaggttttagataaatatatttattatctataactttttggaggcaagatcaatatttttgaagtaatttaaaaatacatgtgtacatgaaaacatatctaagtacattaatacagtcccagtatctcactttattcctgggtaagttgggggttagaaactgagatagattcctacactaaggtgaagtgtgttgcca

SEQ ID NO: 860536 - DNA, 661 bp, Homo sapiens
tgggagtaggaatgaaaaaaaaatagtttagaataaatatacctgctgcatattaaaagttattttgagaagaaatatttcttgaaaggaaattatattgaaaactcacaagtagttcaataaaccttgctatgcattcaccaactgtgttaaacaggaaatgaatgaaaaaacagaastatgtgtcaatcaaggcataactagggaacaccaaagctcaccttattcttttcaggaacaggcagtccattttgggaatgccaaccaggagaatataatttttaatgaaatttgatcagaaatgagcagagggaggtccaagaagaacactttcccctgtactcagacatgaatgtacaaaatacatctgggaaaattaaactacatggaacagcaaaaccttgacttttcaacaaatttacagaactcataaatgactttatgtgtttactagtgaagtgggacttatggcaggagggggatatattgctttttatgaaggggaagaaactgtcattttcatgggtctcaaatggaagagttatttttttagctgcctgttttagtagaggggttaggaaattcaacctgaggtcttacaacacccctagttccagttgtacctggtttgaaatgaaagacctaaggctgtaagaaccaa

SEQ ID NO: 860537 - DNA, 560 bp, Homo sapiens
tttcatttagattttctttgatttctttcatcaaagttttctagtttttctcatttacatcctctacataatttgtttgatttatactttcctaatttttttggtattgatgtaaatgttactgtgttttaaatttcaaattcaaatggttcattgctggcatataggaaagcagytgacttttgtatattaactttctatcttgccaattggtataacagcttattcattgccagagttgtttgttgtcattggttctttgggattttctgcatagacgatgtgatttgtggacaaaaacgttactttatttcttcattcccaatctgtatgccttttttttttctttttcatgtcttattgcactagctaggacattcagaatgatgttgagatgtcgagcaggagaagtaaaaggggacatcctcaccttgttcccaatgtcaggggaaagcattttgtttctcaccatcaagtgtgatattagctgtagattttgtgtttgtgttgtcaaattcaggagttccctctattcctaattttctgagagtcctcacaaa

SEQ ID NO: 860538 - DNA, 667 bp, Homo sapiens
ttttactatacattctccatgtttagatatgtttagacacacagatacttaccattgtgttttaattgcctacagtattcactagaatatgctgtacaggtttgtagcctaggggcaataggctatagcatatatccaaggcgtgtagtaggctataccatgtaggttttgggaagtayactctatgaaacctgtgtaataatgaaattgcctaaggatacatttctcagaacctatacatgttgttaagtgacacatgactgtatatttctttagtatgctccaattcccaaatggaggttaatctcatagaattgagttttgttgaaccaacctgtcccaggtttcaacccttgttgtgattttcctaaccttctactttctctgttgtgagctgcagcaacattttatagagttgttattttactgagctgtttctctggaagcagttgtaatgtctgtggggataatgtaccactttcctttttagaggagcactgagaaatccagagaagcttttggaaggtattgacactgctcaaaaggaaacattttaaaatgaaaactagacacttgacaattaaaattcttcatgatatgactctgttttatcatgaagcttgaggtttctgagatgttacccatctcattcatgtatgtctgtacc

SEQ ID NO: 860539 - DNA, 667 bp, Homo sapiens
ttttactatacattctccatgtttagatatgtttagacacacagatacttaccattgtgttttaattgcctacagtattcactagaatatgctgtacaggtttgtagcctaggggcaataggctatagcatatatccaaggcgtgtagtaggctataccatgtaggttttgggaagtacactctatgaaacctgtgtaataatgaaattgcctaaggatacatttctcagaacctatacatgttgttaagtgacacatgactgtrtatttctttagtatgctccaattcccaaatggaggttaatctcatagaattgagttttgttgaaccaacctgtcccaggtttcaacccttgttgtgattttcctaaccttctactttctctgttgtgagctgcagcaacattttatagagttgttattttactgagctgtttctctggaagcagttgtaatgtctgtggggataatgtaccactttcctttttagaggagcactgagaaatccagagaagcttttggaaggtattgacactgctcaaaaggaaacattttaaaatgaaaactagacacttgacaattaaaattcttcatgatatgactctgttttatcatgaagcttgaggtttctgagatgttacccatctcattcatgtatgtctgtacc

SEQ ID NO: 860540 - DNA, 618 bp, Homo sapiens
tcaataagatattgtcattcactataacagagaggataaaaaattgcaaataattttcatgaagatactaattaaaagagaaaatgacataatgggatgctgtatcaaatactgcattaaaggatagcaatcataaatatttgtggtttgtggatggaggtaatggggatatactcctaaagtaatacaatgctgctactataatataacaaagttatttttccttttttttttttgaaatgtagtcttgctctgttgcccaagctggagtgcygtggtgcagtcagctcactgcaacctccgcctcctgggttcaagcaattctcctctcagccccccgagtagctgggactacaggtgcatgccaccatgcccagctaatttttttttgtatttttaggagagatggggtttcaccatgttggccaggctggtctcgaactcttgacctctgcctgccttggcctcccaaagtgctgggattacaggtgtgagccactgcgcccggccttttccttatgttttccaatcagatctcttttggttaccttattttcaaaatgtagtgaattaaagcaacattaaaaaaaaaggtgaacttagagggtcagaatggta

SEQ ID NO: 860541 - DNA, 632 bp, Homo sapiens
ttatttacagaaatgacatcattcatctttctaatccattctaagttgcttatgcgttggtcctcaatgctgtttgctacctacatttatttatccagagtgaaatagtaactatcaactgagccacactatcttcttcaaaaattccactttattcattttttggtcaatatttcacctatttttgaagttttactatttgcaaatacattgttttctttgtataaaatayatctaatgtctatacactagtaatattacttgttctcagcttcaggaaacactttacagctgtaagttgaacaaacactacgttgttaaacatgccattgttgtggtgttaaatacatcaatagaaaggagaagatggatctgttgcatctgctgccactgctctataaatttatttttatttcaaaagttcttaccaacaatttatttaaaataaacaattcctgagatttacattgcactatcccagtttcagtaatttttattctgaaggtttgcaaggaattggcatttttcccttatatactcagaagctttgcaaacactttaaaagactatataaaacctttaaaatgagaagtacatctatgtattttttaaataaaatattaaggatatta

SEQ ID NO: 860542 - DNA, 569 bp, Homo sapiens
gggagaaaccactcccataatccaattaccttccactgggtccctcccttgacctgtggggattacaattcaagatgagacttgggcggggacacaaaaccaaaccatatcactcatccaccttgcaccagacaccaaggatccaggctaagtccctgacctcttggagcttacatcctagtggggatgtattagtcaggataggttaagttatgctatgtaacaaaggattctaaaatcttagtggcttaataaaattttttttcatgcgacatgtccaaatttggctggggagagctmtactccacaaagtcccttcagatactgtggctaacagaggtggtaccatctgcaacatcattagttgctatggcaggataagggagtatagcaaatcatgaactggcaattgaatgctttggtcagtgatatggtttggctgtgtccccacccaaacctcatctcatattgtagctctcataatccccacgtgtcatgggaaggacccgatgggaggtaattgaatcatgagagcaggtttttcccatgctattctcatgatagtgaat

SEQ ID NO: 860543 - DNA, 679 bp, Homo sapiens
aatctacttctgagttcatccaggttattggcagagttcgtttctctctggctgtgtgactgagggtcctggccttttgcttgctgtcaactgggagcctccctcaggtcctagaggccacttgcatctcctggaggccacccacagctccctaccacgtggacttcctcaatgtggctgcttacttcatcaagccagcaaggctccctccctctgatcttctaagacagagtcttagataacataaggcaagctagggagtgacagctcaacacctttactgtgtgctattggttagatgcaaggtcacaggtctgtccacactggaggagaggggatcatacaaggcatggacaccaggaggtgggaagtcactggggtcaccttaggagctgccctgacagccttggagcactggggcactgacagcctctgctatgsgttgtgagacttcagtgctgcgaagaacaaaccccttgagtgtgggacccgtgcttgactctctctgtcccacctccagctcccatacaatgggggcttctatgggttgcaggcattggggggctccctgggacctggggtgggcgcttcaggtctcctttcaccttccaaccactggccccttcccaagctcactgtgtgacctcaggcaagttgcttgaagcttctgagtcttgat

SEQ ID NO: 860544 - DNA, 661 bp, Homo sapiens
ggacttcgttttcacctttagctttttgcattcggatttatttttctctttgccatgagcatgtattttttgtcatttaaaaaaaactatctaatgaaaagctatttttaaaagtctccattgatattatttaggatgaagaaagcctctactgtggagtgagggggaggaaacatgtctggagtggctgaggtgtgggcgggaaggaaggatatggaaggtgaaaatgtatagctcctttctcaagaagctctcttggaaaggaggaacggtgatcgtgggtgttgaaggaatgtttttgctgctgcatgtacagctctgatacatttccaggcaattggacttcaatttctttggtcctatctgcagctgaccgtgggacactatctggaggtaactcccaggatatctcttcttctgtggtctgggcttaayttctctccctgccctcccttctccctggaagtggaccccataagcctgtgcctgtcacactttaatgtgcatttgaatctcgtgtaggggtcttgttgaaatgcagtttctgattcagtaggtctagggagggggtgctaagagtatgcatttttagcaggctccacagtgaggccgacttgctgctccttgggccacccgttgaattgcaaggtcttaaggcagc

SEQ ID NO: 860545 - DNA, 637 bp, Homo sapiens
atagactacagtataatataaatataactttgttgttgttgttgtttgtttgcctgtttcagacagtctcattctgttgccggggctggagtgcagtggcatgatcacagctcactgcagccttgaccttctgggctcaagtgaaccccccatctcagtctcctgagtagctgggactacaggtatgtgtgactatgcttggctaattacattttttttttttttttttttttttgtagaaacagggtctttgtatgttgcccaggctggtctcgaactcctggcctcaagcaatcctcctgccttggcttccaaagtgttgggattataggagtgaaccactgtgtccagcccawtgtaagttttatatgccctgggaaataaaaaaaaaatgcatgcgacttgttttgttgcaatattcgctttgttgtggttgccttggaactgagcccatgatatctctgaggtatggctgtatttagaaatgcatatttagcacccttttcagttgctcacagaatacttccaaaggattattagtcactgagggtggtaacggtttgtcttgtttacatgctgaattcttttatcgctcagaaatgcattcagatgaaagtaacaagaaattcaaccacaa

SEQ ID NO: 860546 - DNA, 637 bp, Homo sapiens
atagactacagtataatataaatataactttgttgttgttgttgtttgtttgcctgtttcagacagtctcattctgttgccggggctggagtgcagtggcatgatcacagctcactgcagccttgaccttctgggctcaagtgaaccccccatctcagtctcctgagtagctgggactacaggtatgtgtgactatgcttggctaattacattttttttttttttttttttttttgtagaaacagggtctttgtatgttgcccaggctggtctcgaactcctggcctcaagcaatcctcctgccttggcttccaaagtgttgggattataggagtgaaccactgtgtccagcccaatrtaagttttatatgccctgggaaataaaaaaaaaatgcatgcgacttgttttgttgcaatattcgctttgttgtggttgccttggaactgagcccatgatatctctgaggtatggctgtatttagaaatgcatatttagcacccttttcagttgctcacagaatacttccaaaggattattagtcactgagggtggtaacggtttgtcttgtttacatgctgaattcttttatcgctcagaaatgcattcagatgaaagtaacaagaaattcaaccacaa

SEQ ID NO: 860547 - DNA, 613 bp, Homo sapiens
atacagtatatgtatatttccattttcaaaaatatacagtttcaaaatttacagatgtatattttctgtttacaaaagtaatataaatttgttataaaaatgttaacatcacggaaatacgtagtgacaatagtaaccatccccttttaatttaattcctgttggtggcctascctagttaactagggcagattcctacagattcttttctgtgcataaactaacctatacatatctctaaaatagtaccaaaaaaagaaataaatctctatgtaagcaaattttcctgggtaagcattcttagattctccatcagcagcatttttctgacatgcattcacagacattctcactcattgtttccaatatccttcctcattgatctagtttaatgagaagtcttttctaactcttctccacaacagcaacgtcattgcaagttccaattattcctgatatttctcattacaataattattctttctttatcattactaattactgttgctttaaaacatccctcagaatcaatgaggatggcagatgcctgaagactgtcactttacttccaaaacatcaagctaaatattcaggactatggcttcaactgatt

SEQ ID NO: 860548 - DNA, 605 bp, Homo sapiens
gcccctagagagaacaggaacaaagatttccccattatcgtgacctccgtaatgctcaacccatgaaaagtgttttgtaagtggtgtttgagtttaatttagcagaaagaaagtatagctaacaattccctttatgtgtgggaaattctcagggtagactccacaaaatgggtaatggaaacactctttgggttagagatggccgacctcagagaagctcccagaaatgtaggcatgggagtgagcaaccttatactaaatcaataagttgctaagactcctagctatgaagccaggtgactttgtctacctgaaaagcagactgcaagtgaatgttgagcactgctgatctggtctcctggcccacaacattatcgtatgtcrgtgattttataagatggaaatttgttggaaaattcaatatattttgctgcattccttccagacacaagacctagaatacataggctggagaaaggaatcagaagaaaggggaataattaaggaaaataatgggtttcaaactagagtttcaaccctatttagtaaaaaaaaaaaattcatgtattattctaatgggtgaataattgaacaagataaaacaa

SEQ ID NO: 860549 - DNA, 690 bp, Homo sapiens
tggacaataagtaaatgaacaaacaggtatggttgagttctgataaaagcttatttatgaaaacaagttataagccaggattgggccatgagttgtgatttgctgaccaatctctgatctagagcactgttgcaggctggtctctttagaatgctgtagtggagttagagggcaaaaagttttgaggagagtaacacttgtgaaaagaaaatgagaagagacagggttgtgctggaggagctgtaaaaccaaattgcagacctcacaaggtctctgccagcctagcagggagctctggagcaaaggatgctgatatagttttgctgtgtccccacccaaatctcaacttgaattgtaataatctcaaagtatcaagggtggggccaggttgagataattgaatcatgggggtggtttcccccrtactattctcgtggtagtgaataaatctcatgagatctgatagttttataaatgggagttcccctgcacaagctctcttgactgtcaccatgtaaaaagtcccttttctcttctttcatcttctgccatgattgtgaggcctccccagccacgtggaactgtgattccattaaacctcttttatttataaattaccagtctcagatatgtctttattagcagcacgagaatatactaatacagatggccattacagaagtcctcatt

SEQ ID NO: 860550 - DNA, 690 bp, Homo sapiens
tggacaataagtaaatgaacaaacaggtatggttgagttctgataaaagcttatttatgaaaacaagttataagccaggattgggccatgagttgtgatttgctgaccaatctctgatctagagcactgttgcaggctggtctctttagaatgctgtagtggagttagagggcaaaaagttttgaggagagtaacacttgtgaaaagaaaatgagaagagacagggttgtgctggaggagctgtaaaaccaaattgcagacctcacaaggtctctgccagcctagcagggagctctggagcaaaggatgctgatatagttttgctgtgtccccacccaaatctcaacttgaattgtaataatctcaaagtatcaagggtggggccaggttgagataattgaatcatgggggtggtttcccccatactattctcgtggtagtgaataaatctcatgagatctgatagttttataaatgggarttcccctgcacaagctctcttgactgtcaccatgtaaaaagtcccttttctcttctttcatcttctgccatgattgtgaggcctccccagccacgtggaactgtgattccattaaacctcttttatttataaattaccagtctcagatatgtctttattagcagcacgagaatatactaatacagatggccattacagaagtcctcatt

SEQ ID NO: 860551 - DNA, 690 bp, Homo sapiens
tggacaataagtaaatgaacaaacaggtatggttgagttctgataaaagcttatttatgaaaacaagttataagccaggattgggccatgagttgtgatttgctgaccaatctctgatctagagcactgttgcaggctggtctctttagaatgctgtagtggagttagagggcaaaaagttttgaggagagtaacacttgtgaaaagaaaatgagaagagacagggttgtgctggaggagctgtaaaaccaaattgcagacctcacaaggtctctgccagcctagcagggagctctggagcaaaggatgctgatatagttttgctgtgtccccacccaaatctcaacttgaattgtaataatctcaaagtatcaagggtggggccaggttgagataattgaatcatgggggtggtttcccccatactattctcgtggtagtgaataaatctcatgagatctgatagttttataaatgggagttcccctgcacaagctctcttgactgtcaccatgtaaaaagtcccttttctcttctttcatcttctgccaygattgtgaggcctccccagccacgtggaactgtgattccattaaacctcttttatttataaattaccagtctcagatatgtctttattagcagcacgagaatatactaatacagatggccattacagaagtcctcatt

SEQ ID NO: 860552 - DNA, 694 bp, Homo sapiens
aagttctgcaacctcctcggactcctgctgatgcccagatgtctgtggtcaccagttcccactgagctcaaccccaccttgttcccccttccccaatataaaaagaagcttcagattcatgccttttttatttttatttttttatttttttgagacggagtctcsctctgtcaccaggctcaagtccagtggcgatcttggctcactgcaacctctgactccctggttcaagcgattctcctgcctcagcctcctaagtagctgagagtacaggtgcgtgccaccatgcccagctaattttgtatttttagtagagacggggtttcaccgtgtttgccaggatcgtctcgatctcctgacctcatgatccgcctgcctcagcctcccaaagtgctgggattacaggcgtgagccaccgtgcccagcccagattcatgccttttaaggcagcttcttaggacattggtctgccgtcttctcagcttgctggctttccaaaatacagtcgctttccttgctctgactacttgtctctcaacttactggctgttacgcagtgagcggtccaagtctggactcagttacaagttccaaactgagaagcatgcatttgttggtccaggcttcctaggaacctaaaggcagccaagcggtctctctgttcccagagttctccagtgagaaggagaagctg

SEQ ID NO: 860553 - DNA, 542 bp, Homo sapiens
ataaaagcagagattagaatggtggttgccaggggctaaggagttggggaaatggggaagtgcttgtcaaagagtacaaagtttcaattatgcagaaaagtcctgagaatcgaatgtacagtatggttaccatagttaataatactgtattgcacacttaaattatgctgacaaagtagatcttaagtgttctcaacacagggggaaaaaagacaactatgtgaggygatgaatatgttaactagattgagtgtgttcatcatttcacaatgaatatgtacatcaaaacgtcatgttgcacaccttaaatatatataatttctatttgtcaattatgcttcaaaatgcatgagaaaaaaatttttgagttggctcaactcctaagcctgaacattctcttaatactactctcttcaactgctttggcttgttttcttttcctgaatccagccatatctgatttaatgagaatgagataattaactgtatgtgtaaaatttggctgtatagttatggtgctattgtagtgtgtttgttaaaat

SEQ ID NO: 860554 - DNA, 544 bp, Homo sapiens
ttttttactttccaaaccctatattctatattcttaattatattttcagcaatgctaactcttgtcaatacttccatcatgactttcatatattttatgttgttttattttttcctccacatttcttaagttctactaagtcatttttctactcttaatgtcttctttgagccattttatcttacttgattttctctttcatttctttgattttgtagagaagtgtttgtatcatttttcccwgaaatgctacatgaactttctaggctatagtctacatttgccttttagtttattttctaaattttatttatcttggaataggagtcatttcttcagagaagctgtaagctaaaagatactgtgtatgacaagctgggcaagtgagcagggagagctgaccactcagaattggggattctgtctcagaacactttcctctccactgtgctatttagtctcctctccctgctgttagcatttttatccttctttaggtggtggctttgcatatgtctgttgagggaggtcatcctatctattt

SEQ ID NO: 860555 - DNA, 544 bp, Homo sapiens
ttttttactttccaaaccctatattctatattcttaattatattttcagcaatgctaactcttgtcaatacttccatcatgactttcatatattttatgttgttttattttttcctccacatttcttaagttctactaagtcatttttctactcttaatgtcttctttgagccattttatcttacttgattttctctttcatttctttgattttgtagagaagtgtttgtatcatttttcccagaaatgctacatgaactttctaggctatagtctacatttgccttttagtttattttctamattttatttatcttggaataggagtcatttcttcagagaagctgtaagctaaaagatactgtgtatgacaagctgggcaagtgagcagggagagctgaccactcagaattggggattctgtctcagaacactttcctctccactgtgctatttagtctcctctccctgctgttagcatttttatccttctttaggtggtggctttgcatatgtctgttgagggaggtcatcctatctattt

SEQ ID NO: 860556 - DNA, 544 bp, Homo sapiens
ttttttactttccaaaccctatattctatattcttaattatattttcagcaatgctaactcttgtcaatacttccatcatgactttcatatattttatgttgttttattttttcctccacatttcttaagttctactaagtcatttttctactcttaatgtcttctttgagccattttatcttacttgattttctctttcatttctttgattttgtagagaagtgtttgtatcatttttcccagaaatgctacatgaactttctaggctatagtctacatttgccttttagtttattttctaaattttatttatcttrgaataggagtcatttcttcagagaagctgtaagctaaaagatactgtgtatgacaagctgggcaagtgagcagggagagctgaccactcagaattggggattctgtctcagaacactttcctctccactgtgctatttagtctcctctccctgctgttagcatttttatccttctttaggtggtggctttgcatatgtctgttgagggaggtcatcctatctattt

SEQ ID NO: 860557 - DNA, 591 bp, Homo sapiens
agacagtgaggcagcaagaaagggatgggagaagcaaatatgagatgcattcgggagcagattactgtcgtgggcaactggtgttcattccctctggggacctctgggagatggagtagaacattcaccagagctgtcccrcccaagaagcaaggagcttaggcatttctccaccaactgccattcattactggtccaggggtgttcactttatggcacttcaggttggccacaacactggctgagtgtccttctgatgccagagaatacctccaaatagagtagctggccgctttcagtaaaaagccctgtgcatgcagcaacatggcacagcacaatggcatccactacaggggatgggcttcattgtaatgtcaaagagcaatagtacatgtaaagtccttagtactattactggcacagcataagtccatctatcagtaatagttgagaaaatcatttctgggaatatacaaatctaggaaagtagctttcctcagcatgggaatccaactgtgatcccaagtatttggcaaaaggaaggccaccgtactctatgccttattgagcagtgcagaaggtgaaatcgtg

SEQ ID NO: 860558 - DNA, 591 bp, Homo sapiens
agacagtgaggcagcaagaaagggatgggagaagcaaatatgagatgcattcgggagcagattactgtcgtgggcaactggtgttcattccctctggggacctctgggagatggagtagaacattcaccagagctgtcccacccaagaagcaaggagcttaggcatttctccaccaactgccattcattactggtccaggggtgttcactttatggcacttcaggttggccacaacactggctgagtgtccttctgatgccagagaatacctccaaatagagtagctggccgctttcagtaaaaagccctgtgcatgcagcaacatggcacagcacaatggcatccactacaggggatgggcttcattgtaatgtcaaagagcratagtacatgtaaagtccttagtactattactggcacagcataagtccatctatcagtaatagttgagaaaatcatttctgggaatatacaaatctaggaaagtagctttcctcagcatgggaatccaactgtgatcccaagtatttggcaaaaggaaggccaccgtactctatgccttattgagcagtgcagaaggtgaaatcgtg

SEQ ID NO: 860559 - DNA, 591 bp, Homo sapiens
agacagtgaggcagcaagaaagggatgggagaagcaaatatgagatgcattcgggagcagattactgtcgtgggcaactggtgttcattccctctggggacctctgggagatggagtagaacattcaccagagctgtcccacccaagaagcaaggagcttaggcatttctccaccaactgccattcattactggtccaggggtgttcactttatggcacttcaggttggccacaacactggctgagtgtccttctgatgccagagaatacctccaaatagagtagctggccgctttcagtaaaaagccctgtgcatgcagcaacatggcacagcacaatggcatccactacaggggatgggcttcattgtaatgtcaaagagcaatartacatgtaaagtccttagtactattactggcacagcataagtccatctatcagtaatagttgagaaaatcatttctgggaatatacaaatctaggaaagtagctttcctcagcatgggaatccaactgtgatcccaagtatttggcaaaaggaaggccaccgtactctatgccttattgagcagtgcagaaggtgaaatcgtg

SEQ ID NO: 860560 - DNA, 654 bp, Homo sapiens
cttataaaagaagcccccgagagctcccttccccctgcaccatatgaggacacagcaataatgtgccccctgtgaaccaggaagtgggccctcgccagaaacaaaatctgacatgtcttgatcttggacttcccagcctccacagctgtgagaaataaatgtctgttgtttatcatttaccccatctatggtattttgttttaacagcctgaaaaaactaagatagtctctaaatggtagaaggtaaagagcattcccctggaggctgccagtttctctggaagagaatactccttttttcaaagtctgggaatcgaagcctggcttctaggcattatgttctccgggtaaagtaagtttgactgtttcgcatatagactttgattaatcrcctggtgtattagtctgttctcatgctgctatgaagatgtacttgagactgggtaatttataaaggaaagagatttaattgactcacagttccacatggcttggaaggcctcaggaaacatacaatcatggcagaaggggaagcaaacacatccttcttcacataatggcaggaaggaaaagtgccgagcaaagaggggaaagccccttatacaaccatcagctctcatgagatctcactcactatcatgggaacagcagcat

SEQ ID NO: 860561 - DNA, 587 bp, Homo sapiens
cattacttttaatgacaaaaacgacagttacgtttgcacgaacctaacactttatttatttatttatttccccttgctgagatcagatctctctctttctgatcgttattgaggtatgctccatgccttgattccaggaaagctatatagagagagacttgttaggccatcctcctcctccctccaccaccaatagcactgtgcttgaatattagatcaagaaatggcctgacagcccaagaccccttctcartgaaattagcttgagacttctgacaagaacgaaagtattctgcccaatgactcccatttaaaaaaccaactcaagagtaacatactacttatgcactccagtgagactttagaaatagatattgaggccatataagacagtccagaaattttccagaaagactaatagttgtacaagcctctttttttaaacttaaatttttatttttattttaaattccagggtacatatgcaggatgctcaggtttgttacacaggtaaacgtgtgccatggtggtttgctacacctatcaacccatcacctaggtattaagcccaccatgcattagctatt

SEQ ID NO: 860562 - DNA, 606 bp, Homo sapiens
tcaggatcagtcattgggatttgccaaattcaatagatataaactcaaaggcctcttgaagcaaggcagatgatgcaggtcaggcggggactagagtaaattagaaagtttaaataccatcaaaaaaaaagctcttacttcaaatgattattctcatgctttcatagaagatctgtgttgccagatttttggctcttgcaaaagaaagtcctgtttttacatgttgacaagaaacttatttwaaaaaaaaaagaatactaaacaatgaaactcatttgtgacccctggacttcaaagcttcttgaagctgaagatttatatatttgtcttgtgttatcactttgagataacttagtgagagacagttccaaaagactctttcatttataaaagttgctcttttcattggtcctaaatctaatgcttccaaatatctcatgatccttctttataagattccaggaatttaagaacaatgccattttcaatttatccatgtcatttgtggttttattgactttaatcatagctcctttcagccttcttgtttctaaactaatgttacagattattattataggataatactttcataggtacagaaaa

SEQ ID NO: 860563 - DNA, 589 bp, Homo sapiens
gtctctcagagggaaattgttattgaggccttcaggcttttgtcattacaaaacatttgtgcatctccaggcatacctgcaactagatgctcatttggtaagatgcaatcagaagattccagagcaggttgcttttacccccattgataagcaaacatatccattgtacagatgcrcctgctgtttgcaaggattcctacacctgatcctttttaaaaagaaagaacattttgcaaggtaggaaattcttaagccctcatttagaggtctcacaaattcacatttttctaaatatgctttcgtatgtgtggaagaaagaagggcacaggatgggaaacataaaagatggccataggtggactgtttctatctttttttatatatcagttttctattcggatggccaaatggaaaattggtgtaaaaataaaggtaaaaatggttattaagcacttgttctatgtctagcacccttttagatagttttcacttgagcactttcacttgagcctcaaaacaagcacactacgttgcatatggtattataggattgtctaggttatgcagcagttaatcagtgaactctgaa

SEQ ID NO: 860564 - DNA, 614 bp, Homo sapiens
agtaatgaggaaatgtagatctgtaattcaacttgagcatgttacctttacccagaaacaccattaactcccttatcaaaaagaaaactgacgttctgagagcctgtgtttctctaaaatgtccagtaattaggtagcgaagataagacagaatgagttcttttaattccagttctaacaagcctttcctcttgcctacactcttccagtgaatattttccacttctacgagaaactgagaaaatgggtttaagtcacagcatgaagaagacagtctgaataactgatgaagtgacttaataatgcattygagcatccattcattcaaaaatatgttgttaaattgagtgtttactacaaactgaacacactgttgtgtgttaggacataagtggaaaagggagaaatagaaacgaggcccttgttcttacaggaattctggtctaacagggaagacagttaataaaaggtaaacacataaaaagagcacacgtcaatgactatacgttctattaagacagcaagcaagtgatgtgatggagtctggagttgacagggaacaaggatgctactttacatgatgtagacagggaaggtctttagggggattggtg

SEQ ID NO: 860565 - DNA, 614 bp, Homo sapiens
agtaatgaggaaatgtagatctgtaattcaacttgagcatgttacctttacccagaaacaccattaactcccttatcaaaaagaaaactgacgttctgagagcctgtgtttctctaaaatgtccagtaattaggtagcgaagataagacagaatgagttcttttaattccagttctaacaagcctttcctcttgcctacactcttccagtgaatattttccacttctacgagaaactgagaaaatgggtttaagtcacagcatgaagaagacagtctgaataactgatgaagtgacttaataatgcatttgagcatccattcattcaaaaatatgttgttaaatygagtgtttactacaaactgaacacactgttgtgtgttaggacataagtggaaaagggagaaatagaaacgaggcccttgttcttacaggaattctggtctaacagggaagacagttaataaaaggtaaacacataaaaagagcacacgtcaatgactatacgttctattaagacagcaagcaagtgatgtgatggagtctggagttgacagggaacaaggatgctactttacatgatgtagacagggaaggtctttagggggattggtg

SEQ ID NO: 860566 - DNA, 614 bp, Homo sapiens
agtaatgaggaaatgtagatctgtaattcaacttgagcatgttacctttacccagaaacaccattaactcccttatcaaaaagaaaactgacgttctgagagcctgtgtttctctaaaatgtccagtaattaggtagcgaagataagacagaatgagttcttttaattccagttctaacaagcctttcctcttgcctacactcttccagtgaatattttccacttctacgagaaactgagaaaatgggtttaagtcacagcatgaagaagacagtctgaataactgatgaagtgacttaataatgcatttgagcatccattcattcaaaaatatgttgttaaattgagtgtytactacaaactgaacacactgttgtgtgttaggacataagtggaaaagggagaaatagaaacgaggcccttgttcttacaggaattctggtctaacagggaagacagttaataaaaggtaaacacataaaaagagcacacgtcaatgactatacgttctattaagacagcaagcaagtgatgtgatggagtctggagttgacagggaacaaggatgctactttacatgatgtagacagggaaggtctttagggggattggtg

SEQ ID NO: 860567 - DNA, 594 bp, Homo sapiens
tctcaaaaagtgaaaaataaaattatcatgggacccagcaattccactactaggtatatactcaaataatgaaaagcagatactaaaacaaatacttgtgcacaaatggtatagcatcatattcacaatagccaaaggtagtattaacccaaacttccatcaaccaatgaattaacaaataaaatgtgatatatacatgaagtggaatattatttagctataaaaaggaatgaaatactgatatatgctacaacaaaaatgaacsctgaaaatgtgctaaatgaaagaagcaaaacacaaaaagattacatagtgtatgattccatttatatgaagtatcaagaataggtaaattcgtaagtacagaaaatagatcagtggttttcaggggcagggagtaggggggttttggagtgaatgcttaggagtatgagattttcttttggggcaaagaaaatgttttggaacttgatggaggagatagctgcacgacaacctgaatgcactacattcctctgagttatacacttaaggagttttaattttatgctaagtgaattttacctcaactgattttttaataaataaaatgag

SEQ ID NO: 860568 - DNA, 644 bp, Homo sapiens
gaaattctgtcctttgcagcaacatagatggaactgggggccattccattaaatgaaataagctaagcacagaaagaaaagtatcgcatgttctcactcacatgtgggagctaaaaaatgtgaatctcatgaagatagggtagattggcagttaccagggatggaggtaagaggagggaggaataaagagagaaaaataaatataaatgtttttattaccactgaactgtacacttaaaaatggtaaattatcggccagatgcggcggctcacgcctgtaatcccagcactttgggaggccaaggtgggtggatcacaaggtcaggagttcgagaccagcctggccaacatggtgaaaccccatctctactaaatatgcaaaaattagccaggcrtggtggcaggcacctgtaatcccagctattcgggaggctgaggcaggaaaatcgcttgagcctgggaggcagaggttgcagtgagcccagatcatgccactgcaccccagcctgggcaacagagcgagactccgtctcaaaaagagaaaaattgtatattatctgtgtatattttatttcaaaattttttttttaagtttgcactttctatcttgagtaaagaaaagggaacactcacaaactattggt

SEQ ID NO: 860569 - DNA, 633 bp, Homo sapiens
tcttaggagaaaaagggctcgttagggagtatagaggaatatccaggtggctcagtgctattcctcctcctccacatattgtgtcatttcctaggagtggtactggcatggggactggaggaagaagagggatctcttttcagcaccagaggtagtgatgttcttgccctgcctgtcctatctagagaactaggtcaagaaaagaccctcctttgaaagaaaatgagaggtttgcacaagcactgaaatcctcttagaagttaggagctgctaagtcaccatgtgagcatgggaggtgcttctgacaaagaaaacaatatctgcatctatatttggggcagtgattgcaagataaagcaatgaaggtacmaaaatgacctgtgattgactctggggaaaagagagcagttggtggtggtggggtgggcagtggactgctcctttgaaacagacatctgcaataaaaaaggaactctattttttcaccaaaataggctgctacctgtcctgccacaattttgtgaaaaatccagagcaaatctctactccagtgggaaatcaggtgatgtacactcagtttttgtttttatattttgtcaaatatttcagattttgtttcagaaaaattctaat

SEQ ID NO: 860570 - DNA, 570 bp, Homo sapiens
cgatactttatacctcacattacttctgttatgctacacactcctgagtcacaggagattccaacttgtatttcaagcccagactgcatgacttcaatgtcctgttgcccttaacccctgtatcagattgcagccccactctggaaagttttcttgaattcttctatgtaygttttttaaactgtgggtcatcactcattagaagttcatgaagtcaatataataggtcaagaataccatgaagaaagcagaacagaaaatatcacagtgcatcactctcaggaagggtagatattgtttcacgaaactttttttttttttgagacagggtctttgtctgtcgcacaggctggagtgcagtggtacaatcatagctgactgtatcctcaacctcccaggcccaagagatcctcccacctcattctcatgagtagctgggacttgaggcacatgccatcatgcctggctaatttctaaaactttttgtagagatagggtctccctatgttgctcgggctggtctcaaactcctgagctcaaacagtcctcctaccttggcttcccaaagta

SEQ ID NO: 860571 - DNA, 570 bp, Homo sapiens
cgatactttatacctcacattacttctgttatgctacacactcctgagtcacaggagattccaacttgtatttcaagcccagactgcatgacttcaatgtcctgttgcccttaacccctgtatcagattgcagccccactctggaaagttttcttgaattcttctatgtatgttttttaaactgtgggtcatcactcattagaagttcatgaagtcaatataataggtcaagaayaccatgaagaaagcagaacagaaaatatcacagtgcatcactctcaggaagggtagatattgtttcacgaaactttttttttttttgagacagggtctttgtctgtcgcacaggctggagtgcagtggtacaatcatagctgactgtatcctcaacctcccaggcccaagagatcctcccacctcattctcatgagtagctgggacttgaggcacatgccatcatgcctggctaatttctaaaactttttgtagagatagggtctccctatgttgctcgggctggtctcaaactcctgagctcaaacagtcctcctaccttggcttcccaaagta

SEQ ID NO: 860572 - DNA, 758 bp, Homo sapiens
tatccattcatttgtcaatggacagttggattgctctcatcttttggctattgtgaataatgctgctatgaacaggagtgtacaaatatctcttcaaggccctgttttcaattcttttggctatgaacccagaagtggaattgctagattaaatggtaattctatttttaatttgttgagaaccaccatacttgttttcatagtggctgcaccattttgcattcccatcaacagtgcacaaggatttttccacatcctcaccagcacatgttattttctttttctttttttgatagtagccatttaatgggtatgaggtggtatctcattgtggtttttgatttgcattttgctaatgagtgatgctgagcatcttttcatgtgcttattggccatttatgtgtcttctttggagaaattctattcaagttgacttctatgattttgcattatcacatctgtattgattcaagcaagccaactagaataaattctggcatttaaascgattttgtggtttttctgcaaataaattctgcccccaaataacctccaactttctggaagcagtcagcaggagtacagttctgaagataactttctttaaaaaaggaaattcataaaatatcatgcatcttccttttttgacactaatggaacaatttaatgtaatttcagagggaagcagagcccctggaaaggctggtgtgataagggaaggttacccagctttcctgtcaggcggtgtgtgggagcag

SEQ ID NO: 860573 - DNA, 649 bp, Homo sapiens
taactagctggaggctgggccccccgggctgcctgacatacacctccttctgcttttgcaggggcttcgggaagcagggattccagtgccaaggtaggctctggggctttggggatgctatttgtgggaagagagggtgaaaaatactttatagaagaagttactgagttaggcagagagtgaaagaatcacgttggtcggagtgacctcccaggctaggaattcttcaccacaacagggtcctttcaaggggtgtgtgtgtgactggggccgatggcgcttgggagtcttacatgccaaggaagttcacctacccttcctgccttcccggctctggaagagtcaaagcggtcycctgaagcaatcctggcatggtcagttccgctgggggagaaagtgttttcccgggacgtttctgggagaacctgtcctccttagttcccctttctctgcccatgtcccttccttatctcacccagggaggttctgcctctccctgccttgcagaggtctctgcaggtggctgccgctcctctgcagatggtgcatcccctagaaaggcgactgtgtttgtcgcctgggcctcctctctctctgaaagaagtatttccagagggagtgtttctcagatcctggtttaaatcaccct

SEQ ID NO: 860574 - DNA, 649 bp, Homo sapiens
taactagctggaggctgggccccccgggctgcctgacatacacctccttctgcttttgcaggggcttcgggaagcagggattccagtgccaaggtaggctctggggctttggggatgctatttgtgggaagagagggtgaaaaatactttatagaagaagttactgagttaggcagagagtgaaagaatcacgttggtcggagtgacctcccaggctaggaattcttcaccacaacagggtcctttcaaggggtgtgtgtgtgactggggccgatggcgcttgggagtcttacatgccaaggaagttcacctacccttcctgccttcccggctctggaagagtcaaagcggtctcctgaagcaatcctggcatggtcagttccgctgggggagaaagtgtyttcccgggacgtttctgggagaacctgtcctccttagttcccctttctctgcccatgtcccttccttatctcacccagggaggttctgcctctccctgccttgcagaggtctctgcaggtggctgccgctcctctgcagatggtgcatcccctagaaaggcgactgtgtttgtcgcctgggcctcctctctctctgaaagaagtatttccagagggagtgtttctcagatcctggtttaaatcaccct

SEQ ID NO: 860575 - DNA, 655 bp, Homo sapiens
ggacactgctatgggttgggagaggaaggatggaaaactcataaaccttgggaaattatggatttctgtgtgctcaggggagcttaagaatagattttcttgctttcgtatgatgataggacgaaactctaggttgactgcctcataatttctccctttttgtttccactctgtctatttcttataaaaccactctctgggaggtaatttaagaatgtgtttgatgacagggaactggggctgaagatccctattgtaaaattgcctaaattctagagtagaagtggaactcctttgacaagcaaggcagatttctctctatggcatttttttctttgccttttatttatttatttatttwttgagacagagtctcactctgttgcccaggctgcagtgcagtggcaccatttcgactcacggtaacctccatctcctggggctcaagcgattcttctgcctcagcctcccaggttgctgggattacgggggcctgccaccacgcctggctaatttttgtatttttagtagagatggggtttcatcattttggccaggctggtcttgaactcctgacctcaggtgatccacccgcctcggactcccaaagtgttcagattacaggcatgagctacagtgctggctgtttctgtgg

SEQ ID NO: 860576 - DNA, 739 bp, Homo sapiens
acatgtagactagaaaagtttgcacttttttatatcacaaaaaaggttaattttattttctatggaaagctagaattgatgataatgagtaagtcagctcttctttttcccatgtagattagaaaacaggtttttaaatcttgtagttgaaattattcttaaaaaaccccaaatcatgacatgaatccaaccattcttgtttttatcaatattcaccctatcaaatataaagtttattttagtgggtaattaacatgtgtagattagcatagcrtatgtgtatttatataacaaaaaatgaatcaaaagttaattttattttgggcagtgttccctagaaacttataatatggccccatgcacttcaggttgaattttcttagtaaaatcataaagaggtccattttttcaaaaaatcaccaagtcaggctgcaagtttagaggttacttctattgtttcacttctctttcttcccagaagcagaccccagagacctgtgagccaaactccactcaccttttagcttattctaaatgtgtcctgcgggcttctctgtgaataaaaggcagaggctttttgacttcgtgtttgatgatttggcttttttcttttttttaccacctgacgggggatttcaggctcaatgtcccaatcgaaataagaatctttgagtgggttaacattgagtcttaaaaaggagggctgatttgttggagaggcaacaacgaattcattttt

SEQ ID NO: 860577 - DNA, 549 bp, Homo sapiens
tctggggtacacagagagagccagtgtgatggggaaggcaaaagagctgggcacagatggctcatgagaagtgcccgctatcatgttttacttttttttttttttaatttttttttgagacagagtcttgctctgttgcccaggctggagtgcggtggcgcaatctcaactcactgcaaccttcatctcccaggttcaagcgattctcctgcctcagcctcccgagtagctgggactacaggcacctgccaccacacctggctaatttttgtatttttagtggaggcggggtttcaccatgttggccaggctggtcttgaactcctgggctcaagtgatctgcctgtctcagtctcccaaagtgctgggattatagacatgagccaccgtgrccggcctatgttttactttaaatatgtaagagctctttgcttttagctatgaaaatacagaaaaaaaataataaatattattggtcatattggcatatatgagacctcagtaaataagagctcttatgatgattctgcttccccccttttacagatg

SEQ ID NO: 860578 - DNA, 676 bp, Homo sapiens
agggcactcataaatatccttctgcagattctacaacagtgtttacaaactgctgcatggaaagaaaggtttatctccatgaggtgaatacaaagatcacaaggcagtttctcagatagattccatctagtttttatcctgttatagtctctttttcgccattggcctcaatgagctcccaaatgtccatttgcagaatggacaaaagcagtgtttcaaaactgctgaatgaaaagaacggtttaactctgtgaaatgaacgcacacatcacaaagcagattctcagatagcttccttgtagtttttatccttggatattcacttttttgccattggccaaaatgtgttcccaaatgtccattcacggaatagacaaaaacagtgtttccaaatggctaaatttaaaaaaaaaaggcttaacactgtaagatgaatgcacacatcacaaagtsgtttctcagatagcttccttctagttgttatcctgggatatttgcttttttgccattgtctcaaagagctccaaaacgtccatttgcagaatggataaaaacagtgtttccaaactgctgaaagaaaagaaaggtttaaccctgtgagatgaatgcacacagcacaatgctgtgtctcagaaagcttctttcttgttttcatctgaagatactttctttttca

SEQ ID NO: 860579 - DNA, 676 bp, Homo sapiens
agggcactcataaatatccttctgcagattctacaacagtgtttacaaactgctgcatggaaagaaaggtttatctccatgaggtgaatacaaagatcacaaggcagtttctcagatagattccatctagtttttatcctgttatagtctctttttcgccattggcctcaatgagctcccaaatgtccatttgcagaatggacaaaagcagtgtttcaaaactgctgaatgaaaagaacggtttaactctgtgaaatgaacgcacacatcacaaagcagattctcagatagcttccttgtagtttttatccttggatattcacttttttgccattggccaaaatgtgttcccaaatgtccattcacggaatagacaaaaacagtgtttccaaatggctaaatttaaaaaaaaaaggcttaacactgtaagatgaatgcacacatcacaaagtcgtttctcagatagcttccttctagttgttatcctgggatatttkcttttttgccattgtctcaaagagctccaaaacgtccatttgcagaatggataaaaacagtgtttccaaactgctgaaagaaaagaaaggtttaaccctgtgagatgaatgcacacagcacaatgctgtgtctcagaaagcttctttcttgttttcatctgaagatactttctttttca

SEQ ID NO: 860580 - DNA, 645 bp, Homo sapiens
gagaatcagcaaagggacatataggagcctatttagacttatggggaaaaatcaaatatcctcagttaaaaacaaacaaaaagctatccgtgaaactgctgtgtgatgtgtggattcatctcagaaagttgagattttcttcttattcagcaggttggaaacactgtttttggaaaatctggaaagggacatttgggagccctttgaggcctgtgggaaaaaccgaatatccccagataaaaactagaaagaagctatctgtgaaactgctttgtgatgtgtggatttatttcacagaattaaaactttcttttgattccacaggttggaaacaccatttttggaaagcatgtgatgggacatttgagagccccttgaggcttatgggaaactytaaatatctccagataaatactcaaatgaagctatctgtgaaactgctttgtgatgtgtggattcatctcatagagttaaacctttcctttgattcagcaggttggaaaccctcttcttggaaaatatgtgatggtatatttgggagcccattgaggcctttggggaaaaacagaatattcccagatcaaaactataaagatgctatctctgaaactactttgtgatgtgtggatttatctcagacagtta

SEQ ID NO: 860581 - DNA, 620 bp, Homo sapiens
aaatctgaaagtctcaaaaccagggaagctgacagtgcagccactagtctgaggcccaaggcctgagagctcccaaaaggctgctgatgcaagtcccagggtccaaaggccaaagaacctagagtttgatgtgcaagggcaagaggagaaaaaggcatactgctctggaagagagagaaagtgcataaaaaagaaatccaagcaagctgaatgttcccattcttctgcctttttgttctagtcacacttgcaaccaattgcatgatgcctacccacagtgaggatgggtttttctctctcagtccactaactcatccatcattctcctgtggcaacaccctcacagatatacccacacacagtgcttcatcaggcatctgagcatccctcaatcaaattgacaattaatattaaccacacagrccaattggtagagagtatatttttgtaatttccacatatttattacttttcctttttccttctgctatgaatttgtaatttcatttaatgtggtcagaaaagatatttggtatgagttcagttttcttaaatttttaaaaacttgtttgtggactagcatgccatctatcctggaaaagtcttggtatgtacttgag

SEQ ID NO: 860582 - DNA, 543 bp, Homo sapiens
agttatctgcaaatggatatttgggagcactttgaggcctatggtgaaacagaaatcatcttcacataaaaactagaaagaagctttctgagaaactgctttgtgacgtgtgcattcatcttacagactttacctttcyttttcatacagcagtttggaaacactgtttttgtccattctgggaatggaaatttgcaagctcattgaagcccgtggtggaaaagcgaatatcccaggatataaactagaaggaaactacctgataaataactttgtgatgtgtacattcaggtcagagttaaaccatacttttgattcagcagtttgggaacacattttttgtccaatgtgcaaatggacaattgggagctcattgaggaaaatggaaaaaggggaatatcccaggttaaaaactacaagaaagctatctgagaaactattttgtcatgtgtgcattcacctcacaaagttaaacctttcttttcattcagcattttggaaacactgtgtttgtacgattggtgaagggatatttgagagtat

SEQ ID NO: 860583 - DNA, 482 bp, Homo sapiens
ccaatggcaaaaaagtgaacatcccaggaaaaaaactagaagaaatatatctgagacaccgcttcacaaagggtacgttcatcccacagagttaaaccttttttattttccattcagcagtttggaaacactgtttttgtataatctgcaaagggatatttgggagcaccttgaggtctatggtgaaaataaagtaaattcagataaaaactagaagaagctttctgagaaactgctttctgatatgtgcattcatctcacagagttaaactttctttgattcagctgttttgaaacactgtttttgtccattctgtgaacggacatttgggarctcattgaggccaacatcaaaatattgaatatcccatgataaaaactacaataaagcagtctgagaaaccgttttgtgatgtgtgcattcatctaacagagaaaaacctttcttttgattcagctgtttggaaacaccgtgattgtcc

SEQ ID NO: 860584 - DNA, 689 bp, Homo sapiens
gaattgggtatccatcccctcaagcatttatcctttgtgttacaaactactcaattacagtattttaggtattttaaattgtacaattaagttgttatcgatgtgctatcaaatagtattgacataactctgatgygctatcaaatagtaggtcttattcattctttctattttatttacccattaagcatccacaaataagagcagatttcttcttagaagtcatgcgagcaggaagctcgcatgtggagctatatttataaaatattaaaagaaaaaacttactacccaaacccatctccagaccatgaatttctctctggatatcttattaaaatattgtctcctatcaaatctctatcaaaataccaatgacattcacagaagcagaaaaaaaattctgtaactggtatggaaccacaaaagcccctgaatagccaagcaataccaaacaaaaaaccccaagatgaatatatcacattatctgaatcaaaatatactacaaattatggtaaccaaaacaggatcaatggtattggcataaaatcagacattgagactaataaaattgtatagaacacaccaaaataaattcatgtatttacatccaactgattttcagcataaattccaagaacatacattgagaaaaggacgcacttttcaataaatggtgctgagaaagtgga

SEQ ID NO: 860585 - DNA, 689 bp, Homo sapiens
gaattgggtatccatcccctcaagcatttatcctttgtgttacaaactactcaattacagtattttaggtattttaaattgtacaattaagttgttatcgatgtgctatcaaatagtattgacataactctgatgcgctatcaaatagtaggtcttattcattctttctattttatttacccattaagcatccacaaataagagcagatttcttcttagaagtcatgcgagcaggaagctcgcatgtggagctatatttataaaatattaaaagaaaaaacttactacccaaacccatctccagaccatgaatttctctctggatatcttattaaaatattgtctcctatcaaatctctatcaaaataccaatgacattcacagaagcagaaaaaaaattctgtaactggtatggaaccacaaaagcccctgaatagccaagcaataccaaacaaaaaaccccaagmtgaatatatcacattatctgaatcaaaatatactacaaattatggtaaccaaaacaggatcaatggtattggcataaaatcagacattgagactaataaaattgtatagaacacaccaaaataaattcatgtatttacatccaactgattttcagcataaattccaagaacatacattgagaaaaggacgcacttttcaataaatggtgctgagaaagtgga

SEQ ID NO: 860586 - DNA, 602 bp, Homo sapiens
cctacaggtattttattgatgttattcttcctctgatgacacgctgatttcaaaacatgcctaaaaccaaagacacaggatctttgaagtcccttccctcaaatatctgaggcttttccccaattgagcagcagttcacatgcttgtaagttttaaatgtgttargcattttactggaaatgctttatatgcttcacactccacaggacttcttattcccagctcattgattgaggaaagtgaaatctgccatttgctgatgggccaatgtcaaggccaatgtcccagatcccctgtcaggacaaaagtgtgatgcagccagaagtcagccctcacctgcaaatgctctcctgaacttgcctaccctggagggatctgctcaccaggcagattccaggcgatgcccaaagcactccctaataaaactctgtgtgctcatctccgccttaacttctgtttccaggagacccagcttgtgaccattgtttccaggaagattaccaattgtctctgtttgccctggaccgaaggttttcccaggacatagatctttcagtgctaaaacaggacagtcctgagttatcttaggaccaggaatgtct

SEQ ID NO: 860587 - DNA, 676 bp, Homo sapiens
gcccgagatggccctccttgccatgaagtaggcagaaggcgcttagagctctagtttcccaaatggagctcaattgcttgtcatattacatacacgtgctgttatgtgtgatgatgctctgttctaaccctgaaagacctggtggagccttagcaaatcactggccattctcccaaacactgcgtgtgcttatgctatgccgccatagttttacaagcatttttcagcgtttatgcaaatgctgcccttctgtctttggtaactgctttgctcatctttcaggattcagcttacatcttgtcttctctgtgccacattcctgtcagcagccacctcacaccacccgctcctgtgcacacaggcgtacagasatagtcttgttcctctctgctcttagagcaccattcagctacccccagtggagcactaatcccagtgagctgtgatggtttcttggtgtctgtctccccgcgagaccatgggctcttggtgaacagcggctgtagcctgttcagctctgaccctccggaccctcatataacctgtatgacccatgaaggtgcacagcaatgggaaggatgagggaagaagaaggatcttttcaaactctgtacattcttcacacagaaaagcaggctcatatcagctgacttgttctcccaggcagagaacaaga

SEQ ID NO: 860588 - DNA, 658 bp, Homo sapiens
ccacccccgttctctgcgtggctcctaccgcttcctcagcccacatcttgctgccagtctctgcttctcagcccacatattccaaaacctgcctcggaatgcaaactggggtaccagaagccttccacactgctcagaatgaggcctgggcagtaggagagcaggctgctcaggatccatgtccggctccgcaaaatatctcactcttccaggcctctgttcattcatctgcagaaagagctaagcttaaattattttcttgactggttcwcatggaggtataaagagtcctgttactgcccaggctattaagtgctttacaaactataaagtgcggtacaaatatcgttcttgtcagtttataaagtgccttacaaactataaagtgatatacaaatattgttcttatcaatgtgctttggaagaagctggatccacagtcacaggcagcagttctaaggggcaacagggacacacaggaactcagctgatgccaggggtgccgggcctctgtactttcaaagacattctgttctattcctaggtatcactaccagaacattcctaaacaataaccatcctgctgcaggtggtgcgagaagggacatcacagagcattttacatagggtcctacaggctgatgcctttggggtccag

SEQ ID NO: 860589 - DNA, 658 bp, Homo sapiens
ccacccccgttctctgcgtggctcctaccgcttcctcagcccacatcttgctgccagtctctgcttctcagcccacatattccaaaacctgcctcggaatgcaaactggggtaccagaagccttccacactgctcagaatgaggcctgggcagtaggagagcaggctgctcaggatccatgtccggctccgcaaaatatctcactcttccaggcctctgttcattcatctgcagaaagagctaagcttaaattattttcttgactggttctcatggaggtataaagagtcctgttactgcccaggctattaagtgctttacaaactataaagtgcggtacaaatatygttcttgtcagtttataaagtgccttacaaactataaagtgatatacaaatattgttcttatcaatgtgctttggaagaagctggatccacagtcacaggcagcagttctaaggggcaacagggacacacaggaactcagctgatgccaggggtgccgggcctctgtactttcaaagacattctgttctattcctaggtatcactaccagaacattcctaaacaataaccatcctgctgcaggtggtgcgagaagggacatcacagagcattttacatagggtcctacaggctgatgcctttggggtccag

SEQ ID NO: 860590 - DNA, 658 bp, Homo sapiens
ccacccccgttctctgcgtggctcctaccgcttcctcagcccacatcttgctgccagtctctgcttctcagcccacatattccaaaacctgcctcggaatgcaaactggggtaccagaagccttccacactgctcagaatgaggcctgggcagtaggagagcaggctgctcaggatccatgtccggctccgcaaaatatctcactcttccaggcctctgttcattcatctgcagaaagagctaagcttaaattattttcttgactggttctcatggaggtataaagagtcctgttactgcccaggctattaagtgctttacaaactataaagtgcggtacaaatatcgttcttgtcagtttataaagtgccttacaaactataaagtgatatacaaatattgttcttwtcaatgtgctttggaagaagctggatccacagtcacaggcagcagttctaaggggcaacagggacacacaggaactcagctgatgccaggggtgccgggcctctgtactttcaaagacattctgttctattcctaggtatcactaccagaacattcctaaacaataaccatcctgctgcaggtggtgcgagaagggacatcacagagcattttacatagggtcctacaggctgatgcctttggggtccag

SEQ ID NO: 860591 - DNA, 594 bp, Homo sapiens
cattcaaatgagagtccaagaaatttttttgttttttgcttaaaccagttggagttgcacttttgtttcttggaaacaaattagctctgagaaacacaggtaacaaagagcccaagttctttgtctaagtcagggactaggctatataagctatatgggaaccaagcatccagatcttaggctagtatgttttttctctttttaatgaagtgtaacacatatgcacatatctctctctmtatatatatatatgtgtgtgtgtgtgtgtgtgtgtataacttatctattgaaagtgcacaaaccatcaatgtacagctcaataaatttctacaagttgaacatacctatataaccagcatccaggcaaaagcacagaacattaccaccatctctccctccacccaccagagcttccctttctctgattccagtctctcctcctccaggggtaaccactatcctcatttctagcatcacaggttagttttgcctgtggtttgtttgctggttggctggttttgttttactttgttcactaatctgcagtctgggcaggtgggaggatcatttgaggccaggagtttgagatcagcc

SEQ ID NO: 860592 - DNA, 618 bp, Homo sapiens
cacagttccacatggctggggaggcctcaaaatcatggtggaaggctaaaggacatcttacatggtagcagacaagagagaatcaggaccaagcaaaaagagtttccccttgtaaagctatcagatcttgtgagacttattcactaccacgagaacagtatgagggaaattgcccccatgatttaattatttcttaccaactccctcccacttatgggagctacaattcaagatgaaatttggatggggacacagccaaccatatcattctgcccctggcccctcccaaatctcatgtcctcacatttgaaaccaataatgyctcttcccaacagtcccccaaagtcttaactcatttcagcattaactcaaaagtccacagtccaaagtctcatctgagacaaggcaaggcccttctgcctatgagcctgtaaaatcaaaagcaaattagttccttcctagatacagtgggggtaaaggtgttggataaatacagctgttccaaatgggagaaattagccaaaagaaaggggcaacaggctccatgcaagtctgaaatccaatagggcagtcattaaactttgaagttttgaaatgatccctttgactccatctctc

SEQ ID NO: 860593 - DNA, 634 bp, Homo sapiens
caagccaaaccatgccagcatatttaaggcctctacttacattgtgtctgtcaatattcctttggccaaagaagtcacatggccaggccaaaaatctagggaaagaggagcatgtatcattctcagtgggagctataaggtagtacatatttgcagaataatcaataatcctatccatcagagtcatgaaaggacaatccaatggggagggtkagcagtgagtaaagagataaagagtattcaaaatcaagccaagctctgggagaaaggtcatgtatcaccaaaatagagtgccatggccccagccatccagaggggagtttaacattgacttgggagatggagcatcaggaaaacaggaagaaacccagacttcaaggtgcaacgtaatgagcagaaagccaagttcacaacaaaattaatgtacaacccatgttgggttgagctgagctgatgaggtgttccctgacctggcagcactacctcaggctctagccagggggattctgcaaaggaggcctcactggtaccacctgagtggagtttgggaagctggtagatatttagtacaacatactccatatctatggcaccctcggaaagcctacatgggatgcagcaagatgttaagatg

SEQ ID NO: 860594 - DNA, 634 bp, Homo sapiens
caagccaaaccatgccagcatatttaaggcctctacttacattgtgtctgtcaatattcctttggccaaagaagtcacatggccaggccaaaaatctagggaaagaggagcatgtatcattctcagtgggagctataaggtagtacatatttgcagaataatcaataatcctatccatcagagtcatgaaaggacaatccaatggggagggttagcagtgagtaaagagataaagagtattcaaaatcaagccaagctctgggagaaaggtcatgtatcaccaaaatagagtgccatggccccagccatccagaggggagtttaacattgacttgggagatggagcatcaggaaaacaggaagaaacccagacttcaaggtgcaacrtaatgagcagaaagccaagttcacaacaaaattaatgtacaacccatgttgggttgagctgagctgatgaggtgttccctgacctggcagcactacctcaggctctagccagggggattctgcaaaggaggcctcactggtaccacctgagtggagtttgggaagctggtagatatttagtacaacatactccatatctatggcaccctcggaaagcctacatgggatgcagcaagatgttaagatg

SEQ ID NO: 860595 - DNA, 634 bp, Homo sapiens
caagccaaaccatgccagcatatttaaggcctctacttacattgtgtctgtcaatattcctttggccaaagaagtcacatggccaggccaaaaatctagggaaagaggagcatgtatcattctcagtgggagctataaggtagtacatatttgcagaataatcaataatcctatccatcagagtcatgaaaggacaatccaatggggagggttagcagtgagtaaagagataaagagtattcaaaatcaagccaagctctgggagaaaggtcatgtatcaccaaaatagagtgccatggccccagccatccagaggggagtttaacattgacttgggagatggagcatcaggaaaacaggaagaaacccagacttcaaggtgcaacgtaatgagcagaaagccaagttcacaacaaaattaatgtacaacccatgttgggttgagctgagctgatgaggtgttccctgacctggcagcactayctcaggctctagccagggggattctgcaaaggaggcctcactggtaccacctgagtggagtttgggaagctggtagatatttagtacaacatactccatatctatggcaccctcggaaagcctacatgggatgcagcaagatgttaagatg

SEQ ID NO: 860596 - DNA, 600 bp, Homo sapiens
tgcacagaatgggtgctcaatgaacatttgtcacatgaatgatttgggtggggggtgagataacagccatttaagacttactccataggatatgataaataggcatgagttgagagaatataaatggcatcctagtgtcagcttcatttcttgctttgctgaatgatcttaggaaagtcaccagtaggttcagagcttctgattcctcatctatgggatggatgtactaaaacctgctctaattatttcagggactgttgtgaagattaaattagagaatagatatcaaagtttcaaactgttaagattcataagcctttgtttttagtgttatttctagaacaaagaatcccatatttttwaaaaaaaaaaaaaagaatgtttaaagctactcaaataatttgtttgtttaggggtctaagacaagtaccataaagtccggtataaagagaagggacagaatgctgcctgggccttgtcttcctggaacccaggattcactgtggaattagcacacaagcctggagctccatgtaatgtggagatctgtcttcatcaggggtagaaaggagactctgaaagctgctgttttatatctgc

SEQ ID NO: 860597 - DNA, 494 bp, Homo sapiens
agtttacttgggaaatccttccaagtctggcataaatggtgcccaccatgagaatcttcctggtcttcaaagaagttgtggtttgaatgcatcctccatccctgcatcaatcagcttaggtgtatcaccctgtcagagctccttaagagccaagggcacatagtagataytgaataaaaatgttgacttatacatcacaaatatctctactatctaacattctgttggttggattttttttacttaaaaataaatgataaattcacaggaagttgcaaaaatcatataggaagtccctgtgtaccttttacctaccttttacccatttccccccaatggttatgttgctgaaataccaagggtttggtccaggtcctgctgctcactgcacagaaagccaatcactgagacaatgagtattgccagggaagaagactttatttaggtgatgcagctgaggagatgggagatcagtctcaaatctgtttcttcaa

SEQ ID NO: 860598 - DNA, 571 bp, Homo sapiens
acattttgccaccactttcatctgcaggtgacagatgcacacatccattatgtggtccaataaaagagaatcattttcatctgtcaactcggtaatccaatttcagcaaacctaagctgtgctagtgcagtgtgttggatccaagtgtgatccttgcactagcagcagcacaacctggacacttgttagaaatgcagattctcaggccccacccagatttactgagtcaggaattctgacggggtcaaacccaacratctgttttggcaagccctccagctgaggctgatgcccaagttcaaggaccaccatgctaagatgtctgggtgcatgcagggagcaatgaaaatgctatggagactgagacctggtgctcctggtattcatgtcatagaggtgattttaatttgggaggttttcaaacatggtgagagcaccttcaatttcttaggacaacagagaggtaacatggcaatgcaacttgggtccaatgcccgggaaagtgctggcagcctttgcaagtgaattctgcacacttgtcatttttagcttatctggaaatctatatatg

SEQ ID NO: 860599 - DNA, 565 bp, Homo sapiens
ttgttttaagaaatgtctaagtgaaacagtgtacactacattgatattttttataattttcttttttctttctttcttttttttttgagatggagtcttgttctgtcacccaggctggagtgcagtggtgcaatctcggctcactgcaatctccgcctcctgggttcaattgattctcccacctcagcctcccgagtagctggaattactggggtgcgccaacacgcccagctagtttttgtatttttggtagagacggggttttgccatgtyggccaagctggtttcgaactcctgaccccaagtgatccgcctgtctcagcctcccaaagtgctgggattataggaatgagccaccagaaccggccagatatttttataattttctgataagatcacaacaacagaatcaagcactattgtgatactgaggacacaaccctctgcccaccccacattctaaatcgttttattttcccctcaacgtgttcacaaatatgcttctaaataaagactcacacctcatcagctgtcttggattactctagtcagggcaacaccaaat

SEQ ID NO: 860600 - DNA, 565 bp, Homo sapiens
ttgttttaagaaatgtctaagtgaaacagtgtacactacattgatattttttataattttcttttttctttctttcttttttttttgagatggagtcttgttctgtcacccaggctggagtgcagtggtgcaatctcggctcactgcaatctccgcctcctgggttcaattgattctcccacctcagcctcccgagtagctggaattactggggtgcgccaacacgcccagctagtttttgtatttttggtagagacggggttttgccatgttggccaagctggtttcgaactcctgaccccaagtgatccgcctgtctcagcctcccaaagtgctgggattataggaatgagccaccagaaccggccagatatttttrtaattttctgataagatcacaacaacagaatcaagcactattgtgatactgaggacacaaccctctgcccaccccacattctaaatcgttttattttcccctcaacgtgttcacaaatatgcttctaaataaagactcacacctcatcagctgtcttggattactctagtcagggcaacaccaaat

SEQ ID NO: 860601 - DNA, 648 bp, Homo sapiens
atctttgatctttattaaaatgcaattctggaaatggggaggtaaaatatgatcatctcatgtcagtttttataactgtaggtgctggagtttcagactcctatctgagattgggaattaatgaatacagaaggcataaggaatatgagggcattgagccaaagggagaggtggggcgagggaggggctgtggtagcaacatgaayagaaaaggagaaaaaggacctgagttggaaaattgaggtctccatatcaaattactcttatttcaaaatgtttcctaggtttgcttattcctactgatttttattaccaagagctttatagaaacataatatacttttttattactttaagtacagctagttttagccacttatacctccagacatgccactcaactgtgaccttgagtatcatttattcataaagtaattttcttagaatgacgaagcatctacatttcctaaattacatatcactagttatttttcttgagacatcactttatatgactcattttacaagtttacaagttgcttctttactagaatgtttccccgtccccaacagtggaattagtcttctacttggtttaattttatggtgttcctgctgcaagctcagcaaattatgaacagttgtctc

SEQ ID NO: 860602 - DNA, 590 bp, Homo sapiens
ttttctttccccaccgtgttaaccctgatcaggattttattgatattcgtagaggatgtggagcataactaagaaaggtcctgtttaggcaaaggagattgaaattatggtgtgttgctctgtggggtcatgtgttaaaatgtgtgtgcaaaggcagcctaggaagaaaaaataaatggagatgatttttgtttctaggtagcagcaccgcctgcattgtggtgctggacagaaccagccaccgcttacacacagcaaacctgggcgattcaggcttcctggttgtcaggggtggtgaagtcgtgcaccgatcagatgagcagcagcattacttcaacactccattccagctctcaatcgctccccctgaagccgagggagtcgtcttgagcgacaggtaatctcccctytcagccattaagtgtgagcaggacgtggctcattcatagtcccctcctgtcccccttgagtgcagtgaggtaggcatttccatgaaaagaatacactgagaatgttctcatcaagaggaccttttagtttaactttgaaagatacttttctggaactagataatctagctaagtggaatt

SEQ ID NO: 860603 - DNA, 618 bp, Homo sapiens
ccagcaaaaatcctggattggctttcttcagtctgtctttgagtcctgccctttcctgtaccaaactctggggccagagagagagcctgttcttatgagccagtcttagatgtgtgccaatcccagaaccaatcactgtagccagaaggacaacaagctctgattggccaggtctgacaccagtgattgtgtctaggaggattaaatgctccaattggctaggcccgagtcacatgggcatcaggaaccaatcattatgtcgaggcagataaaatgctctgataggccaggtctaagtcatgtgctcatccttggagccaagggttgaggtgggcttcacccaraccttgcactggggtgagggaggggtgaggggtgctgctcctagatgcgggaatgaatacaggcaggcagatgatagcaaccccaacgtgggacaaagccctttgtcccttttccccagagtgcccccaactctaggttatactgggtgtatgacttttattagacatgacagttgcagtggtgtgtgcatgtgtgtgtgtctacatcacattgcacaatgcaatttaagattaaatattagatctcctattcttaaaagccttcaggttcttc

SEQ ID NO: 860604 - DNA, 663 bp, Homo sapiens
ttttccagtagaagagatgcatcatatcaagccattctgattttctgttctcagttttctcaaatgacaaataagaggtgttgtgagcttggtgtgagaagttccaaagaattttctggaatgatggaaacattctttatctgtgctgtcyggtatagaagccacaagctatgacattgctactggactcttaaaatgcagctagtgggactgagaaactgaatttttcattttaattaatttaaatttaaatagccacacaaggccggtggctgctgtaatcagacaacacagaataaaagcctgctaagtttttctgttagcattggatagaaatgtgagatcttcaatgcatctggtctgtagtaaaagaaactctcttgcccttgtctgctgccagagaaactttctgaatctcagggagtttttccacgagagtgatgggaggtctgcgctgcgtccatagggccagcgatgaatgtggcgccttgtaatgaaataactgaaacatcattgtgactgtagaatcaagggtcttccctccttatctccaaagtgcccgtgttttacatgaaaaagcgtttctaattaataggccagcccctcttgagtttgataaaaacagaggagaaaaggatttgattaacccacgatcttttcaat

SEQ ID NO: 860605 - DNA, 574 bp, Homo sapiens
tttgttgatgcagagataagaaacttctttctcctctctgcttacagggacaggacaggctaggtagcagataacatctctctagatggatgtgggttttaaaacatgactgcaaagtttttgacagttcaccattgagaagtgaggtctttcgtgcttatcatttgaatcaggatgggattgtaattgccaccatgctagagaagccacatgttggagcctcagttgggggaccctagcagagcccagccttccagccatccctagcaaggtaccagacatgggagtggaccctctgggctaagccactggctagctgaatactcctgagtgatctccatcaacaccatgtagaacagaagaatcacccagctaagccctgcctgatttgctgmcccacaaaattgtgcaatataaaagtggttgctgtattcagccactaagttttgggattatttctcacacagtgaaaagataataggaaaataatgtactgaattattttgtttattggtaggttcctggccccattcatcaaggctgggccagggaaggctttgaatatggctactgt

SEQ ID NO: 860606 - DNA, 567 bp, Homo sapiens
aggaatatctgtggccaccagagctggaagaggcaagaagctctctccctgagagcctccagagggaatcaaccctgctgactcttgactttaaacttctggcctccagagctgtgagaaaacacgtttctcttgttttaagacccccagtttgtggcaattaattacagcaacccttggaatctaatrtattgaccattccaaatgctggggaagaatgtggaggaactggaactcttgtacattgctgatgggaatgtaagatagtacaagcgctttggaaaccagtttggcaatttttttaaaaaagttaaacacctgctgcaggatccagccattctgctcctaggtatttacccaagagaaaagaaagctgtggtaggcaaaataatggcccctgaagatgtccatgccctaatccctggaacccataaacatgttaaattacatgacaaaggagactttttagatgtgattagattaaggatcttgagatggagagattgttctggattatccaggtgggcctgatgtcatcacaagggtccctataagtgaaagagggag

SEQ ID NO: 860607 - DNA, 608 bp, Homo sapiens
gaatatggggaaaagatatgaacatatatctgaccaaagaggatatatagacggcaaataagcacatgaaaacatgttcaacaacattagccattaggaaaatgcaaattaaaaccaatgcataagagtctacaacaatctcagtataaatttcaattttaaaaagtatgaacaccacccccattcaacttctttcacccaccagactctgatttaartggcttggagtgtgacctgggcagtgagagtgtaaaatctcccctatgtgattttaatgtgcagccaaggttaagaacaattctcctaggataaagagtatagcttaatagaaatttttaaaatagagcctgaagccaggtgaggaaaaatgctgatgtggagttttctgattgagagttatcttcacactcagtctccaaataacagaatgaatgcagctcgttctcaggatggtttatgttgcagctacagatctagctatttctagtcaccacaaagaactggagttgggcaaattgaccaggtggatataattattagtgatgcttttctgtgtcctctttttttctccattaacttctctttccaactactagttttcaaatttg

SEQ ID NO: 860608 - DNA, 622 bp, Homo sapiens
tttccaaacttaaaaaagtgaatacttgctcaaaggtcagttctgcatttcaaaatataacataataaaaatctctgagtaagtttttagaaaaagtaatgcttaccacttgtctatggagaacaattatttgtctctccagatttcaaggaatttctctatatttcactttcagaaatgaatcagagacaacaagtaaatttaaatagataattataaatgtttaaaaagttggccgggcatggtgactcacgcctgtaatcccagcactttgggaggccgaggcaggcggaccacttgaagccaggagtttgaaaccagcctggccaacatggtaaaaccccatctctactaaaaatataaaaattagccaggtgtggtagcacatgcctgtaatcccagctactcgggaggctgaggcaggagaaccgcttgaacctgggaggyagaggctgcagtgagccgagatcacgccactgcactccaacctggatgacaaagcgagactctgtctcaaaaaaaatataaaaaaataaaaataaaaagatgaaaaactgatttgaattttccaggaaggcttatctatctagtcaaatcactaataatcttattgtaagtgaaa

SEQ ID NO: 860609 - DNA, 581 bp, Homo sapiens
caattacaatgtgtcaataaaaacaggtaaataagaaaaaaagaagtcattggcttactggtttgttgttaggcaattaacagaaagatctgggacaataggcatcacaaagtagtttcagcttcatcagtaaagaagatagggtaggtaaatcaaaggtstggcttgtacttatgaaactatggtttagagaaaataaacatattagttatattccatcaaaatgtatgaataataatgtatttaccaaaggtcccatgtcaggtttcctagatttctagaaaggaaaagcatgaaaattacacattctgaggtaaagctctaagaattcatcatcttttactacctattcaaagtttttcagatttcttaatatcaaaaacaaaaatcacctctgtatgaattttattattttaatgttaaatatcacaactaatgtttaatcagtacaatgctctggttcacttaccaataacttaagtgtgataggagtaaggaaaacctgattataaaatggtcagaatttatgaaagttaggctccttacattctgttctttaaatgtcatcatcaagttcccta

SEQ ID NO: 860610 - DNA, 628 bp, Homo sapiens
tatgtacaatagaatactgctcagaaatacaaaggcatgaattactgaagcacacaaaatataagaatgcatctaagaaacactgtgccaagtgggagacggctcaggtaagaagagtgcctgctgcaagacttcgtttatgtgaagttctagaatgggccaaattgtctgtggtagaaaatatcaaagtcatagttgtctccagaggtgggggtgtgcacagggtacttggggtgaagttcatgttctgcaaatggrtaggggcatgggttacacaggtgttggcttttgtcagaatccagccatcatgtacttaagatttgtgcattttacgagagaaggaaaaaataaatattgaactgcacttcatgctatgcgggctgatgtgtttagggaggaatatactgatgtctgcaatttgctttgaaatgcataaaaaataagatgggtgaatgggtggggagagatgaataggtgtattgatacgtgataggcacagtaaaacactaatggcagaaacttggtggtgagtatacaggtgtttactgtaaaatcctttcaactttgctgtttgaaaatgttcttaatcacacactgggagaaaataggcacctcacccaacatagcc

SEQ ID NO: 860611 - DNA, 633 bp, Homo sapiens
gttaatttttctatttttttgtagagatggagtttcattatgttgtccagatgggtttcgaactcctgggttcaaacgaccctcccaaagtactgggattacaggtgtgagccaccctgcccagcctacatattaattttgcttttgaaaagggaaagttaagcgaatgagaactgggtgtcgaaaggatccagagattaagatgtrcacatcgagatccccagcctggtggtggcgactccatcgtaagcctggagtgtttctccactgacttgacacaagtacatccagctgccctatctcaatagtgagttgatttagagcaaacacgtcctgtgaaggaatttttagacatttttgctctattacagctcattatgtaggcatttaaagagagctcaagaatatgtaggaaaaaatgtttctaaaaattctttgttttctctggcatttcctaagttctaaactttaaactttttcttcagagaggaatttatttttataccaatgacatttgattactcaactggatatacttaaacagctaaacattctaccagaagactgacgtccttgttcatatccgatcatatataaatactggcctatgaacaaaactggggagatgtgtta

SEQ ID NO: 860612 - DNA, 633 bp, Homo sapiens
gttaatttttctatttttttgtagagatggagtttcattatgttgtccagatgggtttcgaactcctgggttcaaacgaccctcccaaagtactgggattacaggtgtgagccaccctgcccagcctacatattaattttgcttttgaaaagggaaagttaagcgaatgagaactgggtgtcgaaaggatccagagattaagatgtacacatcgagatccccagcctggtggtggcractccatcgtaagcctggagtgtttctccactgacttgacacaagtacatccagctgccctatctcaatagtgagttgatttagagcaaacacgtcctgtgaaggaatttttagacatttttgctctattacagctcattatgtaggcatttaaagagagctcaagaatatgtaggaaaaaatgtttctaaaaattctttgttttctctggcatttcctaagttctaaactttaaactttttcttcagagaggaatttatttttataccaatgacatttgattactcaactggatatacttaaacagctaaacattctaccagaagactgacgtccttgttcatatccgatcatatataaatactggcctatgaacaaaactggggagatgtgtta

SEQ ID NO: 860613 - DNA, 633 bp, Homo sapiens
gttaatttttctatttttttgtagagatggagtttcattatgttgtccagatgggtttcgaactcctgggttcaaacgaccctcccaaagtactgggattacaggtgtgagccaccctgcccagcctacatattaattttgcttttgaaaagggaaagttaagcgaatgagaactgggtgtcgaaaggatccagagattaagatgtacacatcgagatccccagcctggtggtggcgactccatcgtaagcctggagtgtttctccactgacttgacacaagtacatccagctgccctatctcaatagtgagttgatttagagcaaacacgtcctgtgaaggaatttttagacatttttgctctattacagctcattatgtaggcatttaaaragagctcaagaatatgtaggaaaaaatgtttctaaaaattctttgttttctctggcatttcctaagttctaaactttaaactttttcttcagagaggaatttatttttataccaatgacatttgattactcaactggatatacttaaacagctaaacattctaccagaagactgacgtccttgttcatatccgatcatatataaatactggcctatgaacaaaactggggagatgtgtta

SEQ ID NO: 860614 - DNA, 633 bp, Homo sapiens
gttaatttttctatttttttgtagagatggagtttcattatgttgtccagatgggtttcgaactcctgggttcaaacgaccctcccaaagtactgggattacaggtgtgagccaccctgcccagcctacatattaattttgcttttgaaaagggaaagttaagcgaatgagaactgggtgtcgaaaggatccagagattaagatgtacacatcgagatccccagcctggtggtggcgactccatcgtaagcctggagtgtttctccactgacttgacacaagtacatccagctgccctatctcaatagtgagttgatttagagcaaacacgtcctgtgaaggaatttttagacatttttgctctattacagctcattatgtaggcatttaaagagagctcaagaatatgtaggaaaaaatgtttctaaaaattctttgttttctctggcatttcctaagttctaaactttaaactttttcttcagagaggwatttatttttataccaatgacatttgattactcaactggatatacttaaacagctaaacattctaccagaagactgacgtccttgttcatatccgatcatatataaatactggcctatgaacaaaactggggagatgtgtta

SEQ ID NO: 860615 - DNA, 648 bp, Homo sapiens
aaagcccctcaaaagcagaagaaaaaaaataaaaccatatgaattaaagttaaggtagaggatttttccaacagcatcatttctgctggttactaagttccacaaatagctaatgaggccaaccacctttgaaatcaaagtgctgtgccccatctcctaatggagccacagtatgmtaagggaagtgaaacttctagagtcagcacccagatggtgttgacaaagaaacccacgtgcatggtgcagtgcagactattttttaaattggcctcaaactctaaaaagcacacaaacacacatttggatcacctctgttccaccacacaaaacagtcccagtttgcgtgactccccactgcctggttcacatgctgagtaactggatgctatttcaatatttagctcaggccaacaacattagcaaagcagatttttctcaccttattgcccatggccaaatatataactttgaggtggtctgcgcggtctgcttctttccatatgagtataacattgacctgtatgcatatgattctcagcaatgtagaggtaactgctcacatttgtatcttagtaagagggaattgatgaagcaataaatgtttaacagctaggtgtcatctcccagctgtgtatgaatttctgttat

SEQ ID NO: 860616 - DNA, 676 bp, Homo sapiens
ttctctctcatttctaaatttctgaaattttcctgttactcttcctgctttcaatttctccttacattaatctttcatatacatggtgacccgggttacctttcccaaagcagtattttcattattatgtcactttaggtcatcaatgactgctcatcgccaatagcataaaatccaagctttgatctgcaactcaagagcctctagaatccagagaaacctccttttccagccttccctctcactacttttccctctatgacatctagatttatctttgcaatcacctctgaatagaccctttcatttctacctccctctctctttcttttccttttttttttttttttttttttttttgaggcggaatttcactcttgytgcccaggctggagtgcaatggcacaatctcagcccaccacgacctccacctcctgggttcaagcaattctcctgcctcagcctcccgagtagctgggattacaggagcacgccaccatacccgactaattttgtatttttagtagagacagggtcactccatgtaggtcaggctggtctcgaactcccaacctcaggtgatccacccacctcggcctcccaaagtgctgggattacaggtgtgagccactgcgcctggcccctctcccttttatccatactttttttccccaaa

SEQ ID NO: 860617 - DNA, 558 bp, Homo sapiens
cttgacctctcaactatattacattttttccacttaacgttaaacaaagctaggagtacttatgtctcccaataaggttttcaatgtagtagtttggggaggtattaggatagtcagaagtcctttgtctaaaatagtgttgaaaccttcttaatctttggaagaaaatctactttggagaaaagcttaaagatttggrggatttgacgtttacctaggaacaggatagctaaatagtaaaattaaaaatgggctttaatcttcaacacattttacttagtagcactacaaacatttggtcatgtcaaggaaccatgacggtttgaaggaatttttcacccctatggtctataccactattttggattgtgttgtgcatatgctctcctggtaccctttaccctagagcacttattacagtgtgcaattagatatttattttattttattgctctttgtatcggacacctcttgagccctttcttatatcttcttcatttacctttatattccagctgttggtgcaaccatcagctttgtgcagattattctgaaaat

SEQ ID NO: 860618 - DNA, 627 bp, Homo sapiens
taagaaattgtaagaattggagcaagaagagtagaaatcaaagagcaagtgagagaagtatgcagaataagacccaaggtgatgagcaaaggaggaggtcatacaagaataaaggactacctcgggagaagttacaatgtgtgagaaaaaagtgttctgttttacaagattaaaaaaaaatacctgamgatgatgctgaagaagaaatagctgatgatagctgataagaaataatacttgagaatagttaataagaaaaccttttagggtgtgttctcgttctctctttctctgtctctctctctctctctctctccctccctccttccttccctccctgccagccttcccgtcttaaaaaaatgacttcacagcagaaaaaaatacaaaagatacaggaggataggggaaaagatgtgggtgaatcattggttggcaaagaatgaaaagccttttatttcataaattgccttcatggctcaatagtgaccagcatgatcaagttgctaataagattcaaggcctaattactgggagtaaaatagacctactattgtatcatattttaaaaatgttattaagatatggaagctactagaaagcaaagatcattggtatgactcaaca

SEQ ID NO: 860619 - DNA, 627 bp, Homo sapiens
taagaaattgtaagaattggagcaagaagagtagaaatcaaagagcaagtgagagaagtatgcagaataagacccaaggtgatgagcaaaggaggaggtcatacaagaataaaggactacctcgggagaagttacaatgtgtgagaaaaaagtgttctgttttacaagattaaaaaaaaatacctgaagatgatgctgaagaagaaatagctgatgatagctgataagaaataatacttgagaakagttaataagaaaaccttttagggtgtgttctcgttctctctttctctgtctctctctctctctctctctccctccctccttccttccctccctgccagccttcccgtcttaaaaaaatgacttcacagcagaaaaaaatacaaaagatacaggaggataggggaaaagatgtgggtgaatcattggttggcaaagaatgaaaagccttttatttcataaattgccttcatggctcaatagtgaccagcatgatcaagttgctaataagattcaaggcctaattactgggagtaaaatagacctactattgtatcatattttaaaaatgttattaagatatggaagctactagaaagcaaagatcattggtatgactcaaca

SEQ ID NO: 860620 - DNA, 588 bp, Homo sapiens
aaacagaaataactttatgaggccaatatcactccaatatcaaagctagacaaagccactacaagaaaactacagacaatgcaaaaatcctccacaaaatatcagaaaactaaatttaataacatattaaaaggattatacacaatgatcaagggggatttatcccttagattcaaggatgattcaacatatcgatcaatgtgatataccacattaacagactctaagataaaactacatgatcatctcaatagatgcaaaaacaaaaagcatatgacaaaatttaacatccattcatgatttaagaaaaacctctcaacaaaataggtatagaaggaactgacttcaacataataaagacracatatgaaaactccacagctaatatcataatcaatggggaaaagctgaaagcttttctgctaagatctgatataaagctagggtacccatgcttaccacttctcttcaacacagtataagaagtcctagccagagcaataagacaagaaataaaaggcactgaaatcagagaggaagaagtaaaactatccctgtttgtagatgacatgatcatatgtgtaaaaa

SEQ ID NO: 860621 - DNA, 607 bp, Homo sapiens
atatagaagatgtacaatgtgagtcatattcctttctactttccctaagaacaaaccatgttagtacttaacatttcgcttttaccaagcttttagcggtcgtttctttgctattcaatgagaactgaagttttgctgaaatatgggaaaagtaaccaaacatctctaaaaaacaaaacaaarcaaaacaaacaaaaatacaaggagtaagaaatatgccatattttctagacacattttatttcagttttttcccctgggtgtagagttagggtgcaaaatctatcaaattcttctattaattttaaattaagaaatgtggagatttgctatgttagaaccaaagctttcctgattctctgaggataactgtgtgtgtgtttgacctctagagctgaagtcacggtgttagccccttgtgacattagtgttcagaagctctttctatgcatggataaatcttggttgtctagcacaggttgtgaaacataataggggctcattaaatatttgtttaatgaataaatgaaattattatgcaataaaattaaaaatgtaatgtttaccaaactactctcagtacatttgtttcagtgattttttcata

SEQ ID NO: 860622 - DNA, 616 bp, Homo sapiens
tctacacatgttatagaaggcagggattcattcagaagaaccacaggaagtgagtgatagcttatgtttgtcctttgagtggattaaatatgtatttttatgcttttgcaaagatattagccaaataaaggtgtttactgtagttggactggaaaacaagtgaggctgaattatttaccttcatgtacaccattactacagtaaatcatatattagcagtattttaaaacaaatttatcattttaaaatatcaattttttattccycaagtggctttgtaaaataaccaaattaggtaaacaatgagtattagcttcatgaaatatatgaaccaaatggactgaaactggtttttactctccctcgcccagcctcttccccacagatgcagttaatttttataatccctttagggtctgtacattttgatataaggaaactagtggtttatctatactcgaatctaaattaaatccctaaagtttttccctactgccaatttctaataaaatgcagtcctaaggaaaggtgaccaatggagtgcatgtgaaactcatcttcattctgaagtgtgatggaaacacaggaggcagaagggacaaaccatgttgcttgg

SEQ ID NO: 860623 - DNA, 616 bp, Homo sapiens
tctacacatgttatagaaggcagggattcattcagaagaaccacaggaagtgagtgatagcttatgtttgtcctttgagtggattaaatatgtatttttatgcttttgcaaagatattagccaaataaaggtgtttactgtagttggactggaaaacaagtgaggctgaattatttaccttcatgtacaccattactacagtaaatcatatattagcagtattttaaaacaaatttatcattttaaaatatcaattttttattccccaagtggctttgtaaaataaccaaattaggtaaacaatgagtattagcttcatgaaatatatgaaccaaatggactgaaactggtttttactctccctcgcccagcctcttccccacagatgcagttaatttttataatccctttagggtctgtacattttgatataaggaaactagtggtttatctatactygaatctaaattaaatccctaaagtttttccctactgccaatttctaataaaatgcagtcctaaggaaaggtgaccaatggagtgcatgtgaaactcatcttcattctgaagtgtgatggaaacacaggaggcagaagggacaaaccatgttgcttgg

SEQ ID NO: 860624 - DNA, 632 bp, Homo sapiens
ggattcctgtgatagggagcgtggctaggagactggtgtagcagcttaggtgagagataatggtgacctgatctatgattttaaaggtgaatatggaaaacatgaacatatttgaaatatattttggagacgtagtttacaggaattggtgactaatttagttgtctgggagttgaagcagggggtgaagttaaagtagggatggkggtaggcaataatttcttaaatggaaaacaaaaagcactagaaaatgaaattttaataaaaatacatacgttgactttattaaaattaggaacttctatttgtcaaaagatgccattcatagagtgaaaaggccaagtaaggactaggagaagatgatttgaactcatatctagaatatataaagaaattatatacattaagaagaaaaagccaacccaatttaaaatttgggtaaaagacttgaacaatcactttacaagaggatttctaaatggtcaataagcatatgaaaaggtgctcaacattactagtcatgagggaaatttacattaaaaccacagtgagatatcactatactcccagcagaatggctaaaattaagaaggctaacaatatcaagctttggcaaagatgtggaacaatta

SEQ ID NO: 860625 - DNA, 596 bp, Homo sapiens
gtgaggatgcagagaaagggaagtgctcatacactgttgctggaaatgtaaattactacagccactgtggaaagcagtatggaagttccttacaaaacaacagaactaccacatgatccagcaatcccactgctgagtacatacccaaaaagaaagaaaatcagtatattgaagaccatctgcactcccacatttagtgtagcactattcacaatagccaagatatgggatccaacctaaatatctatcaatggmcgaatagataaagaaaatgtggtatatatacacacaatggaatatcatgcaggcataacaaatgaaatcttgtcatttacagcaacatggatggaactgaaggtcataggttaagtgaaataagccaggcacagaaaaacaaatattgcgtgttttcactcatatgtggtaacttaaaaagtggatctcatggagataaagaatagaatggtggttagcagaggcttagaggtaaggggaggtggactataaagagaagttggttaatgggtaccaaaatacaattagaaagaaggaataagttccagtattcaatagtacagttaggagactataattaa

SEQ ID NO: 860626 - DNA, 610 bp, Homo sapiens
agataaaagaagtctggaagaggtaggagtctaggactgttggctacccaaagttatcaggaagccacaatccttctatccctatgcttattatggttacaagatgactgctggagctccagccattatatctactttttaggcaggaagggagataatggtgaaagaaggaaagagagagcatgccagctcagtcagcctgtttttaggagatwtcttggaagtgtcattcttaggtcccattctcccagaagaccctgaaccaaagatccagatgcaaatgattaattcgggaaatgctgtcaggggaaactggtcagggagtgaaagaagcagaatgaggaaaaggaacccgccaagcaagggtgcaacttcagggcagcctcagctggatccttggggagcttgggagtataaattacatctcagagtttgtcctgcctcaaaggaaaggaactgggcccctgcatttcaacccagccatgggctgcccagaagaggttgggaggaagtaaatctccaggaacttctggctttccatacagcagaggtggcaccattgcccaaatctatgttagaagcatagaaaagctgcagatgctggtgaacg

SEQ ID NO: 860627 - DNA, 610 bp, Homo sapiens
agataaaagaagtctggaagaggtaggagtctaggactgttggctacccaaagttatcaggaagccacaatccttctatccctatgcttattatggttacaagatgactgctggagctccagccattatatctactttttaggcaggaagggagataatggtgaaagaaggaaagagagagcatgccagctcagtcagcctgtttttaggagatttcttggaagtgtcattcttaggtcccattctcccagaagaccctgaaccaaagatccagatgcaartgattaattcgggaaatgctgtcaggggaaactggtcagggagtgaaagaagcagaatgaggaaaaggaacccgccaagcaagggtgcaacttcagggcagcctcagctggatccttggggagcttgggagtataaattacatctcagagtttgtcctgcctcaaaggaaaggaactgggcccctgcatttcaacccagccatgggctgcccagaagaggttgggaggaagtaaatctccaggaacttctggctttccatacagcagaggtggcaccattgcccaaatctatgttagaagcatagaaaagctgcagatgctggtgaacg

SEQ ID NO: 860628 - DNA, 586 bp, Homo sapiens
aaacactaggaaaaaaaagtgtccagtgggtgtttgaaactagaaaacaagttgccttttgaagaattttgcctcaggttttatcattatgaagtgctgcccaattaattgcctaactgggtatgatgctgtatattgagaacttcacagacctagtcaatttcttttcttttctttcttttttttttttttctagatgaagactcactctgtcgctcaggctggagtgtggttgtgcgatctctgctcactgcaacctctgcctcctgggttcaagtgattctcctgcctcagcctcctgagtagctgcgattataggcaggcaccccmacgcctagctaattttttttttttttttgtatttttggtacagacagggtttcaccatgttggccaggctggtctcaaactcctgacctcaagtcattcacctgcctgggcctcccaaagtgttgggattacaggcgtgagccaccatgcccagccttcacatagtcagtttctgcaatgagcctaaggcaagcacactgtcatagagactgtgttggtgtatggaagtatggtaaggtggcatgaaatatgtggt

SEQ ID NO: 860629 - DNA, 586 bp, Homo sapiens
aaacactaggaaaaaaaagtgtccagtgggtgtttgaaactagaaaacaagttgccttttgaagaattttgcctcaggttttatcattatgaagtgctgcccaattaattgcctaactgggtatgatgctgtatattgagaacttcacagacctagtcaatttcttttcttttctttcttttttttttttttctagatgaagactcactctgtcgctcaggctggagtgtggttgtgcgatctctgctcactgcaacctctgcctcctgggttcaagtgattctcctgcctcagcctcctgagtagctgcgattataggcaggcaccccaacgcctagctaattttttttttttttttgtatttttggtacagacagggtttcaccatgttggccaggctggtctcraactcctgacctcaagtcattcacctgcctgggcctcccaaagtgttgggattacaggcgtgagccaccatgcccagccttcacatagtcagtttctgcaatgagcctaaggcaagcacactgtcatagagactgtgttggtgtatggaagtatggtaaggtggcatgaaatatgtggt

SEQ ID NO: 860630 - DNA, 596 bp, Homo sapiens
gttgtgccttagagttttctcatattaaggaaatacctattcattcttatttcctcatatgtttttgttaggagtgggttttgaattttcttaaagcccactttgagaaattttttttgatcagcacctattgagataatcatttgatttttctccttagacctattaatagagcaaattatattaatagattttgtaagattawgccattctagcattcttggcataaaccccacagtcttaatttcaaagatttgatatacttacatggaagtgtagtaaatcatgtaagctagtatttttattacttgccaaatgaatgttttggtgaatgagtttagagggagagatcattatgggaagaaaaagccttttgaaagagcaaggaccactaccaactgtgacatcatgagcatcaaccacacaccatggcaatacttgccatagcttatttctactagctgtttatcttggggagtttacttacaccagagtcttcaactttcaatatttcatcagcataagttgtagtcgattgatcacaaactaaataaatgctagaaaatctcaaatgatggagcaattgctgcattatg

SEQ ID NO: 860631 - DNA, 596 bp, Homo sapiens
gttgtgccttagagttttctcatattaaggaaatacctattcattcttatttcctcatatgtttttgttaggagtgggttttgaattttcttaaagcccactttgagaaattttttttgatcagcacctattgagataatcatttgatttttctccttagacctattaatagagcaaattatattaatagattttgtaagattaagccattctagcattcttggcataaaccccacagtcttaatttcaaagatttgatatacttacatggaagtgtagtaaatcatgtaagctagtatttttattacttgccaaatgaatgttttggtgaatgagtttagagggagagatcattaygggaagaaaaagccttttgaaagagcaaggaccactaccaactgtgacatcatgagcatcaaccacacaccatggcaatacttgccatagcttatttctactagctgtttatcttggggagtttacttacaccagagtcttcaactttcaatatttcatcagcataagttgtagtcgattgatcacaaactaaataaatgctagaaaatctcaaatgatggagcaattgctgcattatg

SEQ ID NO: 860632 - DNA, 644 bp, Homo sapiens
gacttttatgcctatcattttctctctccctgggatgtttttatcttcagtttttagatatatacaaaacagaactttaaggaagccactgtctcagaggcctctgactagcaaatgcactattccatccgctgttgttattgcatagaagtgcctgaagattataaactggcagaggtcatgcttcttcctacaaagggagaagtacggttgtgtaaataagacagattaatttttggtgcttgagaagatgaaggaactaattattgagtatttgggaaaccatattagaacattaaaggcatatttaaaatgtccttttcaagtagtatttacttggcagataattagcagagcgtaaacaaaagagtgttaatggggcttccttaccccaggtggtaactaaatttattagaaaggctcagggaggctttgcactagtggagaggactgatcagaacagttgcttgtattayataaagagaaaattctgtcatcctgatggtttcttgcagacagtgaaagagaaattttaggaaatgtgtctcatcagtgaaatagccttggtattcacggttctctctcctggaagcagcttgtgagcaggtgtgataggtctgaggagcaggagctagattaccgaa

SEQ ID NO: 860633 - DNA, 500 bp, Homo sapiens
taggagtcatcagcatctacttgtatttaaagccctgataccaggtaagaagattgaggtgaaagggtataaataaagaagacatgagggccctgggtcttgtgacattcaggggttagatagaggaatgagactagtagagtcttagagcaactagctgggtaggaggaaaactaggagatggtggtgtcacaacagcatgaagaaggaagcatttcaagaagaatggaacctatgtcagatgctgctgagagtctgaatatggtaatattaaaggattgaccacttgatttaaccatgtggaggtaytgtttaccatgatttcttcctttagcctaagaatgcgctatgtctctcactggagacatccttgagttttctctaatgtcaagtcaggaaattataacacttctagtaagtagatatctattctgctttgtaattgtgtccaggaattagtgtaaaaataagtaatcttcatccttcaatgaatttctttg

SEQ ID NO: 860634 - DNA, 646 bp, Homo sapiens
tattagaatggtatctaaagtccttttcagctatgaaatttcacaagtctttcattagactttcatcatctgtgtatacacagaaaacaataatatcttgccttttgcaagttctatagtttttttattttaataatcatccaattcatctttcttaaaaaccagcctccttgaaattaaactgacatggattaatatctcacttatactctaatgacagaaaaaactttaaaatttttggaaagaaatcattaagaaaaatttacatgtaagagaacatatatattctatatcagtaaatatataggtgtgatacagatctgtgtctataattatatagacaactatatcaggatatataccttatcagaaaacaractgaaaatatatcaatacaataaaacttaaaatgtactaactagataaagccaagaactgatgactactgagaaataaataaaatggtattatgaatgaatttgcattgttctaactacatcacatatttccaatgacagcttcacattgatttaatattggccaggccaagactggaagaagaatgtgttgtcctggaccctagaaaaccacatctgattgttattgtgaattgtatttcatatggctgtaattattctgaattgtg

SEQ ID NO: 860635 - DNA, 646 bp, Homo sapiens
tattagaatggtatctaaagtccttttcagctatgaaatttcacaagtctttcattagactttcatcatctgtgtatacacagaaaacaataatatcttgccttttgcaagttctatagtttttttattttaataatcatccaattcatctttcttaaaaaccagcctccttgaaattaaactgacatggattaatatctcacttatactctaatgacagaaaaaactttaaaatttttggaaagaaatcattaagaaaaatttacatgtaagagaacatatatattctatatcagtaaatatataggtgtgatacagatctgtgtctataattatatagacaactatatcaggatatataccttatcagaaaacagactgaaaatayatcaatacaataaaacttaaaatgtactaactagataaagccaagaactgatgactactgagaaataaataaaatggtattatgaatgaatttgcattgttctaactacatcacatatttccaatgacagcttcacattgatttaatattggccaggccaagactggaagaagaatgtgttgtcctggaccctagaaaaccacatctgattgttattgtgaattgtatttcatatggctgtaattattctgaattgtg

SEQ ID NO: 860636 - DNA, 494 bp, Homo sapiens
ctgcagtcatttaatatggagtttcaccagtctatgtgtgaaagactaatgaaagggttaaagaattcacaatttcccaaaagaaaaaagaaatcatgaaataaatccactattagagtctaaatggtaatgcagcctcatttaaataacaaggaaattataactttccaaataataaaaagcttaaagcagcttaaaaatagctctgggtgaacacacgacaactaaaaacaaaatggaagaatggaagctcagttcctaccttaccactgaggaattttaagtyatcattcctgtaaacatttctccagtggctccacggaatttaaaaatgccttccaaattgccttcagttttcacaggccatctaaaagaaacatgattttcctttcttagcaaacatgataaagaccttgaggagatataagcaatttattgatgaggacaagaatggcttttaatttgccatgggggatttgagccagaagttactg

SEQ ID NO: 860637 - DNA, 647 bp, Homo sapiens
gtatgcatctgatgcgaaagttctcaaaaacacgtagtaaagattgatggaaacaaagggaactatggaccaatcacaaaatgtaagtgcagaattttatatcttttcactagtaattgataaaacaagtaggcacaaatttccgtaaggtaatacatgatttaagcaaaactgttaaccgcttgacataatgatatttatagaacttgaaatacagcaaacagaataaatattttctgctttcaagtgcacatggtatatttgccaagatagaccatargctgagtcagtataaacgtttctacaactatcttaaaaacatttatgaaactgtccaagacctgacatcatgcagaatatgttctctgaccaaaattgtattaaaatagaaattagtaacaataagatatccagaaaatgtgtgaatatttagatgttattgaaagcatactactaaataatatctggttcctttaaaatattaataaaattaataatcactagaaagactggtgaataatatagaatacacagattgccaatatcaggtttaaatgaggtaacattgcattagatgcttcaaatatcaaaagaataaaaagaaaatttttggaacaatgttttgacaattaaaaagctaatttaaa

SEQ ID NO: 860638 - DNA, 674 bp, Homo sapiens
agcacacaagcagattcatctcaaagataaataaagggaagctaattcaatatgtctataatatgattcatctagagacaatgaagcaaagtacatgaaatttggtggacaaaaggaatgtgatgactctagagttcgatgctgatttgccaaagaatggtaaaagaaaccaacaagaatttgttagacaaggactcagaaagcactactctacattagaacttgagcaacatatggaagagataccagttggcttagtattttatattcaagcaacaaatgactagaggaaagtaaaataaaaatcaaaattagaaataagcaaacaaacacatccaagtatatggaacaagraaaagaatgccagttcaaagcaaacaataagaaaaatgatgtgatttgtattgtcttctttccagtgaagccttcttttatagtagagggtatatagatagactgttaaagggcatataattttaatctaaagaattttatctcttatatatgttgatattttcaatcttctgtatgaattgctaatgaagctcagtagaacaaataaccttttgagacctttaaaagataaaacatataatgcagaaatggtagaaaaaatattttggtgagtaagaagcagaagaaaagatttcaaaatcattgaaggtatttagata

SEQ ID NO: 860639 - DNA, 604 bp, Homo sapiens
caaaatttgcatttcatacatctatattggtgcataatcctacagttaggtttattattttatgttcttaagcatgagtttcagagaaaatcaaacttaacagaaatggaggtaatcatttatctaatgctgtctatacgaagatgcaaactcctctaccactagaagattagaggatgtcttcttcagccttggctgcaaaaggaagatagctatatttaaggcttgttgtgattcaggtacagttaccctatccacttgtttgcattatcttctttaattttcacaactgtattttgaaatcagtattatcattcctcattacagataaggaaaatgaaatagaaaggttaaatactaaatacttggtaaacagtagraaaggacatcgttgattcaggagagactggtgagagagaaagagaaagaaagggtggagggaagaaaaagaataaaaggagataaagtaaatttgaaattttaacagaaagaaaaactgcagttcccaagatatcactagaaacttgtgagatgagagttctgactggtacataacactgacagaatctaaatttaaaatgaatggagaaatgaagaaaaacca

SEQ ID NO: 860640 - DNA, 584 bp, Homo sapiens
tcgtttctttttattcttttttctctaaacttcccttctcgcttcgtttcattcatttcatcttccatcactgataccctttcttccagttgatcgcgtcggctcctgaggcttctgcatttttcacgtagttctctagccttggctttcagctccatcagctcctttaagtacttctctgcattggttattctagttatacattygtctaattttttttcaaaggttttaaattctttgccattggtttgaatttcttcctgtagcttggagtagtttgatcgtctgaagccttcttctctcaactcgtgaaagtcattctccatccagctttgttccagtgctggtgaggaactgcattcctttggaggagaggcactctgctttttagagtttccagtttttctgctctgttttttccccatctttgtggttttatctacttttggtctttgatgatggtgacgtacagatgggtttttggtgtggatgtcctttctgtttgttagttttccttctaacagacaggaccctcagctgcaggtctgttggagtttgctagaggtccactccagaccctgttt

SEQ ID NO: 860641 - DNA, 584 bp, Homo sapiens
tcgtttctttttattcttttttctctaaacttcccttctcgcttcgtttcattcatttcatcttccatcactgataccctttcttccagttgatcgcgtcggctcctgaggcttctgcatttttcacgtagttctctagccttggctttcagctccatcagctcctttaagtacttctctgcattggttattctagttatacatttgtctaattttttttcaaaggttttaaattctttgccattggtttgaatttcttcctgtagctyggagtagtttgatcgtctgaagccttcttctctcaactcgtgaaagtcattctccatccagctttgttccagtgctggtgaggaactgcattcctttggaggagaggcactctgctttttagagtttccagtttttctgctctgttttttccccatctttgtggttttatctacttttggtctttgatgatggtgacgtacagatgggtttttggtgtggatgtcctttctgtttgttagttttccttctaacagacaggaccctcagctgcaggtctgttggagtttgctagaggtccactccagaccctgttt

SEQ ID NO: 860642 - DNA, 584 bp, Homo sapiens
tcgtttctttttattcttttttctctaaacttcccttctcgcttcgtttcattcatttcatcttccatcactgataccctttcttccagttgatcgcgtcggctcctgaggcttctgcatttttcacgtagttctctagccttggctttcagctccatcagctcctttaagtacttctctgcattggttattctagttatacatttgtctaattttttttcaaaggttttaaattctttgccattggtttgaatttcttcctgtagcttggagtagtttgatcgtctgaagccttcttctctcaactcktgaaagtcattctccatccagctttgttccagtgctggtgaggaactgcattcctttggaggagaggcactctgctttttagagtttccagtttttctgctctgttttttccccatctttgtggttttatctacttttggtctttgatgatggtgacgtacagatgggtttttggtgtggatgtcctttctgtttgttagttttccttctaacagacaggaccctcagctgcaggtctgttggagtttgctagaggtccactccagaccctgttt

SEQ ID NO: 860643 - DNA, 616 bp, Homo sapiens
gcccctactggggggtgcctcccagttaggctgctcgggggtcagagacccacttgaggaggcagtcttccggttctcagatctccacctgcatgctgggagagccactactctcttcaaagctgtcagacagggacatttaagtctgcagaggttactgctgtctttttgtttttctgtctgtgccctgcccccagaggtggagcctacagaggcaggcaggcctccttgagctgtggtgggttccacccatttcgagcttcccggccgctttgtttacctaagcaagcctgggcaatggcaggcgcccctccaccagcctcgctgctgccttgcagtttgatctcagactgctgtgctagcaatcatcgagactctgtgggcataggaccctcygagctaggtgcaggatataatctcctggtgcgccatttttttaaggctgttggaaaattgcagtattcgggtgggagtgacccgattttccaggtgccatctgtcacccctttgtttgactaggaaagggaactccctgaccccttgcgcttcccgagtgaggcaatgcctcgccctgcttcggctcgcccacggtgcgctgcacccactgtcctgcacc

SEQ ID NO: 860644 - DNA, 612 bp, Homo sapiens
atttgctaagcattactagtatcatctttggaacaactctttagaagaaaaaagtggcattattataagcaaaaagtggattttttatggctattatatatattaaaatttttctcaaattgtttctttttataatggtctatgttaaggcctcataatttattgaaaagttcaactgacataacctcaaaagtgctttaaaatgaattaagaaaaatgaaattaatgcacattatttgcatgtaatggatttagaaaagccaygctcatatagttttttatccattataagtcaatacagaccatcaatattttgaccagtgagctacaccatacagcaattccaggctcatttaccctggcacccaacatagttcaaattccactttccatggaaacatatttcaagttttactctccaagggaaaaccaacacatttgaatgttaacttcaaccaagccaaaccagaaaataaatttgctttagaaaattcagtattcttcaagtcaaacctgtatgacacaggaatatccctgatgttatagattatctctgtcatcactctacttacttaactaggaacaggaagagagggttgactgaaatcacat

SEQ ID NO: 860645 - DNA, 629 bp, Homo sapiens
tttttggttcctgatgttaagcaatctttaaagggcatctgtctttctttagttaataatgtcaaaaagacagcattgacatagttaacttcccaggatcctcagttctttagagatgcactaaatggctggtatcatcacttataaatgtgtattactctgatggagtttatattgaaaaataaagtttacgttttatgcttatcttttattttggagtttatattgaaaaataaagtttatttttatacttatcttttacttttattttgtcatgagctttttgaagccctcttgtatatgcctgtaaaatagaaaattctatatattgttgtaaaaatktattgcataactcttatatacgaacaggaatataccatcgaagtggggcacagaaatagaaagataaaatgcatagtacttttcaagagcttataatatatggtgggaggcagaaaaagctataaccattcaaatagttactaagttatttattgtgataactttggggatgcatgtgataagcacctactgtaggcagaataaaacatcacactagataatatcaaagaaataatgtgtgtgcaagaataatgcatggcaaaacacgttcaaagtcatgagagttg

SEQ ID NO: 860646 - DNA, 629 bp, Homo sapiens
tttttggttcctgatgttaagcaatctttaaagggcatctgtctttctttagttaataatgtcaaaaagacagcattgacatagttaacttcccaggatcctcagttctttagagatgcactaaatggctggtatcatcacttataaatgtgtattactctgatggagtttatattgaaaaataaagtttacgttttatgcttatcttttattttggagtttatattgaaaaataaagtttatttttatacttatcttttacttttattttgtcatgagctttttgaagccctcttgtatatgcctgtaaaatagaaaattctatatattgttgtaaaaatgtattgcataactcttatatacgaacaggaatatrccatcgaagtggggcacagaaatagaaagataaaatgcatagtacttttcaagagcttataatatatggtgggaggcagaaaaagctataaccattcaaatagttactaagttatttattgtgataactttggggatgcatgtgataagcacctactgtaggcagaataaaacatcacactagataatatcaaagaaataatgtgtgtgcaagaataatgcatggcaaaacacgttcaaagtcatgagagttg

SEQ ID NO: 860647 - DNA, 607 bp, Homo sapiens
ctcaaaaaaaaagaaagtaaagaaataaaagaatggctactccatagacaaagcagccccgagagctgctggttgcccatttttatggttatttcttgatatgctaaacaaagaatggattactcatacctcccctttttaagccatataaagtaacttcctgatattgccatggcatttgtaaactgtcacggcactggagggagtgtagcagtgaggacgaccagaggtcactcttgtygccatcttggttttcgtgggttttggccagcttctttactgcaacctgttttatcagcaaagtctttatgaccggtatcttgtgctgaccttttatctcattctgtgacttagaatgctttaacagtctgggaatgcagtcccataggtttcagcctcattttacccagcttctattcaagatggagttgctccagttcacatgcctgacatttcccccctcccttttataagagcacccttagtcctaagggttgctgaggaatgaagatccaccttctgtaagttcttcaggctgaacaggggtgacaatattcctgcctaactattagggtctcttgtattctgggtagagaggagctcagtc

SEQ ID NO: 860648 - DNA, 605 bp, Homo sapiens
caggttgcctgtaaaacctcccagagttgctgctcagtaggcagctgggaatgtggaaatgaagctaaggagaaaggaattgggcatgtggagaccacctgagtctgagtgacaggaaaagccctgggattttccaggaagaggcacaaagtaagaagagagctgtgactgtacccggggggagaaagcaccctttaaggggctggcagaggaaaaggaatcaaggagacgttgggggagagtcagagatgtgggggggacagtcagagaagaagaaaccagagaagagctggtaactaacgaaccaagggagtatattttcaattgagaaaatggccagcaaattcagatgcagcagaaggctgtaatggaaggactagtgagaagactccaaagataatttctggaatattcccatggtgacccttactgtttagcatggggtacaatttagagaattgstataacttctataaattgtttcctttttaaaatttttctgccagccttagagtaaaaagattcctagatatagagacaaaaaaattctatttctgtaattgacagccactgtcccatctctgaacagataaatccatggtaaa

SEQ ID NO: 860649 - DNA, 637 bp, Homo sapiens
agtgactatgctgcaaaacccaaacatgcacacaaaatagaatgaataaaggttacacataatctcactcaagtatgaattgctttttttggccaagaaataagtttagatcagattgggaatgacctctaagtaagttaccaaaaacactttttgtttttcagaactttatagatttcacaactgtgaatcagggatggtgaatctatttagcttttgtgctattgtcwatagcctattttactctcagagactcataatttcttcctccttgtattattgatctattagatcctaatccagtggttttcaatcaacaacatcagtaaggatctcctgggtggcaattttcaactcctaatatttattcagcaggtctagtgttaggtctaagagcctgcattttttaacaagctgggcaaccgacattcccacctgtgatcctgacgcaggtcttaggagttacactttaaaaatactttcctagactttgagttcacttttcactaaaccactaatatccctagttctaggtttaacctcttggatttagaaggttgggttttatttgtttttttttttttttttttttttgaaaattagaaacagctaactagcttttttattctcttgttct

SEQ ID NO: 860650 - DNA, 616 bp, Homo sapiens
tggcaatttcccttcatctctctctctttctgtctcgctctcctgcttccctgtgataagatgtgccttgcttccccttcatcttatgccatgactgtaagattctcaaggcctccccagccatgcagaattgtgagtcaattaaatctttttatttmtaagttacccagtctcaggtatgtctttatagcagtgtgaaaacagagtaaaacaccgtacatatgtacatttttaaagaactaaccttgacggtgtatgaaaactaatagcaagtgaatttaaaaaatacctattctttaaataggaaatcccatttatattcaaaataaaaaggaaaaacagtattaggaaagtaaatctgatagattcagagttcaaattattattgtaagatagggaaaaatttagacacttaaaatgcataattatttaaagttaaaatacttcacataaaccaacaacattgctcaataatgccaattaaaatattaaacattcttgaagcacagtttttgtggaggagtgtaagatttttcctaaaattacaatgcatgcgctatgatgagttctatcctccagagggcagtgcagtacaaactcagaggacatagaacac

SEQ ID NO: 860651 - DNA, 590 bp, Homo sapiens
taatccccacatgtggatggagggacctagtgggaggtgattggatcctgggggcggtttcccccatgctgttttcgtgatagtgagggaggtttcatgagatatgatgacttaaaagtggcaatttcccttcatctctctctctttctgtctcgctctcctgcttccctgtgataagatgtgccttgcttccccttcatcttatgccatgactgtaagattctcaaggcctccccagccatgcagaattgtgagtcaattaaatctttttatttataagttacccagtctcaggtatgtctttatagcagtgtgaaaacagagtaaaacaccgtacatatgtacatttttaaagaactaaccttgackgtgtatgaaaactaatagcaagtgaatttaaaaaatacctattctttaaataggaaatcccatttatattcaaaataaaaaggaaaaacagtattaggaaagtaaatctgatagattcagagttcaaattattattgtaagatagggaaaaatttagacacttaaaatgcataattatttaaagttaaaatacttcacataaaccaacaacattgctcaat

SEQ ID NO: 860652 - DNA, 612 bp, Homo sapiens
gttttgatttgcatttttctgataattagtgatgctgagcatttttccatatgcttgtttggccatttgcatgtcttcttttaagaatgtttattcatgtccttagcctagtttttgataggattgtttggtttttgcttgttgatttgagttccttgtagattctggatattagtcctttgttggatgtatagattgtgaaaatgttctttcactttgtgggttgtcygttaactctgctgatcatttcttttgctttgcagaaactttccagtttaatcaagtcccatctacttatctttgtttttgttgcatttactttttggttcttggtcatgaagtctttgtctaagacaatgtctagaaggaaggatttttctgatattactttgtagaatttatgtggtttcaggtcttagatttaagtctttgatccatcttgagttgatttttgtataaagtgagagatgaggatccagtttcattcttctacatgtggcttgccaattatcccagcaccatttgtggaatagggtgtcctttccccactttatgttttcacttgctttgttgaagatcatctggctgtaggtatttgactttatttctggg

SEQ ID NO: 860653 - DNA, 612 bp, Homo sapiens
gttttgatttgcatttttctgataattagtgatgctgagcatttttccatatgcttgtttggccatttgcatgtcttcttttaagaatgtttattcatgtccttagcctagtttttgataggattgtttggtttttgcttgttgatttgagttccttgtagattctggatattagtcctttgttggatgtatagattgtgaaaatgttctttcactttgtgggttgtccgttaactctgctgatcatttcttttgctttgcagaaactttccagtttaatcaagtcccatctacttatctttgtttytgttgcatttactttttggttcttggtcatgaagtctttgtctaagacaatgtctagaaggaaggatttttctgatattactttgtagaatttatgtggtttcaggtcttagatttaagtctttgatccatcttgagttgatttttgtataaagtgagagatgaggatccagtttcattcttctacatgtggcttgccaattatcccagcaccatttgtggaatagggtgtcctttccccactttatgttttcacttgctttgttgaagatcatctggctgtaggtatttgactttatttctggg

SEQ ID NO: 860654 - DNA, 579 bp, Homo sapiens
gccccatgcaagttcaaaatccagcggggcaatgaaatcttaaagctccaaactgatctcctttgactccatgtctcacatcgaggtcacactgatgcaagaggtgggctcctacagtcttcggtagctccacctctgtggctttgyagggtatagccctgcttctggctgctttcacatgctgacattgagtgtctgcagcttttccaggcacatagttcaagctgtaggtagatctaccattctggggtctggaggactgtggccctcttctcacagctccacggatgccccagtaggttctctgtgtggggtctccaacgccacatttcccttctgcactgccttagcagagggtttctgtgagggccctgcgccagcagcaaacgtctgcctgagcatccaggcatttccaaacatcctttgaaatctaggccaaggttcccaaacctcaattcttgacttctgtgtacccgtaggctcaacaccacatggacgctgccaagacttggcaacagcccaagctataccttggccccttttagtcatggctggagcagctgggatgcaggacactaa

SEQ ID NO: 860655 - DNA, 645 bp, Homo sapiens
tgtaccacatattctttatccagtctaccactgatgggcacctgggttgatttcatgtctttgctgttgcgaatagtgcagtgatgagtcaattcaagtgcatatatctttttggtagaataatttattttcctttgggtatatgccttgtaatgggattgctgggttgaatggtagctctgttttaggttctttgaaaaatctccagactgctttacacagtggctgaactaatttgtatttctactaacagtttataaattgtctcttttctctgcagccttgccagcatctgttgttttttgactttttaataataacaattggtgtgagatagtatctttgtgattttatggttttaatttgcatttctctgatgattaatgatgctaaacattttttcatatgtttgttggtcacattttttttttttttttgagacggagtcttgttctgtcgcccargctggagtgcagtggtgtgatctccgctcactgcaagctctgcctcccaggttcatgccattctcctgcctcagcctcccgagtagctgtgactacaggtgcccgccactgcgccctgctaattttttgtatttttagtgagatggggtttcaccatggtctcaatctcctgaccttgtga

SEQ ID NO: 860656 - DNA, 611 bp, Homo sapiens
tgttgcaaagccaagtatagatgagtggatttggagctaagagacaatagattgataagcagaacaaatggacataggtcttgggctatatgtctggaggaatgtgcttgctagagataggaaccttccaatttcagttgtaaattgaggagtgtgcccacaatcctgagtttcagactgacactgtgcagtccttctcaagtcagctggcctgggacctaagttgatgggcaatagtcagcagaagacagagaggtccatctccttaatgtgtctacaaatgtcaaaaataaggtgaaggtaggatggtaagaaacgcactctctcaaattccagggggtgttcctagcagatggggagctcatcctgagatacagacagtaaggagctrggctacttttcagcacatgagtcgtctcagcaggggtgattgtgtacctaaattgtctttggacctggcctccaaagatcttctcccaggtcctcaagaaagaggacttataagaaacaaagtaaatagactaaaaaaaaattttaatgtaagtatctgatgtgattaaagcaattcattggaaaggttaatctagaaatgacatgttggattagaagga

SEQ ID NO: 860657 - DNA, 653 bp, Homo sapiens
atgggtagcagatcttctaaaaatttttaagcagatttccaaagctttgcagtcatttacagttatcataatctataattttaataccagaatcagtcattttaatatgagattattcaagttcagttatctgcagcagcatctatttaatcagtagaaaatgggtrcatcccttgccatgccaaagaagaggagtggcagttttgatcatttggaggctgtgggacagaacaaatgcgaaattcagagaggacaagggaggcctgatttgaacactaaaatttccaaaatgaaagatggaacaatggtagagaggtattgtgatggagattagtatgtgggacacattaaaccactgcttaatttatgatcaaagtagacttcgactccccagcttttttcggccttattattaatactcagcatagcccaggcaacatagcagggagtaaatagtgtgatttttattttaagttgaaggctcattaattgtttgccaggttcaaatacaagatatctaaggaggtgaaggactggaaaaggttgggtggaaaaggttgggtagaaaagggagacggctgaattcagttaaacaaacagtaaagtgtatcactaacttactaatagctggttattttaaacacaattggtta

SEQ ID NO: 860658 - DNA, 612 bp, Homo sapiens
tgagcaaggaatggacatgctgcccaatggaagtcaatgagacttgatgagggacttggcagagatttctgagaaagtttttcatcacttttatataagagcttcaaggacaaatttctctttgtttccttgatcattgtcatggcacttgcaaggcagatgagtgacaagaaactccttcatttaatcaggagtgtttgcatcatttaacagatattatttgtttacagagaagattgaaaaccttgattttcatgggagtttaaatttattgtagtgttattttgtgtagcctctaggatcctttgattcagagaagcaagggttgatcttatgtagaaggccatcctacatgcacagacaarctaggcaaatcaaaccattataaaaattacacaattagtttatttatgtaaatagtgtttcatattctattctgcaaaaccttaaagattttatttacaatgttttgatttcccatttttattagcagataagctactaaatacactatttaagggtcataaataaatggttttcactgccatggtatgccagaaataaatatgaaattctccagaattcctaagtcaacttttgaatctaaaagtc

SEQ ID NO: 860659 - DNA, 584 bp, Homo sapiens
gaaagagagacaggaacagaagaaatatttgaagtaatactgactgaaaaattctccaaattaatgtcatacatgaaaccacaaatgtaggaggctcagagaacaccaggcaggataaatgccaaaaagacaacatctagacataccattttcaaactacacaaaatcaaagataaagaaaatcctgaaaaaaaaaagccagaggaaataaacactttacctatagaggagcaaaggtaggtattacatcgaacttctcagaaaccatgcaagcaagaaaaaagtagagtgaaatatttaaagcgttgagcaaaaaaacccaccaacctaraattttgtaccctgaaattttctttttctttttttttcttcaaaatttgcttaacttttattattattattattattattattattttattaaagttttagggtacatgtgcacattgtgcaggttagttacatatgtatacatatgccatgctggtgcgctgtacccaccaactcgtcatctagcattaggtatatctcccaatgctatccctccccccacgccccaccccacaactgtccccagagtgtga

SEQ ID NO: 860660 - DNA, 564 bp, Homo sapiens
aagttgacactcaatattaagcatcataaccttgaacaactggagggttaagggctctgatcctccatgcagtcaagaaacagcatatagctcttgactctcccaaaacttaactactaatagattactattgaccagaagacttaccgataacgttaaccaattaacatttattttgtgtgttatatgtattatgtactgtgttctttttttctttttttctttttttgagacagtctcaaataaggtgccatgagtgcagtggcacgatcacggctcactgcagcctggacctgccgggmtaaagtgatcctcccacctcaggctcccaagtagctgggactataaacgcacaccacagtgcccagctaatttttatttttttgtagagacatggtttcactatgttgcccaggctggtctcaaacttctgggcctaagagattcacctgctaggcctccaaaagtgctggaattacaggcagtaatcattgtgcctggcctatactgtgttcttataataaagtaaaccagagaaaagaaaatattattaagaaaatcaca

SEQ ID NO: 860661 - DNA, 564 bp, Homo sapiens
aagttgacactcaatattaagcatcataaccttgaacaactggagggttaagggctctgatcctccatgcagtcaagaaacagcatatagctcttgactctcccaaaacttaactactaatagattactattgaccagaagacttaccgataacgttaaccaattaacatttattttgtgtgttatatgtattatgtactgtgttctttttttctttttttctttttttgagacagtctcaaataaggtgccatgagtgcagtggcacgatcacggctcactgcagcctggacctgccgggctaaagtgatcctcccacctcaggctcccaagtagctgggactataaacgcacaccacagtgcccagmtaatttttatttttttgtagagacatggtttcactatgttgcccaggctggtctcaaacttctgggcctaagagattcacctgctaggcctccaaaagtgctggaattacaggcagtaatcattgtgcctggcctatactgtgttcttataataaagtaaaccagagaaaagaaaatattattaagaaaatcaca

SEQ ID NO: 860662 - DNA, 504 bp, Homo sapiens
tttgtttgcagccaaaggatataaaatcttaaaggtttacccaggaggatattagaagctgaattgcatgagcataaaacttacgtcaaagtattgccacaagtatcactagcaagtcatttcaataattcttcattaattcatttatccatttcttagacatatgttaagcaaatacattctgtcagttcctgtatttaaagttggtratataaatacaaataagattcataaagatagtcacatgataaaataatcattaagtttatatgtgaagtaactcaagaaagaacagaaaaaaaagaatatttatcttgatcctaggtggtaggaaagactgagcaaagtgtaaacattcctaaagttttaaaggatgactaggaattttccataaataatgaatgccaagagctcatctagctctaaaattctgtgatataaatgctttctgagtgaaataatttgttccttagatcactagttcttgttctctaagaaaagcaa

SEQ ID NO: 860663 - DNA, 552 bp, Homo sapiens
aataaagacataaaagcccccaaacataaaaaataacaactacacaaatatttcataatgctctatcaccattaataggaaactttactgtctgcttttaaattctacttttaaaaaaaaaactgaattaatcaaagagtggtgagtccacagatgtgcatctgtwtctacagaaaaatgatgattttattgttggtctttttcaataagttcaaaataatcacggtgattgagtgtcaattccatcttttttaacaaaaacacagagtcatgaaataggattagagctggaacagttcaaatgcaaagaagatattttctgctattcagatttgatattattgagaaacacttcactatgtgtatcacactcactttaaaatcaaaatgagttatacaaattaggctaacatatttatcattgttgacacagttaagatctcaatccatacggtataataattaaaatttgacatatgggaaattatagaaatatgacttctaaaattaattatttccctaatccagtaagtacaacataagtggaagaag

SEQ ID NO: 860664 - DNA, 766 bp, Homo sapiens
cctgctccttgctctttctacccaataaatacaaagggctgttgaggttcaggtggctgcccttgctcactagaagcagggagccctcttcttccctggaccccttctttaaaacagtttcttttgttttcagttttcatttctcattcgtcctccttcgctcagtcccgtagtaactgtggcaaaagagagctgggtgtggtggctcgtacctgtaatcctagcactttgggaggctgagactggaggacggatcacttaagcccagaaatccaaaaaaaaattatgcaggcatggtgaaacatgcctatagttccagctaattgggaagctaaggcaggaggatcacttgagtccaggaggtcaaggctgcagtgagcccagtccacatcactgtgcttcaacctgagtgacaaattaagacctggtctcaaaaaagtaaaataaaataaaagagaaagaagaaatgtgctaagatracagcaggtattgaatttaaaactttttttcaaataagttttggaaactatttttttgtgacagctacttataatgtctttcactatgctaatacattttgtgactttcaaacaaactttatatcatgtaagagctccaaacttatttggtaataaactgtcttttgtggaagcatctcttgaagtcagaaactggctgaacaagcttttgaaagctcttgttttctgtgctatttccatttggtcttgggaactgtaatatttgatagataaaattcaccctgcca

SEQ ID NO: 860665 - DNA, 667 bp, Homo sapiens
atgatagaatgatgcatgaaggatttctattcctttgggtatatactcagtattgggattgctgggtcgaatggtttttacatctttgaggaattgccatactgttttccataatggttgaacaaatttacacccccaaccaacagtgtaattctttccctttcttatcttcaaagactttccaatgtctaagataatcagattcagccttcattccaaaatttccattttgtccaactcccctttctaacaagagaaaagtaaaaataaagaacaaatgaacaaaaattactcattcactgtagctaatacctacagaataaaaatggatttaaataatttcccaaagagtttgttaaccccaaatattatataatgtctgatatctagtcagccttccctcctcactcaaagctggctackcacacaaataactaccctagacacatgaactcacctagacaacataaaagtagaacaaaagatttagtaaattacctactctgattttcttaacactgaaagaacttgtatgtaagtttatatgtaaatactaacctcttaataaatgacattaaaatacattgttagtgtgggagatattatcggtagactttttaatatgtgcttgggatgcttatggttgagccacaggcacttggcaatt

SEQ ID NO: 860666 - DNA, 667 bp, Homo sapiens
atgatagaatgatgcatgaaggatttctattcctttgggtatatactcagtattgggattgctgggtcgaatggtttttacatctttgaggaattgccatactgttttccataatggttgaacaaatttacacccccaaccaacagtgtaattctttccctttcttatcttcaaagactttccaatgtctaagataatcagattcagccttcattccaaaatttccattttgtccaactcccctttctaacaagagaaaagtaaaaataaagaacaaatgaacaaaaattactcattcactgtagctaatacctacagaataaaaatggatttaaataatttcccaaagagtttgttaaccccaaatattatataatgtctgatatctagtcagccttccctcctcactcaaagctggctactcacacaaataactaccctagacacatgaactcacctagacaacataaaagtagaacaaaagatttagtaaattacctactctgattttcttaacactgaaagaacttgkatgtaagtttatatgtaaatactaacctcttaataaatgacattaaaatacattgttagtgtgggagatattatcggtagactttttaatatgtgcttgggatgcttatggttgagccacaggcacttggcaatt

SEQ ID NO: 860667 - DNA, 620 bp, Homo sapiens
agggatgcattcaaaccatagcacccctaaatcttatactgttaaatttagattaccattagacatagaaataaatataaattgcatttcctgtctaatgagtggtttaacagacatcacctcatttgaattttatgacaacacaactcacaacctaattgtttgctatctatgatttcatctcttcctcattattcttttattcctcttattctctatagcactactgaatattctataataatcctgcaaatacacatgatacccactgtaattgatctctaagatattatctccacaatatatatgtccacaatacattgttaatgaaaagttcaaggtaaagaacaggaatcatagtataaaaccatagagtatagtgtgttccagtataaaaagaagaaaacataacctgtaagtatatatatgtatatatataactgtaaamaaatagccatgtgttgaaataggataaatttttgctttctattttaatatttgtataatctaagttcttttaaaaaaatagaaaaacaaaagtatgaaaaaatagcaaaaaggaaggctagagtagggctaacatattcataaaatatcgtaggcacagtgcctagggcctg

SEQ ID NO: 860668 - DNA, 627 bp, Homo sapiens
gtctctaagaacttcctttatgaacctgagtgctcccttgttgagtgcatatatatttacgataattaggtcttcttgttgaattgaaaactttatcattatgtaatgtccttctttagctttttttatcattgttggtttaaattctattttgtttgaaattagggggaaaaaccctgctgttttttcttttccttggtaggtttttctctatcccttaactttgaaactatgaatgtcattgcatctgagatgggtctcttgaagacagcataccattaggtcttgcttttttttttaatccaacttgtcatcccgtgtcttttaatyggggcatttagcccatttacattcaaggttaatatttatatatgcagatttgattctgtcattatgttgttagctgggttttataaagacttgatttgttgttgctttatagtgttaatggtctatgtatttaagtgtttttgtttgtttttgttttgttgtggtggctggtaatggtcattcttttccatattttacagtcctttagagatctcttgtaaggcagatctagtggtaataaattccgttagcatttgcctgtctgaaaagaatcttatttctcatttgtttacgaag

SEQ ID NO: 860669 - DNA, 651 bp, Homo sapiens
caaaccaaaaaaaaactgcacctattatttccctcctcctcccacattttgaatttttgatgctatgatttacatttttacattacctatctcctaagtatttgttgtagttattattttaatggtattttttagacttcttactaaacatagaagtggtttaaacactatgattacaatattagtatagcaaycacacaatcactttaacattttttatttttgttttaaagaactccctttagcattccttgtaaaactggtctcataggaataaattccctcaactttgttttttgtctaggaaaatctttacctttccttcatttctgatgatttactttgttggttaaattactactgtttggcttcatttttttaaattcagcattctgaatatattgttcctctccctcctggcctgcataatttctgctaagatgtatgctacaagaaatatttgatctcatttatatattatttgctttttctgttgtcatgaccctctctttgtctttggcctttcagagtttgattataatacgtcctggggtgtttttatttgagttgaatctgattggtgacttaaccttttagtccctagatagctttaaattttttatttgatttctggattgattctctgtcttt

SEQ ID NO: 860670 - DNA, 644 bp, Homo sapiens
gcctgggaaatttctcatacaaactgaaacaccaatgcttgttttgattctgagcatttgagctcaattactgagcaaatctgatacagaaaatctgtcattcttactgctacctattttcaatagaatgattcagaaactgacccaatcctgtgactgtattgaaagaggcttatcaattgatcaggtgtggcaaagaccaccttcgatgatatgattaagacagycttttctgtagatcatgaaatataatccaaaactaatacactacatcatagcgctatagctaccaggcccaaatctcctcgctttagccccgaggcaagttttgaacattttcaaaggaagcctgtagacattaggtgtaagggaacttaatgtactacagggagtcaaagtaggattgcccccgcagaagacaagtaaactgatattggtagaagaaataggagtttgccaaattaaccagagagaatagggacatagagatgctgcctagaaattactttccatcttaactccaacaactaccctatgtgaactcagttacaatacagctagcttattttgtattgcctgaatatgctttgtgccgatactaatgatatggaccagaccttatcttaagctatcaaatttttgag

SEQ ID NO: 860671 - DNA, 645 bp, Homo sapiens
atgtataatcacaacaaccataggatttaacattaaattatctagacccataatatatgtgaattaaaagaatgtagttttacacaaaggaatggggatcactcattttcaaaggactcaaataatggaggataagaagtattctttattcccccattggttttaatcttgttctgtcagtatttcctaaataacrtatagataatcttgttctctgtcttttggttacaaacattgtttttaccattgctgacacttgtgctttaaactgtcttttagatatgtgttgtatttatctagaaaacagtgttttgcctgtcatttgacatttaaaataactgagagtcaactcacagttttaattagaattgtcatattaatatatgctatccttgacacaagctgttagcgttaatttatttgtgtacctaaacgataaattgaaaagaaaattgcaaagcaatccaaagcatggaggttgtttgccggtttcattcattgtataattattgagattacatatattgagagttgcaaaaggctgataatggacatataaatattaatggaaaagagaaaatactattcttcataaaatattaccataaataatataaaacaccagggaaaaaaaggaacactgtg

SEQ ID NO: 860672 - DNA, 632 bp, Homo sapiens
aaattaaggtcacatttttttattaaataccaaattgtaatggactttcagctatctctgcccaaatttgaccttaaatcactctctttagatgttcagggaagagtgacttcaaaaagtcacagataattagttgtgctttagagaggagaggtaagaatgaatgactaactttctggttccaatcctaaattatataaaattgttagaagggaatattcttgccacaattttgccttgaaaaataaagtggtraaaagggatctttcaatcctctttctaattccctgtttgaaatctataaagaaacaacttttttttaatttagggatataacactttgagagaataaatgggttggtatatcatattattcaaaagcaatgatacacaaaaataatcagttctcccaatattataccatagctccaatgcaattcaaatgaaattctgggggagtcacaaaattatttgaaaaaagatcaataggtgactatataaaaagtaatttataaataaaagactattgtgaagaatatggatttttaaaatatctgactaaatcataaaggcataatacataatatagagtagcacagtccacaaatcagcaacaataacaatggattgga

SEQ ID NO: 860673 - DNA, 632 bp, Homo sapiens
aaattaaggtcacatttttttattaaataccaaattgtaatggactttcagctatctctgcccaaatttgaccttaaatcactctctttagatgttcagggaagagtgacttcaaaaagtcacagataattagttgtgctttagagaggagaggtaagaatgaatgactaactttctggttccaatcctaaattatataaaattgttagaagggaatattcttgccacaattttgccttgaaaaataaagtggtgaaaagggatctttcaatcctctttctaattccctgtttgaaatctataaagaaacaacttttttttaatttagggatataacactttgagagaataaatgggttggtatatcatattattcaaaagcaatgatacacaaaaataatcagttctcccaatattataccatagctccaatgcaattcaaatgaaattytgggggagtcacaaaattatttgaaaaaagatcaataggtgactatataaaaagtaatttataaataaaagactattgtgaagaatatggatttttaaaatatctgactaaatcataaaggcataatacataatatagagtagcacagtccacaaatcagcaacaataacaatggattgga

SEQ ID NO: 860674 - DNA, 609 bp, Homo sapiens
aagtaaatgctgcaaatggctatgtatggattctgatgacatcagtgtattgcattgtattatactttgctgattttaccctcagaaaaaaattctgagacactttaccctttttttttcctgagggagagatgaactatctttgaagtggctccactcaaatgtactaagcagacatagatcacacataagagataagagttaaaaaatggtccaggaaaaatagtgaactgcttgtttcattaatatgatacactactggtgagtcaaagacactcacactctagacttcatgttgttattatasagaagtaaagagaatccctcttgatcaggtgagacaatgaagtagtcatgaaatgtctcctgatgagatgttattggaaaataccctactgagacataaagaattgcaatgccatgaaattctttaccttaacagggatgaacctttgaagacttgcaaggcttttgaggtctttttgctttgggaaaggatttagttaaggagcaattctagaaaaaccagtgtcctagcagaattaagattttggaattttaaatacatatctgttattagaaatccacaagtatcattaaaataatttg

SEQ ID NO: 860675 - DNA, 609 bp, Homo sapiens
aagtaaatgctgcaaatggctatgtatggattctgatgacatcagtgtattgcattgtattatactttgctgattttaccctcagaaaaaaattctgagacactttaccctttttttttcctgagggagagatgaactatctttgaagtggctccactcaaatgtactaagcagacatagatcacacataagagataagagttaaaaaatggtccaggaaaaatagtgaactgcttgtttcattaatatgatacactactggtgagtcaaagacactcacactctagacttcatgttgttattatagagaagtaaagagaatccctcttgatcaggtgagacaatgaagtagtcatgaaatgtctcctgatgagatgttattggaaaataccctactgagacataaagaattgcaatgccatgaaattctttaccttaacagggatgaacctttgaagayttgcaaggcttttgaggtctttttgctttgggaaaggatttagttaaggagcaattctagaaaaaccagtgtcctagcagaattaagattttggaattttaaatacatatctgttattagaaatccacaagtatcattaaaataatttg

SEQ ID NO: 860676 - DNA, 583 bp, Homo sapiens
gggacaatactttgaggcttgagatactgtctactggggtgcagtatatgcactttatcaatggctaggatttagggctgtgtcccaacagcttgaacccatgggtccacgacgtaaaaggtagaaataagattcattcctcttactatcactgccagtgatctacttgatgagtttctttgtattcttaaaaccttttaccctctcaatctggaggcctaattcccaygggtaaacacttatgtcaggaaacacagaaaagtttctactaaagtagaagctgcagaaaacacatagccacctgtgcacttcatgccagcctaccagtgggcaaaggaaaacattggtataatgataaaataatcatgagaatctaggtttgccattaaaccatgggagaaaggagaagtatttcttaaacccaggtgatccctgggttgcttccaatgtatccataccaagtaatcatgatgaaaacaagtagagaaaatatggttccaaatcaaggagactaaaatcttaggtaccttggggaagaaaatctgagttatgctatcaggagaataactcaagccagccaaat

SEQ ID NO: 860677 - DNA, 583 bp, Homo sapiens
gggacaatactttgaggcttgagatactgtctactggggtgcagtatatgcactttatcaatggctaggatttagggctgtgtcccaacagcttgaacccatgggtccacgacgtaaaaggtagaaataagattcattcctcttactatcactgccagtgatctacttgatgagtttctttgtattcttaaaaccttttaccctctcaatctggaggcctaattcccacgggtaaacacttatgtcaggaaacacagaaaagtttctactaaagtagaagctgcagmaaacacatagccacctgtgcacttcatgccagcctaccagtgggcaaaggaaaacattggtataatgataaaataatcatgagaatctaggtttgccattaaaccatgggagaaaggagaagtatttcttaaacccaggtgatccctgggttgcttccaatgtatccataccaagtaatcatgatgaaaacaagtagagaaaatatggttccaaatcaaggagactaaaatcttaggtaccttggggaagaaaatctgagttatgctatcaggagaataactcaagccagccaaat

SEQ ID NO: 860678 - DNA, 583 bp, Homo sapiens
gggacaatactttgaggcttgagatactgtctactggggtgcagtatatgcactttatcaatggctaggatttagggctgtgtcccaacagcttgaacccatgggtccacgacgtaaaaggtagaaataagattcattcctcttactatcactgccagtgatctacttgatgagtttctttgtattcttaaaaccttttaccctctcaatctggaggcctaattcccacgggtaaacacttatgtcaggaaacacagaaaagtttctactaaagtagaagctgcagaaaacacatagccayctgtgcacttcatgccagcctaccagtgggcaaaggaaaacattggtataatgataaaataatcatgagaatctaggtttgccattaaaccatgggagaaaggagaagtatttcttaaacccaggtgatccctgggttgcttccaatgtatccataccaagtaatcatgatgaaaacaagtagagaaaatatggttccaaatcaaggagactaaaatcttaggtaccttggggaagaaaatctgagttatgctatcaggagaataactcaagccagccaaat

SEQ ID NO: 860679 - DNA, 621 bp, Homo sapiens
tcgcaaccggggctatgtgcttatttcagcatttcaatgcctgtcattacttattgcctctaggtgtggagtaggggggatgcctgaccctgcacaccagctgtgtagatgtgggagaggggtttcttccagatgcagactctcagtaatatcccttgtttctgcctccatggctcactcctgccctccactgatctggccactctctcagctcatcccactgatgacaccacgacgctctctgagagaccatccccaagcacagacgtccagacagacccccagaccctcaagccatctggtyagtaactgcctccccagactggaaacaggctattttctgttcactgtgtatttccagcacctggagtacagcccagcacagaatagttctcagtaaagacgtgatgggaaagtaaatgacttcaagccaggcagagggtgggcacatgataaatgtctgaatagataagtgaatgcataaattattgctgcatacaaaccacctaaaaactcagtggcttaaaaggataaccatttatttagctctcatttctgcaatttggaaatctagggtgtgctcagctggctggttcttctggtttcagctggacttactca

SEQ ID NO: 860680 - DNA, 637 bp, Homo sapiens
taggtctcgaaaatgggctcaacatattcagtaaaccatgttgtcaacagatgtactgtcatcgggctttgttgcttcattatagagcataagcagagtagatttagcataattcttaagggccctaggattgttgaaatggtacgtgagtactggcttcaacttgagcaaggttgccacaaaccttcaatttgtaaaaaatgcattatcagcaaagtgcagtcaataagaatgagacacgcctgtattttaaaaatctcaatttctggttatttgctgcaagaatatatgaatggaattgatttttgcataytaatcttgtatctgccaccttactaaactcatatattagtcatagtggtcatcttgcatgttcatcagattttctacatagataaccatgtcttctgcaaataaagacagttttattttataaaataaaactctcttctcaatatatgttacttagacttgctctcacaggagattggggtttctgtttacactgcataggttgtctagaagatcccatatctaaaacatggatcatgaaggtcctggattggttcactgggtcaccctgtacaagcaaaagtgcagcttctccagaggcatgtaccttatacaggatacatag

SEQ ID NO: 860681 - DNA, 575 bp, Homo sapiens
gtgggctgtggtaggtgcaccagggaagggaccatacagaggaggctggtctcaagtcctagggtgcctgggatggccctattgaaatgctgcagcagctcttgtgcaggcagggatctgtatggacagctgggtggacacaggtgcctactgacctcccagatccttcagcagagctcagccctgagtgacagcccaaggcagacctggctacctcagcctctggctcacagccctcagccagagccytgagaggcctgggatctcaaagctgcaaggtgggaggccagaggagagaagcccggagctggtagtgatgctggctgagtgaaaattgcacatttcccaacagtgtgatgctccctatccagcctgggcttttggcagacttctgtgctttgtggaggaagctggctcagattcctcccctccctgtgcagtttgtgtgtcaaggtgtacttgtcacacccaactcaggatatcttgcatcactttgtgggtccttgtcccccagagctgggactgctgagttttagccctaagctcttgctcccatcttagcaagtcagggccca

SEQ ID NO: 860682 - DNA, 645 bp, Homo sapiens
tacatcctggaaagttaacacatagaaataaaagttctgtacatagaaacaggttcaagaacctatgttcttgaacaaaatgaattttaagcgatagagaacatcacagagtatgtacaccaaaggaaattaagcagagattataaattttagaatagaattgaaatagaaataaaattcaattagagatagaattaaatcaaaataaaattgtttcagcagccttagargcatttttactattttactgattgagaaaaacaagatgcagaaagcaggtatgatatgatcccgtgagtttggaaaacaatgataatgccttcattatgtcacatgtattttatttcattgaatattatatgaacatcaggaaaaatgtaagacaacaaatcctagattatcaacataggtaacagagaggaggggagcccaagcaaacataagaaaaaagttctgtactgaaacacatctattccattctactcatctgtaaagttaaagtgtgaatattggaaagtaatacaacattaaggacactaaaagaaagaatagcccctattcagatctggtattgatagagcctgaggccaatttggcagcagacagagacacaagactgtttgctgcatatgggtcctgggtgag

SEQ ID NO: 860683 - DNA, 594 bp, Homo sapiens
ccattcaaaaaaccaacgaaacaagaagctgttttttttgtgaaaaaaaaattagtaaaatagactgctagctagactaataaagaaaaaaaaagaagaatcaaatagacacaatcagaaatgataaaggggatatcaccactgaccccaccgaaatacaagaagcaaccatcggagaatactgtaaatgcctctatgcacatacactggaaaatctagaaaaattgataaattcctggacacatacaccctcccaagactgaaccaggaaaaaactgaacacctgaatagaccaataacgagttctgaaattgactcagcaaaaaatagcctmcaaccaaaaaaaaaaaagaaaaagaaagcccagtactagatggatttagagctgaattctaccagaggtacaaataagagctggtaccatttctactgaaactactcaaaacaattgaaaagaagggactcctccctaactcattttatgaagccagcatcatcctgataccaaaatctggcagagatacaacaaaaaaagaaaacttcaggccaatatccctgatgaacatcaatgggaaaatcctcaaaaaaaaaaaa

SEQ ID NO: 860684 - DNA, 594 bp, Homo sapiens
ccattcaaaaaaccaacgaaacaagaagctgttttttttgtgaaaaaaaaattagtaaaatagactgctagctagactaataaagaaaaaaaaagaagaatcaaatagacacaatcagaaatgataaaggggatatcaccactgaccccaccgaaatacaagaagcaaccatcggagaatactgtaaatgcctctatgcacatacactggaaaatctagaaaaattgataaattcctggacacatacaccctcccaagactgaaccaggaaaaaactgaacacctgaatagaccaataacgagttctgaaattgactcagcaaaaaatagcctacamccaaaaaaaaaaaagaaaaagaaagcccagtactagatggatttagagctgaattctaccagaggtacaaataagagctggtaccatttctactgaaactactcaaaacaattgaaaagaagggactcctccctaactcattttatgaagccagcatcatcctgataccaaaatctggcagagatacaacaaaaaaagaaaacttcaggccaatatccctgatgaacatcaatgggaaaatcctcaaaaaaaaaaaa

SEQ ID NO: 860685 - DNA, 700 bp, Homo sapiens
tggcttatgaaacatgtcggttagatgtactaaatccacggtggtaacttctaacccccaaatgacaaactacgtatagttgtataaattggggtcctggtcactcaagaattttaaagagacacaggtgataaatcaaaattaccctttacaaaggtgcaacttgccatgatttatggccattctaccaaagggctgaggaactgccaacaaaatactcacctacccacccccaacattcactagagatctctatagaaccacaaascagcatgtttaacctccatattgggaaagtttctaaaacctgtccaaacaacaacaacaacaacaacaacaacaacaacaaaacccagaatcaacagaaacaaacaattgtcataagctactggagaaaagactcataggttttgtaaaggaaaataatccctgactaaaagtatttatttttttttgaggaggtcaatataactaaggaaaataaactagctagagaatcataataaatatttagatcttaaatagttttaaaactgtattctccaggactctaggatacagaggtacttcaggaattctgcaaatacttaatttgaaaatcatttttaaaacactttaaaaaactgtagtgaaagttaagaactatcaatacacacacacctgactatgttagatactaaatatatattgttgaagacca

SEQ ID NO: 860686 - DNA, 700 bp, Homo sapiens
tggcttatgaaacatgtcggttagatgtactaaatccacggtggtaacttctaacccccaaatgacaaactacgtatagttgtataaattggggtcctggtcactcaagaattttaaagagacacaggtgataaatcaaaattaccctttacaaaggtgcaacttgccatgatttatggccattctaccaaagggctgaggaactgccaacaaaatactcacctacccacccccaacattcactagagatctctatagaaccacaaaccagcatgtttaacctccatattgggaaagtttctaaaacctgtccaaacaacaacaacaacaacaacaacaacaacaacaamacccagaatcaacagaaacaaacaattgtcataagctactggagaaaagactcataggttttgtaaaggaaaataatccctgactaaaagtatttatttttttttgaggaggtcaatataactaaggaaaataaactagctagagaatcataataaatatttagatcttaaatagttttaaaactgtattctccaggactctaggatacagaggtacttcaggaattctgcaaatacttaatttgaaaatcatttttaaaacactttaaaaaactgtagtgaaagttaagaactatcaatacacacacacctgactatgttagatactaaatatatattgttgaagacca

SEQ ID NO: 860687 - DNA, 700 bp, Homo sapiens
tggcttatgaaacatgtcggttagatgtactaaatccacggtggtaacttctaacccccaaatgacaaactacgtatagttgtataaattggggtcctggtcactcaagaattttaaagagacacaggtgataaatcaaaattaccctttacaaaggtgcaacttgccatgatttatggccattctaccaaagggctgaggaactgccaacaaaatactcacctacccacccccaacattcactagagatctctatagaaccacaaaccagcatgtttaacctccatattgggaaagtttctaaaacctgtccaaacaacaacaacaacaacaacaacaacaacaacaaaacccagaatcaacagaaacaaacaattgtcataagctactggagaaaagactcataggttttgtaarggaaaataatccctgactaaaagtatttatttttttttgaggaggtcaatataactaaggaaaataaactagctagagaatcataataaatatttagatcttaaatagttttaaaactgtattctccaggactctaggatacagaggtacttcaggaattctgcaaatacttaatttgaaaatcatttttaaaacactttaaaaaactgtagtgaaagttaagaactatcaatacacacacacctgactatgttagatactaaatatatattgttgaagacca

SEQ ID NO: 860688 - DNA, 608 bp, Homo sapiens
aaaagtctgaacactaaagcttaggtgagcttcctaagttggcaatactccatgtgtactgatacatattgatgctaggagggtaacatgtcctgaggataatggaagcttcatgattggaaccttcctgaactctgccatatgggactattcttttggctagttgtaatttgtatcctttcccagtaatagatgaatacaataaatttataatatacatacaataaacatataatatacaaacaataaaaacaataagattaacaaaatagggagaagaaaaaagaggaagccaaaacacaacactattcagtacagttgctgtcaytggctgtacaatttggtttggtgtattctgtcagcacagaaatttatatttacgtaaggtttcataatttacattttgactacaaaacacttttactcataatcacatttattccttatgcccacttgtaaaggaagtacttttcttagccctattttacacttgaggaaatttaagttcagagatactaagtaatttattcaaggtccctggcagtaccagaactgtgaagataggcattctgattccaaagtttgtattctttatactgacacactaa

SEQ ID NO: 860689 - DNA, 630 bp, Homo sapiens
tgagcccatgtggggagctttgtacaaagtatattaaacctattctctcatcaatgcctgacaatgcaaatatattaggacaggtatagattctattaccactgcctcttagagaacatttcagagatgtgtggctaatagaaaataaaatacgatgtgacaggtaaagtcaggatgattaaaatttggattattaaaatgacgtcttgacacaatatccacaatggcttcgttatgaaagttcagctttctgttcataatactttatagcacccctctgggcagaattaaatgtataagattttccttccttatgaacatgttgctgctaagcagctaacatagtatctgctgcgaagtgagaatatatttttaattataaagaaagagatatgaactacattaggtccttactatataccagatgataacttttacttcytaaaagaaatacattaagctgacttaatgctgaacattcaggatcatgcaatcaatattattcaaaaaagagagatttcaactaatgcttaaccttggaattaagttggctaaacaaatgttaactgtgagctatcacacctgaccaaccaacatgagttagcactccccctctttttttttactaaa

SEQ ID NO: 860690 - DNA, 591 bp, Homo sapiens
aagtttagtctttgaaaagatctacaaaattgagaaattagctagactcaccaaacaaaacagaagaatcaaataactaaaaccaggacagaaataaaaaaatgaaagctctgaagattaaaaatacagtatctaaatttaaaagaatactagatgggattaagaacagattagacactgcagaaaaagatcagtaaacttaaagactaagcmacagaagccattgaaaatgaagcatagagagaaaaagactgaaaataagtgaacagagcattggaactcccaaaggacataaaggcaaaaaataatttgaagaaattatgaccaaaaatttaccaatttattgaaaattataaacttgataattcaaaaaagtcaacaaacctcaaacaagacaaacacagtgaaaaccatactaaggcataccataacctaattcctttaaaccagtgataaagagaaaatgctaaaggcagccaaattaaaggcatattatatagcagaacaaaggtaagaataattacagatatatcatcagaaactacactattcaaaagacaggggagtgacatatttgaagtgatgaaagaa

SEQ ID NO: 860691 - DNA, 691 bp, Homo sapiens
tgtgacaggagaaacttctagaggatagggaattccaaataagagtgtctgccttaggcttgcagtcaatgggaccatttagcctggcatcccccacagtgctcagctccacctcttacacttggtcacaccacagaagatgtttatggaaggaacatcaatttgagtgtccaaagccctggcagatggagtagaaactactcactttctctcagacaaccaggaccacagaccttcacayttatacagcaatgaggccactaagcactggccaaatgtgaaatgtaatcgtatccctcaactgtgacctgcttcaattgctactgatggagcattcattagtaacctagggctcatttcacttagaatgatatcatattgttttctgccatgttaccaacgagaaagccttattctctcccaattttctagaacttgtttatggctacagttgcaaaaacccaacagggcaaaaatgttgtctaggaactgcggcaaaaactgagttgttttcaagtggccacatgctgtctaaacttccgaatcaatttcctccttaactttctatttagagcaatcaaagtcctaaatcatccaagaaagattagatgctttcccagtgtgtgtgttttgtttttgttcttgtttgtttgtttgtttgtttgagacagggtctcactctgtcacccag

SEQ ID NO: 860692 - DNA, 646 bp, Homo sapiens
ctgtctctaaaaaaaaatttaaaaattagccagacaaggtggcacatgcctgtagtcccaactacttgggaagctgagctgggaagatcacttgagcctgggaggttgagggttgaggctgcagtgagccatgatcatgccactgtactatagcctgggtgacagagccataccctgtctccccttaccccctgcaaaaaataaataaataacctgaaatttggattttttttttaaccaagtccaagtgcccttccttcccagtttcagggattcmgaagagtctgattgttatacaaggggttctgtcttagaaaaacctgaaggctgacatgtgtctaaggtctgcactttctatagcaagcaaggcactcccttctctcctcacagactcatcaagtcccaagcaacacataagatgcccccacccaagccagctatttttaacaatgtcctgtccacagcctgagctaaccaagtggatcagatgctacagctaagggcaggggaacctctcctccgtggtggccactgatccactaaacaaatgccaattacaggtcacttgcgattatcaaaagtgacttctattggcagtgactgcttctcaaggaagggcaaggtgtggggccctattattacctct

SEQ ID NO: 860693 - DNA, 598 bp, Homo sapiens
tgtccgttctcagaaaactagatttgtcattctgttgctgggatcatagaatcacccagtcatcagctgctgactgcctatctgctttgacagggaaggaaattgaggatgttagtagagattatttaggatcactcagtgaatgtaytgaaaaaacaaaacaaaacacaagaagtgctttggcagatttgaatttagaggaagataagaagaccaagtaccaaaagcaccaaagcttcgttatcaagtacctttgtatgaaaaggattgcactgcatcatttcttctgtatatccatgagcatacacattcttttctttttcatcagtcatggcataaactatgaaatgatcaaatgatcaaattggcatttatagctttccaaactatattactgtattcctaagtaccagcatgcatgtgtatatgcgtgtgcacacacatagaagtatatatgtgtgcagatatgtgtttgtattttaggctgagccatgtgaaatgccttcttgtagatcaaaaatggtcaaatattattaatttcatatggtttaattgaaagtattgtaggtgattacagtgttctgagttttgatcattg

SEQ ID NO: 860694 - DNA, 627 bp, Homo sapiens
ttcctacagtgtttgcctgtagaaatatatagtctagtctagcatatggcacaatatatcagcacaaataatatggtgttaaattatttaataaagatacgtataagatgttatggaaacacagaggagggacatctaaccctgactggaggttcagatatgggttcctggagacagtaatttatgagctgagttttaaaggagcagtaggagttaacattagccaggtgaagaaggagtagagggagatcattcttctaggcagacagggcagcatgtgcagtgaagccctggctgaaaggcagatctcttgacaactgggtgtaagaacatggcatgttcagagaacagccagtagttgagtatggctgggattgagtgtctrtgaggtatgcagtaatatgagacttgagaggaaagcagaagttatatagtgaatgttgttttttgctcagctaagaagtttgggttttataagcaatgatagcggtatttattgagacttggtattgctaggtagtattatgtacactttatatgcattatataatttaatcctcacaaccacacaacacaatattattatcactatcttcagacagagaaactgaaacacagaaagattac

SEQ ID NO: 860695 - DNA, 477 bp, Homo sapiens
ttctagttttgtcaaatggctcagattattttaagcttcctctttagataaaatgcagtttgactcaccggttttttttcttttcataaaggctactgtgagggagtagggcatcctcctgcaacaagcagcggagagagaaatcagtccccagccctgaccctcggrtctctggtaaaacactcagtcatgagacacgagacctctggccacatgccctgatccatggactcagacagaaagtcctctcctgcatcttggggtccagaagaggccaggaagcaaaatctatacaaggaatgctggtttcttgccccaggatctaggtaaacattgaataaaattatttaatctgccatttaagcaagaagtatttctaaagccacatgctggtgaccaggcagagaagatggctaagctgggaaagaactggtgtgtcagtaccacgtccatctacagttaatactcactggcata

SEQ ID NO: 860696 - DNA, 665 bp, Homo sapiens
actacaagctcctctgcacccatatctaaggctcagacatgattttgtggcatgatttgccacagtatgactatttcagtctctcagagcctcagaactaaattcccaggacagaaaatatgatggaattcgtttccttacaatttgtgcccacccatctgcttatggaagcagacactggggcagaaatatggacagctggtcctcctcccagcaggagctagggatcaggagcaagtccaaagaagaagaggggcattcacaaacaaatccaagtgtgtattaattttaataacagaaggacaaaagagagccaagttttatttgcaacttatgtttttccaacacagatattagcagctacctgaaagttaataattcaggaggaaatatcaatacctcaagaatatggttcagcccagcatgagctgacttgattgactcaggaatatgacaccaaaccctaccaacagctgtatacacctgaccaaagagtgatagagagacagacagaagccgggcgtggtggctcacgtctgtaatcccagcactttgggaggccgaggcaggtggatcacctgaggtcagsagttcgagaccagcctggccaacatggcaaaacaccatctcttctaaaaaaaatacaaaaaattggctgggcgtgg

SEQ ID NO: 860697 - DNA, 701 bp, Homo sapiens
ctactattacctctaaagactagtttaggaattgcatatttctttctccaataacattctatgggttctcccacctccagtctctctcctcaatgatcctttcttcaccaatgtggtgattctgctagttgctcaggatgtctcttctaattatgcattcctgaactggggggaaaaccacagaacaagcttgaggacccgctgtgagatggacctgagctaaaactccattgatcacctaaccaccataagctcctactctgactgatgggccacagtgacgttttcagtctcttggaattagtgtcagttcagascaagtatcttcaaaaggtctgactattttcctttccccaatgcacagtcacctagtaaaagcccacaggtctctttggggaacactgagagaaagattaatggtataaatttttggcagtgtactggggtccctcctcaaggagattcagcctccctttcattcaagggtttctgggtctgtaaactggctcaagtctgggaattgaccaagaagccatgatgctctgtttctatatttcatgagacttctgttcacttgacctagaagtttactcttatacagatcaagtaagagtttagtagacctcctatttatttcatttctaaaaatgccacaatgaactagccagtaccacaggtctacataggtcagactgttctga

SEQ ID NO: 860698 - DNA, 621 bp, Homo sapiens
aactgtttattaatatttatgaaacttgtcagaatctaagtggcatcagtaatgttaagaacaccccaacaaatagagctgaggagagccatgaagagaggtttctcatgtttgtatgcctgataacaaaaaagactctgcaagaaccacaactttacacagagaccatcacaatcttagacacaaaaaaaatacttctcctragacatctgcccaacaactgcttgtccaacctcggactggtatcaccattgttattgatctttgtagacaaggatagttacgtcaaaacacttgtgtgtcctcctcatttttctctttaaaaatctttgttttcctttacctccctgaatatgcacataatttactatgggatgcatattccccattgcagtgctctcttcccaaataaataccttttcttttggagtgcgtctttctgttttttatgttgacctatatgtgtcagaaacaggacttgaaaaagatcactttcaggatgcattggtgattcttggacccgcagtgcgctactcacttgagccctctgagctctctgcttccttggctcgccttttctgccctgatgagtcttctctcaggctgagcctccctcctttt

SEQ ID NO: 860699 - DNA, 610 bp, Homo sapiens
taattatggctgaacctttaagacttagatcagaatccacagggataacaaaatgcaggcccctgtctggccaagctggccagaaaaggtggtgtatcagttttattcttgaaaattgctaggaatagaaacggtttgtctcaatagcatctgcttctagggttgttttctctgacagcagaaagattctatcccatatctccttgaagtttcttcctttttcactatcatctattatcgtcttcctttcttccaactcaactcctacctcagtaatgaacaagaaattattacaaaactctttgtrtagggcagtaggtaagtaacccttcttccttctggaataagcaaagctggaaggttaagataaggctgtttccttaccagtgtctcatttatgtcacatacagccacaaagttagcttctactctacatgcatttttatgttttgcttttttatgtttaatataaacataaaaatataaacacttttatgttttgcttttttgtgtttaatataaacattaaaaagcagattctggagttcacatagggacctgaatctcaagcttagctatattttctaataagtgactttgggcaagtaca

SEQ ID NO: 860700 - DNA, 622 bp, Homo sapiens
caaagctttgttattggactggagtgctgagtcttaccaaggcatggtggctgccctgccactggctgcttctcaaactcaaactcaaccccatgaacttgtgtctggaacttgttacaggaagagaagcatgctgtcagcaaatactaaaggtgtcatattgataaaacaaaagcaaaccccaaaacatatagcttttttaagaaaatgtaccacaataaaaaggtagagatgtgctcctttatttcaacctatactaccaccgcagctctgacaccctgagagccccagggtgatggtggtggccctcatatatattggcagcagtggattataggaaattataatatagtttcctataggcaacgttactggaaaagtagaggcatgcttggcaggagatggcagacaggtcaagacaaggcgkttgtatttaccggacttcatggcacccaatcaactgaaatggatgatgggatgtggcagggaacatgtgactgaacttgcctgtgagcacatgtgagcccccccttggtactgccaggagtaatgtcagggatttttaaaaagtttatagcaaggtaagaaagagcctgagaaatttagcttatcactgtaacca

SEQ ID NO: 860701 - DNA, 623 bp, Homo sapiens
aatttgcatttccctgatgattagtgatgttgagcatttttttatatatatctattggccatttgtatgtcttcttttgagaaatgtctactcatgtcctttgcccacttttaaaaaaaactttttaacaggattattggttttttattatgaagttgtttgagttccttgtgtattctggatatttgtcccttgtcagatgaatagtttacagatatcttctcccattcwacaggttgtttcttcgctctgttgattgtgccctttgctgtgcagaagctttttagtttaatatagtccagtttctctatttttgtttttgttgtctgtgcttttgaggtcttagcaatacaattattgtctagaccaacgtcttgaagtgtttctcctgtgttttctgctagcattcttacagttttaagtcttacatttaagactttaatccatcttgagttggtttttgtacatggtgagagataggggtccagttttattcttctgcatgtgcatatttaattttccagcacaatttattgaagagagtgtcctttccccagtatatgttgctgatgtctttgtcaaaaatcagttggcaggaaatatgtgggttaattcattgtcaa

SEQ ID NO: 860702 - DNA, 596 bp, Homo sapiens
tttctgcatctattgagatgatcatatggtttttattttcattctgttgatatgatgtgtcatgtttattgattttcctatgttgaatcatctttgcatcccagatataaatcccacttgatcatggtgtattatttttttgatgtactcttggatttggtttactagtattttgttgaggatatttgtatctatgttcatcaggggtattggcttatggtttttgttttgttttgttttgcttgactggtttggtattaggttaatgctggccttgtaaaatgagttagtgagaattcttycttcaattttttgaaacactttgaggaagatttgtgttagttcttctttatatattttgtagaattcagcaatgaatccatctgtcctgggctttgattgtttggggattttttattaccaattcaatctcgctactagttattgatctgttcagatttttaatttttttcctgattcagtcttagtaggttgtatgtatccaggaatttatctctttcctctaggttttccagtttgtttggtgtatagttgttcataacggtctctgatgatctcttgcatttctgtgatat

SEQ ID NO: 860703 - DNA, 589 bp, Homo sapiens
tatgcaaatcagactgagaaggctgataaaccatcttcattttttaaattggtaagtgtttttaaattaaaatacccagttggcaatagtgaggggaaactagcacccttctggcagaagtgaaaattggtctagcatttcccatggaaaaatctgagaagttataacagaagtcctaaaactgtgcacatcctttgacccaaaacttctgtatctagaagttttttataagattgtaatagtagtatatacagagatgtatgtttcaagatctttaccaaaatgtcatttagaatattttaaaagtggaaataagtttcaaacaatttatgatgtcaaattygattaggtagaataatttttaatgatatgaaaaatgttcacaatatttcactcagtgctaaaaattgagccaaaaaatattatggacattattatctcatttgattttatgtaatactgtgtatgcatgtgcgtgtgtgtgtgtgtgaatagagggtgaggtgggggagaaacacactggaacagatatcagaatattatgtatggcatgctccatgtactggtattagaagcgatttaagaactg

SEQ ID NO: 860704 - DNA, 623 bp, Homo sapiens
tgaagttccccacaattattgtattgcagtttatctttctcttttaatttagtaatatttgcagtgggaatatggatcatggaggttctgttgcctttttctcacgttagggagactctcttggctccaggctgattttggccaagcaggctgcctcagttctctcttcctccttgctttaggggtctcttttctcttttctgttgaattccagtgttctcttttgaataatctaatagtagtgtgacaatctactcactattttagttcttcttagtggaggaggcatatacaagatgcctctaatcagccatcttgaacctctcattctgacatkttttcccagacttattttcaaaacatggtcccagagcctcctcttctgtgcagaataccagacttagcactgtggatctagtggtgccatcaaatacctcatgagagaaaagagcccgcagtccaagtgagtcatttccacagtcaattcaggagagggtggaaggggtgcagttatgtcaaatgaaggaagtagaagtcaactttgctctggagatcagaaaatatgtcatggagaaggaattgtagactcttgagggatgaattcaccaaatgtgtcaggaaga

SEQ ID NO: 860705 - DNA, 469 bp, Homo sapiens
aacaaagcggtgtcaactgagattctccattccaggttctcaaacccaccacaagcgtccttagtaaggctttagctggccacagctaataaatatgtccttctcattccctctttactagtaagtcctttcatcctcttccaaataagccacacagaggcagagacaaggagaggaccataaaggcctgaatgaaggaggatgaagtccgctgctacgttagctctgtccccaagagagawctagggacatttgctcatctggacagttgttactgagaaatatcatgtggcttcagagctgccatgatgccactaaggagccaagtaatgcacctagtgtagaatcacatctgtttgcctaatgttaaccagaaatacccacttctcacctagcctcctgccctgtgatgagacagtggcagagcattgcagacatctaacggatggtggaatccaagtacagggac

SEQ ID NO: 860706 - DNA, 591 bp, Homo sapiens
tgaaaagaccatttgagaaaccctgatcatgagctgaatctccaagctgttcctaaaggagctaaactttgcctgttgcaggtgggtagaggagacagaaagtgggcgaagagcttcccagcacgtggaaaccttctgatctggctcacctcrccatcttcatgattcccctggagcacacactggttctgtgtctggctgagaggggcaagggagctgaccctgctctccgaatgaagaaggtgctttctttttctctttgaaagaatcttcaaggacaattttaaggtctctaagatggggaagtttccttctatttttgagtgatggacactttcttcctggtgttgttgttggttttggctgtggtctctttagtctatttgcctcaatgactaaaattttagaagaggaaatatttggaaaaatattctctactcaaaaaatggcagaaaggatttagatgacgcatttttaactgaagtaattattgaaagctgaatgaaataattactcttataataataatgatgaacccacatactgttcctgaaggttgatgctggcccataggtccaatctatgtgtatt

SEQ ID NO: 860707 - DNA, 643 bp, Homo sapiens
ccaaattatgtgagcttcaggcgctaaaaaaaaaaaaaaaaaaaaaaaaaaaaaaaaaacagttttctccctggtgctatgtcagcagacaatttagatatggaaggaagggactgcccatcacccagaaagactggatctgagactggatgagactaaggaatgtcagtattttatgcacgtgycaggattgttgaaatgtacatatgagaagatgggtgtgtgtatgtgttgggaaataaaaaagatgattgtggtgaacactatcgcttgctaactcagcacccattgcccctcttttccttccaatattgttcagatgtctagttacccccttgcccggcccccaccaacaagcagtaaactggcttcatcccacaagccctggggtggatgctgatttgttaacaaggatgcatgtggcatttcctaggcaactgctatggttcaaaagggggcacataaattgacgttgtctatctcagagaagggaaggatttttattccatgcttcaggtggagttccctctcctcctagatgtgaacagaaatatttctccagttgtagctggcagtcaccacagcaccatgaaagggaactgcgttaggatgaatctgatactgtgaatagtagtatggacag

SEQ ID NO: 860708 - DNA, 585 bp, Homo sapiens
tgacaacaatttctgggcaactctcaaccacttggtgacgccagatcatagagaattcaaaaggggccaaggtcagaaaccagaacctcatcagttaagctccttgtcataattagagcttcccagagctgactgtcctctgtgcctggacagccagagatgtgtacacgattccaaacaaatataagcgaatgggtcgcaagtgctactcctcagcactccacattctcaggagctgtgacactgggacagtgcaggtcctgaatggtgagagaccttaaggcttaaaaccacacatggcattacctgacttcaaattatactacagagctacagtaactaaaacagcatgatactggcataaaaacagacacatagaccaatcaaacagaacagagaatttagaaacaaatccatatatctacagtaaactcattattgacaaagstgccaagaacatatattgggaaaagaaccttcagttcaataaatggtgctgggaaaactggacatctatatgcagaaaaatgaaagtagactcctacctcttgccatattcaaaattaaaatcaaaatgaattaaag

SEQ ID NO: 860709 - DNA, 592 bp, Homo sapiens
gctcaaaaactgccagcaaacatcagaaagtggagtcagactccttattacacagaacaaattacttaatgtaaagaatgatatattttcttctaaatttaccgtcttattaggtgctattttcctgcctattttacatttccttgtccctcctttcttgccctctttttgattatttctatattacacttgcccctctattaattgggagttttatatgatttttaagtcattcctttaatattcatcctagagattatggcatgcattacaacctatcaaaaatttaatattaattggtgtttttgtttcatgtgggataatgcaatgattttataaaacacttatataactctctgctattatttgtattttaattgttatatcttttaaacaccacaatacattatttttattttatgcagttgcaaatcatttagattcaytcagacatattcaatttttatcattctttgtttctttctgcatctccagacacccatcttcaaaccattcctcttcagaaggaatctttccttctcctagaaagatgcttttcaacatttcctttagtgaaagacttctggagaca

SEQ ID NO: 860710 - DNA, 562 bp, Homo sapiens
tacaatgcatatattttacataatttcaccctaaaaatgtaacatgtatttggcaaaggaagggcttttgttgctgtcattctccctcatgtgttcctcttgtgcctgactgactctgcagggggaactttagttctcaggaccttggtttgctcatggccttctgagattgatgctgcctttcctctttttgctcttgttgcaaggacagtgcaatcatattcttgccttccttcttctgttgcacaaatgactggcccccctcaccaggatcacttggagaaaaatctcttagtattctgagagggcctagactcccactgagtcctccaaaaggactgaagatagaggtttcctagagcktctggctcctctctttctttttagtgctggttctctctaatcttctttgtaaactcccattctctgaaagacaaatgcttttagggactctgcatggcatgtggattttactcacaaaaactgtgtcccagagctcccctacctatttttctaccatctcttcctgttcattcactgctgtatgtagccttggccatgt

SEQ ID NO: 860711 - DNA, 644 bp, Homo sapiens
tcgtttaacacattcatgttttactcgtgaattaagcacaaatcgtagaacagatttgtattggtacagccaatgtatttgagtggagcccaagtattgatatgtcagagggtggtcattttgccttatttttttaatcaatattgttgactattttataaatatttcaatgcctactatgtgcctaaaagtattctatgagaaatgtattgaatctactttttgaatcttcattgggtttcgggatagaaactttagagtcaaatgaattttctgggattcactgtacatcaactaatcccctagtcttaatttaaatcttttcaacatcaggagtgacaggtttttttgttgcaggtcacctgtgaatgggtcctttatatagaatgagactttaaaaaatatttgtttatgtctaatccatcctcacattaactcatggtatgtttctgggtagtttgttgtctccaaattttataaaccacaaaaatgtgytgctgctgagatgtcagtaattaattatttttataaataatcttttgtcaactctggtgccttagctgttcttaggtttttaaagaatatcctgataaagcaaagttctcatatattattatattggattgtcagttgaaattagtggt

SEQ ID NO: 860712 - DNA, 655 bp, Homo sapiens
gcttggtgcagagctgagttcaagtcctggatatccttgttaaccttccgtctcgttgatctgtctaatattcacagtggggtattaaagtctcccattattattgtgtgggagtgtaagtctctttttagatctctcaggacttaccttatgaatctgggtgctcctgtattggatgcatatatatttaggatacttagctcttcttgttgaattgatccctttaccattatgtgatggacttctttgtttcttttgatctttgttggtttaaaatctgttttatcagagactgggattgcaactcctgcttttattttyttttgctttccatttgcttggtacatcttcctccgtccctttattttgagcctgtgtgtgtctctgcacgtgagataggtcttagaggagagtttcttatgattgagggcacttgccccaattcttctctattactctataaaaaaatggaatcataaaattttctttcagattgttaaatattcttcaacttaattttaatagctaatggcaattgccatgtatggatggatatgagaaagttttcagaaaaatgagatatttatcttgaggaagatttggctgttgggaggaggagacataatagcttttttcagatattcagtgtaagtga

SEQ ID NO: 860713 - DNA, 630 bp, Homo sapiens
taattgaatatttattgacatgtccttaaggagtactatatcactctgaagtgacttatggcacatcaaaaatattaactatacattattactatacattattttacttattattataatttaaaatttcattatttcctgaaaattttttcagtgagacttccagaacctgtgctggaaggataaatttgagatctatttgcacactaggtggtgcaaatagaagttacaacactttacatggcacctttatttaatcagaggtcaaaatacatggccagtaatgtagtacatccttgggaacaggacattatttgcttcactcactggtggggagagggtcctaccatccatctcgaggcscttgggcaataggttttacttgggaaggtgatgtcagggaaggcaggtagccaggtgtgcttttactgccctcagggagttcctagtctacttgtgcatgaaatagacctatatgtaagcatttaagatgataccaaaaatattccgttttccaggaggtgtggagttgtgagtagacaaggaagaataagcatttaaggaatacgtgatactcatgcatcatgtgcagtgcaatgggtctttttctgaaattttgtctacacaacc

SEQ ID NO: 860714 - DNA, 585 bp, Homo sapiens
tggaatatcatatgaaactcttatttttctcttctgttgtatttaaattctttcttaatatgcacattttctaagaagatactttttaagagagaaaagatagaggcctgcatgggtaatacttggattgagcccagggaattctctgtcatgcattttagctatggggacatcagctgctacttatttgctactgatttctcacttccttctttttcataccagctttcaattgcttgtttctaaacaatgcgttatctttgattaaattagaccagtaataaaagctcgtgaatccttraatgaaaagcacacattctggtcttcttgaccctgcattccaaaattattctctaatgtttataaccaccttggtagataaagtcttctttttccttctcagagaaacggtttgcagccaactgtgaccactaagctaaatctattgcggtgtttgtaattgaaagctttttgtatgtcttggttgtggtgctgggctctctcctggatttgttgatttcaacaatggagtaattcaggagaacagagagggaccagttagagctctccaggttctgtgtaaca

SEQ ID NO: 860715 - DNA, 622 bp, Homo sapiens
cctaaagatgtggccctatttatgtgctgacagactggttttaagctaagtctgcaaagctgaaggctggatttggcaccagagtaaaatcaccaagataatgattgcctctctagaaggcatcttggtatgcagccaatctgtctctcttggtgacacctgagttccctgagagcatgggtattcatcacttgtgcatgcattcactcagtcaatcattcattcacttactcatggcaatttattcattcattcattcaagaagtataatgagttttactttaaggctagaatraactaaggtaactgcactttcttatctatattataatgtgtggactataaatgtttctaagtagaaaacgaatgcatcaaatgtcacattttcttcttttaatatggaagtatgtttttaaatacttatttttaaaggtctgaaaaaagaaagcacttccaaaatggtggagaaagggcctccaataattactcctccataaaagcaatgaaaacattggcaaaaaaaaaaaatcatcaaaatcaattttttgagagctctggaaattaaccaaaggcttacaaaaatgtaagaagcgtttattcaagaaatatcggtaagaacagt

SEQ ID NO: 860716 - DNA, 618 bp, Homo sapiens
acagccaagaagctcaatgacctccaagtaggataaactcagaagtccacaactacgtacattagagtcaaactattgaaagacaaagagaaattttttttaacttttaggttcggggtacatgtgcaggtttgccatataggtaaattgtgtgtgatgggtttggtgtacagattatttcatcacccagctaataagcatagtacctgataagtagtttttctatcctcctcctcctcccaccttccaccctcaagtaggccccagtgtcttttattcacttctttgtgtccatatgtactcaatgtttagctcccacttataagtgagaacatgtggtatttggtgttcttgtgttagttttcttagcataatggcttccaggtccatccatgttgcttcaaaggacatgatctcactcctttttatggctgcctagtattccatggggyatatgtaccacattttctttatccaatccactgttgataggcacctagattgattccatgtctttgttattgtgaatagtgctacagtgagcatacacatgcatatgtctttatggtataatgatttatattcctttgggtgtatacccaataataggattgctga

SEQ ID NO: 860717 - DNA, 602 bp, Homo sapiens
aaagtccacagctagcattatcctaatagtgaaagacaatactttcctcttaagatcagaaacaagaatgtctgcttcaattaccactcttcaatatcataccagaggttctagccaaggcaattttgtaagacaaagaaatagaaggcattgagattggaaaggaagaagtaaaactatctrtttgcagatgacatgtccttccatatagaaaaccctaagaaatccacacacatacaaaactattagagcaaataaataagtttagcaaggctacaggatacaaaatcaatatacaacaatcaattgtatttctgtacactagtaatgaccaatatgaaaaggaaattaagaaaacaatcccatttacaatagcatcaaaaataataaaatattcagaaatacattcaatgaaaagtacacaacttgcagaccgaaaactacaagacattgtcaaaataaattaaaagactaaataattggaaaggcaattcatgtgtatagaccagacgacataatatgaagatggcaatgcttccttaaataacctacagactcaatgcaacccctatccaaacctccagtggttcctttgtggaaat

SEQ ID NO: 860718 - DNA, 591 bp, Homo sapiens
tcctttgtggaaatcaacaagttgattctaaaatttctataaaagtataagaggttcaaaataataaaaagttttgaagaagaagaacagttggggaattcacacttcccaattgcaaaacttactacaaagctacattatttaagacagtgtggttctgacataaggatagacatatatatcaaggaataggattgagagtccagaaatatatgtacacatctatagttaattkattttcaacagggatgtcaaggccattctatagagaaagaaaaaatagtcttttcaacaaatggtactggaatgactggatagtcatatgtaaaagaatgaagttgggccacctacctcataccatatataaaaatcaactcaccatcaattacacacctaaacgttagaattaaaaccataaaactgccagaaaaaatgtgttagtaaatcttcctgatcttgggtaatgctttctttaatatgacaccaaaatcacaaacaacaacaaaaataaataaattggatttcatcaaagttaaaattaaaactttttgtgcatcagaggacattaagaaaaatgaaaagacaacccac

SEQ ID NO: 860719 - DNA, 637 bp, Homo sapiens
tatccaccagcctcttactgaccaactgtgtctttctcagcagaaatttggtcaactttcttatgtcctaactagtcacatagacaagagaattttgcttgaaccctgagcatcaactgcacatctgtccatcgtttgcctttccttcaaagccagacttagagaaggagttgcctgcactcattgcttctgcttgcctcaggcaccagcaattcagcaccacattcttgagattgctcttctaagatcaccaacagccacttttctgccgtccatcccaaggtagatcctgtcgatggcttcctccatgttgaatctctccttcatcattgcctctatgacaccactctttctagtcttattctccctctcagaccaccccctcttcctccacccacctcttcaacatcattctttcacagggttccgtgcttggtccatcttccagagcaccatggggagtagaaataaagtgakatttggagacaggtgtgttggtttgaccattgattattccattcattagctatgtgatcctgaacagtttctagctatgtgatcctgaagttatttgacctcattgaaatgcagtttccttgtcctcagtatgacggggtgaatcatgcataagtcacta

SEQ ID NO: 860720 - DNA, 627 bp, Homo sapiens
attttttaaaaactgcttatgcaattcagtagagatcagtagtgatttaattattggtcaatttttactgaagtaaaattattgaagaaatacatgtcatattttacagaaagtacattgagaggtaaagtctggcttgagaaccaaggttactgacaaatcacagtcatcacctctacactcataagaggaatcagaattgagccataaaagtataagacacactgcagtagtccaaagtaatcgttctgtctccttgcttttctgcctctgactgtattaggaaggagcccttttaggagrtagaataactgagttccatgtttctgacctgaaaaattcaggtgaattggtggtacctttcttgctaataaccagacacctatgaacttagctaaatatttattgaaccattttgtactttgatcctgtgatactttacagagattataaatgtcttgatttcatatgattgtccatgtaggtcaagtaattatccatgtaaactttatacatttacctacataaaaaaggtaaaaattaggttctccaatttgttgttttaccctggtctattggtgatatttggcaattaactgataaggtccgtaaaaccaattcaataag

SEQ ID NO: 860721 - DNA, 602 bp, Homo sapiens
tttaatttgatgccatatcagtgattaggaagaaaaaaaatcttatgatggggagtgtacatctcatagttactgactgttatcatagtgagagagataataaaatcattcacctgctcttgtaaatgtggtggaagttctaagttaagcaaagaataattctcttttatgcaaaattgamgagagagcttcagagctcagagtttcggtgcttactgtaagaccagtccatcccagccttcccatgaatgttgggaacaggagatggagccccagcactctgaatgttcctggcagtgcccttgcctgtcctccccacccccacaggcacagctctctggcctgttctgtcttgaaaatcccaggactaatctcattatgttctttatccctgctgctttagctaccggtagaagctcaagttgccaggtcgtctcttctcctcccaccactgtaatcctgaaatggttctgcatgtctcccagggatttatcccactccttccctttctactaattcttggaaactcatgttctaccactagaaaatctccttgatcttctctaaacttttttttaaacttcttgtccctactaaaaggc

SEQ ID NO: 860722 - DNA, 587 bp, Homo sapiens
ggtaacttcactcatagggatactttaagtctaaatacagattttcaaaagatttctctatttactattagagattaacataaaaggaaaagcaagatatgacaagtatataaatattcttaactgtaaggttatttcaggcatatttgacccagactccaggaagtcctgagcaacagggataaggaaaygacccatatatttcagcaagatggcaactcttagaaggtttgtcatgggtggccttgccttgcaatagtttgtgaatagggaaagttcctctttgttcctggcatagccaaggtccatgtgcaaaaaagacttggctctcagatgtgcatatattccccacaaaaacttacttttgccatcttgggtccccctttattacctattttcccttaaggctcatggaaggagcctgcagagaaggctcgaggctaaaggtcaggttcctcactttcagagtaaaacataccttcaaaaggaagtggtgatagagtacagagaaattcctaagggagaaagtggcttcaatatggcaggaaattcatctgatccagacgtcctgtatcatcctttaatgt

SEQ ID NO: 860723 - DNA, 507 bp, Homo sapiens
agcacaaatcttttgtgtatagcttgatggattttcacaaagtgaatacacttgtgtacctactacccagactaagaaatagaacattatcagtataacaggaggctttattaggctccttcccagtcattactaccttcggtagtaactacttgcttatctgtcattatcaattagttctgccaatttttaactttataagtrgagtctgctacattttggaattttgtcccccaaaacctcatgttgaaatttgatccccaatattggaggtgaggcctaatgtgaggtgtttggatcatgaagttggatccctcatgaatggcttggtgccattcttgcagtgaggaatgagtttcactctgttagttcccaggagagttggctgttaaaaaagtgacagtcacttccaaccccgtcgcttcctctctcaccctgtgatctctgcacatggctccacttctccttccatcccatgtggaaacagcctggagccctcaccagatg

SEQ ID NO: 860724 - DNA, 507 bp, Homo sapiens
agcacaaatcttttgtgtatagcttgatggattttcacaaagtgaatacacttgtgtacctactacccagactaagaaatagaacattatcagtataacaggaggctttattaggctccttcccagtcattactaccttcggtagtaactacttgcttatctgtcattatcaattagttctgccaatttttaactttataagtggagtctgctacaktttggaattttgtcccccaaaacctcatgttgaaatttgatccccaatattggaggtgaggcctaatgtgaggtgtttggatcatgaagttggatccctcatgaatggcttggtgccattcttgcagtgaggaatgagtttcactctgttagttcccaggagagttggctgttaaaaaagtgacagtcacttccaaccccgtcgcttcctctctcaccctgtgatctctgcacatggctccacttctccttccatcccatgtggaaacagcctggagccctcaccagatg

SEQ ID NO: 860725 - DNA, 658 bp, Homo sapiens
tcttgcagtgaggaatgagtttcactctgttagttcccaggagagttggctgttaaaaaagtgacagtcacttccaaccccgtcgcttcctctctcaccctgtgatctctgcacatggctccacttctccttccatcccatgtggaaacagcctggagccctcaccagatgcagatgctggtgctatttttcttatattacctgccaaataaacctcttttctttataaattacctagcctcatgtattcctttatataatacaaaatagactaagaccraatcatacactgtatgctcctgtgttttgttccttttcataacaatatgcttgtgagactcatccatgttgtgtgtagttatggtttgtttatttttgttgctatatagtattccactgcatgaatgtattacagtttctttttttttaactcatttattgttggtggacatttgaattgtttctattttgggggctttacaaatgatggtacaataaatattcttgtacctgtctttggcatacatctatgcacaatcccatgcattttagggggttatatctatgagttaaaatgccagatcatagagtatgagaatgtttagctttagtagttgctggaaaaccaatatgtccacttctttgaagttgttctatc

SEQ ID NO: 860726 - DNA, 599 bp, Homo sapiens
aagtttttagtaaaggtagaccatgaagcaaggagcatgtgttttaaggaaatgaagctctgcaaacagcagtcttccttagagtataccgttctcctgtcgggaaagaagagctggtcacgaatggacatttttagccacagctgggctattgtacctagcaataacagaagcagtagcagcagcaataatatgaatgtatgggtttatatactggtgcctatatgtcatatgtgtttctatatgttgtgttacttaaacttactgaagaggtacatctcaarttgtatgtgaagtttattcatttaagaaaaaggcattacaggaagattttacctttcagtaatctgtggtctcttgattttaaaataatccagtgttctcagtaaagacctgtgtttgcttgggaaaaagccaaattagcattgagagagtgttaaaatatggaacagcatggtaggtgatgagcagaatagactgggttgatctataactccccaaagcatgggaatcaacattttcaccttttgaaaggattaagtcctggtgcagtggctcacgcctgtaatcccagcactttgggaggccaaggtgggttg

SEQ ID NO: 860727 - DNA, 578 bp, Homo sapiens
gtaaactatagtacatgattttgttcattagtgaagtatattaataaaagaaaaattgattctgatgacaggtcaaataaggatctgtcactcattcacagatttttaaggaataacatagaagatatttctaaacaatgttacatttaacatggttttcaggatttttctaaaaaaattaagtctcattatactaacaaaaaatttaatataamctattgtaagttactttgaaagtttagtctaggccgggcgcagtggctcatgcctgtaatctcagcactttgggaggctgaggtaggtggatcatttgaggtcaggagttcaaaaccagcctggccaacatggtgaaactccatctctactaaaaatacaaaaattagccaggcgtggtggtgggtgcctgtaatcccagctacttgggaggctgaggcaggagaatctcttgagcttgggaggcggaagctgcagtgagccgagattgcaccagtgcactctagtctgggaaacagagcgagaccccatctcaaaaaaaaaaaagaaaaagaaagtttagactttagactattcctctttaa

SEQ ID NO: 860728 - DNA, 650 bp, Homo sapiens
cattgccaggttttgaggtcacatgtgctaggtcatttgcctaagatgttttgtttaattctgaaaacaattgagaaaggtatctttagtcacattgtacagacaggaaactgaggattttattataaatgttataaagtcacttagtaagtgttaggatgctgatccaggtctgcctaacagcaaacctcatgctgtttcctcaatgctatgtaaggatgtaactgcccaatgggttcatcttgtccactgcccagatagagccaatttatcaagagaggggaattgcaacagagaaagagtttaatactgtacasccagctaaatgggagaccagagttttattattactcacatcagcctccctgaaaattcagaggctagagttcttagaagatagtttggtgggcatggggctagggaatggagaatgttgattagttggatcaaggatgaaatcatagggagtcaaagctgtccccttgtgctgaatcagttcctgggtgggagctacaaaaccagatgagcaagtttacttgcctgggtggtgcccagaggcatcagaatgcagggtctgaaaaaaatacctcaaacaccaatcttaggttttacaatgctaatgttctctataggaacaattgggcaggtta

SEQ ID NO: 860729 - DNA, 650 bp, Homo sapiens
cattgccaggttttgaggtcacatgtgctaggtcatttgcctaagatgttttgtttaattctgaaaacaattgagaaaggtatctttagtcacattgtacagacaggaaactgaggattttattataaatgttataaagtcacttagtaagtgttaggatgctgatccaggtctgcctaacagcaaacctcatgctgtttcctcaatgctatgtaaggatgtaactgcccaatgggttcatcttgtccactgcccagatagagccaatttatcaagagaggggaattgcaacagagaaagagtttaatactgtacacccagctaaatgggagaccagagttttattattactcacatcagcctscctgaaaattcagaggctagagttcttagaagatagtttggtgggcatggggctagggaatggagaatgttgattagttggatcaaggatgaaatcatagggagtcaaagctgtccccttgtgctgaatcagttcctgggtgggagctacaaaaccagatgagcaagtttacttgcctgggtggtgcccagaggcatcagaatgcagggtctgaaaaaaatacctcaaacaccaatcttaggttttacaatgctaatgttctctataggaacaattgggcaggtta

SEQ ID NO: 860730 - DNA, 645 bp, Homo sapiens
ctggattctttacctaactaaagggtttctgaaggtgaatctgcctgggctactatttctctttattttccaaagaaggcattattacagttctctagcatcatgtctttcttacctattaatgttctatatgaaacggttttgcattaatcttttccccagctcactgtttcctaatgtgcttcagcattgtctggaatatttgctaaaaatccagatgcctgggttctacctttagactactaaatctgatctatagggcttgggctaggatttgtatctttatggcacattaggttatccttatgcaggttgaaatttgggaactactgggtaatatgtaggattcatgcctttaaaaaatctactgatattggatgtggggaagaacatgaacaatactgttggtggcaagatgcaaggttagcacaaaatcatccattcattaatttaccraatcatttaccacagtttgtgggcactttttgtgccaggttctgtcctagatgctggggagtatagtggtcaacaaagacaagatcctgtcctcactaagtttacattttggtgtgaaagattaagtacaagtaaaaaagtattttcaggtagtgataatttcaataaataaagggtagagaagttgtt

SEQ ID NO: 860731 - DNA, 625 bp, Homo sapiens
agatggagggaaaggacttctcagcacagccacagctctgctatacagaggaagcaatggatgtggctggagccacagcctgggaccctcagtcccagcgctatgccaagtgttgcacaaacttgtgcttatcatggttagaaagaccatatttgggtatttattgggctgctatatgaaaactatctgactagagcagaacattgaattctgcccagagcatagatttaatgggaaaaacacacttgtttatattgtaaagtcttatctgtttcactatgatatatctcatattctcattagttaccatactggttaactaaaatcaaactgtttgtctttctattatgactccattacttactgctatgtgaccttgaacaagtaattgtatcttttataatccctaggtttctccagtgcaaaatgrggctataacataacccatctcatagagttatcttatgaagattcattgagataatccatatgcccagcacacagtacttaataaataataatttctttatttaaaataatgtacttgtacagatatgtattaaatatattcagcaatgaacattaagagatgttagatgtggtaaataggaaacaataacccagc

SEQ ID NO: 860732 - DNA, 661 bp, Homo sapiens
aatggatgcagaggttctttgatcataacagagagacctgtctcctgggctgtcttagaattttactggcaagttgaccagttcctgaggattctcactaagattcccaaatctgaagagaagaaaactgagtaggtatcctcaccattttgggttgttcttgttttctcttgtggctgagaaatagtagaaatgaaggcttcagagcagcgtactaaattgggagaaagatcgatccatagctctttggaatgacgtacctttcaccaactaaacttagagattctgccaagaagaaaaacatcaactcattgaacccatggaattagacgtcttagtattgcttcctacaaatagagcaccttacataaattttmtattaaaaaaagctgaaaggtgagatgataaacaagagaatgagatgagaaaggagatatagatctcaggaaatgaatcaagaatggaaaatcataatgattatagaaaaaaatattcattagaaatagaagaaaacagaataggcccaggtaaaaatctttacacataaagatgaaaggtttgaaaaaaatcagagtaaatgaaaaaggaaaacagttagacaaagtagaaattctcaaacatgaaagaggctgcttgacagtgaaagccacacagtgaagag

SEQ ID NO: 860733 - DNA, 638 bp, Homo sapiens
gatagtacaaaaattcctataaccccctcttctcttccacagtttcctctgttaacatcttggattaatatggtacatttgttactattaatgaacaaatattgagatgtcattattaactacagtttatattctttatgctggttcactctttgttttgtacagttctgtggattttcacaaacacatgatgttatgtgtctatcattacagtatcagtgagggttgtacagataaacagaactgatagaatacacatacacacacacacacasagagagagagagagagagagaagagagagagagaagagagagatttattacaggaaattggttcacataatcatggcggctgtcaagaaccaagatctgcagtcaacaagctaaagattcaggagagctgatggtgtaagttccagtccaggtctggagacctacagcctcaagagccaggaagagccagtgtttcatttggagccccacggcaggaaaataatgatgccccagctcaaggtattcaggcgggatgaaattctctattgttcataggagattttgcctttttgttttatttaggctttcagttgattggatgaggccccctcacattaggaatgaaaatctgctattctcagt

SEQ ID NO: 860734 - DNA, 671 bp, Homo sapiens
tattccatccactctcttataaatagtaagtttactaaattctcttcaagttactcaacttaagtatatcctgtacttttgctgggactgtgagtaatacatttcaaaatgaagaaaaaaatcatagaagaaaaaaaaaccttgaccaaattatgaccaaaaatgacaaaattctttgcctcaccatttctggcattaggattatccgtattttctgtgctgttgtacttctttgtcattactaactatctctataataaatattacctttacagttcatttaaaaaggaagtctaaaaggaaaaaaaaccaagtaaatgaagttaccctaaaattgaatttgaggtcctaataataaattatttgcttaagccagtgtccagaatagtttttcctgggttttcttctaggaatttatagtttgaggttttaagtttaagtcttyaatccatctgcatatggcagatggtacctcaccatgttttagtttgtatttctctgataatttagtgatgctgagcattttttcatgtgttttggccacatgtatgtcttcaagtgtctgctcatgtgttttgtccactgtttaatggggttatctgtttttttcttgttgatttaagtttcttatagatccatatggcagatggattaaatagtcatctgcatat

SEQ ID NO: 860735 - DNA, 705 bp, Homo sapiens
ccaatttaattgaggtgagataatacttcactgtggttttgatttgcattttctggatgattagtaatgttgaatattttttaatacacctgttggccattcatatgtcttcctttaagaaatgcctatttcgattctttgcccattttaaaaattggattatttgggtttttctgttgagttgtttgagttccttatatattctgattattaatcccttgacaaatggagagtttgcaaatattttcccacagctgcataatattccatagtgttaatgtaataccattcatttttattgatttttataagtttatgatgatgtgcttaggtgtggttttccttgtacttwccttgggtttatagagcttctggtgtatgtggcttaattcctttcatgaattttggaaaattcgcagacattgactcttcaaatactacttttgatccatccttttcatctcaacttctcagactcaaaaagtatgtatattttctctgctctttattttgcattattttatttctctgtgcttcagtctggatatgttttgacctatactccagtttattaactatctctgtaactatatcacattttgaggggtatttttcacttttaaaatttctgttgtattcttttttatgttttatagttatgtactctaagtcttcatttggtcttttaactctttgaatacatta

SEQ ID NO: 860736 - DNA, 603 bp, Homo sapiens
cccaacttctgagagctttgattcccatatctgtgatgcttatcttgcaggttggttgagagtttagaaaagtaattgcctgatacactacacctgctcgacagcatgcacttatcatttccttttgccaagggaaggagayagagggtaggcaatgctgatgtctgttttatttaatgccgtgtgatttacactcaatgtggggacatggaaagttctggcatctgctgcattgactcaggactgaggaggtcagcaggagtacaggcacctgaagaagtgaaaagccatagtatggccctgagagggactgtcacagaaagtaggagcctctgaattgtgagccaaaagacagaagattgagcttctctcccatcagtaccatcagcacttacattactcttgtggcagatagaactgagaatatgactgagacccctgctctgtcctctgccttcaagagagcctggctgtatcctaaacactgagaagtaggctgttaggtagacttttccagggagggagaaggaaaagggttggggcttgtaaacttataaaccagactggaagctccttaaaggtaggaactatgtctgtatggtc

SEQ ID NO: 860737 - DNA, 598 bp, Homo sapiens
ccatatctgtgatgcttatcttgcaggttggttgagagtttagaaaagtaattgcctgatacactacacctgctcgacagcatgcacttatcatttccttttgccaagggaaggagatagagggtaggcaatgctgatgtctgttttatttaatgccgtgtgatttrcactcaatgtggggacatggaaagttctggcatctgctgcattgactcaggactgaggaggtcagcaggagtacaggcacctgaagaagtgaaaagccatagtatggccctgagagggactgtcacagaaagtaggagcctctgaattgtgagccaaaagacagaagattgagcttctctcccatcagtaccatcagcacttacattactcttgtggcagatagaactgagaatatgactgagacccctgctctgtcctctgccttcaagagagcctggctgtatcctaaacactgagaagtaggctgttaggtagacttttccagggagggagaaggaaaagggttggggcttgtaaacttataaaccagactggaagctccttaaaggtaggaactatgtctgtatggtcactattgaattcttagcac

SEQ ID NO: 860738 - DNA, 509 bp, Homo sapiens
gaatttgatgaagtcatcagccagctctgtgctgttcctggatgggctggtgcttccggaccctgctgggcggaaaggctgaggaaagctctcaatctgtgcaccaaaaagggtgtaatgactcagctaggaaccccaataaccaaagagggaaaacatggcactgcattccttcagtaaaaggcaactcttattctccttcgagtcatcctrggcctgaacaagctcttggaattataaagcctgattcctcaggtcagcataatgcgtctaaagaccacaggagaatttcctgatccaggaagcttggggtgggatggagggagtggtgtgtatgtgtgtgcacatgcgtttatgtgttttagggaggtagggatggaaagggtctgctgttactgagaatccacagtcttttggggaataggcttcttgcatctgtgatgtaatgaggtatatgtcccagaaggcttgagtcaacaggcccctccagggagcaccaggactggtac

SEQ ID NO: 860739 - DNA, 680 bp, Homo sapiens
atgggagagctgagtcttgaatgtaagtcagtgtttaccaagcagagaagggtatttcattcaaagagaaacaattataaactcaggaagtcataaaatacatgtgtagggatcaatgactagagtggatggttcttttgatagatagaggcaaatgagactaatgaaagttaaagtcagattttgaaaggtcttggattcttggttaagaaattttgttttcttcatggaagctgtaagtaatccatttgctgaaatgctaagtcatcaaacatagcattctgtatcatttcacactgttctctagtagttgtttttgtatgaaagagtctttaacaarttctgcttttctacctgggttgcaaaccaagtcttccattcctggatcccaaaattacatagcagagtaataggttcaataagtaacagttcttgcaaactttttgcttagcttaccattgtttatttatgccaggcattcttgctcattttaagacaaaatgaatggaaaaatattcttaattttcagggccacataagtgaacattttcattccagtatttgcatttctaagttcactagatatacaacttcactttttccttgagtttcagtatcagtcagtgttatactatgcacgaaatattgtttggttatttgcctagtagcctcgaattatt

SEQ ID NO: 860740 - DNA, 593 bp, Homo sapiens
ataaaaggaaaaatgcaattattacacatatatagaagctacagagctgtaaacacacgcatagatttatcaaaatgaaccgtcagctacataaattgccttcttctgtcttctagaatttctggtctatggcagccctgagaaatcagagttgaagagctggaaagagatattatatggttatagtggcacctgtaggataaactgagaaattttgcttgctggattcaggtttttttttccccctaaaaagtatgcattagagggaggggctggtgagtcttcaatgaaatagctgagcagaaatgtttaaataatgaatgatgaaatattctaaccatagagcagagtgatgagataaatgtagtttcagagcctcaaacacttggcttcatgttttctctctgctgttttaggtaaatgaaaaaaartatctctgaaacacgagtttcttcatgtgtaaatatgaaatattagtttcttcatgtgtaaatatgcacaaccctgcccattttgcagagctggtgtagtatgagagcgagtacatgtaacctgctgaatttgcagcctggcacacagctggttctcggtaa

SEQ ID NO: 860741 - DNA, 588 bp, Homo sapiens
aagacacaacataccagaatctctgggacacattcaaagcagtgtgtagagggaatctgatagcactaaatgcccaaaagagaaagcaggaaagatccaaaattgacaccctaacatcacaaaaaatggttttttatttattaaaaataaataaggtgatccattgctaatatttttacttgtgtcactatttctgctactgctaattcttgctactaccactaccacaaccactacctacatcccaccccaatcaccaccattagcacttaataatttacaaaaagctttcaatacatgaccttattactcattacatctttayaacagacctatgagatttccatacatacctcatgatccatattacagatgagaaaaatgggcagaaaaaatcaataacttgtccaaggtgaaaaagtaacagagccattatttgaagctggatctatctgatgccaagttacctcatccaaaatgaggatattacaataaaaagattccaaagcaataaaatgccatatgtgattatcctgcattttccctaacaggttaacaccttcccctgctccctgccaatttttatcc

SEQ ID NO: 860742 - DNA, 634 bp, Homo sapiens
tttctccacatcctcactaatacttgtctttttaaaataataaccatgctagcaggtatgaggcaatatctcattgtggttttgatttcatttccctgataattgttgacattgaacatgtttgcatgtattggttggccatttgtatgtcttttttggagaaatgtctatttaaatctgtcgtccatttcttaatcagggtattagtttttttaaaaaaacttttgagttgtaggagttctttatatattttggacattaaccacttatcagatttatggtttgcaaatatgttctctcaatctttargttgctttttcacgctgttgattgtttcctttgctgtgcataagctttttaattggagcacttgcacactgttagcaagaatgcaaaatgttgcagtctctatggaaaatagtttggcagttcctcaaaaaaataaaaataaaattgctgtatgatccagcaatcacacttttcagtatccatccaaaagagatgcaaccataatcttgaagtgttattagtactcctatgtaaattgaaacactattcacaatagccaagatgtggaaacaacctaaatgttcattgacatttgaatggataaagaaaatgtggtatattcatg

SEQ ID NO: 860743 - DNA, 634 bp, Homo sapiens
tttctccacatcctcactaatacttgtctttttaaaataataaccatgctagcaggtatgaggcaatatctcattgtggttttgatttcatttccctgataattgttgacattgaacatgtttgcatgtattggttggccatttgtatgtcttttttggagaaatgtctatttaaatctgtcgtccatttcttaatcagggtattagtttttttaaaaaaacttttgagttgtaggagttctttatatattttggacattaaccacttatcagatttatggtttgcaaatatgttctctcaatctttaggttgctttttcacgctgttgattgtttcctttgctgtgcataagctttttaattggagcacttgcacactgttagcaagaatgcaaaatgttgcagtctctatggaaaatagtttggcagttcctcaaaaaawtaaaaataaaattgctgtatgatccagcaatcacacttttcagtatccatccaaaagagatgcaaccataatcttgaagtgttattagtactcctatgtaaattgaaacactattcacaatagccaagatgtggaaacaacctaaatgttcattgacatttgaatggataaagaaaatgtggtatattcatg

SEQ ID NO: 860744 - DNA, 635 bp, Homo sapiens
caacaagttagattgacaagtaattacaattaatgccaccccaatcattagtaaaacacatttagctatatatttgtaggccaatatttaatagcaaaacagaattctaagaacaccactgtgcccaaaagctctctgatctttaccaatttagcaaccagccaggctagaatagaataaatatcacatggtctgggaaaatgggctgtcctgattctgaaagattgtgctggctcttgatatggggagccatctgtcaatgctctttgaaaaagtgagaaatcagggctacttctctagcattcgtgaatctaaccttctgtgctgtcaccctttccttgggaaatrtttcttaagagccagatgttagtattcatttcagttcacaaaacagttacttcccaaggtctatcagcagcagaatggataaataaataatggcatagtcacacagtgaaatactacatagtcatggtagtgaatgaaccacatctacatacaacagcatgaatgcttctgaaacataatgtgaaatgaaagatgttagccatgaatgcatatgtaccatatgatgacatttgtagaaaatttaataaggggcataactaatctatgatgtagtggttacccttggg

SEQ ID NO: 860745 - DNA, 584 bp, Homo sapiens
agcatgttgtcattcaactgtcattccataatatttctgagttgcctactctgtacaaaaggaacaacttcttcagtgtccctcccatcttgtcctcaaaggctagagtaaaaaacagttcctaaaactgttgagaagtactcttttaagaagatctcacaagatttaagttctgatacattgtctattaaaatggaaaagtcatgaattctgggaaattgaggttgttccccaaatgataatatttatggtattgtttaagggaaaataatggggggcatggtaaacaaaactgtgttctaacaatgaagaatttcaaataagcaatgcaaaggaaaacagagaaaactcagctctctataaattttcsccttaaggcctcagcaaccttccattcacctctaggaagttagttctttctttttccaaaggaatttcttcagcttgactgcttttacaggtgccaacagcaacaaaccatcacaaaaaaaggcaactgctaaatggcacacacatgcacacccacacatgcacatgtgtgcacacacagacacacccacatacttctctcctttttacatcta

SEQ ID NO: 860746 - DNA, 658 bp, Homo sapiens
acaagaaaaagcaagtagctcagagatcaacagctctgtttttgactgagctgccgatttcaaagcggatgttctgcaagcagctctcggtaaggaagctgagaaagcacagctgcttggagagcttaagtggtttagcttaattcctctgtaaactgtattttaaatgactatgaaaccacatttctgtgactggtattgtttaaagagatggaagyccagctaaaatgctttggttttctttcataaatattcagatttattctaagacttttccttcacagtctctgagaatcagccacttgcaagcaatgaagactgggctgcccaatgtgtgtcctgagacctctgtttgtcacaagcatttaattttcttggagctatagtagactgtagtttttcaggttgcttgataatggggctttctataaataaaagaagcaagagcaaatgtactccaccctgatttcctcaaagacaaattctcccaccccagtaaatataagcatacagcttaaaggtctgttttttgaataacaaataaagcaactaagtctcaatcttttaatgaaaaaaaaattaaggctaattctaggaataaatggaagtgaaagataagtccttcaccgagatcaaggactcactgtgagcacatggt

SEQ ID NO: 860747 - DNA, 594 bp, Homo sapiens
tgggcaaaggcttcatgactaaaacaccaaaagcaatggcaacaaaagccaaaattgacaaatgagatctaatacaactaaagaacttctgcacagccaaagaaactatcatcagagtgaacaggcagcctacagaatgggagaaaakttttgcaatctatgcatctgacaaagggctaatatccagaatctacaaggaacttaaacaattttacaagaaaaaaacaaccccatcaaaaagtgggcaaaggatatgaacagacacttctcaaaagaagacatttatgtggccaacaaacatgaaaaaaagctcaccatcactggtcattagagaaatgcaaatcaaaacctcactgtcagttagaatggagatcattaaaaagtcaggaaacaacagatgctggagaggaagtggagaaataagaatgcttttacattgttggtgggagtgtaaattagttcaaccattgtggaagacagtgcggcaattcctcaaggatctagaaccagaaatatcatttgacccagcaatcccattactgggtatacacccaaaggattataaatcattctactataagacacatgcacatg

SEQ ID NO: 860748 - DNA, 482 bp, Homo sapiens
gggtccaaatactgttatgaacctgaaatccatcttgtttttcaacaagagtccagtggggcttctttgataaccactgagcatcaacacaaatcattaaacactaatggattaagactcagaaaggtccagcagagaaagaaagcaagtctagaagaatgtgtagagccatgtgcccggagaaagtgtgtgtggcagcccctcccaggctttaatcagcactactggcctgtgcttccatgagtaataaaactyagtttaagagaaaaaagaggtgtaatgaaaccaaaacagaagcagacactggagcatgcctacacacacacacacacacacacacacacacacacacacacacacacaactctaccattaaggaagaagaaagctacagtatacccatttttccagtatagatgccagattgtttttatttatcttggaaataaacttactgtgtgcctgagggattttgttttact

SEQ ID NO: 860749 - DNA, 581 bp, Homo sapiens
tgataccaggattgctactattttatgtgcttaattatggcttgctgtacaattatgtcttggtttgctactggggtgaaaatctggttaagcctataaaaattaataaaatggaaagcaaaggatgtacctcagctgtttatgtgtttgccactcatgttagattgtgagcaggaattcttattaggaggaattacctttctcatatgttattcttagtgcgtactccaatatttggcccatagtgagtgctaaaaaatgaatgaatgggtgcttaatttataacaccctaaaacacatatgctttttgggtctacaagaaatatatattattatctactgcccaaatgaagcaactcaggtaaaaattctagagctgcattgtctgacatggtaaccactaaacaygtggctatttacattcaaattaaaattaataaagatgaaataaaattaaaaattcagtttctcagttgtgttaagcacattgtgttaagtgctcaatgtgttaagtgctcaaaagccaaatgaggttagtggctatcataatgaacagtgcattttcttcatatgaaaaaacc

SEQ ID NO: 860750 - DNA, 605 bp, Homo sapiens
gacaggcatgtgacacatattaaaatacatcatcttaatcacttgattgtgttataaagctggattaaaatgtgatccaataaccttttattaaaatgttctataaatcattttgcccaaaacctctttttaaattgtaacttcaacagtattccactagatggcactaaaagcctgaagaaaaacagggtaggctttaaaagataagtttatttaaaatgcacacagaaactgatgaaccggctatctttgacggattattattgttgttctagtgggattttaggagaaygtgccatttcctcatgtaatcagacatctggccattcattataaacttacgtggcatgtggttttagggtatctgtgatcttgaaataagttttgaatcctgtttcatttggaaagagataaaatctatttctgttcagtgattaatgacttttgtaatactgactgaatattgaaaacttcatgttttgttcttacttctagctctgtttagattttggtcactaaacgcttctttttttttttgctttcagttagagccctaacgtgatgttaactttggtaagattatagcttccgttttccctataaca

SEQ ID NO: 860751 - DNA, 647 bp, Homo sapiens
atttccaagaaaaatttccaaactattagtcataggtgtgttctcatataaattatataatagccaaaatactttctatgtattaattatattttaattatcagttactttattgtttagtatagtgagttaatttacctgtaagtaattattggctgatgaaaaccctccaaaattcctaaacctcataatgatactcacatagttcatcaaaaacgtagaaactaaaaaggaagagatatgtaattrtgagcatgaagcatgttttgcctgttacatatattcaaaattcatctctttccttgacaatctttgcaaaggagggtattcattttaataaataagaattatttgtatttggtttcttctagtcttttattgttttcctgataagagtatttataaaagttgagattggactttcaaattaccttttgagaaagtaatttttgaccacaaatgcaattatttgctattaaataattgtgagaatgacagtttatttgatagtcacagaaacaactgctttgagtggcttaagttaacaattccctgaatattttaatgaaggctttcttttgagagcccaggatttcttcacttttaatagatattattctgtatttatattaaaaactcttatttca

SEQ ID NO: 860752 - DNA, 594 bp, Homo sapiens
ttcaatctcttacttgttatagacctattcaaattttctatttcttcttgagtcagttttggtagtttgtgtccttccaggcatttgttcatcttaaccaggttatctaatttgttgacatacaataattcctagtattcccttatatgcttttttatttctgtaagatcagtagtaatgccattcttttcattcttcattttagtaatttgagccttctgtcttttttcttggctagaggtttgccagttctaatgttgtcttcaaagaatcaactttctttggttttatctattttttattcactgtttcatttatttttgctgtaataattatttccttctttctgctttctttargcttggttttctctttttctagtttcttagagtggaaagttaggttattggtttgagatttttctgctttttaaagataggcatttactgctatatatttctccctaagcattgctttagctgcatttcataagttttggtatgttgtgttttcattttaattcatctaaaagtattttgtttttatttttttgagatagggtcttgctctgtcacccagattggacctcagtgg

SEQ ID NO: 860753 - DNA, 588 bp, Homo sapiens
cctaagcattgctttagctgcatttcataagttttggtatgttgtgttttcattttaattcatctaaaagtattttgtttttatttttttgagatagggtcttgctctgtcacccagattggacctcagtggtatgatcacagctcactgaagcctcaaccttttcccaggctcaagtgatcctcctacctcagcctttcgaatagctgggactctaggcatgtaccaccatgcccagctaatttttttttttttttttttttttttttttttttgtagagatgggatctccttatgtgacccaggctggtctcaacctcttgggctcaagtgattctcctgtctcaccctcccaaagtgctgggattacaggtatgagtcatcaggcctggccctcaaagtattttccaattgkctttttggtgtcttctttgacgcattcattatttaagagtatgttgtttaatttccacttatttgtgaaattctcaaatatccttcttttactgatttctaatttcaatccattgtggtcagagatcatattttgtattatttcaatcctttttaatggcctagcacgtgacc

SEQ ID NO: 860754 - DNA, 688 bp, Homo sapiens
gtatgcctcccaaaaagaaccaaatacaaatagatatagtaaaggtatatggccaatttttatggaacagttaccaaatcatagccctgtggttacatgcattatgtcatttaatcacaataaccctgtgagggtcttatgaggtaggtattctcattgaacccattttacaaaaaaatgggagatgttgcttctagctagtgttctctgttcctatctcctaggtacagtatacattttttagttgttcacctctttttctctgttatttattttacctttcttcctgcagatttacccttttagaatatgcccatcaatttttactaccagtcccaaaatagagcttctctttttagctccccccccagtcctgagcatcttctcactccacttgggaagctgaaaacctcacaggccatgttttatggatgcctggacacccccagtgtgggcaataaagctctttatacagaggatggaattatggctcartatctatttgggctggctgttcctggaaccagagatagtttatttatgactaacgaaaacttactaatctgtcttcaagtgacaagtgacagaaacccagccgaaacttaagcaaaggaaaaagtcatttggttgactggaactaagaagaatcaaagaggagctggaatcagacactatcccaaatctctct

SEQ ID NO: 860755 - DNA, 601 bp, Homo sapiens
aaagattgctgcctgatctttcctctgtaagcttcatcccagaggggcccctgccagatgccagccagaactctcctgcatgaggcatctgtcgacccctgctgagagttatctccctgtcgggatacatggggttcaggtacmcacttgaggaggcagtctggacccttagtagagcttgaactctgtgctgggaggtccactgctctcttaagagccatctggcagggaagtttaagttctgctgaagctgcattcacagccatccctttcccaaggtgctctgtgccagggagatggggggttttatctataagtccctgacttgggctgctgcctttttttcagagatgccctgtccagagaagggaaatctggcagtctggccacagcagccttgctgagctgcagtgggctccgcccagttcaaacttctcaggggctttgtttacactgtgaggggaaaaccgcctacgcaagcctcagcaatggcagatgcccctccccctaccaagctcaaatgtctcaggtcaatctcagactgttgctgtgctggcagcgagaatttcaagccagtggatcttagtttgctgggctccgt

SEQ ID NO: 860756 - DNA, 611 bp, Homo sapiens
gctttaatttttataagcataactattgaacaataatattagatcaaatgtaccaataagtattttgatatttcattggtcattctagggtatttttttaaaagaaaaagtcatgtttctaaaacctaaccaggatctttggtttatgaagtacagtaagtccttaagaagataaatacccctacagaatacagcactcaytgaattaacaaggtctagaagatctcttgaagaaattcagaaagaagagatggtggatatacagcagagttaaaccagaactgagtacagttgttggatgatattttcagagagacttcagggtttttcatttaaaatgcggacaaaagaagcttcaatgatggatatttgctcaggcccctactcttatgggcagaatttgccactttactcataaatactatataaaaaagtgatgacacttacaaggagctaggatcctaagaagaaaatatatatttaaaaaattacaaaacagccccttgccacatatgtaatgtgccctattggttcttctttctgatttgtatgtgtatatgtgtatgtttgtttcagaggggaaaaataaggaataccttccatcctatcct

SEQ ID NO: 860757 - DNA, 631 bp, Homo sapiens
aaaaatgaggaaacttgaacctgtcagatggtcttaaaattctcaaggaaagtcaaaccctgaaaggaggatcatgccaacagtggtaaagtgctgggaatagttgccatgggaaataatccacgatactggttgtccatatatttattycagctgaaggactcccaacaggtgatatccacatgttgactgccatatccagattcggatccatcaccttgtccattctcccagactccatgccctaccacacacacacacacaatttttcagaaaaataaatatcaaagtgagcatctctttgtgggttgtaaggtatgacatttataaatgcattttacaagcatctgagtaatggtcatttcctatgaactgtgcaatagataaagtaggctgcaggagattcaaaaatcccactgggcttgctgtaacttgacgcctttttgtctcaaccaaccatccatatcaggtcacagttagtgagaaagatgtgattatggagaaaacctagtatctactctgattttaagtcagttgcaacagtcttatgatgctcattagcaaaaagcaaaaaaatgtacttatgacaagtcttatcattgtgacaccatgattgagaactttcgttcca

SEQ ID NO: 860758 - DNA, 563 bp, Homo sapiens
tttaaatgacaactgtaaattgtgactttataacattcccagaacaacttcctcataagaaagttaacttactttcttatcttctgtgcacaattgacaactcttctttacagcacattctacaattaaaaaaaattaagtccaaaattaatccaaatcctttttattgctcaattttacataaaagtgcatttcatttagtaattcctgttttaagccatagtcatccataccccagcattttacttcattattttcatgtatctagatccctaccagtactgtataaatcctcttagttttaagtcttttctcctatttcttggaaaaacatgaaatagcatcatccaactttgatgagccaagttctaaaaaacaacccycaaaacatagtaaggaaaaacaaattggcaactccattgtattttaaaatatcatgtgctgttattcaggatggtattgccaagatattcttacttaactaattaaccctttaaatagtaaaaaaaaaaaaaaaattaattccctatctttttttgccacaaagctttaaaaacttttcc

SEQ ID NO: 860759 - DNA, 641 bp, Homo sapiens
attttacttcattattttcatgtatctagatccctaccagtactgtataaatcctcttagttttaagtcttttctcctatttcttggaaaaacatgaaatagcatcatccaactttgatgagccaagttctaaaaaacaacccccaaaacatagtaaggaaaaacaaattggcaactccattgtattttaaaatatcatgtgctgttattcaggatggtattgccaagatattcttacttaactaattaaccctttaaatagtaaaaaaaaaaaaaaaattaattccctawctttttttgccacaaagctttaaaaacttttcccaaatgaggattttcattcctctagttttatggaaaaacaaacagtatgatttatatttgaaagttctagaataaaaactatgaatttggaaaaaagcatttcaatgcctcattttattactgcaacatctccttaaagaaagggtctggaattaatgtcctagttgttttgtgatacagcaacaataaagttgctctctctattattttggggacagagttcacaggctctgtgggaaaggtcaaatctttctatttaatttcaaattgtttgattggatgcagatctgatgtggctggggaaaaaattttacagt

SEQ ID NO: 860760 - DNA, 656 bp, Homo sapiens
gctgcctgcttcttgagataatttgagaaggtggagaggcaaccagctatagtgctctaagatcagcacccaggaagctgctccacaactccctcctgctctttgtattcagtgctgctgagcttggagcaaccccagaaaccactcttacattagtcttctcttatgtgtgttttaggctgtggctttctccattggtctgatctgaattgctttctgtttctcagggattcttaacattttctggctctcatgttgttttscagcactgtcataatatatatctctataactagtcatgtgctgcataactatatcttggtcaacagactgcatataggacagccatcccttcagattataatactgtatatttttactattccatttctatgtttaggtaagtttagatacacaaatacttaccattgtgttacaattgcctgcagtattcagcatagtaacatgctgcataggtttgtagcctaggagcaataggctaatctagcctaggtgtataataggctatactatctaggtttgtgtaagtacactctatgacattcacacaatgatgaaattgcctaactatgcatttctcaggatacacctctgtcattaagcaacacatgactgcataatgtttactgaaaact

SEQ ID NO: 860761 - DNA, 626 bp, Homo sapiens
cttatttcagtgcaacgctgagaactgtggatttggttttagtaaggaagactgatttgcttacagatactaacattcttttctactctggaaaccagacagcagtaattattctgtctcattgtctttgtaaaaatggcaatcttggctttacagggcactttccaagtaattcaaattctgtctcttattttgtctatacggttccaatttaggatacttaaaaccttatttccaggttcatgaatttaactcagcatgacttttaacatttcaaaattttttcaatttggaaggaaatcgagagaggcctccaaactgaagtaatttttttatgaaaaagaacaaataaagcattttattaactaagaccttaaaaaacttaagaaagaggaactatgaccattgagtgggtctgattagaacaaaacccaayggcttattcacaacaaaaagcttatatgtcataggtcatgcagaaagtgatgggggagaaaccatgcttttcctcaaatttaaaactttgaatctacctttcatatttcagataaaccaaattaatctgagtccaatttaactgagtttcaccaaaaccatctagaacctttaaaatgtcttcccaccaa

SEQ ID NO: 860762 - DNA, 650 bp, Homo sapiens
acttgcagagattaagggtaaccccactgtttcaggaagcagagcagcccagacgtgagtcattcacacaacaccatgagaaacctatcagacatattctttcagcctgcaaatggcagaagccttaccctaaatgggcttggacaaaacccaaatgaattagcttatataactggaagttcaagggtaagctcagctttaggtgtggcttatgtggaaactcatatgatgtaaccataacccagctctttatcattccttggtttgccttggtcctcctctactatcttggatttattctaacacagattctaccctcacaattgagatgattgtctgaagctatgtaacatccttaaatccaggcaaaaaggcccctcccctggaccctgcattataaagagctcttctccacgtcagtccctacccatgggacaaaasagcctctgggaccaatgggacatatcctcctggaaccttctcacatccttttagaccatactctggataccatggacacaaggattccctgccccaaatctccaagctagttcttggcttggagtaggtgtagatctcttcctctggttcatcctcttgaagatgagccaaactgtcaatgtgtatacctttgggtgcaggtgttaact

SEQ ID NO: 860763 - DNA, 586 bp, Homo sapiens
ctccaagctagttcttggcttggagtaggtgtagatctcttcctctggttcatcctcttgaagatgagccaaactgtcaatgtgtatacctttgggtgcaggtgttaactgtttgcagaggatgtggatggaatttgaatgaacaggctaggctttcacaaatgactatgagtcctcttgttgtgcagaattgaggcaagagtgagaaagagatgggacaaagagtgagaagatgtgatctttccatccagccatgttccagagctgaaatctaaggattctaagaacttgaacctgaccttccaggtcattatgaaagtgtattttgtccacacaatacactaggagaaaagaacagttgtttttaacattatgcttgaatttataattttcacatacrtaggcatatagttctatatttagaatataaggcctttatttcttctcttgctatgtgacctgcagtgtcagggttgaaactgcttagttacaaatttaaccaaaggttaattttgtacatcatatgagtttccacataagccacacctaaagctgcacttacccttgaactttccaggttcaaatt

SEQ ID NO: 860764 - DNA, 594 bp, Homo sapiens
aatggagacacacgtggtggctcatgcctgtcattccaacacttttggaggcccaggcaggaggaatgcctgaggccagcagtttgagaccaccctgggcaacatagccagatcctatatctacaaattaaaaaaaaaattagctgkgtgtggtggtgcatgtctgcagtcctagctactcaggaggctgaggatcactggaacccaggagttcagggttgcagtgagctatgatcgcactactgcactccagcctgggcaacacagcaagacccaacctctaaaaaataaaaataaaaagtaaaaagaagataataaccaaaatttttccaaaactgaggaaggtaaaatggaaagggtaaatatgtggataaatataaatgtgtatttcctaaatacctactgtaaaaaaatatggtaataaaataatgtaagatttaatatatatatatatatacacatatatatataagtatgttttaggatgtgggggaataaatggttctaacactattggagaagtagtaaaagttacaatttgcattaagctgtaataaaccaaaggtaactgccaaaagaatagaaatatatata

SEQ ID NO: 860765 - DNA, 567 bp, Homo sapiens
ctcacctagggcaggcccagaaatgctgtccaagagccagggcctagaactggggaccccatgaacctacttgtttctctacatcactgtggctgagctaggaactaatctctaagacaaagtcccctgcattcattctctgtttctcaaycagaaggagtctctccccatggttcccacagatgagaatgtgcagggtcactcctgaagccagcatggccctgggtctcactcaaggcctgtggtgagaactgcctgggtaccactgatgtttattgaaggcccaagggctcttaagtctgcaaatgataaatcttgctgggactggatctttcctttcaaggcaatgggtacccttctggcccaggctgtgtctagaaatgtcaaccaggagctagggcctggaatgggggcctcaaagactgttcctgataccctattcttccgtagctatgctgatgtccaagtttcaatacaaagtcctctttactctcccctctcctctccttaggtggagggaaggagtctcttccagagctgcaaactgtgctgcctgtgtttggggca

SEQ ID NO: 860766 - DNA, 645 bp, Homo sapiens
ttcaaaggtgttaggaagcagaaaggtgatacagaattggagaggtcggagtttttgtattaactgtattaaatgcgaatcccgagaaaatttcccttaactacgtcctgtagttatatggatatgaagacttatgtgaactttgaaagacgtgtctacataagttgaaatgtccccartgattcagctgatgcgcgtttctctacttgccctttctagagaggtgcaacggaagccagaacattcctcctggaaattcaacctgtttcgcagtttctcgaggaatcagcattcagtcaatccgggccgggagcagtcatctgtggtgaggctgattggctgggcaggaacagcgccggggcgtgggctgagcacagccgcttcgctctctttgccacaggaagcctgagctcattcgagtagcggctcttccaagctcaaagaagcagaggccgctgttcgtttcctttaggtctttccactaaagtcggagtatcttcttccaaaatttcacgtcttggtggccgttccaaggagcgcgaggtaggggcacgcaaagctgggagctactatgggacagttcccaagtgtcaggctttcagatttcctgaacttggtcttcacgggagaagggcttcttgaggc

SEQ ID NO: 860767 - DNA, 655 bp, Homo sapiens
gatgtaagattttcgtatagggtatgttaatggagatgcaaaataaattggtttgatttagcttattttcaggagaatgctgatcataacttgctatctatattactaatctacagccaccattcctgacttagatttcaattcttctaatgaattatgttgccagtgatccattacctacacaagcacctctcccatctgcatagaggaaaccaatcacatagaatgctktctttaatggctctgaaatttggcaggttttttaggtcaaagtcagttgctatcaataaaagttagcaatggattatttattactatgcaaattttaggtcatttaggttagtccattgcaaattttagttcaaaatccattactaacaataaaaggtagcaatggattatttattactatgatttcaaatatgtcatatgccattattcccctgtgttaaacagatgaaaatctagaattcgaaaaccttattgtaactctttatttcattttctggttgcacagtggtttttttagaagcttttctttaatcacacttggaatcagacatgtatcatatatgtgtggttggttgatgacctcagtgctgtgatcttggctcactgcaacctctgcctagttaatgacctcttatttacctgg

SEQ ID NO: 860768 - DNA, 650 bp, Homo sapiens
tgagtaccttagtaaattgcacgtgtggacaggatcttgggcttattgtctgggtgagctttcctctatgaaggtataaacacacacacacgtgtatcagtctttgaccacaacctgtgattccttccagctctgccctgcctctttatcatccctcttttgacattgtgtattcatttcctattgctgctgtaggaaaatagcactcacttagtggcttaaaacaacacaagtttattaccttactgttctggaatcgaagttttactgggctaaagtcaaggtatcagcaggattgcatttcttctggargctctgtttccttccctttttcagcttctagaggacacttgcatttctagactcacaggcccttccttgcatcactccaacctcttacttcaatcatcacatctcctactgactccaggccccctcctccctcttataagcacccttgtaattacatttgctctcctagataatccagggtaatcccctatctggagatcttttaaatctgcaaagtcccttttatcatgtaaagaaatatattcacaggttcctgggattaggatttggacaggctgtggggggagaattattctgtctaccacacctggtcaagactttactctctcaactgctct

SEQ ID NO: 860769 - DNA, 620 bp, Homo sapiens
caaaattggaatgttctttcagtcaatggcaacatttttcactgggtttatagtaggatttacacgtggttggaagctaacccttgtgattttggccatcagtcctgttcttggactgtcagctgctgtctgggcaaaggtaggtgaagcctgtgaatccagattttgaactgcaccttctcccttcctgctctcaccctacggaaaggtctttttactacatgatgactctgattctgtacttgttacttttacgttttctgttcaaaatcagctggataagcatatccagcctcactgagtactacccctgccaagactccatgctgttcttggccatgtgattatttggggaagggatgagaaagaagaatgtagctctcatatctaccttctgcctttgtaagaaaacgagcaartaaacaaacaaaaacaaaaacaaaacaaaaaaaaaaaacttgaactccaaagaaccatgctctctagtggatgatgccccattcacacggcaagtagagactcaagtttagtgaactacagatgtcccattcaattaacatttttttttactttaatgtttttggctttctagatttttgtttaagttttaaattgatttt

SEQ ID NO: 860770 - DNA, 673 bp, Homo sapiens
gacagacaactcttatccataaaatacaattaactcttaaaaacccataagaagaaaacaatttaaaaatgggcttgcaatgggatgatttttaactatagattacatttctttagcaaaaatatcacatatccagatatttccatccttttygtgttagttttggtgagtaattttttaaaagaaatttcccatttcttctaaattttcaaatttatataatagatgtgaagttattcataatatcctcttttaggatttttaatgtctgtgagatatacacacttggcctcttcttcattcctcatatcggtaatttatattatcttttgatcttcttgaatagtcttgctagaagcttatcaactgcattaatctttttaaaaacacttttagtttggttgattttcttatatatttgtttcaattttattgaatttttactgttatttctttccttctactttgactttaatgtatttcttttttcatagcttcttgagatgaaagttttggtaaccaatttccagcctctattcttttttaaaatacacaaaagcctatttaagcctattcctctaagcacaagtttttatatgttatattttcattatcagtactttccaaatatttttcaatttcaattgtgatttattttttcatccatgggtta

SEQ ID NO: 860771 - DNA, 673 bp, Homo sapiens
gacagacaactcttatccataaaatacaattaactcttaaaaacccataagaagaaaacaatttaaaaatgggcttgcaatgggatgatttttaactatagattacatttctttagcaaaaatatcacatatccagatatttccatccttttcgtgttagttttggtgagtaattttttaaaagaaatttcccatttcttctaaattttcaaatttatataatagatgtgaagttattcataatatcctcttttaggatttttaatgtctgtgagatawacacacttggcctcttcttcattcctcatatcggtaatttatattatcttttgatcttcttgaatagtcttgctagaagcttatcaactgcattaatctttttaaaaacacttttagtttggttgattttcttatatatttgtttcaattttattgaatttttactgttatttctttccttctactttgactttaatgtatttcttttttcatagcttcttgagatgaaagttttggtaaccaatttccagcctctattcttttttaaaatacacaaaagcctatttaagcctattcctctaagcacaagtttttatatgttatattttcattatcagtactttccaaatatttttcaatttcaattgtgatttattttttcatccatgggtta

SEQ ID NO: 860772 - DNA, 656 bp, Homo sapiens
atttaaacattatagattttggtttttaaaacatatactcagttcgtgcttacaaaatatttaatttgaacatatcttcatcagttttgctgaacaaaaattttccaaaagaaaaaaaaaatcctaaataaaaaggatgcaagaacaaaaaacttggaaattataatttggaaagataattgttatactttcggttattacatagacacataatttatwattctataatcgtgaaataatgaattatgtcttcatcttaaaactgtaaatatcaattttcaatctttattttctacttaatgtttcattctgtaatttctaaatgtcaaaataataaagctactctgacaattcaataaaaataaatacaactactacattaaagctgatacctgagttgagttagttatttgatacctgagttgagtgagttagttgagttagttaggtatactcaaccttctgttgagtataccttttccaaaatgcttgggacaagagtatttcagattttgagtattttctgattttggaatatttgcattaaatggtccatttagcattttctttgaacatcatggtgatgctcaaaaagttttagttttgagatcatttgagatttcacattttcagttttgggatgttcgatccatttg

SEQ ID NO: 860773 - DNA, 656 bp, Homo sapiens
atttaaacattatagattttggtttttaaaacatatactcagttcgtgcttacaaaatatttaatttgaacatatcttcatcagttttgctgaacaaaaattttccaaaagaaaaaaaaaatcctaaataaaaaggatgcaagaacaaaaaacttggaaattataatttggaaagataattgttatactttcggttattacatagacacataatttataattctataatcgtgaaataatgaattatgtctycatcttaaaactgtaaatatcaattttcaatctttattttctacttaatgtttcattctgtaatttctaaatgtcaaaataataaagctactctgacaattcaataaaaataaatacaactactacattaaagctgatacctgagttgagttagttatttgatacctgagttgagtgagttagttgagttagttaggtatactcaaccttctgttgagtataccttttccaaaatgcttgggacaagagtatttcagattttgagtattttctgattttggaatatttgcattaaatggtccatttagcattttctttgaacatcatggtgatgctcaaaaagttttagttttgagatcatttgagatttcacattttcagttttgggatgttcgatccatttg

SEQ ID NO: 860774 - DNA, 577 bp, Homo sapiens
ccagaaacccatgtatgatcccaacagctagtccctctgttggcacaggaccctgtgcttacttctcctcaaaagtatttctttacttgattatttcacatattaggcggtaagatcactaaggcaggaattttgtcttattttagatcaatctctaacacttgacacagtgcttrcttggctcacagtaggcactcaataaatatttgttgaaaaattaaatttataaatcagcacaacacagataatcttaaatgcaatgaacacaaaaacttaaatttaaaaaaatccaattatctttttatagcaatagttttgataacagtctgctagtgtttgcatgatagattacaaacatcaaatattttgcacaaatatatttttctttatataaataaaaacaaatgcatctataaatctttattctaataactatataattcaatgtctctttaaaaataaaattttgcagccggtgcggtggctcacgcctgtaatcccagcactttgggaggccgaggtgggaggatcatgtggtcaggagaccatcctggctaacacggtgaaaccccctctc

SEQ ID NO: 860775 - DNA, 601 bp, Homo sapiens
agtcccagctactcaggaggctgaggcaggcgaatcacttgaacctgggaggaacaggttgcagtgagccgagatggtgccagtgcactccagcctgggtgaaagagcggaaacaaacaaaaaaagtaatttcccttctttcttcaaatattatgcaacttgcgaattcttggccgggcrtggtggctcacgcctgtaatcctagcactttgggaggctgaggcaggcagattgcctgagctcaggagttcgagactagcctgggcaatatggtgaaaccctgtctctactaaaatacaaaaaaaaaaaatcagctgagcatggcggcatgcacctgcagtcccagctactcaggaggctgaggcaggaaaattgcttgaacctgggaggcagaagttgcagtaagcccagatcatgccactgcactccagcctggcaacagagccagactccctgccccgcacccacacacccaaaaaagaattctcaaacatcatgtgtattttcctctttcttttctaatataattttaatctatttaaaatattttataatgagaaaaaatacctttcacatatcctttaagcaggggtctacagac

SEQ ID NO: 860776 - DNA, 643 bp, Homo sapiens
atgcctttttataaaaagtcagaatttatttaaacagtgcatgcctttatagatccataagtgcttgacaaaatatgggaacctctttggaatatttaacctagtattttaagaaacatttttatttgaagatcccagataaactgaaacatttataaacacacatagcagtgatttattttctaaacctcagaaataggctttttaaaagaatgagagtctatcataaaggtagcatgttatgacatttgttaaatagatgaattattcaaaacaaacatatatgtagtctatcaagtaagaaagagtgaaagaagcacctgccctttcccatagatatagggcaaatgcagggttagacgtcagcaaaacccagaggccagtggccatgtgtctgctccctccgatgtccatcagctcctccttttatgccgtgccccacacccccacctccattgctaaaagcatgccaactmttcaaataaactttcaagcccacagactccagacccaggtagagaaatggcagcaggcttccatcgggcattctaaatgtgctgttcacacacttaatctgggttgacaacaagattaaaaaaatcccctggactggaagcctggaaacctggattatggacattat

SEQ ID NO: 860777 - DNA, 619 bp, Homo sapiens
agggtccccaaatatttccatttgagatgacaaagtgctcttcagtcatttagcttactcttcagttcagatgacttatcatcttgatttcagagagttcatatatgtctgttttaaaaaactggttcaaaaagtctgaagttacgaaactaaaccaaatatgcattactctcatgtcaaattacaagctcttagctgckgggattttttcacatgcagcctggagcccttgaaaacctctgttttctgttagactctccagggtacacagaagttgcctcattattttagttaatggtgactgcaaataagccccccaagtcatttaactatgtgcttaccactgctttaaaagaaccccaagttaggtcctcatgtaggtaaaggagctcccttcacatatatgtgttcctaaacttgtcaaagattgtagcaaagcaatttaaagctaagataagggtaactctcaatacaagattattttgaaaatgcttaaacaagcatttttattgaagtctagcatacatacagaaaagtataaaaatattaagagtatagttcagtgaagaaatactatgaaggaaatggatcaaggaagactttactgaaggaggtgtca

SEQ ID NO: 860778 - DNA, 635 bp, Homo sapiens
aaaatatgggggtttctggtcccagggcttcttcgcctttgcagggagaatggtcaacagtaccaaagcaaggccactggagtcccagacagaaccattagctttttctcattagccattcagccatcttcaggatgtcacaattgagacctgtggggcacaattatgaaatgtaggaaaataagaccaaaaactcttgggcaatgtttttgtcaagtaacatcttaaatctcacattcatctaagaactttgcctcccacttcttgttcttatttttcatagcatctgtaacatttcaagaataggcatgaaaaataaactccttttatgccctttagaagaatcatttcaaaacctgcttggtagatatacagcagtgatttaaaatggaatatccaccctaactagtattctgtcttttggtgcaggggtgatccaccaccattattagaggatttttgagctgatttayttttcaccagtagtggtgatatgtttagactcatccactcaagactcccatagtaagtgcatttcgcaaggcagcctgctaagcttagaaatataatcaagccctgaagaagagaaaatccacataaggaaacaataattattaataatatttattgaatta

SEQ ID NO: 860779 - DNA, 646 bp, Homo sapiens
tttaatagggattaaggtggcaagaagtgtataatgctatgcatttgtaagtacaaacatgcttagaaattcatttatctttggggggtgatggaggttagttcaagctccagctatatttacaaacagattctagccacagctgaacagtgtggacttggggaaagtaactgtgcctgcctttccttaagcccacaaggccttttgatttctgcccaaataaagcaggcctttggcattcagctctcttagctggcaagatgtctgcataatgtctgcagaatttagartggccaggaggggcaggtcaaagacagccaaattatgatatcatacccataaaacctcatcaatggtgacatacagaaaacactcagtaaattgctttcattaatttatccttattaagaaattctaagcagtgtcttcattctttggcagatttctgattctgccattttcccttccttccttcattgcttttccttaacaaaaacaagcaaccatgggcacagagtgacagtagctgaagagatgtggcctggggtagcctaggatgctcagactgactgagaagaatgttttataaatgctctacttgcctttgggagagccaaagacttttctgaatcttctggtctgggtt

SEQ ID NO: 860780 - DNA, 660 bp, Homo sapiens
tatagagagtctccatttatcatccatctattaaaaactatgagttcatactgatacctccaattttaatctgaaagcacattgtacattctaatcctcccttttccatatttgtaactttcttctacaacagtgagaaacttggatctcattatgcttaatatatttactcatttgattaagattaggatacagagaaattcatttcagaattgctaactgtattagtctgttttcaagctgctgataaagacatacctgagactggacaatttacaaaagaaagaggtttaattggacttacagtttcacataactggggaaacctcacaatcatggtggaaggcaaggaggagcaagtcacatcttacatggatggcagcaggcaaaaagagagagggtttgtgcaggggaactcctctttttaaaaccatcggatcttgtgagatttattcactatcatgaggacagcatgggaaagacttgcccccatgattcamttacctcccactggggtccctcccacaacacatgggaattcaagattagatttgggtggggacacagccaaaccaaatcactaacccataccactaggaaaaaaaaaagtctatgaattagacttcaataattgtttactgctttttaaaggtaaaattt

SEQ ID NO: 860781 - DNA, 615 bp, Homo sapiens
atacaacaatgctgaaaagtagaagtaaaaaaggtcattctattgccataatttatgaagaattgccatgaattatgaggccattaaagtttccactctgggtagtagtctatacatggttttctttctctaatagagctcatttgggggtctcaaagaagactgaattatttcagccctactcatgttgagcctttcactgcaagttcctgtgtctgttccaaacattaaaatgggcagcacagttgtctttgtagcagtttgctaaggcaccattccccatttcctctcaccatcagcagctctttctatacagattttagaatgaaaaagcaaagtgaagatagagcacaaaataggcagttgtaaaaagagaatgggagtgacctattatgtcatgaaggaaaaaagctgtaaatggaggaagatctggaaaagccctgatagkaagacaaattgcaaattagattatcacacatttcaattactccaaaagaggcaggattagcgaatcaaagacctgcatatccatactgcgtaatggcttagaagacgcaggaatggagctagaagttatatacataatcttgcccttcagatgagtatgtgagactg

SEQ ID NO: 860782 - DNA, 678 bp, Homo sapiens
aatattaatcaagaattcttaaggagtaaaaatatcattcaaaaatgaaagcaaaataaaaaatattttctggccaatacactgagagaattaatcacaaacagacctgtattataagaaaatcatagtaattcttcagggaggaggaacattgtagcagaaaaatttcaatccacacaaagcatgaagagcaccaaaaatagtaaatatataactaaataaaaatgtttccatttaataattttgttaagacaattaactatttaaagcaggaatgatagcaatataatgtgggttttagaacattcaycaacatggatgagtcgcaaaagaatcttgccacatgaaagcaaacagaaacaacagattacatattgcatcattcagtttttattaaatactagaaaatgcaacgcaagagtaaagaaaacagataagtagtggccagagatgggccctgggtaggggattgactgcagagggatataaggagaatttaaggatgttggaaatattatattgtcataattgtagcagtggctaactatctaccagtactcacaaatcaaattgtacacttacaattggtaaatttctatatgtaaaatatacctttgtgaaactgatttttaaagagtaaaaaataaaaaggccaccagtctaaaaagaaagttgcaa

SEQ ID NO: 860783 - DNA, 597 bp, Homo sapiens
caattgcaacaggtgtaccaccctggtgggagacattgataatggaggagaccatgcgtgtgtggggggaagggaaatatgagaaatctctgtaccttctgttcctttttgctgtgaactagcctaaaaaataaagtcttgtttaaaagataaaattttaaaaaataaaaataaaatttgttcttaggaataaattgttttaaatatatgcaagtatattttctctaaaattgtctatagattccatgcaatctcactaaaaatcccaggatgcstttttgtggacattgacaatccaattttaaagttcatatggaaatacaaaatatcgagaaagttaaaaacaattttgaaaaggataaataaaaatccacacccactagaagaaaatgaaaatgtgtagcaattttaattaattaaaggatattaattaattaatggatatgaagcagtagaactctcctctatcactggtgagaatgtgaaacaccattttagggtgctgtttagcattttcctacaaatgtaaattcatcatatgactcagcaattccactccaatttatttacaccagagaaatgaaaccgtatttctaa

SEQ ID NO: 860784 - DNA, 620 bp, Homo sapiens
tgttgattttccatgtgtcatcatcaactatacaggatccaaaagcaaagcatgtcttcaactcattgcagaggaggtgactaagattaaaccagcggagaagacatagccattcagaaggcagcaacttgaaaaatctacccataagtgatgtattttcatatgagaaataataatctcattccagaaaatggttttcatgacctctcacttctagcatatccagggattatctgcatgaargcattgacaagaaggttgatatggtggcctagacttgattctcacattgactatgataaagacatttaacacatgatgggatacctaataaaatatttaggtgttacctaatctttcataaaaattaatcacaaatttgttttaaaaaatttcagaaggcacagtcagcttttatctcaatctcaaagtctgccacaaaatcttcagttctggttttatgttgcatacaaaaataaatattgcctatattgcttagctctctagtttaagaagattatagacacatattttatcatgtcatcatcttgagctaaacagggtgggtgaaaaatattgtgggcaatgaggaatattgaagagcaaattgtggaaagaaa

SEQ ID NO: 860785 - DNA, 642 bp, Homo sapiens
gattagttcatatccatgattaataagaatgtcctattaagaacttaatatagttaaaagtgtgtgaaaagattcaggttggttaaatttataagttattaatgataataacataagagttattaagcactattattgccaggcactgttctaagcattttacaattattattttatttctccaagctatcatatgaggtatttacttagttttgtctctattttacagatgaggagactgagcaaagatgaagttcaataaccattttatttttaaaacttcatggaaaactgaaatacgtacttctctgacttgggaaatgtagttattaaatataattgtaattttttaagtctcaagatcataaatacctctgtttttaacataaatgatactcatactattataggtatcagcaggcaaataattaaatttggagttttgtttgttttatctttgttttgtttttagtyttgaagtttgagtgaatatctggttgaactctcggtctaaaaatctgattgaaagagaaaaagctatttagatacttgatgaatctgcataatcagtttccagtaaatctattaggttgacgcaaacataattgtgggttttgccattaaaagtaatggcaggccagg

SEQ ID NO: 860786 - DNA, 645 bp, Homo sapiens
ccctactttgccctctaagcatgaagaagagataagtattttgcaggagattccacttaccctccttatacagagctctgtcatgtggtctctcctaactgaaacagactgaggaatctagaattcaagctttccaggctgtattctattagaagaaaacagagaagatgactgttaatggcttttgattctgtaattcagaatctgtaagccacccttttaactatttaatatatatgtgttgtatgtgtgtgtatatatatatatatgtttatatttatatatgtatgtataactatctatatgtgtatctttctcacttctgcctcaattcacttaatactttttaacatatrtgtgttgtatatatatgtgtgtatgtgtatgtgtgtgtatccttatctcttccccctcaattcactctaaatgaaatgcacttactctatcccacaggacacagttcccaggtcacacccattaaccatgtccatcctgaagtccagaattccatgtgatgtgcagccttcagcattaatataactaataattaacaagttatttgacttcaatcaatccccaacaagactccttcaggtgcaaattcccatcttattatcagattaagtaatgattagtgctgattac

SEQ ID NO: 860787 - DNA, 645 bp, Homo sapiens
ccctactttgccctctaagcatgaagaagagataagtattttgcaggagattccacttaccctccttatacagagctctgtcatgtggtctctcctaactgaaacagactgaggaatctagaattcaagctttccaggctgtattctattagaagaaaacagagaagatgactgttaatggcttttgattctgtaattcagaatctgtaagccacccttttaactatttaatatatatgtgttgtatgtgtgtgtatatatatatatatgtttatatttatatatgtatgtataactatctatatgtgtatctttctcacttctgcctcaattcacttaatactttttaacatatgtgtgttgtatatatatgtgtgtatgtgtatgtgtgtgtatccttatctcttccccctcaattcactctaaatgaaatgcacttactctwtcccacaggacacagttcccaggtcacacccattaaccatgtccatcctgaagtccagaattccatgtgatgtgcagccttcagcattaatataactaataattaacaagttatttgacttcaatcaatccccaacaagactccttcaggtgcaaattcccatcttattatcagattaagtaatgattagtgctgattac

SEQ ID NO: 860788 - DNA, 634 bp, Homo sapiens
tttcaaaatgaaattattatctcaatttcctgtgaaaccttttagaaataatgacagtcataagtcccaccacagatctactggtctgtgaatcaaaataataaagattggttatctggaatatgtatttttaaaaatcctccatttcatttcaaagatcacatatgttgttgaagcattgagctacataaatgagatgtaaagggcatccttgtcacagaaacagtatagggaagatatgggtgtgtgattgagctgggcatatcaggggaactgcaagtgggggtgaggatggctgtcatgtagaatggagtggacatatggcaagataaaagcctaaaagttagraagaaaccagatggacaatgcacctggtaaagtgcatgacatttactaggttcttaatacatgttcattaaatgatagataaatgaatgaatacgtcagtgtattagttcatcttcacactgctcacaaagaagacatacctgagattggctaatttaaaaaagaggtttaatggactcacacttccacattggctggggtggcctcacaatcatggtagaaggtgaagggcaggtcttacatagcagtagacaagagagaatgagaaccaagcaaaagaggaaac

SEQ ID NO: 860789 - DNA, 595 bp, Homo sapiens
tggaatggagtggaagaagcaatagacttacaaaggaatagttgtaaaatcacagggtaagttcagattatggagaattgtaagtcatattgattatattataaaccaattgctagtttttcaaatctaagaatctcactttcaatagaatgtgctcttctcttgttttcctttatgatcagtggtcactgatccagcctcattcttcctagtccccgttgtaaccaacaatatttttcgaaacagaaaaaaaggatggttcgtttttctcatgttgcattctagtaaaactgcttggatttctccaagagatmtaaactatttgtacctttggtctttctggtcttttacgtgtttgataaattgataaatattcaaagagtaccaactacatgtctgacttgtttgaagcaatagacacaatgattataaaaagactggcactagcttatactccagttgagtaaaaggtgggtaaattaaaaataataagctagtttcagagaagtataagtgctctaatatattaataaataagacagggtactaagttggagaaaaaagtagaatgagattgaaaaggacaaatctggat

SEQ ID NO: 860790 - DNA, 595 bp, Homo sapiens
tggaatggagtggaagaagcaatagacttacaaaggaatagttgtaaaatcacagggtaagttcagattatggagaattgtaagtcatattgattatattataaaccaattgctagtttttcaaatctaagaatctcactttcaatagaatgtgctcttctcttgttttcctttatgatcagtggtcactgatccagcctcattcttcctagtccccgttgtaaccaacaatatttttcgaaacagaaaaaaaggatggttcgtttttctcatgttgcattctagtaaaactgcttggatttctccaagagatataaactatttgtacctttggtctttctggtcttttacgtgtttgataaattgataaatattcaaagagtaccaactacatgtmtgacttgtttgaagcaatagacacaatgattataaaaagactggcactagcttatactccagttgagtaaaaggtgggtaaattaaaaataataagctagtttcagagaagtataagtgctctaatatattaataaataagacagggtactaagttggagaaaaaagtagaatgagattgaaaaggacaaatctggat

SEQ ID NO: 860791 - DNA, 731 bp, Homo sapiens
tgttctctcatttaccaattaaataacaaatgaaaaaataaacgggtctgtcgtcacttagaatatgtgtttgcccataaaaataactttaaagaaattataaatagcttagaaaaatgatataagaaagctaggttagtagcagttactatagattatttattcaacaaatatgagggaaagaagtgtggtgtgtagggggagatgattccaataatgagracagaggagctctccttgtaaaatggaagctgtaattcttgccttatagtgacaatgcaagaatgtggaatgacgtatgcaaagctccctgtgctgagcataggcaaagccattattatattttgtagatgagaaaacagatgtggtttaatggggttaagttcactcagttgctgccaattggcaaagcttggattcgaactcaggttttctgattctacgatctgtgatcttctcattttgcctggtagttgtgttgtttcctctgggtactgatcacacttgtacaaatggacagatgttgaaaatacatccactggtggttaaacctgaaataaatgctaatttttcatttttataaaggtttctttttgatgtatttgtgttttgagagtatatttgctgttcaatataattttgtgtctatggaatgtgttttaaaaattataatctctaaggatatgaattaatgtacattaatgtgtaactaatgttacagctccttttat

SEQ ID NO: 860792 - DNA, 657 bp, Homo sapiens
ttgagggcagggctggcttttgttcttgaatattaagaaacttaacaaacacatacatgcactgacaactagaagtgggccaaatgacatttcagttagaagaaacagaatgtacaaaggctcagagatgtgaaagtctgtaccatgtttgggggatttccaatactttcatttggtgkgaagataggatgtgagggaccaatagaagcgattagtgacttttgggaaagagtgaaagatccaaggtgacccccatggtccttgcctcctggtgttcacatgtaattctctctctgtaagtgtggccaaaaacagtgactgcattcgaatgaatagaatatggaagggtgatgatatattactcctatgattatactacattctacaatactcaatgttggtagcagactcactccctctctcctcttgctggttttgaggaagtaagttgccatgcattctgtagccacaagaagctgaatgctgccaacaaccatttacaagcaggcaggcagattctaccctaactgagcctcccttctgtaatcacctccatttgagtgcaggcagaacctctgacttgattctaaacaataaaatgttacaaaggtgatggaatatgactcctatgagttcattatattatgttagtctgtc

SEQ ID NO: 860793 - DNA, 601 bp, Homo sapiens
gttgtttctttcaagagttaactcatttttctgggcttcagacattgaacaagtaatggcctggccttatccaaaacttgtgtgtatatatatatatatatatatacacacacacacacacacacacacacacatatgtgtatgtgtatgtgtgtgtgtgtgtgtgtatatatgaccaattttrgatttcaagatacctactctcctgaataataacatagttggggaagtgaggatacacggacttcatcttgtaatggaagatgtctcccagttttgatgatgttttgtatatgactacagatagtatgaaccatgtgtagtgagctcctgtctactttcccattatttgtcaacccaggtcttatcattcttctttccaaatggattgggctctatggtgatgtgactgatgtccccctgtgatattcctctgtggccctttgtaataaatgtgcattccttcagatcagctaaacactatgctcttagagttaaacaataaaattaaaattaatacaagccataaacaaaataaaaccaaaaatgccagctaagggtgttattcttccatcttttaggaaaggaagatttgggtacc

SEQ ID NO: 860794 - DNA, 601 bp, Homo sapiens
gttgtttctttcaagagttaactcatttttctgggcttcagacattgaacaagtaatggcctggccttatccaaaacttgtgtgtatatatatatatatatatatacacacacacacacacacacacacacacatatgtgtatgtgtatgtgtgtgtgtgtgtgtgtatatatgaccaattttagatttcaagatacctactctcctgaataataacatagttggggaagtgaggatacacggacttcatcttgtaatggaagatgtctcccagttttgatgatgttttgtatatgactacagatagtatgaaccatgtgtagtgagctcctgtctactttcccattatttgtcaacccaggtcttatcattcttctttccaaatggattgggctctatggtgatgtgactgatgtcyccctgtgatattcctctgtggccctttgtaataaatgtgcattccttcagatcagctaaacactatgctcttagagttaaacaataaaattaaaattaatacaagccataaacaaaataaaaccaaaaatgccagctaagggtgttattcttccatcttttaggaaaggaagatttgggtacc

SEQ ID NO: 860795 - DNA, 642 bp, Homo sapiens
gtttaaagtctgttttgttagagactaggattgcaacccatgcttttttttttttttttgctttccatttgcttggtaaattttcctccatccctttattttgagcctgtatgtgtctttgcacataagatgggtctcttgaataaagcacagcgatgggtcttgactccttatccaatttgccagtctgtgtcttttaattgggacatttagtccatacacatttgaggttagttgttatgtttgaatttgatcctgtcattgtgatgctagctggttattttgcacactagttgatgcagttttttttttgtagtatcattggtctttatattttggtgtgtttttgcagggctagaaccagtttttcctttccatatttagtgtttctttcaggacctcttgcagggaagscctgctggtaatgaaatccctgagcatttgcttgtctgtaaaggattttatttctccttctcttatgaagcttagtttggctggatatggaattctgtgttgaaaattctttaagaatgttgaatattggcccccaatctcttttggcttgtagggtttcagctgagaggtccactgttagtctgatggacttccatttgtaggtggcctggcctttctctgtggctg

SEQ ID NO: 860796 - DNA, 603 bp, Homo sapiens
tctttaagaatgttgaatattggcccccactctcttctggcttgtaggttttctgctgagagatccactgttagtctgttgggcttccctttgtgggtaacctgacctttctctctggctgcccttaacactgtttccttcatttcgaccttggtgaatctgacgattatgtgtcttggggttgctcttctcaaggagcatctttatggtgttctctgtatttcctgaatttgaatgttggcctgccttkctaggttggggaagttctcctggataatatcctgcagagtgttttccaacttggttccattctccccatcactttcaggtacaccaatcaaacgtagatttggtcttttcacatagtcctatatttcttggaggctttgttcctttctttgcactcttttctctaatcttgtcttctcgctttatttcattgagttaatcttcaatctctgatagcctttcttccacttgatagattcagctattgatacttgtgtatgcttcacgaagttcttgtgccatgtttttcagctgaggtcatttatgttcttctctaaactggttattctagttagcaattagtctaaccttttt

SEQ ID NO: 860797 - DNA, 594 bp, Homo sapiens
caggctcaattctcaccctacttgatccatatcagcctcatttattttaggaaagtgtttacaaaactgacttaacaccattctcccagattttctgaggtattgatcaatggatcagacatataaaaagcatctcctacatctttaagctacccctactaaaaccatatctattacrttacccagcatagtaaagattgatgtgatttgttccagaacttacagttaggcaagtgataatctctggagaaaacaatatagatagttgcacagctgtgaagctatctgcctcacctgcaaggaatgtcagaactaaatttaatacttagagaattacatcaccttcagtttcctttttctgtattaacttagatctctgtcttagctttatttccctgtgtataagactatgtgccttttttataagatcaaattcttttatgcaaacaggaaagaaatagattacacatttatttaaaaggtagtaatatgtttgataacatctctaccatttttcaagacattcaggctcaaaccttgtaatcctctctttttccttcccttcattcccgaaagctatgtcacgcagatttt

SEQ ID NO: 860798 - DNA, 571 bp, Homo sapiens
aaatcagtagtatttctatacactaaaaatatctagactgagagtcaaataaaaaacacagtcctatttacaatagccatgaacaaaatgaaatacctaggaatacagctaaccaaggaggtaaagatctctacaaggagaactacaaaacactgctgaaagaactcagagatgacaccaataaatggaaaaacattccatgcaaatgggttggaagaatcagtatcattaaaatacccctactgcccaaagcaatttacagattcaaagctattcctatcgtattaccatgttattcttcacagaattagaaaaaactattytaaaattcatatggaaccaaatagccaaagcaatcctaagtaaaaagaacaaagccagaggcatcactctacctgagttcaaactatactataaggctacagtaaccaaaacagcatgataccagcacaaaaacagacacatagaccaatggaacagaatagaaagctcagaaacaaagctgtgtgcctacaaccatctgatcaacaaggctgaccaaaaaaaaaaaaaaaggactttctattcaata

SEQ ID NO: 860799 - DNA, 689 bp, Homo sapiens
tttcttttctcccctgtctgacggcctgactcgctgattttttctacattcttttttagtatgaccatgcttcccacagttaaaacaagctccaggaaatggagtatttcctttatccactctcagtcctgccattgcatgtgctagcagagtagctttatgcagattacctctgatgccatcacaggccttgatataatcaactaaatgtgctttccctctgataggtcgcagagcagcctggcaattgggattagcattgtcgaaagctaataactgcagcactatatcctgagcagccaaatctgygatcatctttcgaagagactcctgaaaccgagctataaaattaatgtatggttctcttggtccctgttttatagcactaaaggaaaggtattgttctccacctgaagtgattttttcccaagctctaatgcatactcctctaagctgctctatggcatcatcctgcatgaccacttgtgcatgtaaaccagcccagccaccaacccctaaaagttggtctgcagttatattaatttgaggttgggcctgggcattgtgagcagcctgaatggtagcttcacctgtccaccaagttttaaattgtaagaactgagcaagagttagacaagctcaagtaagagcgtctcagtcagtaggaatcatctgactggaaacagcaa

SEQ ID NO: 860800 - DNA, 631 bp, Homo sapiens
taatggtgatggtttcagaatgccgtaaatatacttaaaccattgaattctacactttaagctttacaatatgtaattgtatttcaataaaacttaaaaaaataaaagttggttaaaaagaataaagtttacgtacatgatgtacccataattaaactttatttctggatgatacagaaccttttgttagtctcaatttctggttatttcatttcaataaaatttccactagagggcattcaaagaaaagcagaaagcaaaactcaatctgacagaaaaataatrtattttcacaatgatgtatttgtcacgtctctgtactggggtaaaatggttggtcttcatgtcatatttttgcatatagttcggtattatctaatctttttaatctgcttaatacactcagtttatagttgagagattaatgaaacaactatgataaaggaaatttcgacaatgataaaatgctaggaattagatatccatttccagctatcagaaaagttttgttagatcaaacctcccactgaaaaagactgtaaaagctgataaaatacaaatatgcctggagacacagtagaaaaaccaaggttgccagaacaggagaagccaagctcctggagagaaaagc

SEQ ID NO: 860801 - DNA, 422 bp, Homo sapiens
ttcctgctcctagtacgaatcagtaactcatttttccccattttatctaaaaactaagatcctgtcttatgaggtatttccacagaatggagaagagttcatgctactttacacatggaaactgagacttcaatctcaagcttagaggctgatttccaagactttgttattaatttcacttcatgagacaagactactgatcccrtattagttaaaaaaaaaaagttagaagccaactttctttgcatctatcaagtacgtgaccatctatctagctttcgcaaaatctagccatttatgttttatggctgactctttccttgtgctctttttcttgagaggtaatttttctcagcaatggcattgctcaacaaaaaaggctacatcaacagcctgaaagtaaattcatctgaagatctgtt

SEQ ID NO: 860802 - DNA, 605 bp, Homo sapiens
gcaattctattaacctgggcttttccatgtctttagtattagttttcaaatagacttgaagtaagtaaatacttttaaaatcaggtgaattcaaatcaagaagaagctgagaaaatatgtatatctcaagtgcataacctctggtgcccatgatggtatgtaaaatgtttcaggaagatgaggtcctctgtgtgacttggggaggtgaaagtgtaggtaggtgttaggataagtaccaagtagacaatctgaacaagattgagtcatgtacatttccacgccgccaccaatcttcatctgtggaacaacaagaatgtaatctctagttctctccattatcacaagagggtttaataagtttggcyttatatacagtggtttctgcttctaacctgcaactgattgcacatctttgcatttgagtaggtacagttcgttgaagaggaagaagagaaatagagggagtcttatgagataaattattctctgtttgactattagctgtcttgtggattctgaatatgtctgtgccagtttagataatttaagtatttttaattatgtcactgtattatagaaaatatttctttcaaacaaaaatatgg

SEQ ID NO: 860803 - DNA, 614 bp, Homo sapiens
gagcaaaaaaaattatacaatctgaaagccaggcaaaactataacattcataacttgggaagatacagtgaaagatatacataaagagaaacaatggcattaaatgtatctctaaaacaacaaacacacactaaaaatgaataagaagccacctgatgacccacatacataaggtcaaactaaacytaaatgaaagagataatatatataagaaaataattttttaaaaaaatagaaaataaatgccccaaaggggatcaacaaagccaaagtctggttctttgaaaaaaattgaaagatgtattacttccagtacttaattttccgcatatgtctaaatgttttatatatgaatatatatgtagctattcatgtaatgaatatgtcatatctaatatataaaataatttagctatattaatattaaatatattattttcttggtatttatgattaatgatagtcatgtcttaattttgaattactttattcaaaagataaagtgacttttttgttccatttaacatattgtacttttaacataatatcaactcatgttctgttgttgattatgcttgccttgttgattttgagtattaagttactttgaattt

SEQ ID NO: 860804 - DNA, 606 bp, Homo sapiens
cttgcttcctcttcaccttctaccatgattgtaagtttcctgaggcttccccagccatgtggaacggtgagtcaattaaatctttttcctttataaattacccagtcttgggaatttcttcatagcagtgtgagaacagactaatacaggctgcctgcattctttgggtaatggcccccttccatcttcaaaggcactaatggatagtctttaccgcattttattactctgatatgtatggactcttctctcacttccaacataaagggctttaggattacactgggcagacccagataatccatgataatcactttatttcaagatcagtgtttagcaaatttagtgccaccygcatccttaattcccccttgacatgtaatatgtaaattggcaatatatagtctaatatattcacaggtttgagggattaggacatggatatctttggggccctttattctgtatagcacagtatgttttaaaattttataagctataatacttttatacatatgaaatgatttgaaggaaatgtaataaaatatcaataaccaatcccagtggctggataacaagtagtttttggtttttttcctctatact

SEQ ID NO: 860805 - DNA, 606 bp, Homo sapiens
cttgcttcctcttcaccttctaccatgattgtaagtttcctgaggcttccccagccatgtggaacggtgagtcaattaaatctttttcctttataaattacccagtcttgggaatttcttcatagcagtgtgagaacagactaatacaggctgcctgcattctttgggtaatggcccccttccatcttcaaaggcactaatggatagtctttaccgcattttattactctgatatgtatggactcttctctcacttccaacataaagggctttaggattacactgggcagacccagataatccatgataatcactttatttcaagatcagtgtttagcaaatttagtgccacccgcatccttaattcccccttgwcatgtaatatgtaaattggcaatatatagtctaatatattcacaggtttgagggattaggacatggatatctttggggccctttattctgtatagcacagtatgttttaaaattttataagctataatacttttatacatatgaaatgatttgaaggaaatgtaataaaatatcaataaccaatcccagtggctggataacaagtagtttttggtttttttcctctatact

SEQ ID NO: 860806 - DNA, 584 bp, Homo sapiens
caatctctcgtaatctacccttccgcaagcaagtctatatttaaatttatactccaaatcatgtctgccacatagttgaacataggaagttccttagtaaaatttgggcctctggtgagcagaatagtggtccttccaagggtacataggccacaagtagagcatgggagtaatattagatatatactgatctgaaatggaagggcaagaattaatgaaataactacctgaagagtcttgctccggaaatatacgtagttataaaattttcaaagatctggaggcacagaagcatgtgccaacattaagaaagcagccagtatcttargtctctgatgagacatcagattgccatgaagtttatagatttcgacagcaaaggaaaccaggatgcgtagtgcttcagcaggtgaccagtcaggcagcaagcaacatttatgttcagtggggacaggcctcagcctctgtgttactctttaaatatataactttagtgtaagagcagaagactactgagtttatggaagaatgtcaagctcttagttggggttatagggcagaattctagcactgaacataaaagg

SEQ ID NO: 860807 - DNA, 589 bp, Homo sapiens
ccttatgaaccatacaaatatattagctattcaaaaatttagaaataaataaaatgggacagttggtcttaattgagaagcccagtttctacagctacttaaatataaaatgaatgaagtcacaatatttttaaaaagctgtgatttggccaggcacagtggctcaggcctgtaatcccagcaatttgggaggcaggaggatcacttgagctcaggaatttgagaccagcctgmgtaacacagtgagaccttgtctctactacaaataaaagattaaaaattagccgggtttggtggtatgtacttgtgggtagtcccagctacttgggaggctgaggcgggaggatcacttgaatccagaagatggaggctgcagtgaactatcatggtgccactgcactccagcctgggcaatagagtgtgaccctatctcaaaagaaaaaaaaaaatgtaatttgtttgtggatcattgatcttatttttataggtagttatcacatgatggtacctgatacattaatataattcttttcatttctatttttttccctaggttatctgggtgtttacgtgtatagtgtccatcatt

SEQ ID NO: 860808 - DNA, 724 bp, Homo sapiens
agcaggtcaagacaccaacaatcagatgtaataatataaagctgactcctaactgaggttccacttagctaaggcttctttgctacctctataaggggaggaaatgattccaggatgtgggtactaggtaggtagggtagagaagtgattgtgcttggcaaaagagtatgagaatatgctgacaggttctgttctagttctcttagcagattttgttattagctcatttgaaatcactcttgttctttgttgtacatttcactctaagcattggctgagatccattgtagactatattggccagagagttcaatgaattacttttggggacagtcttaacatatttaatgccagaatatttcccacacaacgaatatttactttcaaatattataatgacagttatgatagctaaagaagactccaaactttatacttgaacagaggtcttgatttgttttcctccataattctcaaattctcttttattattgacyatgggtcttgtgtcttgactttttaaaattaaatgtttattttgacataattgtaaattcacatgtagttgtaaggaataatatttagatcctatataccccttacccagtttctcccaatgagtaacatcttgtaaaactgtagcataaaatcacagtaggacactgacattcaaaatagaggccttgacttttaggtcaatagtaacattttgaacccgataagc

SEQ ID NO: 860809 - DNA, 634 bp, Homo sapiens
ttagtgactctatacataatacctttgaccatatgtggagaaccaaggaacataatgaagctggttggttggttgctcttaagttcactggacaaaatgatgaaagaaaataatgaactcagggattctgtctcccagtttcagaaacagacactgagcctcaaatgtgctgagatggccctgagtgagagtcttatctcctgtagagaaagagctgaaattgtggaaaaacagacgcaagctcttatcacatgagtggctgatctgcaatgaaaggtgaatgcacagcctcgccaggtgtctactgttaaagtgaaggcattgattggaaaagaatgggaccctgaaacttggaatggggatrtgtgggaggaccctgatgaagctggggacactgagcttataagatctgatgaacatttttttgccagaaggaacagcttccccatccccagtagtgggaacatcccctccctgacccatgctgccatcagtctttccacctttgtctgaggagacacctgtgatgtctgaggcaacagtgatggcatcccctcaggcagttgccaggcaagataatgttgattctcctcaggagacacccccaacacctctctttgcttctagacctata

SEQ ID NO: 860810 - DNA, 653 bp, Homo sapiens
gatgctctgaagcagcgtccaatatatggtactgtttctcccatagccaggattcacaggtccaggaatcaaagggtggaaatggaagtggcaccactcaccatcacccctagcgatctactagtaaaatttttgcttcctgttcctgcaacattacgttctgctggcttagaggtcttagttccagagggaggaacactgccaccaggagacacaatgattccattaaactggaagttaagattgctacctggacactttgggctcctattacctttaagtcaacaggctaagaagggagttacagtgttggctggggtgactgacctggactatcaagacaaaatcagtctactactccacaacagaggcagggaagagtacacatggaatacaggagatccattagggtgtctcttagtattaccatgccctgtgattaagattaacaggaaactacaacagcgcaatmcaggcgggactacaaatggcctagacacttcaggaatgaaggtttgggtcactccaccaggaaaaaaccatgacctcctgaggtgcctgctgaagccaaatggaatacagaacggacagtagaagagggtagtcatcagtaccagctacgaccacatgaccagctgcagacacaaggactg

SEQ ID NO: 860811 - DNA, 603 bp, Homo sapiens
aaatatttattgcagagaatctttttttttttgagacagagtcttgcgctgtcacccaggctggagtgcagtggcgggatctcggctcactgcaagctctgcctcccaggttcatgccattctcctgcctcagcctcccgagtagctgggactacaggtgcccgccaccacgcccagctaatttttgtatttttagtggagacggggtttcactgtgttagccaggatggtctcgatctcctgacctcatgatccgcccgcatcggcctcccaaagtgctgggattatagttattgcagagaatcttgaagattctatatagtcagatatccrgtctttgcttttatgacttctgggttttgtgacattatttgaaaggccttcccctatttcaccagtataaaagagtttttccatcttacccttgattacaggttagcaaactatgtctgtgggccaaatgtagccctgtttttataaacaattttattggaacacagctatgctcattcatttaagtattatctatgggggctttcacactataatggtagagttgagtaattgtgattgagaccatatggtccacaaagcgtaaatatt

SEQ ID NO: 860812 - DNA, 718 bp, Homo sapiens
ctacctgaaagttaataattcaggaggaaatatcaatacctcaagaatatggttcagcccagcatgagctgacttgattgactcaggaatatgacaccaaaccctaccaacagctgtatacacctgaccaaagagtgatagagagacagacagaagccgggcgtggtggctcacgtctgtaatcccagcactttgggaggccgaggcaggtggatcacctgaggtcagsagttcgagaccagcctggccaacatggcaaaacaccatctcttctaaaaaaaatacaaaaaattggctgggcgtggtggtgggcacctggatcccagctgcttgggaggctgaggcaggagaatcacttgaacctggaaggtggaggttgcagtagccaagatcgcaccattgcactccagcctgggtgacagagtgagactctgtcaaaaaataaacaaataaagagagacagacagaaagacagagacagaaagagaggatatcagagggtcagcgctacatactcccatcagaagaactttctgccactggcctggacgtgagtcagcacaagaagtggcatataattataccattattaatttctatgacacatttgaaaggtcatcttcttgggagggaaccagcaagtatcatggaacaggtaccagttttattgtcaggcttccctgggttctatgctgatgtttgaagctggatgacttgg

SEQ ID NO: 860813 - DNA, 636 bp, Homo sapiens
atattgtttttataaagcatgctgtagactcaaatgagaaactcagttcttcctcacaagaagacagtatctttagattgcttaataatagttctcctccttctcaaaagcccgtcacctccccacaattacatattgccctagcttctttcctgcctcctccttttccttcctttctcatttcttcctctcttccctcattttcttgcccattcccttccttcttccctcttccctcttcagagtaaaaacaaattcctctttttattctttccacaacttagtcatttgtgtgtgtgtgcgtgtgtggccttggctcttgatagcttcaaaatgtcttcttctcccwgtgacttatgaacgtattttcttacacacaggcagtatcctctctatgaattcctttcctttttgttctcctgtaatgtccaacctaaatgccatctctccctttcctacacccagacatctgattctacaccctgactctccatcccacttaccaacccccagtcaatggtttgtgtgtttcttgcttagctatttaagcttaattgtctggtgtgccctaaagctgaaatttctctatttttcatgtctagtaccaggttttagttttagtaggtgtttaataac

SEQ ID NO: 860814 - DNA, 671 bp, Homo sapiens
tacaagaactttttgtttatgcataccacatatttttaaacttttttcacaggttcattgagatataatttatgtattatttaattcactcaattaaagtataaaattcaggtttttttagtgtattaactgggtgcataaacaatcrcaatataattttagaacacttttatgctccttataagaaaccttgcacccattagcaatcttttcccattttccccactcttcctttaaaaccctcccagccctaggcaatcatccatctacttcctaaggatttgccaattctggaaggatttgcctattctggacatttcatgtaagtggaatcataataatatatagttatgtgtgactcactactttcacttattttttcaatgttcatcctttttggagcatctattaataccgttttctttttcattgccaaataatattttattttatggacagatcacattttattaatccactcctcaactgatggacatttctgttgtttcctactttttgttgccataaacagttgtatgctactttttgtgtaaggcatttgttttaattcctttttgctgtatacataggagttaatttactgagtcgtgataattctatacttaaccttttgaagaacagtttcatttttctgcacgtggcttgccaat

SEQ ID NO: 860815 - DNA, 671 bp, Homo sapiens
tacaagaactttttgtttatgcataccacatatttttaaacttttttcacaggttcattgagatataatttatgtattatttaattcactcaattaaagtataaaattcaggtttttttagtgtattaactgggtgcataaacaatcacaatayaattttagaacacttttatgctccttataagaaaccttgcacccattagcaatcttttcccattttccccactcttcctttaaaaccctcccagccctaggcaatcatccatctacttcctaaggatttgccaattctggaaggatttgcctattctggacatttcatgtaagtggaatcataataatatatagttatgtgtgactcactactttcacttattttttcaatgttcatcctttttggagcatctattaataccgttttctttttcattgccaaataatattttattttatggacagatcacattttattaatccactcctcaactgatggacatttctgttgtttcctactttttgttgccataaacagttgtatgctactttttgtgtaaggcatttgttttaattcctttttgctgtatacataggagttaatttactgagtcgtgataattctatacttaaccttttgaagaacagtttcatttttctgcacgtggcttgccaat

SEQ ID NO: 860816 - DNA, 671 bp, Homo sapiens
tacaagaactttttgtttatgcataccacatatttttaaacttttttcacaggttcattgagatataatttatgtattatttaattcactcaattaaagtataaaattcaggtttttttagtgtattaactgggtgcataaacaatcacaatataattttagaacacttttatgctccttataagaaaccttgcacccattagcaatcttttcccattttccccactcttcctttaaaaccctcccagccctaggcaatcatccatctacttcctaaggatttgccaattctggaaggatttgcctattctggacatttcatgtaagtggaatcataataatatatagttatgtgtgactcactactttcacttattttttcaatgttcatcctttttggagcatctattaataccgttttctttttcattgccaaataatattttattttatggacagatcacattttattaatccactcctcaactgatggacatttctgttgtttcctactttttgttgcyataaacagttgtatgctactttttgtgtaaggcatttgttttaattcctttttgctgtatacataggagttaatttactgagtcgtgataattctatacttaaccttttgaagaacagtttcatttttctgcacgtggcttgccaat

SEQ ID NO: 860817 - DNA, 628 bp, Homo sapiens
gagacaagaaaaacctgtcacacattgatattgatagtaattgataaaataatttgccattctttactgcacacaaactaggctgtgacaacaaggtaaccagaaattgtgtatgctctcctataaataaatgtcttactgttttcaaacttacgtttagttcrttttatttgatggttaaagtattttgaatgccttatcttgtgtctgtatctgataacttttttattgtctctatgtctgtataggtacgtttgtgtgcttgggaatatggtccatgcaattcaaataaaaacgaaactgtgtcagttggttgaagtaacgatggcaaggagagatgacctctcattttgccgagagatgaaatttaggtgagttctcaaaagagcaatgtagggtcttgtaaatcttaatttgttgaatgaagtacagaaatagagtagatatctggttattggtaggaagaaagacataaaaagagagcagtttacatgtttgtttttctctgtgtctctcctcaaatttccctaagctttgtgcctgtggcaagcctccctttttctaaaactctgctgtacttgagctaagaatttgattctgtttccaatctgatagcataactaaaggc

SEQ ID NO: 860818 - DNA, 566 bp, Homo sapiens
agtattctctgatggtagtttgtattttttaattttcttttgtacttgagatgaaccatatttgcattctaaccccaacctttaatacaaccaggatgtttttactttcccttttttgtgtaagtagaaagcaaacattggtgaggaaggtagaagatgtgtgtcccctcctctttarttttttttttttttttttgcgacagagtctcgctctatcacccaggctggagtgcagtggctcgatcttggctaactacaagctccgcctcccgggttcatgccattctcctgcctcagcctccctagcagctgggactacaggcgcatgccaccatacccggctgactttttgtatttttaatagagacagggttccactgtgtttgccaggatggtctctatctcctgacctcgtgatccacctgcctcggcctcccaaagtgctgggattacaggcatgagccaccatgcccagtctaaaatctgactagtttacaaatagcaaagatttctggaaaacaaagttgggttggtttttttttcaggatcagaaactgttatatttg

SEQ ID NO: 860819 - DNA, 574 bp, Homo sapiens
tttatctgcataaaggtgtttatagtattctctgatggtagtttgtattttttaattttcttttgtacttgagatgaaccatatttgcattctaaccccaacctttaatacaaccaggatgtttttactttcccttttttgtgtaagtagaaagcaaacattggtgaggaaggtagaagatgtgtgtcccctcctctttaattttttttttttttttttgcgacagagtctygctctatcacccaggctggagtgcagtggctcgatcttggctaactacaagctccgcctcccgggttcatgccattctcctgcctcagcctccctagcagctgggactacaggcgcatgccaccatacccggctgactttttgtatttttaatagagacagggttccactgtgtttgccaggatggtctctatctcctgacctcgtgatccacctgcctcggcctcccaaagtgctgggattacaggcatgagccaccatgcccagtctaaaatctgactagtttacaaatagcaaagatttctggaaaacaaagttgggttggtttttttttcaggatcag

SEQ ID NO: 860820 - DNA, 611 bp, Homo sapiens
tggggtgtgtgcttatgaaaactgtccacctctcctataaagtgttttgtgacctataaagttgtgtaaggagtaaatttgagattttctttttttctttctttctctttctgggggatatggcactgtcagtttcagattttcagtccttttagcttcttacttagacctactggagctcctcctggccttcattttygcctggtgggaagcctagctccaggacagatgagtacacagtacatcagggcagagcatccatttactccattatgaaggtcttgtctgtctatatgccatcagctttgtcaaagagcacttgggtttgacttgtcttttgatactcctctgtttctgcggcttagactaccatgtattaagtgatgctttttgaattgcggattttccaatctcctcatagatagtccgcagacgtttcagacttgaaatgtccaaaacttaattcagtatctcttccaatcaacctcctcttcacaccatatttctctttctcagtagcatcatcatctcttctagttccccatctagaaaccctaatcattttaaattctttcctcttatttctttttttttttcctggtgtcccctgg

SEQ ID NO: 860821 - DNA, 613 bp, Homo sapiens
tttgaaaaagtcagagactatcacaacaaaaaagaaacaagatacacaaatagtcaccccctaagttttgttaagaataagacaatcctgcccctcacgcctggctcagtcaccagcaggaggagggcaccctccacagattgcaggagaaggggaaggactcctcctttccctaggtgcacctccactgctgccaccaaggcctggtacagtacccgcaggttcctccccatccccaggtcgggctgggccctgcagcgctcctactcccccttcccagcccccagacttaatgctgataccaccactagcaccgatgccartacaaccgctgtcgccctcaatgcagcagcccaccctacaaggctcctaccaccttgcccccgcgggcaccctcctaccactccagtcgagctgcagtctccgtcgctgccaccaatctcgtgagaccagctgcagagccatatgcaggctccagtttaccacaggtgactcttccttgtcctcctcctccatcctggcttggagcagctgggagggcaaaaccagaaaagcctagaatgggatgcagagagtggtagccttagagcctcaccttgtcacgctggccact

SEQ ID NO: 860822 - DNA, 501 bp, Homo sapiens
gtcagggaggtttcacatcaccaagattcctatcccagaaaagcagatattcatagctctgggaatggaatgcaacccttgtggagagcctataaacggatgcatggggggcgcctgtccatatggataagatacggctataaacgccctcatcttgccacagctcttctaggcctctttagggtgaaggcatactcccttctgagaatttctggtctaaccrgttgtctagcttcacgtcctgtttccatggattgtttgtaaccagcttttgttgcaattgttactgctgattaatatcttgctaatcataggttatggaaagactgtgtttctgttctaagactctgttagaaattactgatgcacacactatattgtaaattcttatctttgtataccgtacttctacatacaaatgtactgtacttctacatacaaatgctatgttaaagaattacttcatccccatgtgaccatctcacctcataatcaaatgac

SEQ ID NO: 860823 - DNA, 501 bp, Homo sapiens
gtcagggaggtttcacatcaccaagattcctatcccagaaaagcagatattcatagctctgggaatggaatgcaacccttgtggagagcctataaacggatgcatggggggcgcctgtccatatggataagatacggctataaacgccctcatcttgccacagctcttctaggcctctttagggtgaaggcatactcccttctgagaatttctggtctaaccagttgtctagcttcaygtcctgtttccatggattgtttgtaaccagcttttgttgcaattgttactgctgattaatatcttgctaatcataggttatggaaagactgtgtttctgttctaagactctgttagaaattactgatgcacacactatattgtaaattcttatctttgtataccgtacttctacatacaaatgtactgtacttctacatacaaatgctatgttaaagaattacttcatccccatgtgaccatctcacctcataatcaaatgac

SEQ ID NO: 860824 - DNA, 615 bp, Homo sapiens
gttggctcatctgtaaacttgaagcatatcccttccctggaggcgtttgtttttccaaggaagtatcctaatgtactcttctttctttctttttttttgttttgaggcggagttttgctcttgttgctcgggctggagtgcagtggcgcaatytcagctcactgcaacctccacccccggggttcagccagttctcctgcctcagcctcccgaatagctgggattacaggcatgtgcactacacccagttaattttttgtatttttagtagagacggtgtgtcaccatgttggccaggctggtctcgaactcctgacttcaggtgatccacctgccttggcctcccaaagtgctgggattacaggcataagccaccgtgcccagcctcccaatgtactctcagtgatgtgcctcagcttgagaaggcacagaacaacatgtttcttttccaaatagatgatgtaagatgtggagacacagaaagttgggagtaacttcacatcaggaagctgcaccacctgtgggttgtgtggcctttggtaggtcacatcactgatcttagcttcagttctcccatctctcaagtgaggacagtatgtgccctgcatacgtccc

SEQ ID NO: 860825 - DNA, 656 bp, Homo sapiens
gatacagccatgcctgaaagttgcactacacttgagcttgcccttagacaaaatgtgtaagagctgggattccaaggacttggttgtgagtctttttatactgtcttttatggtcccaaatatccattcccactgtacttgcattagctcatacagcccttggattcattccaagggctactggactttgcctttaccaagrgacagttaaagccaccagggtggcatagttcaaatccttcactgtaatttcatgtaaataaccttctggcagcttccttttcactgttgtgctcttgtctgccagccaatctcaggcctgggcttcccccaggagatgttaactcatcgtcccttatctgcttgactgactgtcatcttgacacatcattgagctggtgatgaagcccttaattagttcatgtctccaggccgcttctattgccacctcttcttctgtttgctctttctaggcttctctcttttcttccctttaccatctccaaagagaaaattctaccaggtattctatgctaagcactttgcagtactgatgaaatcatcctctcatcagccctctaaaatggcaactatgatcctgagtttacagaagaaaaaactggcccagagaggttgcacttagtggtgttagtccc

SEQ ID NO: 860826 - DNA, 638 bp, Homo sapiens
ctttgatcactctacacatgagaaaaagaaagctatgaagctaaggggcagataagacagtaaacgtaagccacatttttctagctgttcattcttgccccttcccaaaatccacctgcccctctatctttggtagaccatctagtgctttatttttcccttgagatagcctctggattttattacttgtaaccgaaaagacacaacctctgttcgctccacctggaacataaatttctaagctttttgcaatgttaactccttatgtaattcagcttctaagttttgcctcaaatccaccatttacatggagttcttaaagcactgtaattacttaataatatttaatagtgaatggataaatgaaatcttaccaatacytaacgttactttgagaaaattcattcacatctctgaacctcagtttccccaactgtgaaacagaagcatagagagccaacctcaacaaggcagctgcggagactgaaaataaggtgtgcaaggtgcccggcacagaggaaacactcagtgaacagcagccactctggacaatgatctgcaggcatccccagtgataggcaattgattcctgccccaggtaatgtcctctttctatgtcttggctcgaacctccagca

SEQ ID NO: 860827 - DNA, 645 bp, Homo sapiens
tttcactgtcactgtatctgagtttgaaccacagctcagccatttaggatctggatagccccaggcaagcaacttttcttctcaggattccaggttttaaatcgctaaagtggggatagtaatacatcctatctcatagtgctgtatcttaatcttaaccttaatcttaatcttgtgctttatagrgcgtaacataacaatggctaccacagtcattattattcacataaaatccattttgcaacagtataattattggtgtcaatagcaatgcccacgcggatttttaggtagcattgatgtgacttagtgccagatcaaagagtaagaaatatttgagtgaaagattactaccagctcgatgcagacatcctctcaaaaaatatttatttattcccctaccgtgtgccaggcactggcctagaaaccagtgacacagaagtaaatatgacagacaaggtctctggttccattgaacttcatcaggggcgggtttgggaaatgagaccacagatagaaaaaacattaaggtatgaatattcaacatatcaagtagtgatttgttctacgaagaaaagctgcgcagggtagagtaaaaggtgatggagagttatatgaaagtatgacttaaatgaatggtcagaa

SEQ ID NO: 860828 - DNA, 645 bp, Homo sapiens
tttcactgtcactgtatctgagtttgaaccacagctcagccatttaggatctggatagccccaggcaagcaacttttcttctcaggattccaggttttaaatcgctaaagtggggatagtaatacatcctatctcatagtgctgtatcttaatcttaaccttaatcttaatcttgtgctttatagggcgtaacataacaatggctaccacagtcattattattcacataaaatccattttgcaacagtataattattggtgtcaatagcaatgcccacgcggatttttaggtagcattgatgtgacttagtgccagatcaaagagtaagaaatatttgagtgaaagattactaccagctcgatgcagacatcctctcaaaaaatatttatttattcccctaccgtgtgccaggcactggcctagaaaccagtgacacagaagtaaatatgacagacaaggtctctggttccattgaacttcatcaggggcgggtttgrgaaatgagaccacagatagaaaaaacattaaggtatgaatattcaacatatcaagtagtgatttgttctacgaagaaaagctgcgcagggtagagtaaaaggtgatggagagttatatgaaagtatgacttaaatgaatggtcagaa

SEQ ID NO: 860829 - DNA, 627 bp, Homo sapiens
actggatttctcacaatcttagaatagtgctagcattcttgcaaattttgagagtggccaggtttatcaaggatggtcctcgctgccaccagaagcaggtccagttgatattccagttgctgtcactcacagctacagaacttgtaccatgctttctttaattccagacagcattctttctccttggtcaggcagttttgcctgtgttgggtcagtgaaccagtgaaccatgggtcacatggttctgatgagggcagatgagctttctagtcccttggttctgcatgtcaaccctcctcttttcatatccatggttagcattgactcctagttactgggatcaggaagcagagaagtttattaaattgctgatgctacaaaacgtatgggaatctggcaatyttagatacccaataactagcccattaggctagtcatcctagagtacagagttccataaagacggtattaggcaccagactttgtcttttgtttttgactcctaatcggagaaggctaaaactttgctgctggatgcagtatacaataaactggttaatgacttaagctactcagctttattaagaatctactaggtgctttaccttttctggaagtctgacataa

SEQ ID NO: 860830 - DNA, 651 bp, Homo sapiens
cacaacataggatcagcagaagccagtaagtaggacctagattcctgagaggctgggattaatgcaaagacctgtgaccttgtatctgcatatgttctgtattttttttttcaattttgtgggagttttcactaaatttcttggtattcaaaaaggatccttgaagatmttaggaatcattgctttagagtatatgcaattacttcagtggaaatgtgatttcaaatttattctcagcaaatttgaagaaacaacagcccactcagctcctctgtacccagactgtagaatctgatctacagcagggtttccctaccccagcactaccgacactttggctcagatcagcttccaagttttagaagaagttgggaacgtgggaactactctatgtcttctaagtgtttctggcaatctgctctccatcttctggccactctatgctttctccactgtaatcacaagccagcccttcccatggtaaacaagaccactcattaaaagaatattatttattcgcccctttagcatagcactagagttccatcagacctctacattccaccagttcaaagaagaaaaaatatgtatctccatgtaaatgcatcaccccacaaaaaaaaataagatttaggttgactatttctctcc

SEQ ID NO: 860831 - DNA, 661 bp, Homo sapiens
caccatgatcaagtgggcttcatccctgggatgcaaggctggttcaacatacacaaatccataaacttaatcctgcatataaacagaaccaaggaaaaaaaccacatgattatctcaatagatgcagaaaaggcctttgacaaaattcaacaatgcttcatgctaaaaactctcaataaattaggtattgatgggatgtatctcaaaataataagagctattatgacaaayccacagccaatatgatactgaatgtgcaaaaactggaagcattccctttgaaaactggcacaagacagggatgccttctctcagcacgcctattcaatatagtgttagaagttctggccagggcaatcaggcaggagaaggaaataaagggtattcaattaggaaaagaggaagtcaaattgttcctgtttgcagatgacatgattgtatatttagaaaaccccattgtctcagcccaaaatctccttaaactgataagcaacttcagcagtctcaggatacaaaatcaatgtgcaaaaatcacaagcattcttatacaccaataacagacaaacagagagccaaatcatgagtgaactcgcattcacaattgcttcaaagagaataaaatacctaggaatccaacttacaaaggatgtgaaggacctct

SEQ ID NO: 860832 - DNA, 676 bp, Homo sapiens
aaaaccccatagtttctgcccataatctccttgatctgataaacaacttcagcaaagtttccggatacaaacttaatgtacaaaaatcagtagcattcctatacaccaagatccaaaccaagagccaaatcacaaatgaaactgcattcacaattgccacaaaaaataaaatacctaggaatacacctaaccaggcaggtgaaaggcctctacaacaagaattacaaaacactgctcaaagaaatcagcaaaaacacaagcaaatggaaaaacattacatacttatggacaggaagaatcaatatcactaaaatggccattgtgcccaagacaatttacagattcaatgctatttctatcaaatgactgatgacattcttcacagaactagaaaaactattaatattttaaaattcatatagaacaaaaaaagcccaaatagcaaaggcaatcytaagcaaaaataagaaaactggaggcatcatgttacccaacttcaaagtatactacagggtactggtaaccaaacagcatggtacttgtacaaaaatagacacatagaccaaaggaagtgaacagagaacccagaaataatgctgcacacctatgaccatctgatcttcgacaaaccttacaaaaataagcaatagagaaagcatttcccatttaataaatg

SEQ ID NO: 860833 - DNA, 532 bp, Homo sapiens
cttgtgctgtggttttcagctccagcaggtcatttaaggtcttctccacattgtttattctagttagccatttgtttaaccttttttcaaggtttttaacttccttgctataggttggaacatgatcctttagcttggagaagtttgttattaccaaccttctgaagcctacttctgtcaactcatcaatctcattctctatccagttttgttcctttgctggccagtagctgtgatcctttggaggaaaagaggcactctggcttttggaattttcagcttttctkctctggtttctccccatctttgtggtttcatctacctttggtctttgatgatggtgacctacagatggggttttggtgtagatgtgctttttgttgacgctgatgctattcctttctgtttgttagttttccttctaacagtcgggcctctcagctgcaggtctgttggagttagctggaggtccactccagaccctgtttgcctgggtgtcaccagcagaggatgcagaacagcaaatatttct

SEQ ID NO: 860834 - DNA, 641 bp, Homo sapiens
aaaagtcaccattgcaaacagtatatctaggcatatcatttagaagtactgagatgtatatgcaagaagaaatggctaaaagaatcaaaagtagttgcctctaggaagaagcaacgaaagagtgtgaagagtgatacagggaaccattgtaatttctttaatactatttaacaatacttttatttttatttatttatttattatttttatagaaacagggtcttgccatcttgcccaggctggtctcaaactcctgggctcaaacaagtctcctgcctcagcctcccgaagtgttggggttacaggcatgagccactatgcctggcttaactttttcaaaaactaaaattaaaaaaaaaaaattcttttagagacaaagtctcactgtgttgcccaggctgaagtacagtggagtgatcacagctcactgcagccttgaactcctcggctcaagcaatccttttgcctmagcctcccaagtagctaggactgcaggcatgagccaccaagcccagctaatatattttttatttttagggatgagatctcactatgttgcccaggttggtcacaaactcctggcctcaagcaatcctcccaccttagcctccagagtcactggaataacagacatgaagcac

SEQ ID NO: 860835 - DNA, 650 bp, Homo sapiens
ttttttttttttttgagaccaggtttcactcttgttgcccaggctggagtgtaatggtgcgatctcagctcactgcaacatctgcctcccaggttcaagtgattctcctgtctcagtctccctagtagctgggattacaggcgcccacgaccacgcccggctaatttttgtatttttagtagggacggggtttcatcatattggtcaggctggtctcaaactcctgaccttgggtgatccgcccacctcagcctcccaaagtggtgggactacaagcatgagccaccgygcctggcctccttgaagattttaatatcttcctgagtgtcctgaaatttcacaatgctatgttgggtgtgggtctattttcttgcattgtggtcggcattcagcaccacattcagtttccaatttcagtcaggaaactcatgtcttctagttctgggaaatgtgcttgaattactttgttgatgatttcctcctttcagttttctctgtttcctcttttgaatactcgtattcaaatactgtacttcctgtactgatcctctaattattttatcttacttattttcccctgttttctgtctcttttctttctcttctaatttctgagatgtttcctcaacattaccttccagccattctat

SEQ ID NO: 860836 - DNA, 648 bp, Homo sapiens
agcacagactacaaagaattaagactatttaaccaagcattgttgagttttaaaagtgatcatgggtcttaaatggtcagacaaaacgatatgcttttattgtttaacatttggtagaacaaaggtcattctctttttcacaatmtattttccatatgaaaagggcaaagagttattattgtgttaacataataatatatattgatatgaatatggctatatagcaagctgcacttaaaactgcttttccttttctaattaaaacatttaaaatcaaaccccaaatatttttgttttataattagactttggcaattttatttctgcacttcttataaaagttttttttgcccaatattttagtgtggagaataaatagagtatgttccaaagtgaaatgattaaaagtgtgagatttatcaattagtttgtagatattataaaagcaacacaatattcgattaagaaaaacatgttactaaaaagcttttattgagtcgccagcagttagtatcacagatgaactagctgcagtttttgcatacaaataacctgtaatttgaggtatgagataaagaaaaaaaatttttgtggggggggcgggtaatacaatgccagagcatctcagaatgctgagtcagcctcttt

SEQ ID NO: 860837 - DNA, 628 bp, Homo sapiens
cggcacattcccagatatgatagctacaagaacaggcccccttgcttgagaaaaacagagagaggagtaaagaggactttgtcttgaacttagcagctcaactacagtagagaagagcaccaaatgggcattggggtcccccgttccaggccttggctcttgtacagcatctctggacctaccttgggccagaggggagcccactgccctaaagagtgagtcccaggcctggcagcattcaccacaagctgaccaaagagcccttaggccttaagtgaacattggaggtaccctggcagtactccttatggacctgtggtggtggtggtgaacatgaggagagactcctctacatagggaargggaaggaaaggatggaaaaaacttcattttgtggcttgggtgccagctcagccacagtggaacagagcaacaggtatattactaaggtttctgactccagaccctggctcctggacagtatctctggacctgcctaaggcctggaagaatttgctgcccttaagggaaggacataagcctggttggttttaccacatgctaattgtagagccctagggccttgagtgaacatagccagtagtcagctagtggttccagttggtgc

SEQ ID NO: 860838 - DNA, 655 bp, Homo sapiens
taaatagccctatttggttatgtcagccatccatctggagtatttcaggagagcagagttgggaatctgggctccagaaacataccatcttgggttcaaatcctcactccacctctaatcaagcagctgtgtgttcttgaacaagttactgcagwtgcctacccactagtaaaatagggctgatgatagggttagagtaatgattaaacaaaaacaacctcttggcctaaggcctaacaaatggtaaataccccataaataatgttattcaatagttgctggaggagaacagctgtgaagtaatcccctcaattaaccagtaaaatctttctcttcagaatacctcagagccatcttgagctttgtcacatagtactaggtaagccagagtagcggacatttcccaaattcttcaacatctcctctcttctagatagttttatttcttgtttactttttgagtctcaactacctcccatatttattttatcatttgatttttatttggtatgatcacagctgtctttatcttttacccttgctctgcctatgctgaataattaaatattgaaaggtataagattccatttctcagcctgttttcaacatctaagtacagatactttatttgtactcttttgcttatttgaaatct

SEQ ID NO: 860839 - DNA, 630 bp, Homo sapiens
tgtaaaatcccatgtgtttcacaagatcttgattatctggtcaaaatctaacaaaagtaaaaatgaggaagaactgagtggaagagatggcaactgtatctgacaggcagccctctgcttatatgcttcgagggacagacacagggagggagctttgtcctcttcacagcttcttccccttacccctcacctactacccacagactcgtcttgataggtgatttccattcrgtctcagttctgtggcagctgggcctttttcttctacaaacattccacttttataaccagctgagccttctatcccagaagccctttcccctccctggtcttcttcctccaggaatatttttgagcctttcagtggtagagcatgtaaacactgtcattttaagagacatggccaccaagaatagcaaggactacactgccctggggctccaagagtcctgaaaatgatcctgcattgtgggtttgaagttaaaacagattctagattgcaaattgtgcgtgagagcaaagttagatgacgagtagaatcaatctcatttggaaagctgaaagtattggcccttacttaaaggcttcatgaaaatagaccatgacatggctttcgtccttggtgcttgt

SEQ ID NO: 860840 - DNA, 623 bp, Homo sapiens
ccagacctggctaaccgcgcagggctgtcttccctcgcctggaagggcctagcgcccctcccccagtcacgctttcccaccccctgcagtgggggctccagaagcgggcaggaagccacaggaccccatctcggggcatggagaaccttgggctctgtggcctcaaaggtaggggtgatttcgaggggccggcacctcacagggcaggttccaccgcggaaacgcagtcatcgcccagcgmccctgctcctggccctcagcctccccccaggtttctttttctcttgaatcaagccgaggtgcgccaatggccttccttgggtcggatccggggggccagggccagcttacctgctttcaccgagcagtggatatgtgccttggactcgtagtacacccagtcgaagccggcctccaccgccaggcgggccagcatgccgtacttgctgcggtcgcggtcagacgtggtgatgtccactgcgcggccctcgtagtgcagagactcctctgagtggtggccatcttcgtcccagccctcggtcacccgcagtttcactcctggccactggttcatcaccgagatggccaaagcgttcaacttgtccttacacctctgcgaagac

SEQ ID NO: 860841 - DNA, 643 bp, Homo sapiens
tccgttagacttgatttgaatcatttttcagcaaaaataatacataaaagatcagcaagtcagttggcttcatttggaaaacagcaagtacaacaacactgtatggagtgcgtactgatttcataatacctgcactggtgcttggcatatcatgaatatgcaaaacttaagtacttcttttctttttctctagtgtggctgcaggtgtatcatgttttccctaataattacgacaaactcctctcattccccatcttatttaaataactgtttccaagtcaagcctttccaagcttaaacatattacattttcttttttaatttaaaaggcaaattttcttctttaaaatgtttttcaccggtattttatattaaaatttattttgtatgtcttgctgcaatactgactaaaaattacaaatttatacccacacatatgtctgtacatgtaaaatcatgatctaattttgttctcaagataaaatccttatggctttkgaccataggctgccctgaaaatccaatttgaattactaataatataatttttcagagttttaatacaataaaatgaaactatcaaataatattgaaattctaccaatatttaaaaaatataataataataataatgtctttgtag

SEQ ID NO: 860842 - DNA, 602 bp, Homo sapiens
tgcctatgagcctgtaaaaacaaaagaaagttagttacttcctaaatataatggggttacaggcattgggtaaatatgcatattccaaatgagaaaaattggcaaaaacaaaggggctacaggtcccatgtaagtctgaaatttaacaggacagtcattaaaccttaaatttcaaaatgatctcctttgaatctatgtctcacatccaggtaacactgatgcaagaggtgagctcycacggccttgggcagtttcacctctgtggctttgcaaggtacagctccctgcaccagctggcattcagtgtctgtggcttttccaggtacactatgcaagctgttggtggatctaccttctggagtctggaagaaaatggccctcttctcaaagctccattaggcagtcccccagtaggaactctgtgtgggggctccaaccccacatttcctttccacactgccgtatcacaggttctctctgtgggttccaccactgcaacagatttctgcctggacatctaagcgttcctatacagcctctaaaatctagacacaggttcccaaactttaattattgtcttctgtgcacccacaggactaaca

SEQ ID NO: 860843 - DNA, 354 bp, Homo sapiens
aaaccaagttagttatttcctagatataatgggagtacaaatattgggtaaatacagccattccaaatgggagaaattaaccaaacaaaggttctacaggtcccacgcaagtccaaaatccagcaggggagtcaaatcttaaagctcaaaaatgatctttgactctgtctcacayctatgtcatgctgattcaaaaggtatgctcccactgcctttggcagctccactgccttgagatgcaaaaggtgggctcccactcccttaggcagctgctttcactggctggcattaaatgtctgcagcttttccaggcacacaatccaagctatcagtgaatctacaattctggggttc

SEQ ID NO: 860844 - DNA, 584 bp, Homo sapiens
tcaattcccacctgtgagtgaaaacatgcagtgtttggttttctatccttgtgatagtttgctgagaatgatgatttcctgtttcatccatgtccctgcaaaggacatgaacttatcctttttatgactgcatagtattccatggtgtatatatgccacattttcttaatccaggctatcattgatggacatttgggttgggtccaagtttttgctattgtgaatagtgccacaataaacatacgtgtacatgtatctttatagaagcattatttaaaatcctttcggtaaatacccagtaatgagatcactgggtcaaatggtatttctagttctagaaccttcargaatcaccacactgtcttccacaatggttgaactagattacactctcaccaacagtgtaaaactgttcctatttctccacatcctctccagcatgttgtttcctgactttttaatgatcgccattctaactggtgtgagatggtatctcactgtggttttgatttgcatttctctgatgaccaatgatgatgagcattttttcatgtgtctgttggctgcatacatgtcttcttttg

SEQ ID NO: 860845 - DNA, 603 bp, Homo sapiens
tccttcttaaacaacagaaagttagattaatatgctcacatagaaccaatggcatataatagtaatatgtatttctattttccttctttggtcagtttttattgcatgtagatgaattttaaaaatctttgtatttcaaatctttgccactgcctaattcattgtaaattgaaagacaatgtttctcaatgtacagaaagagtagtcatttacaaaaaaaatctgtaatgtgtcaaagactcctcctgttcctttagaggaatatgctagagtattgaggtaaaacatatatttaaaaattccctataatgtcccctatgtcacataaatattatgtaaaacaarcactcaatatattctcagaaatcattttctttttatagtcatgtatattgactccatgtaattaaaaagcattatatggccaattgtttgttattgcctagtcttattcaatttttttgaaagagtttaacatgtatttttaccttataggatagaaacaatagtttggcaggcaaagtaagaaagtgtcttaatacagaaactaacaatagtaacaaaagtgataattatattagaaaattaacatttataagaact

SEQ ID NO: 860846 - DNA, 603 bp, Homo sapiens
tccttcttaaacaacagaaagttagattaatatgctcacatagaaccaatggcatataatagtaatatgtatttctattttccttctttggtcagtttttattgcatgtagatgaattttaaaaatctttgtatttcaaatctttgccactgcctaattcattgtaaattgaaagacaatgtttctcaatgtacagaaagagtagtcatttacaaaaaaaatctgtaatgtgtcaaagactcctcctgttcctttagaggaatatgctagagtattgaggtaaaacatatatttaaaaattccctataatgtcccctatgtcacataaatattatgtaaaacaagcactcaatatattctcagaaatcattttctttttayagtcatgtatattgactccatgtaattaaaaagcattatatggccaattgtttgttattgcctagtcttattcaatttttttgaaagagtttaacatgtatttttaccttataggatagaaacaatagtttggcaggcaaagtaagaaagtgtcttaatacagaaactaacaatagtaacaaaagtgataattatattagaaaattaacatttataagaact

SEQ ID NO: 860847 - DNA, 603 bp, Homo sapiens
tccttcttaaacaacagaaagttagattaatatgctcacatagaaccaatggcatataatagtaatatgtatttctattttccttctttggtcagtttttattgcatgtagatgaattttaaaaatctttgtatttcaaatctttgccactgcctaattcattgtaaattgaaagacaatgtttctcaatgtacagaaagagtagtcatttacaaaaaaaatctgtaatgtgtcaaagactcctcctgttcctttagaggaatatgctagagtattgaggtaaaacatatatttaaaaattccctataatgtcccctatgtcacataaatattatgtaaaacaagcactcaatatattctcagaaatcattttctttttatagtcatgtatattgactccatgwaattaaaaagcattatatggccaattgtttgttattgcctagtcttattcaatttttttgaaagagtttaacatgtatttttaccttataggatagaaacaatagtttggcaggcaaagtaagaaagtgtcttaatacagaaactaacaatagtaacaaaagtgataattatattagaaaattaacatttataagaact

SEQ ID NO: 860848 - DNA, 676 bp, Homo sapiens
gtcaggagatcaagaacatcctggctaacacggtgaaaccccgtctctactaaaaatacaaaaaaaaaaaaaaaaaaaaaaaaaagccgggagtgatggcacatgcctgtagtcccagctattcaggaggctgaggcaggagaattgcttgaatccgggaggcagaggttgcagtgagctgagatcgcaccactgcactccagcctgggcaacagagtgagactccatctcaaaaaatatatatatatattatatatatatatgataaaattattattgaggcatcttcgtgtgcattttgaatgtttgaattaactttattttatagttctggagatgtcactgtaattatgttcaattactggtatgtatgtcttgtattttctaagaagtcactgaaataagcacatttattgagaatttacaacactttacgtgyttatatgacatgaagagggggcagctattctattagtagaaaagcattatttcctcctcccttcaatatatagtacctaaaaagaaatcagtgggaattttattgaataaggcattagcttaatgtagaagcctgagtcttaattgctgcttgaacatttgttttacatgtaaagttaaagctgaattccatataaatttggaagcagaattccatgacaaacttggagatggcagg

SEQ ID NO: 860849 - DNA, 676 bp, Homo sapiens
gtcaggagatcaagaacatcctggctaacacggtgaaaccccgtctctactaaaaatacaaaaaaaaaaaaaaaaaaaaaaaaaagccgggagtgatggcacatgcctgtagtcccagctattcaggaggctgaggcaggagaattgcttgaatccgggaggcagaggttgcagtgagctgagatcgcaccactgcactccagcctgggcaacagagtgagactccatctcaaaaaatatatatatatattatatatatatatgataaaattattattgaggcatcttcgtgtgcattttgaatgtttgaattaactttattttatagttctggagatgtcactgtaattatgttcaattactggtatgtatgtcttgtattttctaagaagtcactgaaataagcacatttattgagaatttacaacactttacgtgtttatatgacatgaagagggggcagctaytctattagtagaaaagcattatttcctcctcccttcaatatatagtacctaaaaagaaatcagtgggaattttattgaataaggcattagcttaatgtagaagcctgagtcttaattgctgcttgaacatttgttttacatgtaaagttaaagctgaattccatataaatttggaagcagaattccatgacaaacttggagatggcagg

SEQ ID NO: 860850 - DNA, 596 bp, Homo sapiens
gtcacactggtgattcctgaaaactcagagatgccagccaccatggagccccaaggggttttacagctcttttctggggagtcccgaggtctgagcccccaagaaatgttacagctctctcttattcctgtctgcagctcagtgaaaagaggcatgatacagctcattcctgtcacctgaaactttgtgagtcccaggttcttgtcccataaccaagaggacaaaggtgtgtagacatcagagagtgagtagggcacagaataattttattcagtggcagaaggaaagctttcagtggagaggggacttgagagcgggtagtcttctgtrtgacagggggcccaaagcaggttgcagtttgtgaggctgagtctggggattttatgggctcaaactgagggagtgtatgctggttggtccatgagtggacctaaagaaagcatcttttgatgggctaaaagacatcgaggaaattctcactccgatcgaggactccacctggaactggcagctcagttttcaggatttgaactgtctttcacttgaaggttgggtttcactggggacccgcccctctgcacctaggaatttgtctg

SEQ ID NO: 860851 - DNA, 677 bp, Homo sapiens
atttttatggattgcacttttgggtgtgggaattttttgcctaacccaggatgatgaagattttcctttacattttcctgttcaaattgcaatgttttaactcttaaacttaggtctatgatccattttgagttaatctctgtgaatgatgtgaggtaatggtttaaatttattttttttgcatgtggctgtccagttgtcccagaaccatttgttgaaaaaacagtcttttctcaattaaattgccttggcacctttgctaaaaatcaactgccaataaatgtargagtccgtttctgttctctaggctctgttgcagttattgacatgtctgtctttatgccagtactgcactgtttcgattactgtagttttatagttttaataaataaactcaggaagtgtaagttctccaaatttgttcttctttttaaaaattactttggctattctgagttctctacatttctatatgtattttatgatcaccttgtcaatttctacaggaaagcacacaggagaattttgacagggattgcattgaatctatagataaatttggggaagattgtcatcttaacaacactgagtctcccaatccatcaacatggattgtctcttcatttatttagatcttctttaacttctcctaataatgtgttgtggttttcagtgta

SEQ ID NO: 860852 - DNA, 640 bp, Homo sapiens
aaattctattattgtattcattgatcatggagaggaagcaggtgaaggtcagagttatccagtgaaggtcagagttatccaaaggatgcgataccagagtggatggcttctagcttccttcaattcaacttgacaattatctattaaatacttgctaagtacaaggctttgtgccaggtggtgtttcccctctagtgatctactataggaataattatctttagtaagtgaattcagaaaataatgagtattattccgcttctgctactctctcactttaacagttatccaagcatgtcttatataaaatcagctcctattatgtggaatatattttttaggtggatagacttgctatgcgaataggcaatagttatgaattcacagctctgaaggcagtatccccgctgttcccttttgtggaactgttgtgttaattacaaaattgtaaaaggwttattaaatgggacatataatggagaaaagggcatgtgaaatcaggtaaacctgtctagtcaccaatagtgatattttcccttttctctctgaaatcttacctcttagtatttgaagacaaatttttaaaaatacagagataaagtctaaaaaaataccattagtctacttagaattcaaattc

SEQ ID NO: 860853 - DNA, 652 bp, Homo sapiens
gagcccaccaaggtttctaatgataaactctcatctatcgggagccactaagaaactttgccagctgttttcctttagaatatgctttgcaattatgttagtatgtcctaaggaggagcttcattaaatagcttgtgaaaatatctggcaagatctcatttacttgttacaaattaagactttcattaacttgatagtcaaaattcatataaaatattttagttgaaaatgtgaacagtttactagttaatattctgaagtactcttaatttagttctctttacatagagagataatgatagattcttttactactattttctgaaattattcaggctattactacacatgtacatgaaacaaacataacaagatctaaatttgtttttagaagaatttgyttttggttataattatgtactcattttctgaaaatgtgtccatcatcttcttattgtggttttatgattttccctccatacattccaatagattctgaaaggtctgaatctcagaattaagtctggagagacagtcgccttggtcggtctcaatggcagtgggaagagtacggtagtccagcttctgcagaggttatatgatccggatgatggctttgtaagtgcagctagcaaaaccatgcacagtccac

SEQ ID NO: 860854 - DNA, 656 bp, Homo sapiens
tacttatgcaggatatctttaaataagggccagactcagtttgacaatgaacagcatttagaacacacacattgattacttaccatttattcaattttaacaaataggatgcattataaccattggaaagcactaaagttacttactttttcaaggtaaatgaccaagcaaagtaggattctgctttttgaagttaatctcmacttcaatataggcaaatattcacagtgtagattcacatatggtaagttattgaaattcagtaaggtatattgatactgttgagcacaaaaaaatgatcatttccaatttaaatgttatgtgtcttgtcatcaggccgggcctgtgctaaaattgagaggtaaggctgggagagagaaggctgccaaagtgcagtgagaatcttgtcctttcattggagaatttcttgggctttgataacatttctcatgtgttgtctgaaagaagcaattctaattatgtgtaacaaaaagtagatatgtcatagttagatttgattaaagaaacaaagctgataatattgacttcattatttggcaaagtcccataggaaactagaactattaggcaaaactatctggaaatgtcataagcatgtcaatagaagtcattcaaaggcttagtcagctcatata

SEQ ID NO: 860855 - DNA, 636 bp, Homo sapiens
atgctcacaactccataccttataggtgtccagtacctttgagtagtatcatacccattttttagataagcgaacttttgccaatgccaaatcatacagcattaaagaagcagactcaagacctctcagactgtaaagctatgtttttatactrtcagtctgtatcagttcagactgctataataaattaccacagactgagaggcttaaacaacagaaatttatttctcacagttttggagtattcaagcctgagatcagggtgtgaacatagtcgggttctggtgaggcccctttttggggaggcagactactttcttctcatcatgtcatcacatggtggaaagacagcaaggtagctctctggggtccattttataagggtgctaattccacttatgaggcctcaaccctcatgacccaataacctctcaaaggcctcacctcctaatactacaaaagtcggggttagggtttcaacctatgacttttagggggacacattcagtctattgtacctcttcatgtcattcccacacattttgcatatggggaactatgggaaaggtaagggcaattgtgcttatttagtctgaagaggagagaactgaacatgcctttaagaaggtgtaatgt

SEQ ID NO: 860856 - DNA, 695 bp, Homo sapiens
aaaaaaaaaaaaaaaaagctgctttcagggatctgtgatagctgtagtgtggttttcctcactgtttcccttcacttttattcactatagagcttcttcttagggggaacatgttcaggtggttttaggaacttatttcaccctccacccgtcacagagatagagatacttcaggactggccatcagacttcytcattctcctggccaaggtgactagttcaatgacatgctgatgtcctaaactgggtcaatccgagggtctccaggagattggatatatggactccaggaaagagtgaacctctttcttcctttgtctatcacaagctgtaaggatcacacagtatggaactaccagaatccatttccttggttggatgcaacaagctgtcagcagaataaagttgctaaaagaggagaacataactagaaaatggagaaaccagtaaacagtggacaatatgagtctgtaggtccaacggtgttgaaagttgatgtccctctatattcatccaagtgcatgaactaataaatcccatcttttttttcttcagctagtttaggttgatcttttgccttttaaaaaggaaagagtcctgtagaatgcacatccttagctgtggttatgggaattttcatgtgttaataattgtccagtttcactcatgctgggtcagtctttataaaggttgca

SEQ ID NO: 860857 - DNA, 695 bp, Homo sapiens
aaaaaaaaaaaaaaaaagctgctttcagggatctgtgatagctgtagtgtggttttcctcactgtttcccttcacttttattcactatagagcttcttcttagggggaacatgttcaggtggttttaggaacttatttcaccctccacccgtcacagagatagagatacttcaggactggccatcagacttcttcattctcctggccaaggtgactagttcaatgacatgctgatgtcctaaactgggtcaatccgagggtctccaggagattggatatatggactccaggaaagartgaacctctttcttcctttgtctatcacaagctgtaaggatcacacagtatggaactaccagaatccatttccttggttggatgcaacaagctgtcagcagaataaagttgctaaaagaggagaacataactagaaaatggagaaaccagtaaacagtggacaatatgagtctgtaggtccaacggtgttgaaagttgatgtccctctatattcatccaagtgcatgaactaataaatcccatcttttttttcttcagctagtttaggttgatcttttgccttttaaaaaggaaagagtcctgtagaatgcacatccttagctgtggttatgggaattttcatgtgttaataattgtccagtttcactcatgctgggtcagtctttataaaggttgca

SEQ ID NO: 860858 - DNA, 632 bp, Homo sapiens
ttgagagtttttaatatgaagagatgttgaattttatcaaaagccttttctgcatctattgagataatcatgtgatttttgtttttagttctatttatgtggtgaatcacatttattgatttgtgtatattaaaccaactttgcgtcctgggratgaatcccaattgatggtggtggattagtttttgatgtgctattagatttggtttgcaagtattttgctgagaagttttgcatcagtgttcattgactgaagttttcttttgtgtgtgtgtgtgtccctgacaggttttagtatcagagtaatgctggcctcatagaatgtgttggagaggaatcattactcctatttttttttttgaatagtttcagtaggaatactaccagctcttctttgtacatctggcagaatttggctgtgaatccatttggtcctagcttttttagttggtaggctatttattattgattccaattttggagcttgttattggtctgtttagggaattaatttattccacgttcagtactgggagagtgtgtgtgtccaggaatttatccatctcttctaggttttcttgtttgtgtgcatagaggtgtttgcagtagtttctgatgattatttttatttc

SEQ ID NO: 860859 - DNA, 571 bp, Homo sapiens
accaagaaattgtgaggcaaacatgaatatatgaaatcatggtaaaataaactgagtaggcttgatggatatttcttttgagttatggcagaaattaaagaattatgcctgctttaccggggagtatgtatctctagtgacttttattatctagattccaggtctctgggtaaactctaacaaacggttatttttcaacactgttttctaaacttcatacagattgccagktcattttgttagcatttatgagtaaaatgtggtcttccaggttattcaaagtcaaagctaaggttatagtgacttagtcccctgaagagagttagagacacaccagtctcctgcactactcacttcaaagtgcctgttgtgagtcacttttggagaaggctaatcacatcgtatgttaattaacttcagttttagaggatgacttttctgattttgtttccaacttttgggagtgactctcagtctttggagcttattctacactgattatttaggatccgaaatgaaggtgtcaaatatatgaaatacaaaaaaatcccttgacaaaatggaagtctta

SEQ ID NO: 860860 - DNA, 590 bp, Homo sapiens
ctggaacacagagttgcattaaggacaatggcaaggacaagattatgaagggtctctcatgctccatagaggagttaaaactttaataagaaactgatgctttgcttgtccaataccctttattctcctcagagatatacttacctcctttcagagaattattcctcttgcatctttagccatgggcattcaatgggatgacatccttctgactacagggactggtggatgagtagacttttgttatgagctggggcaatcattttcccagctcctcttttatagtgatttttccaaggatgggattatggtccagactagaatttttctaattatattttgatgatgaatattctttccttgttagtcagaggctgttaggatgtgagccaggatttttagctaccagtcaattgcctttaggaaaagcttgttttagagaaggaagtgacytaaagagagaagtggaaacaagagatggaaaaataatgttttgacagtgtttgagagctttctttttggtatctaaaaacaaactctatccttctgccccatagtttatttacaaactcatgtgtggttatttttta

SEQ ID NO: 860861 - DNA, 554 bp, Homo sapiens
tttcagtgattagaaattatatttccatcctttttatatttcagaagcaatactcatagatgctatctaggtaagttatgatatttttttcttatttgaatttttcaaaatcaaagtattgacttcatcttttaacagtaacttttttttttgaaatgaaaaagagattamtcatgaaatagcataaataactgtgattccgaagccaatctgatctggagtgttgggatagcactacagtgagaagaattcctttacaaataatagttggaagaaggaaagaagggagccctactcactatccaactgactttctaagaggaagcaaaggcaaataaataagctcttgttgagttaaataatatatatatgtgtgtatgtgtaatacttgtatatatatattcacacataacattcaaatgtccaaataataattgataatgattgttttatgctcaaaattttgatagagaaagaagaaggtataaacaaatgaatacaggttgaatatctccaatctgaaaattcaaaattcaaaatgctccaaaatccaa

SEQ ID NO: 860862 - DNA, 623 bp, Homo sapiens
tacaaaaaaacaaaaaaaagcaacaaaaaaattaaccttagcctgacgtggtggcgggcgcttgtagtcccagctactcaggaggctgaggcaggagaactgcttgaacctgggaggcagaggaggttgtagtcagccaagatcgtgccactgcactccagcctggcgacagcgagactgtgtctcaaaacaaacaaacaaacaaacaaaaaacaaaccaaaaaaaccctactatggcgatgattttttaagaaaatgtttggtgggtcttaaagctctctgaaaatctwatgtggaagctatggatcctttaagaatgcagtgcgtacctattcataaaaatttccttacatttcaaagtgttctcttaacgttgaaagcttggccacactaggctaaagaaaaccctctgtaagtgattatttatgcaaatagaactgtttgtggcactgataacaactagccaagtaaagggattcttcctactggctcctagtgagttgtaacacagagagctagctcttcatcaaaaacttatgcctttcttattatagcatagaactcttgctgggaaataactattttcccagcctcccttacgtttaggcgtggctatgctaata

SEQ ID NO: 860863 - DNA, 586 bp, Homo sapiens
aatagactgaaattgtgatgggttcctgcatcttgcaccaagtatggggatatctgggcaatgttcattccttgtgtggtttcgttgagatcaattttttcctcataatactcacattatgggctaaatggcaaggttaataaccatcactaaacgccattttcaatattggtggagggcaatgtgaaagagaaaggaaattactaaaagaaaaatgactcagcaatgaagggaatatgaacagggttagagtttcatctctcgcatttatgatttcttctgcattaccttttccagttccctttgccyttggtaggggttgtttgcccagtgatacgctccaaatattcattctttaaatatctgaaaccctactggtccttctttagtttttactacatgtttgtttttaaccatatgttttaagcatagttgtaaaagaaggagtccagggaattacctgaattccagccattctccctgatcctatataatggcggcagctccttcaacatagtggtcaacactgtaacacctccttttgcctattttcccagtggtataaagatctctaaacagtcaagta

SEQ ID NO: 860864 - DNA, 586 bp, Homo sapiens
aatagactgaaattgtgatgggttcctgcatcttgcaccaagtatggggatatctgggcaatgttcattccttgtgtggtttcgttgagatcaattttttcctcataatactcacattatgggctaaatggcaaggttaataaccatcactaaacgccattttcaatattggtggagggcaatgtgaaagagaaaggaaattactaaaagaaaaatgactcagcaatgaagggaatatgaacagggttagagtttcatctctcgcatttatgatttcttctgcattaccttttccagttccctttgcccttggtaggggttgtttgcccagtgatacgctccaaatattcattctttaaatatctgaaaccctactggtcyttctttagtttttactacatgtttgtttttaaccatatgttttaagcatagttgtaaaagaaggagtccagggaattacctgaattccagccattctccctgatcctatataatggcggcagctccttcaacatagtggtcaacactgtaacacctccttttgcctattttcccagtggtataaagatctctaaacagtcaagta

SEQ ID NO: 860865 - DNA, 632 bp, Homo sapiens
gatccttcctcaggaaacaatccttaggcctctcaaaaagcatcaaagaactaaaactcaccagatcaccacactcaagacaatgagatgccagactcattcatcatgattgcttccccctccctaaatgctgttttcctaactgaccactgcttcttgttgaccaactccwctttcttatttttgttttttattttttttttgagatggagtctcactctgtcacccaggctggagtgcagtggtgctatctcgactcactgcaagctctgcctcttgggttcaggccattctcctgtctcaacctcccgactagctgggactatggagcccgccaccacacctggctaattttttgtatttatttttagtacagacagggtttcaccatgttagccaggatggtctcgatctcctgacctcgtgatccgcccgcctcggcctcccaaagtgctgggattataggcatgagccacgactttcattttttcttccacaaacgcaccattattaattttcaccactatgaatactgaaaatcgtaatactttccttggttattctagagtcaattgtataactgttattttagaggtgtgggaaaggccaagcacaacagggaattaatacta

SEQ ID NO: 860866 - DNA, 657 bp, Homo sapiens
tacaaatatttaccttttctggtgtttttaattcctttctgcacatctggggttccatctgatataatttccctcagcctgaagtatcagcaagtatctcagattttgtctctctaaggatatctttatttcatcttcattttgaaggatattttttgctagacatagaattctctgcttccatttcttttttcttgtcatactcaatgatgtcatttaattgttttctggctttattctagattctgatgaaaagttagccatcataaatttttttctaatgtatttaatgtgtcattttattcctattgctttttagatttgctgtttattgttttatgtgatttttggttgttamatagctaggtaaggttttctttatatttatcttgcttagggttcactgagcttcttggctctacaggtttatgtctttcatccattttggaatgttctcagatggttattattatatcaaatatattatctatccagtttttctcttctctttctggaacttctattacatcacttgatatcatgttagattcatttatactgtccaacagatcttgaatattctgttgtattttttccactatttttgccttttgtgtttcagtttggatactttctattgatctgccttttgtccct

SEQ ID NO: 860867 - DNA, 657 bp, Homo sapiens
tacaaatatttaccttttctggtgtttttaattcctttctgcacatctggggttccatctgatataatttccctcagcctgaagtatcagcaagtatctcagattttgtctctctaaggatatctttatttcatcttcattttgaaggatattttttgctagacatagaattctctgcttccatttcttttttcttgtcatactcaatgatgtcatttaattgttttctggctttattctagattctgatgaaaagttagccatcataaatttttttctaatgtatttaatgtgtcattttattcctattgctttttagatttgctgtttattgttttatgtgatttttggttgttaaatagctaggtaaggttttctttatatttatcttgcttagggttcactgagcttcttggctctacaggtttatgtctttcatccattttggaatgttctcagatggttattattatatcaaatatattatckatccagtttttctcttctctttctggaacttctattacatcacttgatatcatgttagattcatttatactgtccaacagatcttgaatattctgttgtattttttccactatttttgccttttgtgtttcagtttggatactttctattgatctgccttttgtccct

SEQ ID NO: 860868 - DNA, 616 bp, Homo sapiens
cctaggctacatgactgtacagcatgttactctactgaatactataggcagttggaacacaatggtaaacctttgtctgcctaaacatatctaaacatagaaaaggtccagtaaaaatacagtattacaattttgtggagccactgatgtatgcagtctgttgaccaaaatgttatgtggtacgtgactgtattttaccatttttacaacatttctttccccctcccctcccttcccctcccctcctctcctttctctctcggacagagtcttactctgtcatccaggctggagtgcaatgacgcagtcttggctcactgcaacstccgcctcctgggttcaagcgattctcctgcctcagcctcctgagtagctgggactacaggcatgtgccaccgtggccggctaatttttgtatttttagtagagacagggtttcaccatgttggccaggctggtctcaaacttctgacctcaggtgatctacccacttctgcctcccaaagtgctgggattacaggcatgagccaccctgcccagcctttgcaaaatttctatctattatcacttttaatattgcctcttatccagtctctctattctctcctaatattat

SEQ ID NO: 860869 - DNA, 624 bp, Homo sapiens
gtggaaatgatgtttgtttcttacttctttggggctttgactgtgccattgagattttgtgctcagggataaactaccgtgtatttacagttacctcaacctgtgaggtttgatgcctctttctttctttctttctttctttctttctttctttctttctttctttttctttctgtctctttctttctttctttctttctttctttctttctttctttctttctttctttctttctttcttycttccttccttccttccttcctttctttctttcttctttcttttttccttcttctttttctttctttcctctttctctctctctttccctccctcccttccttccttcctccatccctcccttcctttcttgctttttttttttcttgctttgttacccaggctggagtgcagtggcatgatcatagctcactgcagccttgaacttctgggctcaagcaatcttcctgccttggccaacctgggattacaggtgtgaaccgtggcgcccagccttggccactttctttattctaaacttctttgttccatactttgcttcttttccctggatccatccccaccagcctcccttgtcactccagtgataggacactcagtct

SEQ ID NO: 860870 - DNA, 624 bp, Homo sapiens
gtggaaatgatgtttgtttcttacttctttggggctttgactgtgccattgagattttgtgctcagggataaactaccgtgtatttacagttacctcaacctgtgaggtttgatgcctctttctttctttctttctttctttctttctttctttctttctttctttttctttctgtctctttctttctttctttctttctttctttctttctttctttctttctttctttctttctttctttcttccttccttccttccttcctttctttctttcttctttcttttttccttcttctttytctttctttcctctttctctctctctttccctccctcccttccttccttcctccatccctcccttcctttcttgctttttttttttcttgctttgttacccaggctggagtgcagtggcatgatcatagctcactgcagccttgaacttctgggctcaagcaatcttcctgccttggccaacctgggattacaggtgtgaaccgtggcgcccagccttggccactttctttattctaaacttctttgttccatactttgcttcttttccctggatccatccccaccagcctcccttgtcactccagtgataggacactcagtct

SEQ ID NO: 860871 - DNA, 612 bp, Homo sapiens
attgtaaatagtgctgcaatgaacatatgtgtgcatgcatctttaaggtagaatgattattcttttgggatttatacccatgaatgggattgctggattcaaccttagttctgttttaagttacttgagaaatctccaaactgctttccagtgactggactaatatacattcccatcaacagtgtataagcattaaagggacttaactgctgaatagtcttcacccaactcaaagcctggctctcagtagatactcaatatattgcttatacaattaaaggaatggttaaaaggaaggaagatgtatgcagaatctgtgtactgctaagtcagcaaacatttgctgagggtctgttgaatttggtcctgctcaacattgaacttgcccacttctcaccaccattaaggctccagaaaatttgtttatccacagccttcttcktctaccttattaccttgtcatttctttgagacctaatatccattcctcctgatctccagctcaactccctagaatccatagcttctagagttttgtttatttattccatttttatttatttgatttattccactttcattgaatatcaagacctccaggcatagttccag

SEQ ID NO: 860872 - DNA, 615 bp, Homo sapiens
ctgttgaattttgtcaaaggccttttctgcatctattgagaaaatcatgtggtttttgtctttggttctgtttatgtgatggattatgtttattgatttgtatatgttcaaccaaccttgcatccctgggatgaagccagcttgatcatggtggataagctttttgatgtgcttctggatttggtttkccagtattttattgagaattttcacagcaatattcatcagggatattggtctaaaattctctttttttgttgtgtctctggcaggctttggtatcaggataatgctggcctcataaaatgagttagggaggattccctctttttctattgattggaatagtttcagaaggaatggtaccagctcttctttgtacctgtggtaaaattcagctgtgaatccatctggttatggacttttttggttggtaggctattaattactgcctcaatttcagagccagttattggtctattcagagattcaacttcttcctggtttagtcttgggagggtgtatgtgtccaggaatttatccatttcttctatattttctagtttatctgcatagaggtgtttatagtattctctgatggtagcttgtatttct

SEQ ID NO: 860873 - DNA, 520 bp, Homo sapiens
catatagttttcaggtgcaaatggaacatttaccaatattgctcatattgtagtttagagagaaagcttaaataatattcactcgattctgttgggaggccgaggtgggcagatcacaaggtcaggagatcgagaccatcctggctaacacggtgaaaccccgtctctactaaaaatacaaaaaaattagccaggcatggtggcgggcacctgtagtcccagctacttgagaggctgaggcaggagaatggcrtgaacccaggaggtggagcttgcagtgagccgagatagcgccactgcactccagcttgggcgacagagcgagactccgtctcaaaaaaaaaaaaaaaaaaaagaatatattatctgaccattaacaaatgaattaaggtagacatacctaacaaaagtacatttagaaaatctataactacctgaaaattaagcaataaactctattgtgcaagggtcaaaaacaaccactgaatgtagaagacattatgaaatgaatgacaatgaa

SEQ ID NO: 860874 - DNA, 605 bp, Homo sapiens
ctgttgaattttgtcaaaggccttttctgcatctattgagaaaatcatgtggtttttgtctttggttctgtttatgtgatggattatgtttattgatttgtatatgttcaaccaaccttgcatccctgggatgaagccagcttgatcatggtggataagctttttgatgtgcttctggatttggtttkccagtattttattgagaattttcacagcaatattcatcagggatattggtctaaaattctctttttttgttgtgtctctggcaggctttggtatcaggataatgctggcctcataaaatgagttagggaggattccctctttttctattgattggaatagtttcagaaggaatggtaccagctcttctttgtacctgtggtaaaattcagctgtgaatccatctggttatggacttttttggttggtaggctattaattactgcctcaatttcagagccagttattggtctattcagagattcaacttcttcctggtttagtcttgggagggtgtatgtgtccaggaatttatccatttcttctatattttctagtttatctgcatagaggtgtttatagtattctctgatggtagc

SEQ ID NO: 860875 - DNA, 607 bp, Homo sapiens
gcctaaaggggctagctagaaccgtacccaggctccaaatgaatcatttgaaacattcaaattctgtgcatactattgaatctcatctacttgcatgagaatataaatgcattgtacattagtttgcctgggatatgaacgctactgaatctaccctcttttgcttactaattccactagttaatatctttcagtgaagacttgtccaatcttcttttcacccaccacagtcttctctgagagtgaaaactcaaattacttcattaaggttargaatgctaaagcaataaatccttctggtgaattcttaaatgccctttggaagcaataaagggaactggcaatggttaagttttgtgcttattactttcctctctctcacttagcccaggattcctgtctgtgaaactgagatgttatagcatatccaagagaatgagtttttaggaaaaaaatcattttgcatcacagatcttatgtcaccacatcatcggacaaagcaagtatatatccactgacatttcacctatgcctaggtgatcatgtctcccattttacccaagacagtcctgggttttgcctgtggttctggagtaactattaaaca

SEQ ID NO: 860876 - DNA, 607 bp, Homo sapiens
gcctaaaggggctagctagaaccgtacccaggctccaaatgaatcatttgaaacattcaaattctgtgcatactattgaatctcatctacttgcatgagaatataaatgcattgtacattagtttgcctgggatatgaacgctactgaatctaccctcttttgcttactaattccactagttaatatctttcagtgaagacttgtccaatcttcttttcacccaccacagtcttctctgagagtgaaaactcaaattacttcattaaggttaagaatgctaaagcaataaatccttctggtgaattcytaaatgccctttggaagcaataaagggaactggcaatggttaagttttgtgcttattactttcctctctctcacttagcccaggattcctgtctgtgaaactgagatgttatagcatatccaagagaatgagtttttaggaaaaaaatcattttgcatcacagatcttatgtcaccacatcatcggacaaagcaagtatatatccactgacatttcacctatgcctaggtgatcatgtctcccattttacccaagacagtcctgggttttgcctgtggttctggagtaactattaaaca

SEQ ID NO: 860877 - DNA, 617 bp, Homo sapiens
agcggacaagaaggcagctggagctggcaaggtcaccaagtatccccagaaagctcagaaggctaaatgaatattatccctaatacctgccaccctggtattaagcagtggtggaagaatggtcttagaactgtttgtttcagttggcyatttaagtttagtagtaaaagactggttaatgataacaatgcatagtaaaactttcagaaggaaaggagaatgttttgtggaccactttggttttctcttttgcatgtggcagttttaatttattagtgtttaaaatcagtgctttttaatggaagcaacttgaccaaaaatttgtcacagaattttgagacccattaaaaaagtttaatgagaaaaaaaaaaaaagaaagtcacataaacagaatcctacagtgtgtaaccttttgagctggcttctttttatttattttatttatttatttatttttttgagacagaatctcactgcaatgcccaggctggagtgcaatggtgcaatctcagctcactgcaacctctgcctcccaggttcaagcaattcttctgcctcagcctcccgagtaactggaattataggcatgcgccatcatgcctggctaatttttgta

SEQ ID NO: 860878 - DNA, 617 bp, Homo sapiens
agcggacaagaaggcagctggagctggcaaggtcaccaagtatccccagaaagctcagaaggctaaatgaatattatccctaatacctgccaccctggtattaagcagtggtggaagaatggtcttagaactgtttgtttcagttggctatttaagtttagtagtaaaagactggttaatgataacaatgcatagtaaaactttcagaaggaaaggagaatgttttgtggaccactttggttttctcttttgcatgtggcagttttaatttattagtgtttaaaatcagtgctttttaatggaagcaacttgaccaaaaatttgtcacagaattttgagacccattaaaaaagtttaatgagaaaaaaaaaaaaagaawgtcacataaacagaatcctacagtgtgtaaccttttgagctggcttctttttatttattttatttatttatttatttttttgagacagaatctcactgcaatgcccaggctggagtgcaatggtgcaatctcagctcactgcaacctctgcctcccaggttcaagcaattcttctgcctcagcctcccgagtaactggaattataggcatgcgccatcatgcctggctaatttttgta

SEQ ID NO: 860879 - DNA, 615 bp, Homo sapiens
aagacacaatgaacaaataaaactacaggacaatatctctaatgaacatagacacaaaaatcttcaacaaaatagtagcaagccaaatccagcagcatactcaaagttaatttaccacaattagctaggctttattcctagaatgcaaggttagtctaacatatagaaatttaaaaatgtgattcaccatatagaatcaaaatttaaaagctaggcgcagtggctcacacctgtaatcccagcactctggaaggccgaggccggtggatcacctgaggccaggagttcgagaccrgcttggccaacatggcgaaaccctgtctctactaaaaatacaaaaattagctgggtgtgatggcacattcctgtagtcacaggtactctggcgactgaggcatgagaataatttgaacccaggaggcggaggttgcagtgagcactccagcctgggggatagagtgggactccagctccaaaaaaaatcaccatttcaatatatatgagataagcttttgataaaacttaatatcccttaatgataaaaaaaaaacccctcaacaaactaagcattgaagaaacatacctctaaatgagagccatctatgagaaacccac

SEQ ID NO: 860880 - DNA, 615 bp, Homo sapiens
aagacacaatgaacaaataaaactacaggacaatatctctaatgaacatagacacaaaaatcttcaacaaaatagtagcaagccaaatccagcagcatactcaaagttaatttaccacaattagctaggctttattcctagaatgcaaggttagtctaacatatagaaatttaaaaatgtgattcaccatatagaatcaaaatttaaaagctaggcgcagtggctcacacctgtaatcccagcactctggaaggccgaggccggtggatcacctgaggccaggagttcgagaccagcttggccaacatggcgaaaccctgtctctactaaaaatacaaaaattagctgggtgtgatggcacattcctgtagtcacaggtactctggcgactgrggcatgagaataatttgaacccaggaggcggaggttgcagtgagcactccagcctgggggatagagtgggactccagctccaaaaaaaatcaccatttcaatatatatgagataagcttttgataaaacttaatatcccttaatgataaaaaaaaaacccctcaacaaactaagcattgaagaaacatacctctaaatgagagccatctatgagaaacccac

SEQ ID NO: 860881 - DNA, 599 bp, Homo sapiens
ggaacccctgctggcccacaagggccgggcgcagccccggctcccgcccacgcctctccctccacacctccctgcaagcagagggagcagctctggcctgggctagtcccagagaggggcccccacagcgcagcagtgggctgaagggctcctcgagcacaaccagagtggacacccaggccgaggaggcgctgacagtgagggagggctgctagcacgttgtcacstctcaaaaggaacatacttcaaaatagtgagccatctatgacaaacccatagccaacatcatattgaatgggcaaaagttagaacaattccacttgagaactggaactagaaaaggatgcccactctcacaactcctattcaacatagtaccaaaagtcctagccagaacaatcagggaagagaatgaaataaaaaacatccaaataagaaatgaagtcaaactatctgtctttgctgatgacatgatttcatgcctagaaagctgctaaggctcttgactaaaagctactagaattgataaataattttagcaatgttttaggatacaaaattaatgtgcaaaaatcagtagcatttctatacaccattaa

SEQ ID NO: 860882 - DNA, 611 bp, Homo sapiens
aaatgagcatattctcatggtgaaatgcaggagtgcaggagaataacttaacttcacaagcacatttcaagctctgttagcatcaaatctattaacattatatttggcaaggccaaaatcaagggggcaggaaaatacactctacctgccacaaggttatggcacagatgtggatgcattaaaaatattacagggcagtgaaaaattgggagcaataatttagtctaccacatcatccccatgtctttcaactgtttctcatacgacatgattctgagacctctctccatcctgggagctcttcccttagcatgatcatgtttttccttatttctctgaagatgtactgggctcatggctatataatatttcaggcatggttgatagtcagcagatacataccagaggtcatccctttatattagctgtgscatctattagctctggttccatgtattgctggaactatacacagtagagccaatttaccaccactgtctttgtgaaggtctatttttacatgacgtgagattctagtgacgtttttggtatcaatatgttgctaacaagttattaattagccaccatactctttaattaactatcttaat

SEQ ID NO: 860883 - DNA, 592 bp, Homo sapiens
acggagtcaaaggagatcattttggagctttaagacttgactgcccccgtggatttcagacttgcatggagcctgtagtccctttgtttttgtcaatttatcctgtttggactgggaacatttacccaatgcctgtacctccattgtatctaggaggtaactaacttgctttctattttacaggctcaagctggaagggacttgtcttagatgagagtttggacttggacttttgagttaatggaggaatccagtgggaggtaattgaaatatgggggcaggtttttcccatgctcttcttgtgatagtgaataagtttcacaatatctgattgttttataaaggrcagtttccctgcacacacactcttgcctgctgccatgtaagacatgccttttctcctcctttgccttctgccatgattgtgagtccacccaagccgtgtagaacagtgagtccattaaacctctttttctttacaaattacccagtactgggtatgtccttattagcagtgtgaaaaggagctaatacagtgtgagagtgtttttagaaaagattagcatttgaattgctatacctagtaaaaaat

SEQ ID NO: 860884 - DNA, 626 bp, Homo sapiens
cttgatccagagctgagttcaagtcctaaatatccttgttaatgttctgtctcgttcatctgtctaatattgacaacgcaatgttaaagtctcccactgttattctgtaggagtctaagtctctttgtaggtctctaagaacttgttttatgaatctgggtgctcctgtattgggtgcatatatatttagagtagttagctcttcttgttgaattgatccctttaccattatgtaatgcccttttttgtcttttttgttattttttggtttaaaatctgttttgtcacagactgagattgcaacccctgcttttttctgctttatatttgcttggttaactttcctccatccctttattttgaagctatgtgtgtctttgcatgtgagatgggtctcttgaataaagcacactgatgggtcttgacttttcatccaatttgcaagcctgygtctattaattggggcatttatcctatttacattaaggctaatattgttatgtgtgaatttgatcctgtcatcatgatgctagctggtaatttggcacactagttgatgctgtctcttcacagtgtcattagtctttatattttcttctgtttttcagtggctgataccagtgttt

SEQ ID NO: 860885 - DNA, 659 bp, Homo sapiens
aagaatatttccaccagaaaatagtggtaatggttctcattgtcaggagattagctgagttgggagagccagctgagctgccaggtgtcattgtagccaattaaagtaacaagttacaaatgagttaagcctctaatcacttactaagatggtattagcaagagtctaaaccagagtgccaactccttattttatttcctcctatggaatggcacacaagttgagggtccagtggatcagtgcrgatgtgggagtcatctcactattgaaggagccctaaataaaaggctccagtagttttatgggccctggaatggggaatgggagaaagaagagagctcagagtgaaaaagtactaggtcctgagtcagggtgtgaagtgtcttcaaggttttcccctcttcctcctataagaaggtctcagcagagatgcctgagaaaggcctctgcccaaggcctcagatagagagtccgggagttaagctgtccaggctaggaaaataaatacgtaaagatcatgactggctagaaggatctaaggccttgacttcaactctgtttctgtgcaccaagtctacagtgaacagggaagatttttatctgccaagtaaactctttgtaatcacctatggtcaggcctgaaatatcacacgtaggtt

SEQ ID NO: 860886 - DNA, 650 bp, Homo sapiens
aagtcatatttttggtctggtttataacaacatataattcgacttaaaagaatagcaatgcatattaataattattattgttggtattattaatttgctctaaaattagctgtaagtgattcttttttctcctttgagcagcaagcaatccctatcataaaactgtgtttactgggtggttgagagagatgcattcagtcagggctgtaaataggaggacggtagtgagattctcagggggaatgatggggtagggtgctgcctgtgcgggaaagcttggtccatatgtcccaatcagctgagtttctgccttagaaactggtgtgtgaccctcatagctacygggcagacattgatgccacagggggcagcaacaaatgcccgtttaaagatgctggaaaggaaagtggaagttagagtcacaaatcgctattcaagttctaaacgggcaatttttttttatcatgtaaccctgagccagtcagattcaattacttttttttttctttcaaaatctttccaggctttattaaaaatatcccaaaggtcttgattgttatttttaaaactatgaatttggaaactgcttgttaacaaaataaagcaatcaacataatcatttattctggtaataattatcatataaacat

SEQ ID NO: 860887 - DNA, 650 bp, Homo sapiens
aagtcatatttttggtctggtttataacaacatataattcgacttaaaagaatagcaatgcatattaataattattattgttggtattattaatttgctctaaaattagctgtaagtgattcttttttctcctttgagcagcaagcaatccctatcataaaactgtgtttactgggtggttgagagagatgcattcagtcagggctgtaaataggaggacggtagtgagattctcagggggaatgatggggtagggtgctgcctgtgcgggaaagcttggtccatatgtcccaatcagctgagtttctgccttagaaactggtgtgtgaccctcatagctactgggcagacattgatgccacagggggcagcaacaaakgcccgtttaaagatgctggaaaggaaagtggaagttagagtcacaaatcgctattcaagttctaaacgggcaatttttttttatcatgtaaccctgagccagtcagattcaattacttttttttttctttcaaaatctttccaggctttattaaaaatatcccaaaggtcttgattgttatttttaaaactatgaatttggaaactgcttgttaacaaaataaagcaatcaacataatcatttattctggtaataattatcatataaacat

SEQ ID NO: 860888 - DNA, 650 bp, Homo sapiens
aagtcatatttttggtctggtttataacaacatataattcgacttaaaagaatagcaatgcatattaataattattattgttggtattattaatttgctctaaaattagctgtaagtgattcttttttctcctttgagcagcaagcaatccctatcataaaactgtgtttactgggtggttgagagagatgcattcagtcagggctgtaaataggaggacggtagtgagattctcagggggaatgatggggtagggtgctgcctgtgcgggaaagcttggtccatatgtcccaatcagctgagtttctgccttagaaactggtgtgtgaccctcatagctactgggcagacattgatgccacagggggcagcaacaaatgcccgtttaaagaygctggaaaggaaagtggaagttagagtcacaaatcgctattcaagttctaaacgggcaatttttttttatcatgtaaccctgagccagtcagattcaattacttttttttttctttcaaaatctttccaggctttattaaaaatatcccaaaggtcttgattgttatttttaaaactatgaatttggaaactgcttgttaacaaaataaagcaatcaacataatcatttattctggtaataattatcatataaacat

SEQ ID NO: 860889 - DNA, 529 bp, Homo sapiens
taaataatagacatttatttctcacagttaaggcttcccaagatcagggcatccgcagatgtggtgtttggtgaagactcactctcggcttccaagattacaccttgctgcagcgtcctccagaggcgggatgaacactatattttcacatggcagaaaaaaatggaagggccagacacctctctgaaacctcttttataagggcgttactcccattcacaaaggtggagccctcatgacttaatcacttcccaaaagaccccacytcttaataccaccacaatggggattaaattctaacaagaattttggaggggaacacatccaaacaatgaaataggtcaagcaaacattattgttttcaaattttaaacagatatagaaactaagattcacagagatgaagtgatttgcccaaataacacatccagtgaatgacagagattctgtctattgctaggatcagcaccaaggcagcaggaggaagatatatgactttgtattacttgacctccatataggtatctac

SEQ ID NO: 860890 - DNA, 612 bp, Homo sapiens
gctattgtgaatagtgccgcaataaacttacgtgtgcatatgtctttatagcagaatgattataatcctttgggtatatgcccagtaatgggactgctgggtcaaatggtatttctggttctagatccttaaggaatcgccacagtgttttccacaatagttgaactaatttacactcccaccaacaatgwgaaagcattcctatttctccacatcctctccagcatgtttcctgactttttaatgatcaccattctaagtggcatgagatggtatctcattgtggttttgatttgcatttctctaatgaccagtgatgatgaggtttttttcatatatttgttggctgcataaatatcttctgagaagcatctgttcatatccttcgcccactttttgatgggtttttttttttttgccttgtaaatttgtttaagttccttgtagattctggatattagccctttgtaagatgaatagattgcaaaattttctcccattctgtaggttgcctgttcactctgataataggttcttttgctgtgcagaagctctttagtttaattagatcccatttgtcaattttagcttttgttgccattgcttttggtg

SEQ ID NO: 860891 - DNA, 695 bp, Homo sapiens
agctagtgtactccagttaggctctgtgtgttcgtgtgtgtctgtgcaggtgcatgcacatgcgtgtatgtgactcagtaaaatgctgttacatactgcatatgctggatgagaactcttgaaaagccaagactaaaaaacaacaataacaacaacactcccagctcactgtatgctgatctgctgaagacacctccttactctattgtcatttcatattcaaggatttccctcaatgctgagcttcctgtagagcatttctttttgatcttccactcttccattatttgaactgcaccttcgattttataaagcctgaatgttgattagaaaaaacctgttggccgggcacggtggytcacgcctgtaatcccagcactttgggaggccaaggtggacagatcacaaagtcaggaatcgagaccatcctggccaacatgttgaaacctcatctttacaaaaatacaaaaaattagccgggcttggtggcctgtgcctgtactcccagctactcgggaggctgaggcaggggaatcgcctgaacatgggaggtggaggttgcagtgagctgagattgtgccactgcactccagcctggtgacagagcgagactccatctcaaaaagaaaaaaaaaaatttaaaaacctgtcaattccctcatagacctccaagatctttatcactgggtcggggt

SEQ ID NO: 860892 - DNA, 715 bp, Homo sapiens
attctactctacctccaacagatccatttttttagctcccacgtatgagtgaaaacatgagatatttgtctttctgtgcttgatttatttcacttaacacaatgacctctggttttatccagccaggttgctgcaaataacaggatttcattctttttatggctgaatgatattccattgtgtatatatacattgtctgtatccattaatctgttgatggatakctattgattccatatctcagctgtcgtgaatagtgaaacaataaacatgggaacacacatttcaaaatactgatttcctttttgtatatccagcagtgggattgctggatcatgtgacagttctgctttttagctttttgaggagcctccctactgttttccaatttttaatgggtcccctgtgtggagaagaagagcttttgaacaacagacctattgtataactctctcgacctctcatttctcccctacccaggggatattatgtctttctgcaccacataaatattttatatctcagtaagaaaaaacttattttgcatgttatcaaacagttatcactttgtcatttcttggcctgatatattcattcatttcccaacaaatattcaacaaatacatcaggcactgtgcttagttctaggaatacaaagatgaggttgtggacccaaaaaagttctccagcttggaaagaaaccagtttcttggag

SEQ ID NO: 860893 - DNA, 622 bp, Homo sapiens
catggcaggtccaggacagagtggcctagttgcatagattgaggttgctgagtggctccactcagcagcagcaagaagaatccagtgtcacttcaggccaggatgctcccactcctgaagcaacccaaacctatgcagtaaagagataaaaaatgacaaccaaaggatggatcacctctctaactcagtcacatctttttttccccgaggaaggaatcaaaattgtattagtctcttaagaaacagacatgttatattctacaaatagggttaatattgtgtacaaaataatatttgtraacaaaagtcttttagctggtgatacaccaaaagaaccatttttgtgggttagtgttttccttcccaataaaataattttttgagctgtagtttttgttcagattattaatttgtcagattttatagcctagccagtgtgtttttatttagtcttactaaagtgccatgagtttcaatgtggctcaattcttgcttaaacttccctatgctaacatcatatattgatcctgaagtccaaggtgatgtacctcaaaataacaaatgtgcagagcctttatttaaaacaaacagtttccctttcaaatgcttgggatttttatgt

SEQ ID NO: 860894 - DNA, 618 bp, Homo sapiens
ttaaatctgtattattactgtttttttgtttgcttaataccagtttctgagaaactatcttactcctgtatacgtgaggttatgaaaaacgccaaccccaaagccaagttggcatttaaatggccatgagttataacatttttcctctgactatacctgaaattgcacagaatagagctagcttgatgtaggagatgacaaggacattttaagtatttttcgttaaatgtgtgggcatcacctcaacaatcagtgcaacatgagattcaactgcaaagctactgaaggtattcttgctgcacttccttctggagggttcggatagaagagcctgaagaacktcagcggcatcagaaagcatgggaagaatctccaggtttttcgttttgtccagcccttcggtgtgtggtaagccggcacctaaaccaactaagataaccaatatttatcctgatcttgaagttctttgggctaaaatatttcacaatttttgttggtagcttgtgaggaaactctttctgtcaagaaatgcttccccctccagcctccattttgcctcttcactcatttactctttccttctttctctaatgtttgttgagcaccttctctgggcaa

SEQ ID NO: 860895 - DNA, 650 bp, Homo sapiens
accttttggagggagaagtcagttgacctgtttgacttggtgatatccatcatcctgatattctatactgttattttttcctagtggcaaacccactgattagtaggtcatctcagttgaaaactgaatagagttcaaaaataagaaatgtttgcaggatatgcagtatagctgggtcagattgagatttggaattaatttggtaaatccatacmggcctaaaatcttcttggcggaccatttctatgaaggtgacaatgagaaaaatggtgacggttgtaaaattgtattgttctcaatataattgcagctatctcacaacaagcaaaataattcagttctatttaaaagctgccaatagggctggacacagtggctcatgcctgtaatatcagccttttaggaggccaaggcaggaagatcacttgaggtcaggagttcaagaccagcctaggcaacccccatctctacagaaaaaaagctaccaaaatccacaaggaaagcatggctacaaagtgagtaaatgtctttctacagactgtttgaacaatctgagggaaagaagattaaagtctaaccaagaagaataaaatttccatgatattataacaccatttaatataaaatacacagcatcttgaaggataata

SEQ ID NO: 860896 - DNA, 643 bp, Homo sapiens
ccccagaagctgagcagatgccagcctcatgcttcctgtacagcctgcagaaccaggaaccaattaaatctctctcactctctctctctctttttttttttttttaaataaattacagcaatgcaagaacagactaacatactcagctaccgatgcacttgtttctggttggtggaaggcattgttcccattgtcccctgatcctgagcagtctttagttccagttacagtgaaagcccaggagttcttcccagggcccttcagtgggagaaggaggctgctgctctgcaagtggawtcctcacaggctgagatccccagatctcatgtcaaggaatcaggagccactcttcaggagtgggagtcagtgagatgattattatatctgagctacaagataaggagttgtctagtctcattagtagggccttaatctttcctgagagacaacatgcagaatctccttcacttggttaggcagacaccaagagattgttggattcttgacttcaaaacacagtggggtttctctttcttaacccaatacttggattgaggcttttagagtgttcctgactattttttaaatttgttttgttttgctttgttttgcccagagcatcatcccccaggacattactatt

SEQ ID NO: 860897 - DNA, 637 bp, Homo sapiens
agatgtgggaaagaaagtttcagagaaaatagttataaatggtagtccatcggagcagcttgtaccctgagaccagaactgggcttatgtatttatactagcacaggagcccatgctttggtttccagttcagtatcccagaattttcaggcatgggttggtaacttacactgttttgtctgctgagtgtctgccaccccaatcaatattatcatcttgaattatttctgaaaaccattcttcccccaatattaatccaggtactttgggtggaattgccccatttcttggtccttgttctaggtgtgaacacacgactcagacctgatcactcagttggctctgcaactgatcgattccctaactgatgaatcagagatggacatatgaacaaaattagtccaaaaagactcagctgtgagaattttttttccaggagctattgagaaagggaagctctcttcctataarggctggtttttgagctggcagcaggtagacatagagtgtggtgagcactttgctatcatagggaaggagctatcattcaggaaagcaaagtccagcaatgaagagaaggtgagtcctgctgacattgtttgagttcctagattgggccatacccgaagatcacata

SEQ ID NO: 860898 - DNA, 652 bp, Homo sapiens
agtttaataaatagaggagagccaggtatggaaaaatacagagtacaatacatattaagataaatgagcgagttttttttatatttgttaaactctattttgtcttaatatttattacactctatttcttttcctccctccattactgaaatgcattgctctcacatatgcttaccctggtttgcctggtttataggcatcagttgcatacccagttcaaaggtagagactttgaaatattttttaatccacaaaagttttatcctggaaaagtcggtaggaaaaatgtacccagaaattagcaaggagtgattaaaaccacaggagctcaatacagctatgtggggaaagattcaggctgtggtgagagatttacaaaaaattttagagctggaattggcattggtggccatctagttgacttgtttattttttaaaaggggaaagrcaagtccagagaggttgctcatgtacctgaggtctcatggcacttcttctaggagagcaacactcttgattctccacttttctatttatcttctttacttaagttttattttacctcctgtttaatatttcccatgcttgattggtaggggcataatgcttctccataatttggttcctactgtttgaatctggtgtgcttcat

SEQ ID NO: 860899 - DNA, 648 bp, Homo sapiens
gttacaccatctttgcctactttaaaaataccacttacatttatggtattctaaacctggaaagttatctctgggactatccatgaaaaaggcttattggttttacttgcttatggaataaataaattagctacatttaataaaaaactttttagagtactctcattttaaacaggtatcttattggtacctatgaaaagatacaaaggaaacataaccttagaaactccttctacgagatttttttttaaaaggcagaaatcagatgtaaaatgaagtcctttgtatgcacaaactgcctgctttrgatcttctgtgggatttgcaaaaaaggagctcaagcctgtagactagtggctaggattctatcctttcagtgtcatggccaggttcaattcccagtcagggagccagtccgttggaggtactggatgtaaatcctttaaattcaggaggaaaaataaacatttataaaaattaggttggggctctcacagaggcagctagcatgaggctgaggagcactgagcctcacatggtgccctgcactgccaagacaagtgaacgatacagtaaggatggctaaaggtgacctcagaaacccgaaaggcaaaatgtctgctaatgtcttctttgtgaagacatgca

SEQ ID NO: 860900 - DNA, 575 bp, Homo sapiens
gcagtggtttgtagttctccttgaagaggtccttcacatcccttgtaagtcggattcctaggtattttattctctttgcagcagtcgtgcatgggagttcactcatgatttggctctctgtctattattggtgtataggaatgcttgtgatttttgcacattgattttgtatactgagatcttgctgaatttgcttatcagcttaaggggattttgggctgagatgatggggtttttaaaatatacaatcatgtcatctgcaaacagggacaatttgatttcctctttttctaattgaataccctttatttcyttcttctgcctaattgccctggccagaacttccaacactatgttgaataggagtggtgagagagggcatccctgtcttgtgccagttttcaaagggaatgcttccagtttttgcccatttagtatgatattggctgtgggtttgtcataaatagctcttattattttgagatacgtcccatcaatacctagtttattgagagtttttagcatgaagggctgttgaattttgtcaaaggtcttttctgcatctattgagataa

SEQ ID NO: 860901 - DNA, 575 bp, Homo sapiens
gcagtggtttgtagttctccttgaagaggtccttcacatcccttgtaagtcggattcctaggtattttattctctttgcagcagtcgtgcatgggagttcactcatgatttggctctctgtctattattggtgtataggaatgcttgtgatttttgcacattgattttgtatactgagatcttgctgaatttgcttatcagcttaaggggattttgggctgagatgatggggtttttaaaatatacaatcatgtcatctgcaaacagggacaatttgatttcctctttttctaattgaataccctttatttccttctyctgcctaattgccctggccagaacttccaacactatgttgaataggagtggtgagagagggcatccctgtcttgtgccagttttcaaagggaatgcttccagtttttgcccatttagtatgatattggctgtgggtttgtcataaatagctcttattattttgagatacgtcccatcaatacctagtttattgagagtttttagcatgaagggctgttgaattttgtcaaaggtcttttctgcatctattgagataa

SEQ ID NO: 860902 - DNA, 575 bp, Homo sapiens
gcagtggtttgtagttctccttgaagaggtccttcacatcccttgtaagtcggattcctaggtattttattctctttgcagcagtcgtgcatgggagttcactcatgatttggctctctgtctattattggtgtataggaatgcttgtgatttttgcacattgattttgtatactgagatcttgctgaatttgcttatcagcttaaggggattttgggctgagatgatggggtttttaaaatatacaatcatgtcatctgcaaacagggacaatttgatttcctctttttctaattgaataccctttatttccttcttctgcctrattgccctggccagaacttccaacactatgttgaataggagtggtgagagagggcatccctgtcttgtgccagttttcaaagggaatgcttccagtttttgcccatttagtatgatattggctgtgggtttgtcataaatagctcttattattttgagatacgtcccatcaatacctagtttattgagagtttttagcatgaagggctgttgaattttgtcaaaggtcttttctgcatctattgagataa

SEQ ID NO: 860903 - DNA, 575 bp, Homo sapiens
gcagtggtttgtagttctccttgaagaggtccttcacatcccttgtaagtcggattcctaggtattttattctctttgcagcagtcgtgcatgggagttcactcatgatttggctctctgtctattattggtgtataggaatgcttgtgatttttgcacattgattttgtatactgagatcttgctgaatttgcttatcagcttaaggggattttgggctgagatgatggggtttttaaaatatacaatcatgtcatctgcaaacagggacaatttgatttcctctttttctaattgaataccctttatttccttcttctgcctaattgccstggccagaacttccaacactatgttgaataggagtggtgagagagggcatccctgtcttgtgccagttttcaaagggaatgcttccagtttttgcccatttagtatgatattggctgtgggtttgtcataaatagctcttattattttgagatacgtcccatcaatacctagtttattgagagtttttagcatgaagggctgttgaattttgtcaaaggtcttttctgcatctattgagataa

SEQ ID NO: 860904 - DNA, 589 bp, Homo sapiens
cacagttcgatctcagactgctgcgctagcagtgagcaaggctccctgggcatgggacccactgagccaggcacaggagagaatcttcttgtctgccggttgctaagaccttgggaacagctcagtatttgggcgacagtgtcccatttttccaggtacagtctgtcatgstttcccttggctaggaaaggcacttcctgggtgaggtgacaccccgctctgcttcgtctcaccctctatgggctgcacccactgtccaaccagtcccaatgagatgaactaggttcctcagttggaaatgcagaaatcacccatcttctgcatcagtcacgctgggagctgcaaactggagctattcctatttggatatcttggaatggaccttactttgtaatagatttatagtaaattctgaaatcaagaaatgtgagtacttcagcatagtagtttgttattttttaaaattaactttactttttagatcagttttagttacacaacaaaattgaggggaagatacaagacatttcccatgtaccccttgccccacacatgtgtagtctccctcattattaacatccctcttctt

SEQ ID NO: 860905 - DNA, 560 bp, Homo sapiens
tcaagacttcatttcttttttttgttcgatagtgctccattgtatgcatatatcacattttgttcatttatttgccatttaatgcacatttggatgctttgcaattttgggctatcatggatgatactgctataaacattcacttacaaatctttgtgtggacatgtatttttgttkcttttgggtggattccaagaaataaaattgctgggccaaatgttaagtgtatatttaatttcatgagaaactatattttgcaaaatggctgtattatttaccttcccaccagcagtaaatgaagaccctgggtccttcacatcttttcctacactttgaaacacctttctttttgattatagtcattctagtgagtacataatggtatcttatcgtagttttaatttgtgttttcctaatggctaatgatgctaaacatgtttttatatgcatagtgatcgtttgtgtgtgtgtgtgtgtgtgtgtgtgtgaggtctattcaaatcttgtttctagaaattgtccatttcatctcatttgtcttattttttggcatagttgtt

SEQ ID NO: 860906 - DNA, 594 bp, Homo sapiens
acaaaatggatgaatctggaggacaatatactaagtaaaataagccaaacacagaaagacaaatattgcatgatcttacatatattcagaataggaaatagtcaaactcatagaagcagagggtagagtggtagttattaaggcctggaaggaagggaaaatgagatgatgttggtcaaagggtatgaagttccagtttcacaaggtgaacagtttgacacttgaaatttgcaaagaaggtagatattaagtgttttacacacacacacagacacacacacasaaaatgttaattttgtgagatattggatatgttaattagcttggatgtagtaatcatttcacaatatatacatatatcaaagcatcaagttgtacacttaaatatatgcaatttttatttgtcaaatgtaccttaataaagatgttaaaaaagaaaacaacatcaatcattttggaagaaatttgggcactgatacggtttggctgtgtccccatccaaatctcatcttgaattcctgcatgttgtgggagggacccagtgggaggtaactgaatcatgggggcaagtctttcttgtgctattctcatgat

SEQ ID NO: 860907 - DNA, 584 bp, Homo sapiens
taaagcaggcaaccagcattttgttgtgggtgttggagaggcaaagcatctgtaaagattactttgaaagagagtgttatgtagtggcagatgcataaactaaggactatttcaaatagtaagcaaagaccttgaaacaatacratagccaccattggtaaagtgtcaactctgtgccaaatatttcatgttaccttatcagtaaacttcaacacaatgctatctgataggtgtgcccatattttagagatgagaaaatagatgtgaaatggactacaggtcacaacttttaagaggcataacaaagattcaaaactaggtttgtgtgatttcacaaatctgaaatctttgcagtacactgccatgcaatgctttagctcagaatagaatgagacaataggatatgttgataagtatcaatatgatatgttgaagacagtcagcaagcttgtaaaatggaagaggaacctgttagcagtggtgattccctgtgggcctgcagcaacctcacttcttgtctcctcggaagaaagaattcgaacaggggcataaggcagagtgagagagcaaggcaagttgtagag

SEQ ID NO: 860908 - DNA, 584 bp, Homo sapiens
taaagcaggcaaccagcattttgttgtgggtgttggagaggcaaagcatctgtaaagattactttgaaagagagtgttatgtagtggcagatgcataaactaaggactatttcaaatagtaagcaaagaccttgaaacaatacaatagccaccattggtaaagtgtcaactctgtgccaaatatttcatgttaccttatcagtaaacttcaacacaatgctatctgataggtgtgcccatattttagagatgagaaaatagatgtgaaatggactacaggtyacaacttttaagaggcataacaaagattcaaaactaggtttgtgtgatttcacaaatctgaaatctttgcagtacactgccatgcaatgctttagctcagaatagaatgagacaataggatatgttgataagtatcaatatgatatgttgaagacagtcagcaagcttgtaaaatggaagaggaacctgttagcagtggtgattccctgtgggcctgcagcaacctcacttcttgtctcctcggaagaaagaattcgaacaggggcataaggcagagtgagagagcaaggcaagttgtagag

SEQ ID NO: 860909 - DNA, 598 bp, Homo sapiens
atatatagaaaaatttacattgcatgattatattaaacaaccacacatgacatttatcataaaataatgccattttggggggttattttatagaaaaacaaactagagaagcagggtgatgtatttctctggggacataaaggtgtcacagaaaggagagattttcctggccaggatcactggtagatatacaytctgtccatgctggcaacacgatattctatggccttagcaccaagactgaatagctacaagcagttaagtgagagcattgaaggatagcctttctgtcaccctccaaatcactgaaaataattggactgaccctgtgattagcccagaagaaaatctcatggaggtgcattgacccaattctttgtagtcattttctgacagtggttgggcttgcttgcatttaattggattgtagagatgaaaagagtggagttatgtatttagaaccattatcatcttgagatgagctttcttgcagcatgtgtggagctggggtcagcctcagactgaccactggaaagtgatccagagtcatttttcaagcattgcttttgaacaacatggcttgcaaatttggaattcc

SEQ ID NO: 860910 - DNA, 608 bp, Homo sapiens
caggagagcagtgactctggaatagtcaaagtgacactggtcaactactaaaatggaaccccaggttcaaaggatggcagtctggtattctattcccatactcaaaataccccctatgatatacagaagagtatatcagtataaatattaattttgaggccaggtgtgttcgctcatgcctataatttcagcactttgggaggtcgaggcaggtggaccacctgaggtcagaagttcgagaccaacctggccaacatggcaaaaacccatctctaccaaaaatacaaaaattagctgggtgtggtggtgcacgcctgtagtcccagctacttgggaggctaaagccggagaatcrcttgaacccaggaggtggaggctgcagtgagccgaaatcgcaccactgcactccagcctaggcgacagagccagactctgtctccacgaaaaaaaagaaagaaagaaaaagaaatattaattttgagacatgcacacatgtgagaggctgggaatttttgctaattgccccgccaatgaaattggagagacacaatttccacccacacttggaactacagtggcacataaggaagactgactcaccacaatac

SEQ ID NO: 860911 - DNA, 623 bp, Homo sapiens
tctaagacaatatcaaaagacataacatatgtataattggaatcacagaatgacaggaaagaatgtggcaaaaaaaatttgaaaaattagccaaatttttccaaaattgggtaaaaggcataaatataaagcttgaaaaagctcggtgaccctcaaacatgataaatgaagaagctatgtgtaaatacatcgtagtcttaactgctgaaaaccagagraaaagagaactcttgaaagaagccagaaaaagaataacataattacataaggttcaaatcatcccagattttgcatctgacactgtgtaggccataattccataaacaaatatcttcaaagttctggaaaaaaagtgtcaactcagaatttcatatgcagcaaatatatcctattggactgaaagtgaaatactataatacaattttcaaataaaagaaaactaggaaaatgtgtcttctagcaaatctgctgaaatcctaaataaaattcttcaaactgaagagaaattataccagctgaaaactcagatcatcaggaaggaatgaagatgcttggaaatataatatctgggtaaatataaaaaactactacttaatctctttaaaatatatctaggtatttag

SEQ ID NO: 860912 - DNA, 642 bp, Homo sapiens
aagactccaggtaactcatccaccgtcactctactagtaagcaagaagatagaattcaaatacagatcagtgtaacttcatatgttcttcccactgctcttgggaaacttttgccttccagattccctccttcttttctttcttctcaaaaatacagactcattcacctctctctaataagaatcaggaattctccaatctaggacatccttgctgcccctcaaaaagagacttctcttcaatcgaatattttcccttgaacatcttcaggaaatgccacctacaaagacactttggattggcaaagagcagagtcaggacaaaaagacaaaactctttaaagatgtgattttctgaaatggagggaatggacattrtttttatttgtaatataaatgaatcttggtagtttgggtttagatccattctagatcacccctcaaagtggtacctgtggacccagggttcaatcatggccaacaatgcctagactatagactctgcagaggatgctgctacacaagggtctgtggatgcatctggggatgggggatgtggaagtggacattgagcaatccccaaaccctttcctttactttcttcattgacctttgtcacataccacactttactggaaatgta

SEQ ID NO: 860913 - DNA, 425 bp, Homo sapiens
gcattgtatgaatgtatgatccattaaataaaattaagttaacaaatccagagtcttctacaagaatactagggccaagaaaatgcttaaaattttttttgaggaaagcaaaatagcaatcaaaatattctaccacggcacatagggtgtggacctttgcccattttgctggaggtatcttctgtcatcgcccgcctcacctcacaaacactggctgtttttcttagccgtaaccttcgggtgttytgcacttttttttttcttttctttctttttttttttttttttttggacagagtctctttctgtcgcccaggctggagtgcagtggcataatctcggctcactgcaacttctgcttcctgggttcatgctattctcctgcctcagtctcccgagtagctgggattacaggcacgtgccac

SEQ ID NO: 860914 - DNA, 651 bp, Homo sapiens
gccttgtgtcgcatacttcgcttgagtcatatcaaaagttagtaggcaaacccataaatatatatacctactatgtacccacacaaattaaaaatttaaaaagttagtaggcagtatttgggctttcgtgggaacccacaatgagtttaattcatgctaaaatgacaaacttgttttaaggaagtaatacctgaggctttgagacatcttaaactacctggcttgcagctaaccatcagcctttctgttaaatatttttagggtgctccaggtcctgatggaaacaatggtgctcagggacctcctggaccacaggtgagtatttctcccactcttgtgctcttctgcactagaatgtatatagtcctcaaactggccatctccattttcagtccaaaagttatacagctagacaacagtggtgacatacgttgctatttatgctctctttcctgtcactttcagggtgttcaaggtggaaaaggtgaacagggtcccsctggtcctccaggcttccaggtaagtcaactcaaacatatacaatactgcctttggtcagcctattgagctgtaaatcaccataccgtacctctcttctccaccacaataaacatgatttcaggactgaagcaaagaaaggtgcattttttt

SEQ ID NO: 860915 - DNA, 619 bp, Homo sapiens
gctgaggttgcaggctgctttggctttaccatggagtctggagggtggcagacccatttagacagctcctttaggcagtgccatgctgaaaactctgtgtggggctccacctccacatttcccctcagcactgccctagcagagactctctgtgagagctcttcccctgaagcatgcttttgcctgggcacccaggctttcggatacaacctctgaaatctaggtggaagcgccaaacttccttcagtcttgcattctgcatgccagcaggcttaacatcatgtggaatcaccaaggcctgtggcttgtgctttctggagtggcaacccaagcttcacctgaaatcctttgagccacagctgaagctggagcagccaggatgccggcagcagtgtctcaaggataagcaggacaayggagcccttgacttggcccatgaaacctttctttcctcttaggccttggtttggaagggggattgtgatggcagagcctgactccaagatctctgagatgccctgaagtctttttcccattgtcttctatattagaacttggctcccttttagtcatgctaatctctccagcaagtagtttctccacagtccacttgaatttc

SEQ ID NO: 860916 - DNA, 598 bp, Homo sapiens
agagtgatatggacaatgaagtcctggctgaggtggtctcagatggagatgaggaactttttgggaactggagtaaaggtcactcttgttatgtaaagagactggtggcattttgcccctaccctagaggtctgtggaactttgaacttgagagagatgatttagggtatctggtgaaagaaatttctaagcggcaaagcattcaagaggaagcagagcatgaaagtttggaaaatttgcagcctgatgayatgttagaaaaaaaccatttttctgaggagaaattcaagctccctgaagaaatttgcataagtaatgaggagccaaatgataatcaccaagaaaatggggaaaatgtctccagggcatgttacagaccttcatagtagcccctcctatcacaggccaggaggtgtaaaagggaaaactggtttccccctgctctatgcagccttgggacatggtgccttgcatcccagctacttcagcttcagccatgactaaaagcagccaatgtacagctcaggccattgcttcagagggtgcaagccccaagccttagcagcttacaagtggcattgatcctatggatgaacag

SEQ ID NO: 860917 - DNA, 598 bp, Homo sapiens
agagtgatatggacaatgaagtcctggctgaggtggtctcagatggagatgaggaactttttgggaactggagtaaaggtcactcttgttatgtaaagagactggtggcattttgcccctaccctagaggtctgtggaactttgaacttgagagagatgatttagggtatctggtgaaagaaatttctaagcggcaaagcattcaagaggaagcagagcatgaaagtttggaaaatttgcagcctgatgacrtgttagaaaaaaaccatttttctgaggagaaattcaagctccctgaagaaatttgcataagtaatgaggagccaaatgataatcaccaagaaaatggggaaaatgtctccagggcatgttacagaccttcatagtagcccctcctatcacaggccaggaggtgtaaaagggaaaactggtttccccctgctctatgcagccttgggacatggtgccttgcatcccagctacttcagcttcagccatgactaaaagcagccaatgtacagctcaggccattgcttcagagggtgcaagccccaagccttagcagcttacaagtggcattgatcctatggatgaacag

SEQ ID NO: 860918 - DNA, 663 bp, Homo sapiens
tagaaagaaggaacctaggtagatgttgatggcatgctcttataaacacattttgatatattcttaagacaaaatctcccataaaacaggtacagtgtctcctagaaatatacctgcagtaatatctctgacatgctcagatcctgggtccaggtgggttcattcttgggtctccaggtgatttgctcagggkctttgagtgggcaggtcttccagttactgggcagcgggtggagtgaggaatggcagtagcagtggtgggacaaccatctgactcccaagtggtctgtgctggtgttggtgacagctgtgatgggctggatgggccagtccccaggcacacaggtggcatgtgcaggtgggttccagctgtgatgggagtagcaggttggataggcctgcccttaggccccttgcgagggctgcttgggtgccaatggtagtgtatgtggctgggtgatctcctggcccccagacagcatactaaggtaccagtgggcatggagctgaaccaggcagacctgacctcaggctcctgggtggtgcgtgcaggtgctggctgttgtaggtggagactgttcttctgctggaggcagtgaggtcactgcctgtgcgtcagccctgacagcagcagccaactgtggtggtggctgcaggtagggg

SEQ ID NO: 860919 - DNA, 675 bp, Homo sapiens
gaaaatagcattttgctttttatttggcaaataaaatcttttatgaatttttaatgagatacatatggaagtagttcatcaaaggtttatttctctatggccatatttgatgtaaaatacaaatgccaaaatgtcatttacagagcttttgttcaagaacaggaataaactgacagrctttcagccacacaaacgaagtgcatttttattggctgcatttcagataatggcaaggttataacactgttgacagagatttttcacccatctgttaaaactgcttcatgctgctgagtattaataagcaagtcttttaacgtaacaacaccaaacattaaaacatttcaccttgtgcttcatttttgccattattcttatatgaacataatttttacatgtaaaatcattactcctttactgtttgataggctttaccccgaaattgagtaattatcaactacaatcattagaattcatatagaaatatttaatcatttagatctacttacaggaaggtttttctttcccatgataaagtttacatagtacaatcaagatgctaatggctttgttttaaaaacaaaataaaatcatggttacaaggaaaataaaatataaactaaaaatgttaggtattaagagataacacttcccataaatatagtaaaagaacaa

SEQ ID NO: 860920 - DNA, 675 bp, Homo sapiens
gaaaatagcattttgctttttatttggcaaataaaatcttttatgaatttttaatgagatacatatggaagtagttcatcaaaggtttatttctctatggccatatttgatgtaaaatacaaatgccaaaatgtcatttacagagcttttgttcaagaacaggaataaactgacagactttcagccacacaaacgaagtgcatttttattggctgcatttcagataatggcaaggttataacactgttgacagagatttttcacccatctgttaaaactgcttcatgctgctgagtrttaataagcaagtcttttaacgtaacaacaccaaacattaaaacatttcaccttgtgcttcatttttgccattattcttatatgaacataatttttacatgtaaaatcattactcctttactgtttgataggctttaccccgaaattgagtaattatcaactacaatcattagaattcatatagaaatatttaatcatttagatctacttacaggaaggtttttctttcccatgataaagtttacatagtacaatcaagatgctaatggctttgttttaaaaacaaaataaaatcatggttacaaggaaaataaaatataaactaaaaatgttaggtattaagagataacacttcccataaatatagtaaaagaacaa

SEQ ID NO: 860921 - DNA, 612 bp, Homo sapiens
catctcaaactgcctcattacatctatttgtttccagttggtggaaaaggctcaccttctcattgggccccattttcaggggtgggttgtaggaactagagtactgactagccttgctttgcattactccattcaaygggtttgctgctgggtgtgtggaagatcagcttcccactgggtcctgcttacaccaggatgtgaaatgctgactagcccaaggtaattgtcactacttgattcattatccttgatgctgggtgagggtggagactaatcttcccactggatcctgctgacactgtcctgattgagtagtaataccactgtatgattccagcagttgtggggagattagctccctgctcagcctctctgatacaactgggcagctagtttttgcttctgcaacaagacataggtttatgatgagcttcctgttcatctctgctgaaactagggaaaggtgagggtgagaaggtgaaggaagacaggaactgggagtatcaatttattttggtgatggctagagttgggggagttgaatacctttatatttatttattttccatcttgggaatgggcaagaagattttcccttgttaggtcaccgtt

SEQ ID NO: 860922 - DNA, 642 bp, Homo sapiens
tctctgtaatactaaatgatgtactaggcactgatggattccagatggagtaaggacatgaaattaagtaagtcacagtttttaatctcagggaatgaagatttcattgttaaatacagctatgtaaacaaaaataaaatataatcacagtagaatttcatagtaactaaaacaaaaaacaacamcaacaaaaaacccactacttaaaaatctgatgggagtaaaattaaaggtgtctctgtgcttagcgaatttataaagcttgagagagaaaatggagttcacaaggtagaaaatagggaatgagcattcttacctgggtgatgtaagaaaaatgggctaaagcatatgtggctggaccaaacttttccagggaagttgatgaaattgggctggaaatgtggtttgaactaggtcattatggccttatacacagttctgagtaaaggagaaataaagtcctgtaaaccatcattaaacagtaaatgttcactgccaagtgatatcagcactagagatacctgaaattcatagccctaatgaatagcagaatatattttcaaaatgatagttatttcaagacttttgaatcttatagaatatgttattcctcagacattttggagaaggagagatacatac

SEQ ID NO: 860923 - DNA, 609 bp, Homo sapiens
agatactgtctatataaagtagacacagtttttgattttgatatacaaaatgtcatcatattttaagtgtgtccttgtatttaccatgacatgttcatttaatactgtaagatgcaacagtattttgtatactgtatcagattttaaaaatgctaggaattaaagtatagcaatgctttctgtttttacaatttttattttatcaattttgaaagataacttttagactatgcataattttaatgtatattattattgttaatacatacaatggaagataatagcaattggttatcctttgaatcctgtttaaatttcgagctggtaacatctgttattcccccaaaatacttttcatgccattaygagggttagtttttaatacaaattttctaaagtaatctataaaaaaatgacaaaaccattgttgctggtttttaaactggctttgcaagtcagtggaagtattctactttgtactgttgctttgggaatgttaaatggtctgatgattccatctccctatcaatattgataaaaatttggttcctaaaagttattcttctccagaatttcctccagagcacggatatttattctgaaaaaaaa

SEQ ID NO: 860924 - DNA, 643 bp, Homo sapiens
atcatcaggctgcaaactttccaaaatttattacttcccttttaaatataagttctaattcccaaccatatctttgtgaatacataaaactgattttttttttcgagacatagtctctcactatcacccaggctggagtgcagtgtcatgatctcagctcactgcaacctctgcctcctgggttcaagtgattctcctgcctcagcctcccaagtagctgggactacaggcacatgccagcatgcccagctactttttgtatttttggtagatacagggtttcacaatgttggccaggatggtctcgatctcttgacctcatgatccacccacctcrgcctcccaaagtgctgggattacagtcatgagccaccggtgcctggcaaaacagaatgtttctaagagcacccaagtcacttgttgaatgctttgttgcttagaaatttcttccaccagatatcctaaatcatctctctcaaattcaaagcttcactgatctctagggcaggagaaaaatgctgccagtctctttggtaaagcatagcaagaatcatctttgctccagttcccaataagttccttatctctatctgagatcacctcagcctggactttttggtcaaaaccattcaacaagtctcta

SEQ ID NO: 860925 - DNA, 600 bp, Homo sapiens
ctgcctgccctggactatgaattctggattaggacaattccttaaatggtaatttaaacaatttttatctgatatcacactgtcaatagcagacatattttgaagtaaatcacacacattgttaaactaaaaattataattaacacatcttggctgttggaagttaaatttagtatgtttttataatgaatttacttcacagatacacaggtaatgatgagtataaaaaatccacagtccaacatttttgtatatttagggggaagtctgttaatgagaatatggttacaagtgaaaagaacatggcttaaaattcatacayacaaaaaagtttatccttaatttccaaagaataatgtatattttactattccacttactgtaattggagcagaatgtgtaaatagaatgcttctttctccacttctgaaaatattttccaccctataagtttaagaacaccaaaatgtctatgaacttctcacttccatgtgcagaattagaaaggttacaagaaatttattcctatttcttggtagatccataagtcagatgacagttgtaaaaagaggtcaaagacagtaaaattaagtgactgat

SEQ ID NO: 860926 - DNA, 612 bp, Homo sapiens
tatcatatatgcatatcagtatatttatgtatatatatgtagttttctatacatacacacacacaccagaaaaaaaattaaaatggtacactagaagatatctatttaatacaaattacaaaagtaaagaaggaaaagaggaacaaacagatatgagacacacagaagacaaatagtacttttgcaaacatagagcaaatcatatcaaaaattacactgaatataattaattaaaagggagagaatatgaggctgtacttaagccaaaataagatccatgtgcataccatattcaagagatacattttagsttgaaagacaaaaacaggttgaaagtaaaagtccattcttgtgttgctataaatacctgactgggtaatttataaagaaaggttttatttggctcatggctctgcaggctttaaagaaaacatggttctggcatctgcttctggtgaggcctcagagagctaacaaccacggtggaaggcaaaggggagcaccaaattacatggtgagagtgggaacaagagagggagaagggggagttctcagactcttttaaacagccagaccttgtgtcaaatagctgagagaaaattcagttatcac

SEQ ID NO: 860927 - DNA, 639 bp, Homo sapiens
tgcaccacgatgaaattgcctaaaaacacatttcttagaatatgtctctgtggttaagcaatacataactgtctgtttatgtagtgaaaatgaacatctgtaaacaagattatgaaaacaatttcattttctatagcatcaaaaaamgaaataaaaatataaatgaaaagcttaatgaaaatgacaaaaccatttctgagaaaaataaatgaaaatgtaattaactggagagacattctatattcatggattaaaagatccaatattattaagatggcagttctctcaaaaatgatctgatgcaacactaatcaaaatcccaataggcttttgtttcctttttcagaaataaactgactctacattttatatgcaaatgagaaaaacccagaataactaaaacaattttgaaaataataacaaaattgagagacattatactttagtttcaaagcttattacaagggatggttatcaacacagtgtgtactgacactagattatgcatattttaccgttggataatgtaatgtacatattattaaatatacatgtttattcagtggcatataacgcttctttttttgagaagtggtactttgcaggatgttttacaacatctttggtactagccttcac

SEQ ID NO: 860928 - DNA, 591 bp, Homo sapiens
ctgagaatttgcatcagtagtagcagcatggagtgcactaacaccctggctgagaacattgttagtagcatggtgggtatcagagataatgggaggagaacattgaaaatcattgttatatacaacggttttaaagggttttgctatggggtagtacctggagaggaaagtggggctaaaaagaatgttatggctttatttgttcttttttgtttgctttttatggtaggagaaataacatatttttatgccgatctgatggtcccatgtagaagagaaagttgaagatttgcagagtarggtggagggggaattgcctgagtcctatgtaggttagaagagatgaaacctactgccaaagtagaatttagtaaacaataggaattacaagctcatatatttaagccactatttgagccctgaaaagggagagaagaaatttaaatatattaaatagactaggattttattttgtagcttggtttttagtcactggagacattttactgcatttcctttaattcagtgcaattttcatcagattttatatcagcacaatgctcaattcataagctcaatttacaatctatc

SEQ ID NO: 860929 - DNA, 722 bp, Homo sapiens
attgagttatatacctaaaaatgattaaggtagtaaatttgtatgtcatgtatattttaccacaattaaaaaattagacaaaatacaaaaataaaaaaggatgatacaaatttctcactggaaacaatgcaaggagaagacaatggagcaacatctttaaagaactaaaaaaatactgtcaacctagaattctatacccagtgaaaatatctttcaaaagtacagatgaaatcgtttgttcagacattcaaaagctgaaagaattcatcaccagcagacctgcactacaaaaatattaaaggaagtctttcaggaagaaggaaaattatatgagatagaattatagaattagcaaacggatgaagagcaccagaaatggtaactatatggataaatacatataaatttttgttgctatttaaatatttttaaaaaataggtgactacttaaacaaaaacagtaactgatagggagttgataccatatgtaaaaatagatcatatggcaataccacaaaggcaaggagggragaaatggaggtatactatcataaaattctcatactgtatgtgaagttgtatcatttcactttaaggttgactgtgataagttgaagatgtaagctatataccctacaggaagcactaaatttaaaaaaaagaattacagtaaataaattaattaaaaattaatggaatcattaacaaattattcaattaat

SEQ ID NO: 860930 - DNA, 722 bp, Homo sapiens
attgagttatatacctaaaaatgattaaggtagtaaatttgtatgtcatgtatattttaccacaattaaaaaattagacaaaatacaaaaataaaaaaggatgatacaaatttctcactggaaacaatgcaaggagaagacaatggagcaacatctttaaagaactaaaaaaatactgtcaacctagaattctatacccagtgaaaatatctttcaaaagtacagatgaaatcgtttgttcagacattcaaaagctgaaagaattcatcaccagcagacctgcactacaaaaatattaaaggaagtctttcaggaagaaggaaaattatatgagatagaattatagaattagcaaacggatgaagagcaccagaaatggtaactatatggataaatacatataaatttttgttgctatttaaatatttttaaaaaataggtgactacttaaacaaaaacagtaactgatagggagttgataccatatgtaaaaatagatcatatggcaataccacaaaggcaaggaggggagaaatggaggtatactatyataaaattctcatactgtatgtgaagttgtatcatttcactttaaggttgactgtgataagttgaagatgtaagctatataccctacaggaagcactaaatttaaaaaaaagaattacagtaaataaattaattaaaaattaatggaatcattaacaaattattcaattaat

SEQ ID NO: 860931 - DNA, 722 bp, Homo sapiens
attgagttatatacctaaaaatgattaaggtagtaaatttgtatgtcatgtatattttaccacaattaaaaaattagacaaaatacaaaaataaaaaaggatgatacaaatttctcactggaaacaatgcaaggagaagacaatggagcaacatctttaaagaactaaaaaaatactgtcaacctagaattctatacccagtgaaaatatctttcaaaagtacagatgaaatcgtttgttcagacattcaaaagctgaaagaattcatcaccagcagacctgcactacaaaaatattaaaggaagtctttcaggaagaaggaaaattatatgagatagaattatagaattagcaaacggatgaagagcaccagaaatggtaactatatggataaatacatataaatttttgttgctatttaaatatttttaaaaaataggtgactacttaaacaaaaacagtaactgatagggagttgataccatatgtaaaaatagatcatatggcaataccacaaaggcaaggaggggagaaatggaggtatactatcataaaattctyatactgtatgtgaagttgtatcatttcactttaaggttgactgtgataagttgaagatgtaagctatataccctacaggaagcactaaatttaaaaaaaagaattacagtaaataaattaattaaaaattaatggaatcattaacaaattattcaattaat

SEQ ID NO: 860932 - DNA, 615 bp, Homo sapiens
tagggaaggggagcagggagtggaaagattttttccaatgggctgggcgcctggatgctccccacaaagccccttcctgcctgcccccacccctccggcctctcccctagctggcctctcgcacaggaaatgaaagagcttgctgggctgagagagcagagctggcagcgcygcccaaggaagcacattcaattcgcttatgtatctatttatttatttccatttagaatgaggagaaagaaaatggccagggcagacctgaccacccagcagcctctgatggtgaaggccctggggaggtctgggtgggcccatccaccacccaagatcctctctgcgcgggaggttggtggtggggggagagagagaaagagagaaagagagaaagagagagagaggccgtggatgctctttctcctgaggaatgaaatggtttctggaaaatgctggtctcctgagctggctcagggcctcaagcctgggaggcagcattgagtgatagcttccagatggggatggtggccctcagccagcaaggaggaggaggaggaggacgaagaaggaggagggcagaggagaaggagggagaaagagggagagggaagaggaggaaaa

SEQ ID NO: 860933 - DNA, 633 bp, Homo sapiens
ttagccatgactaagggccaaacattttggatgctcaaaatccacacttttgtcaccctgcttctgagggtatccatgcaccactgaggctggactcatctttcctgatcgctttgaaattgggattgagatttatagactctctttactttgggattcaaatcagtttagttagagctaactcagagaacaattagttcaggatccttttataatgtgaaatcctgatcttttgaggatagcttaaaccagaacgcagtgtgrgatatgtgagatatggccctctagtctaccaacttagcagaaactcgttgattttctagagctttctgaggcaagagcaaagtaattccactgtaagaaagacaacgcgtatgtacaaaagaggcagggcagaagagttaaaaataaaccaaagatagctgttcgccgccttattgacttgcttttgattcctgttcttggacacagaggttcccacccctttgtcttaatctgcacttgaactgacctaggttcctcatgaggactcagtttcagagaactgaaattctctggctcttaatttcagcttgtgatatctgcacttacttttttctatatttaccttactttcgtgcaatcagatttttt

SEQ ID NO: 860934 - DNA, 633 bp, Homo sapiens
ttagccatgactaagggccaaacattttggatgctcaaaatccacacttttgtcaccctgcttctgagggtatccatgcaccactgaggctggactcatctttcctgatcgctttgaaattgggattgagatttatagactctctttactttgggattcaaatcagtttagttagagctaactcagagaacaattagttcaggatccttttataatgtgaaatcctgatcttttgaggatagcttaaaccagaacgcagtgtgggatatgtgagatatggccctctagtctaccaacttagcagaaactcgttgattttctagagctttctgaggcaagagcaaagtaattccactgtaagaaagacaacgcgtatgtacaaaagaggcagggcagaagagttaaaaataaaccaaagatagctgttcgccgccttattgacttgcttttgattcctgttcttggacacagaggttcccacccmtttgtcttaatctgcacttgaactgacctaggttcctcatgaggactcagtttcagagaactgaaattctctggctcttaatttcagcttgtgatatctgcacttacttttttctatatttaccttactttcgtgcaatcagatttttt

SEQ ID NO: 860935 - DNA, 501 bp, Homo sapiens
ttaaaagtgtgtgggccctgctccctctctccttttcctgctctggctgtgtgatacaccaacttccccttttccttctgccatgatggtaagcttcctgaggcctcaccagaagcagaagctggcaccattcttcctgtacagcctgcagaagcatgggccaaataaacctcttttmtatatatattacccagtctcagatatttctttacagtaatgcaaaaactggccaacacaccacttgacatattgtgtacaggtcagccatctcttattcttattcttattctttttgtttggggtttttcttttctttttctttttttctttttttttttttttttttttgagacaaggtctcactctgtcacccaggttggattgcagtggcaccatcatggctcacggcagcattgaacttctgggctcaaaccatcctcctacctcagcctcctgagtttctgggactacaggcatgctccactatacccagctaacttt

SEQ ID NO: 860936 - DNA, 683 bp, Homo sapiens
aaaattcacatacctaagggagtgctatccttcattaaatgtttttctgggcttcactaaaaagagatcaccttaggccaaaatattgagttttaactacaaagatagaaagcaaatgtgaaagtctgcataccgatattagtttgagggagttatagaatcaggatcctttgaaggagctgctcatggtacaacatagcttggtagagccatgtagatttggagctgtagttgactgtgtatttgtaccaacatcttggcagccaactgcatgagctttcacatgtcggcgcagcataacaaagacagagactctttggtagttctgggtagtacattccacatattaggagtaatcttgaaagcaggtgaatgttgctttctctgggggataaaggaagaggtgcggaaaagagaaaaaaacggtgcaatttctattgctgaagtttgaaaagtgaacctgaaagacatatgcaaatggccaatatccacatccaaagatgctcaacattamtaattattagggaaattcaaaccaaaatcacaatgagatatcattgcccacccattaggatggctataataaaaataaaaaaataaatacataaaagcaaaaacagacaataacgattgttggtaaggatatagagaaattggaagccttgcaaactgtgggtgggaat

SEQ ID NO: 860937 - DNA, 651 bp, Homo sapiens
acacctgtaatcccaactacacaagaggctgagatgggagaatctcttgagcctgggaagtcaaggcagcagtgagcgaagatcgtgccactgcactccagcctaggcaacaactctgtctctctctctctctctcacacacacacacacacacacacacacacactctctctctctctctctctctctctctctmtatatatatatatatatatatatacatatgcggtctgttttaaatattttaattaagacaaattatttccttcacttcaaatttgccttaaaaaagaaagaagaatatattaaaataaaccaatataacaaaggaagtccattttaaagctgtatgttacatttctgttttcaccatgaaggaataactggcaccagattgatcttcccatcacagaaaactagaatgtagaaaaaatgtatttgtaaaatggctttcaaacatttggcagctggctgggaaggactgtggtcttcaagaaaagagaaacaaatgaaatgatttctctgatcatcctggctttctatcttgctatcttgaaggctttactgaaaaccagcacatagctcagatacccagaaagggcatgacattctccataagctggagagaaatgatgagagggaagggaggga

SEQ ID NO: 860938 - DNA, 599 bp, Homo sapiens
tacatttggcgcattaaaatttcatcagtacctgaaattctgcaatgaaagatttattattttggcttaaatccttttatcgcttggaaagaaaagattctgacaagaattgctatatcaattcatatctgtctttaatgttttattataaacacatttactagaccttttcctaagaataattttgatgacwcagaatacagacagaacaagaacacactacatctttcataaggtcaccagagagaaccacggaaggaagttagggacaattgagatggataccagaaaattaattttgaaaactagaacttttgggaggaaatctcgacttattaacattctcaaatcttatccaaagaaatattatctacagataaaatccttctctgagtaaggaaagtaaggaatgacaaattgggggggtgttaggtaggttaaagtcaacagactcataagatttcaagttgttataacctgtactgtccaaacctggcctgggcaacagaatcagctgtgggcacttgaaaagaatatcttacctttgtcccaataaatttcatttgaatctctatatgttaaaaaaaataaaaatatgg

SEQ ID NO: 860939 - DNA, 593 bp, Homo sapiens
tgagaagtaagtgattattgttttaagctctgcaatttgggggattttgtgttataacagctatactattatagctaaaataatcaatcaatgaggattcagagaaaccaaggtatcatatttgctttacctcaggtaagcaattactagttaataagcatttactcagtgttcagatctgttctcrgtgctgtaaattacaaagaaatagaaagcacagtgtctgatttcaatattgcttgtaaggcacagaccataaagacaccattaaatgctgaagtgtggagaagtacctctctatttgacagttttttaaagtagttgatctatgaaggctgaaggatgagccatgaaaggcttcatttgataagttgaactttgaccttcaaggtagcctgggagggatttagataagtgatgggtatcccagcagggaggatgatcatgagcagaaagtcaatgtaaaaaaaaaaaaaaaaaagccaggcatcagtgggaaattgtgaaaattctgcccaacagaagcagagaatcctgctgagctgtgctgggtaataaagaaaagcaagtcccagccagactcaggacagact

SEQ ID NO: 860940 - DNA, 541 bp, Homo sapiens
tctctatttgacagttttttaaagtagttgatctatgaaggctgaaggatgagccatgaaaggcttcatttgataagttgaactttgaccttcaaggtagcctgggagggatttagataagtgatgggtatcccagcaggsaggatgatcatgagcagaaagtcaatgtaaaaaaaaaaaaaaaaaagccaggcatcagtgggaaattgtgaaaattctgcccaacagaagcagagaatcctgctgagctgtgctgggtaataaagaaaagcaagtcccagccagactcaggacagactagagagctaggtaattattttaagctggtttacttcagtacaatccagcctccaacttgattgggaaaatccttcagaaaattatcatgtctttttcttttgagcttttacttggtgtctttttcccttgggcactttttttctagagtctgtgaacagacactaggagagagttataatgcacatccccctttccccctcccaaaatggcttatgatctcacttgtcttttgtttttatta

SEQ ID NO: 860941 - DNA, 636 bp, Homo sapiens
cctgtgcataagtggcaaggcctttgataataaagaaacatccagctcggagtggtggctcatgcctgttatcctagcactttgggaggccaaggtgggcagatcacttgaggtcaggagtttgagaccagcctggccaacrtgaggaaacccagtctccattgaaaaaaatacaaaaatgagccagaaattggttgaacctgggaggcagaggttgcagtaagctgagatcgtgtcactgcactccagcctgggcaacagagtgagactacctctcaaaagaagaagaagaagaggaggagcaggaggaggaggagggggagggggaggaggaggaagaggaggaggaggaggaggaagaggaagagaaagaggaagaggaagaagagatgtccaaagctcaacaattgtaaacaagaaaaatcaagagctactacggcagaatcagaaggaaatgagaatggagagtcagtagcacacctggccccagcttcttcccattccactgctgctaaggccaaagagagcttcctttagacacacgaatgcattaggtaatgggttaattatacttaggcttcctagatagatgttataaaatagtatattcttggagaagctaaatttaaaaggtag

SEQ ID NO: 860942 - DNA, 636 bp, Homo sapiens
cctgtgcataagtggcaaggcctttgataataaagaaacatccagctcggagtggtggctcatgcctgttatcctagcactttgggaggccaaggtgggcagatcacttgaggtcaggagtttgagaccagcctggccaacatgrggaaacccagtctccattgaaaaaaatacaaaaatgagccagaaattggttgaacctgggaggcagaggttgcagtaagctgagatcgtgtcactgcactccagcctgggcaacagagtgagactacctctcaaaagaagaagaagaagaggaggagcaggaggaggaggagggggagggggaggaggaggaagaggaggaggaggaggaggaagaggaagagaaagaggaagaggaagaagagatgtccaaagctcaacaattgtaaacaagaaaaatcaagagctactacggcagaatcagaaggaaatgagaatggagagtcagtagcacacctggccccagcttcttcccattccactgctgctaaggccaaagagagcttcctttagacacacgaatgcattaggtaatgggttaattatacttaggcttcctagatagatgttataaaatagtatattcttggagaagctaaatttaaaaggtag

SEQ ID NO: 860943 - DNA, 636 bp, Homo sapiens
cctgtgcataagtggcaaggcctttgataataaagaaacatccagctcggagtggtggctcatgcctgttatcctagcactttgggaggccaaggtgggcagatcacttgaggtcaggagtttgagaccagcctggccaacatgaggaaacccagtctccattgaaaaaaatacaaaaatgagccagaaattggttgaacctgggaggcagaggttgcagtaagctgagatcgtgtcactgcactccagcctgggcaacagagtgagactmcctctcaaaagaagaagaagaagaggaggagcaggaggaggaggagggggagggggaggaggaggaagaggaggaggaggaggaggaagaggaagagaaagaggaagaggaagaagagatgtccaaagctcaacaattgtaaacaagaaaaatcaagagctactacggcagaatcagaaggaaatgagaatggagagtcagtagcacacctggccccagcttcttcccattccactgctgctaaggccaaagagagcttcctttagacacacgaatgcattaggtaatgggttaattatacttaggcttcctagatagatgttataaaatagtatattcttggagaagctaaatttaaaaggtag

SEQ ID NO: 860944 - DNA, 625 bp, Homo sapiens
ttcctttagacacacgaatgcattaggtaatgggttaattatacttaggcttcctagatagatgttataaaatagtatattcttggagaagctaaatttaaaaggtagaggaatatggaagatggttgtatcctcttattgatacttctatgacttaagggaaaataaaactgtcattatagacaggatataagtaatcaatatttgctaatgattgtaattagtttaatatcccacatctcaaacgtaaagcgttcaaaaaaatctaaatggtggccagacacagtggctcatgcctataatcccagcactttgataggctgaagcaggtggatcacttgaggtcaggagtttgagaccagcctgacaaacctggtgaaaccccatctctactaaaaatacatttgaaaaaatgtgcgtggygtgttggtgggcacctgtaatcccagctactcaggaggctgaggcaggagaattgcttgaacccaggaggtggaggttggagtgagccaagatcacaccattgcactccagcttgggtgacagaatgagactctgtctcaaaaattaaaaaaaaaaaatctaaatggtaaataaaatgttattgaacaaaacaggcaattta

SEQ ID NO: 860945 - DNA, 672 bp, Homo sapiens
cctagtcttgaaacgtcttgctttaaccacttagacccaaacccaaagtcccaaatacttctctctgacttttgtcaaatagaatctaataaactttgctcaatcagtgagttctttgatggtctttttaggagttgacaacagagaagaaagatgtttatctacttagaaaaccaaactgacttgggcccaataactgaaaargccactctttctaaactctactgcagtctctcctttgtaagaaatcaaataactgtaaatgtgtgttctttttataggcttctcattttgttctatttgtctaccttacaccaataccacactttcaaaaaacattacagcattattactcttaatatctgaaactatgcatccccaacttggttggtgttctttgagattttcttggttatttttggccctttgcatttccaaataaattttggaatcagcttaccaattttcagaaagcacatccagtgattgcattccacctattgatccgtttaggatgaattgtaatctgtaaactattgactcttccaaatatgtatatattaatttaggtcttctttatttctctcgctgatgttttacagctttccgtatagacattttgtacattattcctaaatattttgttttggttcaattataaatggaatcttt

SEQ ID NO: 860946 - DNA, 643 bp, Homo sapiens
atctgaaactatgcatccccaacttggttggtgttctttgagattttcttggttatttttggccctttgcatttccaaataaattttggaatcagcttaccaattttcagaaagcacatccagtgattgcattccacctattgatccgtttaggatgaattgtaatctgtaaactattgactcttccaaatatgtatatattaatttaggtcttctttatttctctcgctratgttttacagctttccgtatagacattttgtacattattcctaaatattttgttttggttcaattataaatggaatcttttttattctatttacttgttgtatccagagaccttgataaaatagcttcttaatgtaaattctttatctgtacatttttatgtactgtctacttacacagtcatgcctttgtgaataaaaacaattttctgtttctccagtctccctgtgtgtatgtgtaaaaattttttgttggcaaagtggcattttttcttattgcaataggtttgatcaatgtgttttggctaatcttttgtggaatttacagttgacagaggcaaggtttatctagctcctttgaatttccatttataaaccctgggattagaaacagaagaccttaattcaagtat

SEQ ID NO: 860947 - DNA, 617 bp, Homo sapiens
cagataatatttgaatgatctattctacagagtagaagtcaattataaacctgccagacaaaattcatttgcctgtaaacacacaagaatcatttgtgttcctttcagttttccataatttacagagttgtaaagtggctgagtcgataaaaggctcagattcctttacaaaaaacactcaacatttcattgaaaggacacccacagatcacatatccactttcaaatcatttatggttgttcctgacaaatataaagaatatatgatttgcaatgtaaattaacacctttgaatctcaacttttccatctgtaaaatgagaatgataattttatctcacagggtactgtgaagatkcagtgagatgatgatcatgaatacaattaaaatatataaagatatataaacgcaaacctattatttaaatctacgataatactaatccttataataacatatttgctataagtagtaaaaattcaaacttatttcagttctccattaggctgccacatattcctcattacagctttctcaagtccataaaaattctcccttactgtttgcaattcttattctatttgtccatatagaaacacctttgagtaataaactaa

SEQ ID NO: 860948 - DNA, 617 bp, Homo sapiens
cagataatatttgaatgatctattctacagagtagaagtcaattataaacctgccagacaaaattcatttgcctgtaaacacacaagaatcatttgtgttcctttcagttttccataatttacagagttgtaaagtggctgagtcgataaaaggctcagattcctttacaaaaaacactcaacatttcattgaaaggacacccacagatcacatatccactttcaaatcatttatggttgttcctgacaaatataaagaatatatgatttgcaatgtaaattaacacctttgaatctcaacttttccatctgtaaaatgagaatgataattttatctcacagggtactgtgaagattcagtgagatgatgatcatgaatacaattaaaatatataaagatatataaacgcaaacctattatttaaatctacgataatactaatccttayaataacatatttgctataagtagtaaaaattcaaacttatttcagttctccattaggctgccacatattcctcattacagctttctcaagtccataaaaattctcccttactgtttgcaattcttattctatttgtccatatagaaacacctttgagtaataaactaa

SEQ ID NO: 860949 - DNA, 626 bp, Homo sapiens
aatcctctggcctcaaccttctgagtaactgggactaccggcatgcaccaccacattgcttttttgttgttgtttgtttgtttgtttgtttttcatagagatgggatcttgcaatgttgcccagattgatctcaaactcctgagctgcagggatcatcctcaccttcagctcatgcctgtaatccctccaaagcaccgggattayaggcatgagtcacaacttctggccactttactcttattaatcctctttccagttttaattcaagtgccatttcctctaggaagccttccttgattgttctaagttaagttaggtagcccctctgtagcattttgatatttgacatttatgcctctgccacctccctttttagattaaatgtacttctcaagaataaggatgtttctttttttttttttttccttgagacacagtcttgctctgtcagccaggctacagtgcaatggtgcaatcatggctcactgcaacctcaaactcctgggatcaagcgatcatcctgcctcagttttctgaatagctggtactctaggtataagccaccatgcctactagactcattttttaaaaatatttttgtagagatgggatatcactatgtagc

SEQ ID NO: 860950 - DNA, 511 bp, Homo sapiens
atgcactacaactcaataaaatcagctattgatacatgcaacaacatgggtgaatctgaaaatattaatgttgaagaaaagaggtcagtcaaaaaagactacagatcttataattccatttgtataaaattctagaaaatgctgtaggatagaagtcatatcaacggttgtctaaagatgtgggagggaaggagagttaggaagggaaatcatttttgtccctttataatccgtagagggaaacaaggacaytttaggggtgatgattatgctaattcctttattgtggtggtttcactgatgtataaatatgtcaaaacttagcacatgtaggtatgttaaaatttctatcatttatagcacagcacaactgttaatataataaaagataatatttgggagttttggactcaggaataatatatccagcctacaaattttagtcttgatgagtaacaggaatatatgaagaacagatatgtacaaaaatgtttgaaaggaataaataagg

SEQ ID NO: 860951 - DNA, 511 bp, Homo sapiens
atgcactacaactcaataaaatcagctattgatacatgcaacaacatgggtgaatctgaaaatattaatgttgaagaaaagaggtcagtcaaaaaagactacagatcttataattccatttgtataaaattctagaaaatgctgtaggatagaagtcatatcaacggttgtctaaagatgtgggagggaaggagagttaggaagggaaatcatttttgtccctttataatccgtagagggaaacaaggacactttrggggtgatgattatgctaattcctttattgtggtggtttcactgatgtataaatatgtcaaaacttagcacatgtaggtatgttaaaatttctatcatttatagcacagcacaactgttaatataataaaagataatatttgggagttttggactcaggaataatatatccagcctacaaattttagtcttgatgagtaacaggaatatatgaagaacagatatgtacaaaaatgtttgaaaggaataaataagg

SEQ ID NO: 860952 - DNA, 636 bp, Homo sapiens
atggttatgagtgattttcttagtattgatttcaatttttttttgcactgtggtccaagagaatgtggttggtatgattttgatttgttgctgttgtttttgaatttaagaattgttccatggccaatcgtgtggtcagttttaaagtatgggmcatgtgcaggtgagaagaatgtacgttccattgtttctggttggagagttctgtagatgtatgttaagtccatttggtcaagtgttgagttaaaggcctggatatctttgttatttttctgccttgatgatctgtctaatattgtcagtggggtgttaaagtccctcactcttattgtatggttatctaagtctctttgtaggtctataaaaatttgctttacgaatctaggtgctcctgtgtttggtgcatatatatttacataattaaatcttgttgagttgagccctctacaattatgtaactcacttctttgtgttttttatcttagttggtttaagtctgctttgtctgaaattagaatagtaacccatgcttctttctgttttccatttgcttggtagacttttcttcatgcttttactttgagcctatgggtatcactgcatgtgagatgggtatcttgaagacagtatccaatt

SEQ ID NO: 860953 - DNA, 636 bp, Homo sapiens
atggttatgagtgattttcttagtattgatttcaatttttttttgcactgtggtccaagagaatgtggttggtatgattttgatttgttgctgttgtttttgaatttaagaattgttccatggccaatcgtgtggtcagttttaaagtatgggacatgtrcaggtgagaagaatgtacgttccattgtttctggttggagagttctgtagatgtatgttaagtccatttggtcaagtgttgagttaaaggcctggatatctttgttatttttctgccttgatgatctgtctaatattgtcagtggggtgttaaagtccctcactcttattgtatggttatctaagtctctttgtaggtctataaaaatttgctttacgaatctaggtgctcctgtgtttggtgcatatatatttacataattaaatcttgttgagttgagccctctacaattatgtaactcacttctttgtgttttttatcttagttggtttaagtctgctttgtctgaaattagaatagtaacccatgcttctttctgttttccatttgcttggtagacttttcttcatgcttttactttgagcctatgggtatcactgcatgtgagatgggtatcttgaagacagtatccaatt

SEQ ID NO: 860954 - DNA, 609 bp, Homo sapiens
agttctaagtttcttttctctgcttggttgattttgctgttaatacttgtgattgtattctaaaattcttgaagtaagtttttcatttctatcagatcagtttggttatttcttaaaatggccatttcttcttttatctcctgtatcattttactgcattccttagagtcctcatattgagttttgactttctgctgaacactgatgctcttcattcctatccagagtctgaattctatttctgtcatttcagccatttcagcctggttaagaaccattgctggggaaatattcctgtttttggaggtaagaaaacactctggctatttgagtttccagagtgcttgtgctgactctttctyatctttgtgggctttgaagttactattctttggatttttttcttttatcttctttgatgcccttggggtttggttgtggtataagatgggttctgctgacttgcttcttttccggaagatttttagggggccaaagctctccttaggactcctggactgcataccatcattctaaggggcaggtatcaggcccctgcctttgttctctggcctttagaggttagaatcctgctgtgctggaggggcc

SEQ ID NO: 860955 - DNA, 627 bp, Homo sapiens
ttctagactttttttgttggcaactttttcattactgtttaagtctcactacttgattttggtctgttcagagtttctatttcttcctgatttaatctaagagggttggttatttccaggcattttccatctcctgtagattttctagtttgttcacatraaggtgttcatagtagccttgaatgatcttttgtatttctgtggcattggttgtaatatctcccactttatttctaattaagcttatttgtaccttttctcttcttttcttggttaatcttgctaatggtctatcaaattttttatcttttcaaagaagcagcttcttgtttcatttatcttttgtattgtttttgtttctattttatttatttctgctcaaatttttcttatttcttttcttctactggctttgagtttggcttgttcttttttctctagttccttgaggtgtgaccttagattgtctatttgtggtctttcagacttcttgatgtagacacatccctcattgatgcaatgaactttcctctagcaccacttttgttgtatcccagaggttttgataagatgtgtcactattattgctcagttcaaataattttttaatttccatcttaattttat

SEQ ID NO: 860956 - DNA, 627 bp, Homo sapiens
ttctagactttttttgttggcaactttttcattactgtttaagtctcactacttgattttggtctgttcagagtttctatttcttcctgatttaatctaagagggttggttatttccaggcattttccatctcctgtagattttctagtttgttcacataaaggtgttcatagtagccttgaatgatcttttgtatttctgtggcattggttgtaatatctcccactttatttctaattaagcttatttgtaccttttctcttcttttcttggttaatcttgctaatggtctatcaaattttttatcttttcaaagaagcagcttcttgtttcatttatcttttgtattgtttttgtttctattttatttatttctgctcaaatttttcttatttcttttcttctactggctttgagtttggcttgttcttttttctctagttccttgakgtgtgaccttagattgtctatttgtggtctttcagacttcttgatgtagacacatccctcattgatgcaatgaactttcctctagcaccacttttgttgtatcccagaggttttgataagatgtgtcactattattgctcagttcaaataattttttaatttccatcttaattttat

SEQ ID NO: 860957 - DNA, 694 bp, Homo sapiens
aagcagcatagctcatatgcaaagctgagttggccactcccagaagcacggtggaaagttcagactagcttgagtccctagaaggccaacctccatgcccagacttagaccccaccctaaggctctgtccagatagggagatacacatcacagtgcctttcagcaaatgcaaaggtgagagttacatcacccagatgttcaaaaagcatcctggctctgcctcaaagcccattccaactctctacccaagcagggaggcaaacctcaatcatgcatttctaccaagcctagcagctgggtttggccattccaagcagcaattccatctaatcttgcaacccaacctgcagccctgccaaaattacagaactcaaatrgtggtgctggccatctagggaatatatcctgtgccccagctcaccagacgtgatttcaacacccagtcagtgggtccagtgaacagcagagcccagccagcagccccatccaaccccagagcaaaggcagccttccagagagctagagaacctaacagcaagcactacctgcctagtgttattaccagctgacccatccagaataactgtctcaacttcatagtaaaggtctttccctgcaaaagaacacctgtgaaggatggaggacgtggctatctccccaaatgtgcagttacaaatgtaaggtgtcatggatt

SEQ ID NO: 860958 - DNA, 694 bp, Homo sapiens
aagcagcatagctcatatgcaaagctgagttggccactcccagaagcacggtggaaagttcagactagcttgagtccctagaaggccaacctccatgcccagacttagaccccaccctaaggctctgtccagatagggagatacacatcacagtgcctttcagcaaatgcaaaggtgagagttacatcacccagatgttcaaaaagcatcctggctctgcctcaaagcccattccaactctctacccaagcagggaggcaaacctcaatcatgcatttctaccaagcctagcagctgggtttggccattccaagcagcaattccatctaatcttgcaacccaacctgcagccctgccaaaattacagaactcaaatagtggtgctgsccatctagggaatatatcctgtgccccagctcaccagacgtgatttcaacacccagtcagtgggtccagtgaacagcagagcccagccagcagccccatccaaccccagagcaaaggcagccttccagagagctagagaacctaacagcaagcactacctgcctagtgttattaccagctgacccatccagaataactgtctcaacttcatagtaaaggtctttccctgcaaaagaacacctgtgaaggatggaggacgtggctatctccccaaatgtgcagttacaaatgtaaggtgtcatggatt

SEQ ID NO: 860959 - DNA, 694 bp, Homo sapiens
aagcagcatagctcatatgcaaagctgagttggccactcccagaagcacggtggaaagttcagactagcttgagtccctagaaggccaacctccatgcccagacttagaccccaccctaaggctctgtccagatagggagatacacatcacagtgcctttcagcaaatgcaaaggtgagagttacatcacccagatgttcaaaaagcatcctggctctgcctcaaagcccattccaactctctacccaagcagggaggcaaacctcaatcatgcatttctaccaagcctagcagctgggtttggccattccaagcagcaattccatctaatcttgcaacccaacctgcagccctgccaaaattacagaactcaaatagtggtgctggccatctagggaatatatcctgtgccccagctcaccagacgtgatttcaacacccagtcagtgggtccagtgaacagcagagcccagccagcagccccatccaaccccagagcaaaggcagccttccagagagctagagaacctaacagcaagcactacctrcctagtgttattaccagctgacccatccagaataactgtctcaacttcatagtaaaggtctttccctgcaaaagaacacctgtgaaggatggaggacgtggctatctccccaaatgtgcagttacaaatgtaaggtgtcatggatt

SEQ ID NO: 860960 - DNA, 652 bp, Homo sapiens
cttccatagctagagaggagaagtcaatgcttagcttcaaagcttcaaagtacaggtcttcttgttaggggctaaatgcagctggtgactttaagttgaagccaatgatcatttatcattccaaaaatcattggacccttaagaattacactaaatctactctgtctatgctctataaatggaacagcaagcctggatgacagcatatctgtttacgacatgctttactaaatattttcagtcagccttgagatctactgctcagaaaagagattcttttcaaaatattactgctcattgagaatggacctagtcacccaagagctctgatagaaatttacaatgtttttatgcctgctaacamaagaaccattctgcagcccattgataaaggagtcattctgacttgcaagtcttattatttaagaaatacactttataaggctaaagctgccataaatagtgatccctctgatggatctgggcaaagtaaattgaaaaccttctagaaaatattcactattctagatgcaattaagatcattcatgattcatgggaggaagtcaaaatatcaacatgaacaggagttaggaagaagttgattcgaactctcatggatgactttgaaaggttcaagacttcagtggaaga

SEQ ID NO: 860961 - DNA, 600 bp, Homo sapiens
gcagcaatttctgagatgaggttagagcagcagtagaaatacaaaagaaatagaaggaaacggagaatggaatcatagacagcagaaaaacatttaccccttaaatgtcaaattggggataacaaaaccaaattagcctcatacaaattttacctctccttagtaataatgrtccctaaaactatacttcctgaaacagaaaacaagccctgattaacactaaggatgctgtatttcttttgaatttcctattttcttcatgcagagcaatgtgtcaaatccaagttgagcttcctgcacagggctgcttaggatctgttcatgatacacaaagtgagttactgggttggaggtttctagcagagagagtcagaataaagatgagaaaaaatagaagaatgccatttttaaatgcttattagatgcgacataaaaaaatgtattctaaggtctgtattaaaaagattttgcccataattccagggtaaaaaatgttaagcatgactgcacagaaatgataaggcactgatttatgtatagactaggggagacaacaattttttggttagactattccgtcacacattataaaatggcttt

SEQ ID NO: 860962 - DNA, 673 bp, Homo sapiens
aatattgtagatcagtggttggcaaactttctctgaaaagagccagatagcaaatattttaggctttgtgggtcatacaatctctgttgcaactattaaactctgccaatgtagcaggaaattcatagacaatatatgaccaaatgagtgtggctttcttccaataaaactttatttacaaaaataggcagcaggctagatttggcccatgagcactaatttgctgattcctgctatagactcttctggcagattctgtgaggtgagttccctgtctgagaacaatcaacccaacctaaagacaccataggaacataagatctctctgcaagtcatcttctgtttagtgaaagaagtcttcagtgagaaattgctcttcagtatcttccaaaacagggcctcttcttttcaccatctgtggtagtttatcctcaatgatggccaccaagaatttttttcttgtatctgcataytattccttccttcaagaaatggagcctatttcccttcccctagattgtgtgctgaccctgtaattttcatcaaccaatgaaataaagcagaagtggcactgtatcagttcaaggcatagccattcagaggcttaacagcctctactttcactccgtgagagccctgagctaccatgacttctgcaagagatgctaagatg

SEQ ID NO: 860963 - DNA, 580 bp, Homo sapiens
acacaatcgtcccacctcagccttccaaagtactgagattacaggtgtgagccacagcacctggcctgtgactgatcttttgacattgtattgtaatcactgtttgcatcattggctcccagactaaattgtgaatcccctgagagcaagaaccatggttgcttcttgcgcaggatgccttcatctgctgctcgcagatacccaggagccaagatgaattttcttctttggccaacctgaatattcagaagtgtcttgtgaatgccccctcaagtcagctcccacctrcttttcattagtttattcacttttttagggcaacttatattttgtccacttctccttgctttttctttcataggcatttttgtgacctttcctttgtcttattccaaaatgttaactctagttcctacgataagctctctgagttctgaaactccatagaacttgctcataatctcagatcatgcgttcattatagcagttatgtctttatatactcatgtttgatctctctttctagaggacagaatcctcccctttcccccgcatatcctcaatgatccagcatttctca

SEQ ID NO: 860964 - DNA, 651 bp, Homo sapiens
tgtgacaactgtggaccatcaggaaattgcatctgcctggtgctggctgcctattatcatttttagagaggcagtgtgataattgtcaaaccatcattggtcgcctaacattgatggtcacctgacattcctgttgggtgtgcagggtgccctctgctcatgcctaactacctgtaacacatacaccatggaatactacccagtcataaaaaaagtgagatcatatcctttgcagcaaygatggagttagaggccattattgtaagtaagaaaatgcaagaacagaaaaccaaataccaaatgttattacttataagtgggagctaaacactgaagacacaaaacacaatgaagggaacaataaacactagtgcctatttgagggtagagagttggaggaaggtagggatggaaaaactacctttcaggtactatgctcactacctgggtaatgaaataatctctacaccaaatccccataacacacaatttacccatgttacaaacctgcacatgtgccccctgaacctaaaataaaagttgaaaagaaaaaaaaaaagaccagtgaattccataagtatgggtccattaccatacttcttttgctgtgaagttccttgatcagaagtaatgcgatgtgaaataaccatg

SEQ ID NO: 860965 - DNA, 651 bp, Homo sapiens
tgtgacaactgtggaccatcaggaaattgcatctgcctggtgctggctgcctattatcatttttagagaggcagtgtgataattgtcaaaccatcattggtcgcctaacattgatggtcacctgacattcctgttgggtgtgcagggtgccctctgctcatgcctaactacctgtaacacatacaccatggaatactacccagtcataaaaaaagtgagatcatatcctttgcagcaacgatggagttagaggccattattgtaagtaagaaaatgcaagaacagaaaaccaaataccaaatgttattacttataagtgggagctaaacactgaagacacaaaacacaatgaagggaacaataaacactagtgcctatttgagggtagagagttggaggaaggtagggatggaaaaactacctttcaggtactatgctcactacctgggtaatgaaataatctctacaccaaatccccataacacacratttacccatgttacaaacctgcacatgtgccccctgaacctaaaataaaagttgaaaagaaaaaaaaaaagaccagtgaattccataagtatgggtccattaccatacttcttttgctgtgaagttccttgatcagaagtaatgcgatgtgaaataaccatg

SEQ ID NO: 860966 - DNA, 641 bp, Homo sapiens
ataaagtggggatacttaataagtacaaaaatatagtcagacagaatgaaaaaaatctagcattcgattgcacaatagggtggctatagttgataacaatttattttatattttaaagtaactaaaagagtggaattggaatgttcctaacatgaagaaataataaatgcttgaggcttgaggtgatgaatacctcaattacccttatttgatcrttaaacattatatggctgtgtcaaaacatcacatgtagcccatatatatatatatatgtgtgtgtgtgtgtgtgtgtgtgtgtgtgtgtgtgtgtgtgtatatatatatatatataactattacatgccagaataattaaaaagtaaaattaaaaaaaaatgaaacataagttccagaacagtggaagatgatcaggataagttctctagtctctgatttttattattctaataatcaatctgaggccccttcaattgcagtcataggcccgggaaaatgaaaaagggagtaagagttgatatgcaattgggatgtaacaaaacaagttcatttgtttgcatgttggttaaaatccttgtaagcatttctcaaccccagacatttctacggatttatcttaaagtgagtttgctgtatacttttta

SEQ ID NO: 860967 - DNA, 612 bp, Homo sapiens
aacaaacagaagctcactgagggcaaccttggtatctaagcctagcacaacaccttgcaaatagaaggtgttactatttgttgataaatagagtaaaagtttaggttgttatttgtttttgttttcatggaggttttattgttttatttttaatttatacagcagagaatacaactcattattgaccagatgaacaggaaaatcatgtttcttctggaaaaccacaccagtgctacagtgaggcaaatgtgtgtgaagtaatggaaaraacactaactagtgtccaaaaatctggggttttgtgctcattctcaattgatgtgtctcctcaggcaagtcacttagcttctgcatagatctctattttatcacctataaagtgaggttaaagccttccttatctaccccacagggctattgcatgtaggacataattgagatcatgtatgttaaaggactttataaactacaaagtgcagtgacaaatggaaatgagtctaaatcttcatctgctccctgatttagaacaaacatgatttgtcacaagcaaaggtctattatcaggcaaaatacattttatagattgggacacacctccctcttttaagtcag

SEQ ID NO: 860968 - DNA, 619 bp, Homo sapiens
caagtatgacgttccaggggcacgcgccactggaaaaaggaaaaaaaagcctcagatgggcatacctgtaactccctaaatacacacgtgctgaattccaaagggtaaagaaagcactgtccatgcgggaagcccaccctaagggaagaatcatgggaaagaggcggcctataaagtcttaggatcaaggttaaaggctctctttttctttgcccttttttgctatcttttttctctctttgatcttcagggcgcccacttggacctcttataagagctcttttctttctttcctgttctgaagtattttttaataaacktccactcctgctctgaaacttgcctctgtctgaaacttgcctcagtctctttttctgcagaatgttcctcagttgaattatttcttcttgaggaggcaagaactgaagttgctacagactcatacaaataggccaccagtaactctgggtaacttggatctcttccaccagcaataattttaccaagatctttacatgcattaaatttttcaatccttgcaataatctgatgaagtagatactgttatgattcccatcttacaaatgagaaaaacaaggagcagaggtgtaactacaaa

SEQ ID NO: 860969 - DNA, 619 bp, Homo sapiens
caagtatgacgttccaggggcacgcgccactggaaaaaggaaaaaaaagcctcagatgggcatacctgtaactccctaaatacacacgtgctgaattccaaagggtaaagaaagcactgtccatgcgggaagcccaccctaagggaagaatcatgggaaagaggcggcctataaagtcttaggatcaaggttaaaggctctctttttctttgcccttttttgctatcttttttctctctttgatcttcagggcgcccacttggacctcttataagagctcttttctttctttcctgttctgaagtattttttaataaacttccactcctgctctgaaacttgcctctgtctgaaacttgcctcartctctttttctgcagaatgttcctcagttgaattatttcttcttgaggaggcaagaactgaagttgctacagactcatacaaataggccaccagtaactctgggtaacttggatctcttccaccagcaataattttaccaagatctttacatgcattaaatttttcaatccttgcaataatctgatgaagtagatactgttatgattcccatcttacaaatgagaaaaacaaggagcagaggtgtaactacaaa

SEQ ID NO: 860970 - DNA, 619 bp, Homo sapiens
caagtatgacgttccaggggcacgcgccactggaaaaaggaaaaaaaagcctcagatgggcatacctgtaactccctaaatacacacgtgctgaattccaaagggtaaagaaagcactgtccatgcgggaagcccaccctaagggaagaatcatgggaaagaggcggcctataaagtcttaggatcaaggttaaaggctctctttttctttgcccttttttgctatcttttttctctctttgatcttcagggcgcccacttggacctcttataagagctcttttctttctttcctgttctgaagtattttttaataaacttccactcctgctctgaaacttgcctctgtctgaaacttgcctcagtctcttyttctgcagaatgttcctcagttgaattatttcttcttgaggaggcaagaactgaagttgctacagactcatacaaataggccaccagtaactctgggtaacttggatctcttccaccagcaataattttaccaagatctttacatgcattaaatttttcaatccttgcaataatctgatgaagtagatactgttatgattcccatcttacaaatgagaaaaacaaggagcagaggtgtaactacaaa

SEQ ID NO: 860971 - DNA, 626 bp, Homo sapiens
aaaagcagggtagaataataacatgttatatatttcaaagtagcaagaagagagaattcaaattgttcccaacacatgcaaatggcaaatactcaatgtgatggatactccaaatacctgactggatcattacacattctatgtatgtaacaaaatatcatgtctatcatataaatatgtaaaataatatgcattaatttaaaaagtaaacaaaatgaaaaaatrtttaatttatatacctttgaaaaatagtaagacaaattagacaaatagttcatcttaaatcttttagtattcttctataaggaaaagaagtgcttaaactaagcaaaaacaatactggatttgacttttatagaatattacctataaagagttatcctacctggaaaaaaacgttaaattgtaggtggtcccccaaaatatttcacaatatttctgttactgatagaggaagaagattcttagtgtttgttggcatttaaaagtttgaaattagactttagaaatatcaactaacatatcactccatcaaattggtttctgggtagctggtgattttgtgctacaaattccatgctgaatgctactaattttatgtctctttcaaagatcagagaagcttt

SEQ ID NO: 860972 - DNA, 679 bp, Homo sapiens
gtacatggtattgcagggtttgggggaagactagtgaggatttaggcctgattgtccggctttagttgttttaatggatgtgcctgctgatgagcccaagcctccagataataattccagccagaaggaagctgaagagctgtaagaaaacattgcacgacccatgatcttgggttcacctgagacagattttggagaaagaagggagcacagaaagagtatgttaytttcaaaactacaacaattcgaaagctatttttttaattgccaagaaaaaaataggctaccagctgtttcttcccgtaggaattgacacaagccaactctcaggagtgattttccaaagaaaagaactggcccagcctaatcagaagtttatcaaatattcaactttactttttaaaatatgttttagtgctacagatgggccaaataaaacaaaacaaaaaccctgcaattattccttacagtattaccctattaacagcttgattattttaagatctaatcttgagttcttagaggcagcagttaatactgtttggagcaaaagttagaattaacaaaaaatgagtttacatagaaaaagatagtatattcaagtctctgaaaacccccaaataatctatagaaaacacatttataggatatatttgcatcatcttttctaatgaagtgt

SEQ ID NO: 860973 - DNA, 668 bp, Homo sapiens
aaaggcaacattatcagtatgacttatcattgttgatgtcaaccttgttcacttggctaaagtaatgtttaccagatttttccactataagtttaccttcctgcttctttatcattcttattggaaagaagttgctatggaaagcccgcacttaaggagtagggagttaatacttcatctctttgagggcaaagtacataaacattatgtctttatcctatactttgaattataatccaataccacttcatatcttgttgctcaaattgttccacttttggccattgggagctctttcatttggttcctgtgtcccttctaacacacccccattattgtgtttttttgcatgctttcttactttctggttccacaatatgctctagactcaccttgtacattcttggctccagtcatttttccaagaaacccaggctgttwtttttatggaaaatcatattagaaaccaagctctggatgctaggcatgttcactgctatgagagtatcactttttctaggtcctctcagatgaaaaagtaaggaaatatacatgtatactactctgtttacatttacatatctataaatattttacaagtatctatctgtatctgtcttaagctaaagaggagttcacatgaatgtcctcaactcaaatccattacc

SEQ ID NO: 860974 - DNA, 593 bp, Homo sapiens
tgattacatgtaactcaagtgtgatttccttaggtcttagagacattatgtatagatcaaattaatccaacttttagttttagaagtacttttatagcctgcatcatatcctgtaagacatcagatgggatgctacagaaaaccctggtgatgtcctgctccctttcatctcttctcgtgtgtaggcaactcctggtactttggatgaattccaccttaagggctcttattgctcttatacttatgcctaaacgcttaaaataattatgtattaaagttactgttggaactctgccattaartatgtcgttgtgtccaatcagagtaatcataggcaaaaccctatttgtcacctgcaaccttctaaatctcccttttagccatgtctttctcactctcctaaatacctatccaaacaacaagacatcagcccatttttgtgggctgaaaggatttgtatgggcagaaaggattttagatgctaatgatttaaaacatttttctccaaacattaacaggatgtatccggccattaaaaaaatcaaccacacatcctcaatctatgtgtttttacatactaatgatatacatat

SEQ ID NO: 860975 - DNA, 592 bp, Homo sapiens
attcaatgcctgcttgttgaaggtttttaacattaagcaacattcaatttcatcaaaagccttttctgcatcttttgagattatcatatggtttttgtttttaagtctctttatgtaatgaatcgcatttattcattttgcatatgttgaaccaaccttgcatcccattgataaaggctctttgatcatagtgcattagctttttgatgtgctgctggattcaatttgctagtattttgtttaggatttttgcatggctaccaaagacaatggccggaasttttccttttttgttttgtctctgccagatgttggtatcatgataatgctggcctcctagaacaaactggagaggaatccctcctcctcaatttttttggaataattttcatataaatggttccagttcttaacatatcttacagaattaagctgcggatttatctggtcataggcttttttgggttggcaggcttttattactgattcaaacttagaactttttattggtctgttcaggaattcagtctcttcctggttcaatcttgggaaatcgtatcattccaggaatgtatccacttctaggttttcc

SEQ ID NO: 860976 - DNA, 570 bp, Homo sapiens
agatatatttggacatatgtatctcaacgccctacccttggttcataggcctccccttggtttaaaccatcatctctcacttggagtatactaacagccttcccttttaactggtctttctgcttctactcttaattctatctccacatagcagagaatgaagccattgaaagcatatgtaagataatgttacatttgacttccaactctccagggacctctcatctcactcagagtttaaactctraaagtggcctacaaggctgtccacagcccagctgctgtgttcactatgctccagccatgctggccttcttgcatttgttgaatacaccactcattcccacctcagaaactttacactgctggaagctttccccagcatgcttctcttccagacattctcatgacttgctctgttaccagtttctgtttatgtgtcaccttgcaatcctaccttccctgattgctatatttaaaaatcacatctgcctgtgctgtaccaacattcacgaacccatttccctgctttacttattctcctcaaaatttatcatgatctgacagtct

SEQ ID NO: 860977 - DNA, 639 bp, Homo sapiens
aaacagcatttattatactagctggataaagtaatgttttgctttggtgaggtctcttttcctttcagagagtggatgagtttacaaagtctcagacaattttgttacctggctgagcaatgccatcttttatatgtgtaccctttaggataaaataaattgtgccaagaggtgtccagtactactcatagctggctggcagagtctattaaaagagtattgacttaaaatctggaacaaaatttatgtatacactaatccttgataattataacctggttagacagttatgaaatgtggatgggttattctagagaggaagaaaaaaacctaatgtggctttttaaatttcttctttatccttcatgttttagaactggtggctctctccttaaaggggcaaactacttttcccagcttaggtcaggrtctcctcctttgttttccttagatttgtatgttttcctcatgcaaccagagcacttaccactttgtctccttcaatagacagagttttccatggggataagaactttgcctttaaaaaaatcatattcttaaaaacctatacaagaccaggttcataagaagtacttagaaaatgtttactgaggtgacaaagagactgagctaggaaat

SEQ ID NO: 860978 - DNA, 576 bp, Homo sapiens
acttggcttcctgtcacgaatcatctccttttaatcttcataagtatatatgtatattccaaattctaaataattttaataattctatataaatgtatatattctaaattctgaattaaattttattacatggccagaagcaatttaagtgctgattaaattcagatcataaagaaaaacaatggcgatgtagaaatttaggtagagtaaaaaaaatatattcaagaccttcgtcggtcccaaattttcatagcactagaacaaataattttatcgataagaagccatttggttccaataataataactaacactcttagtgtctgctatcagctttatatgatattgtctyttgtaatcctcacaatagccccaggaagcagatattattattatctctcttttatagttaagggagctgaggtatagcaaggtgaagtaatctgtccagggtcacatggcggataacctgggtagtcttacttcacaatccaagttcttaagcactttaaaaaattgaattgaccttgtccagaacctctatgaggtgtataaaccaagattaacataattatt

SEQ ID NO: 860979 - DNA, 446 bp, Homo sapiens
catatgcattcaggggcagtggcagaggtgggtctggtgaggttggtaggaaggaaattaggaaggatagcacgttcgggacggaggaggggttgaaaaagaagtgttggctgggcgtggtggctcacgcctgtaatcccagcactttgggaggctgaggctggtgaatcatgaggtcaggagatcgagaccatcctggccaacatggtgaaaccccgtctctactaaaaatacaaaaattagccgggtgtggtggcacacacctataatcccagctactcrggaggctgaggcagaagaatcacttgaacctgggaggcagagattgtagtgagcagagatggcagcccggcactccagcctggcaagagagcaaggcaagactccatctcaaaaacaaaaaaaaagaaaaaaagaaaaagaaaaagaagaagaaggtcttcaat

SEQ ID NO: 860980 - DNA, 613 bp, Homo sapiens
tctctgtttgtagtcaaactcttccccttccccacccctcagcttctagcaaccattcatcttttcgtcattgctctaatattgtttatttgagaatgtcatatatagggaatactgtagagttactatgtaaccttttgagattgacttatttcattcarcataatgcttttgaggttcatttcagttgtcacatatattaatggtttgttcgtttttattgctgagtgatatttcattgtgtagatataccatggtttatttgtctgttcacccatttatggacatttgggtggtagattatttccagttttgagcaattatgtataagtttttatatgaaaataagtttgcatttctgaagggtagatacctaggagtgggattgctgtgtcctgtggtgtgtgcttgcttaattttataagaaatggccaaactgttttccatactggttgaatgattttgcatttccacagaaatgtatgagagttcctgttctgcatcctcaccagcactgggtgttatgtcctttttattttagccatactattaggtatgtagtagtatttcgtgatttcaatattcatttctctactgactaatgatattaagc

SEQ ID NO: 860981 - DNA, 645 bp, Homo sapiens
aacagagtgagactccatctcaaaaaataaaaaattaaagttaaataaaataagaaattgtttatctgtaagcagctttgaatctttattcattcagtattgtatattttatctacattcagtctgtatgttgtgattatattaaattattgaaacagtagtgatcttaaggtgattgagtgaaaaagtatcactgtatttaaaatcttaagccattttcagtagagctttgaaataatataattttgcatgttttgtgcttattttagcagaagcctgtgatatggaacatttatatctttctttctgtttcaggtgcgtatagcagcaaaattcatcattcatgcccctcctggagaatttaatgaggttttyaatggtgagtgtttgatttataacactaggcttgatatatcaagccctctttttaaaagaaaaccaaaataatcaaaataagctaaggacagtatgcagaaaaatctgtgttttctgaattacaatgacaatatgttagtctggattttgtaatggctagaatataatgtatttatttatatatgatgattctgttagcaaattaacccttttaaagcctgaaataaattttattcatatcactgactagaatatatcctcattctggga

SEQ ID NO: 860982 - DNA, 599 bp, Homo sapiens
tcttcggtctgggccctcccttagcaaacctggggctttatactccctctccaccaatccctgatgaccccggtggtgcctcacaatggacaatgccaagtagcgcccgcatcattccaatgacccctcccccatctcagtctcccacactcccactcctcgcaaggacaggtcctctctggaaccttcacaaacctgatttctggtcctccccaaccakctccctgtccctgcttctgggcgctccttccttcctgagctcccagggttcctcaaggtcacttttggcgacaaaacataaaaaacaaatgatggcaggatggcaggaagaacctcatacccaagcagagtgccaggttttacagcctccgctcagccattcatatcctaagcaacaaaacatcagcagggtgcggaaggtcccgatagtaaaccatctccatcacatccatgtagccatccgtccatcaacctgtatctcaggaacaaatgtagatacattcattttaagcatgcatggtacatttacaaaaattaacctgacttattttgttccagcaaatctcaatatatttgagagcaatcaaatcacacagcac

SEQ ID NO: 860983 - DNA, 648 bp, Homo sapiens
ataaatattcatttccaggactttcattttaatattcctagttatattaaaatgaaaaggaaatggaaaatgaaagcctaagaatatggaagaaggagacaaaagagtttgagggagagaaggaagatgaaaatgacctcgtggctagcatgaaactcaatgttcagctccatcttctatatccaaatatcaggaatggccagtgataaattcagcccctgggaactcagcccagttcmtactgcacttgttagtaggtagaaacttgatatatacatttaaaaacctggaaactcttttatgcacgcacagcttttccatgtccagtttattctcaattttatgattttcaataaatgggagaagaaaaaaggagaaagaaatgaacttatccaagctgtgaaattttaaatattataaaatgcttcaaaattagtggtttgaatgaggtttatactggtttatgcttttttcctttccaccatctccccaacaaaagaaaatcccacattgctgattccaaggaggtaatgtttatttaaagataattgacagcttcagccaatcatttcccttctctttccaaaggaaacagtggattttgtaattccagatgcctttctttacacactgcagcagtcatatgat

SEQ ID NO: 860984 - DNA, 627 bp, Homo sapiens
aaggcacttgctagcctaagcagaaacataaagtaaaaaattttgtagtagggaatttttgttggtaagaaatcagtatcatcttgtaacacaaacacgtgttaatagaacttaaaaatactcagcctaattccttgggactttcagtatcttgacatcacttgtattatcatttgaacttggacattgagccctttatttttgggagtttacagttaaattttggaagaattgtgttgtatttctttcttagatgttgtcagtatgaacagaatttttttgtgracagttaatcttgatgtgctccatagctttctccagtttacacttttgcatttctgagattcagggtctttttcaaggaaggaggctaatgtttaaggcctggaggctgaattcagggagcgtattggcaagtttaggcacttacttgtgtcttaatgtgggaaacagaactttctaagtaatctctggagtttgtagcttagaccaggccttcaaaagtcttttctgttttcctttgctacaatttgcttgttatttctctgccggtcacagatgacctggactgactgaatgcttttgtggtaaggaactgatctggccattttcatataacaaaaatca

SEQ ID NO: 860985 - DNA, 642 bp, Homo sapiens
tgaagatgctaggtaaactgtatgttttgattattcatgctgcctagctactataaatgattgggtcaatcattcctgttggatgaagatatctttatatcaactctaagatcatttgaagaaaaagtgaaaacagcttaaagttccaaaatgtaaaaaaaaaaaaaaaaaaaaaaaaaaaagaaattactgcactgttgcaccaagcaagtaatatagctaataaagagcataaggcagatctatatgttttgaggtatatttgaggtataaagacatctatgacatattacatacaaaaaatcgggggggagggtggcgggggaaaaaaagaaaaaaaaaggacaaaaagtcacacagctgtatacgtgtgagcctatctttgcaaaggaaaaaaagtatataaacttatgtagatgcatagaaaggtcaggcaagataaatgccaaactattaggtgtaatattggagtggtggatgaggatggacaccaawtttttcacttactgataggctactgtcttggaattttaattgaaatttattattattgagactttgctcttgttgcccagtgcaatggcatgatcttggctcaacacaacctccacctcctgggttcaagtgattctcctgcctcag

SEQ ID NO: 860986 - DNA, 634 bp, Homo sapiens
tctctccagcaagctctcaaggaacttgagagagcaaataggataagagcataggtaaaagggttttagaataaaggtgctccaggaaacagtcgattactcggaattaattagagaaaacaggagaccaagtttgaattagagaatattcttaaggaaaaagaattattttgcattcatttctgtactcatccggaaatatttactgagcacctactatgtgcctggtgcaggggatgtggtccwggacttcatgaatgcactttctaaggaagggaaccagccacgggttatacctgaagggcaagggtaggaacgaaattggtgctctgtgctgtaaggggagatgggaaccagagaatgattgcattgagatcatgaggagctttctaaggaacgcactgaacagatctaggtattacacccaagtcactttgtgagtcacttgttaaatattgccttccatcaacagaatcatgagggacctggtggagggcaggggagaatctaacagacctggtttggattccagctcctcaaaccactgcctatggcttgggtgggggtggggtaggggggtggaggcatggtggtgggggttatgtgacctccttggagccccaattccctcatc

SEQ ID NO: 860987 - DNA, 634 bp, Homo sapiens
tctctccagcaagctctcaaggaacttgagagagcaaataggataagagcataggtaaaagggttttagaataaaggtgctccaggaaacagtcgattactcggaattaattagagaaaacaggagaccaagtttgaattagagaatattcttaaggaaaaagaattattttgcattcatttctgtactcatccggaaatatttactgagcacctactatgtgcctggtgcaggggatgtggtcctggacttcatgaatgcactttctaaggaagggaaccagccacgggttatacctgaagggcaagggtaggaacgaaattggtgctctgtgctgtaaggggagatgggaaccagagaatgattgcattgagatcatgaggagctttctaaggaacgcactgaacagatckaggtattacacccaagtcactttgtgagtcacttgttaaatattgccttccatcaacagaatcatgagggacctggtggagggcaggggagaatctaacagacctggtttggattccagctcctcaaaccactgcctatggcttgggtgggggtggggtaggggggtggaggcatggtggtgggggttatgtgacctccttggagccccaattccctcatc

SEQ ID NO: 860988 - DNA, 605 bp, Homo sapiens
ctggttccgtattttacgattgtgaattgtgctgctataaacatgtgtgtgcaagtgtctttttcatataatgacttcttttcctccagtagtgggattgatggatcaaatggtagctctagttttagttctttaaggaatctccatactgtttcccatagtggttgtactagcttacattcccaccagcagtgtaatagtgttcccttttcaccacatccatgccaacatctattatgttttgwttttttatttatggccattcttgcaggagttaggcggtattgcattgtggttttgatttgtatttccatgataattagtgatgttgagcatttttcatgtttgttggccatttgtatatcttcttttgagaattgtctattcatgtcctttgtccactttttgatgggattatttgttctttttcttgctgatttgtttgagttccttgtagcttctgtatattagttccttgttggatgtatagtttgcaaaaattttctccccctctgtggatttctgtttactctgctgattatttcttttgctgtgtagaagctttttagtttaattaagtctcatctatttatctttgtttttgt

SEQ ID NO: 860989 - DNA, 605 bp, Homo sapiens
ctggttccgtattttacgattgtgaattgtgctgctataaacatgtgtgtgcaagtgtctttttcatataatgacttcttttcctccagtagtgggattgatggatcaaatggtagctctagttttagttctttaaggaatctccatactgtttcccatagtggttgtactagcttacattcccaccagcagtgtaatagtgttcccttttcaccacatccatgccaacatctattatgttttgattttttatttatggccattcttgcaggagttaggyggtattgcattgtggttttgatttgtatttccatgataattagtgatgttgagcatttttcatgtttgttggccatttgtatatcttcttttgagaattgtctattcatgtcctttgtccactttttgatgggattatttgttctttttcttgctgatttgtttgagttccttgtagcttctgtatattagttccttgttggatgtatagtttgcaaaaattttctccccctctgtggatttctgtttactctgctgattatttcttttgctgtgtagaagctttttagtttaattaagtctcatctatttatctttgtttttgt

SEQ ID NO: 860990 - DNA, 611 bp, Homo sapiens
ttcccagtgattttgacatggcccctggctgagcatattgctctggggctccaggaaaccccgatgaagaccttagcttttgaggagcaaggatgctctattagtctgttttcatgctgctgataaagacatacctgaaactgagtaatttataaagaaaaagagttttaatggactcacagttccacatggccgaggaggcctcacaatcatggtggaaggcaaaaaatatgtcttacatggtggcaagcaagagagagagagagagagcttgtacagggaaattcccctttataaaaccatcagatctcatgagacttattcactatcatgagaacagcatgggaaagacccatccccatgattcaattacctccyaccaggtgcctcctatgaagtgtggaaattgtgggagctacaattcaagatgagatttgggtggggacatacccaaaccatatcaggtgcttcattctagcaatgagaacaagtgaattttaagtcagggaatgaacctcacagagtcccaggcaccctgagtggttcaggggcctctagccagctccacaaggcaatgagtaactcacacagtagctctagagcacctgtat

SEQ ID NO: 860991 - DNA, 654 bp, Homo sapiens
ttattacctctaaagtcaccttgtgcctacaagcagaacatgcaggccacagtggtaaacacattcagtgaggagggcggcagagcaggtccctgagtgctgacagtcaatgatggtttgctcagtcagtttctaggccagagaaaagaagagtgaaaacagatacagaggtaagtgctggtggcagggtaatgtgagctgtgggatgtagagtgagagaggtactttggacccggtgatgcctagggctcctgggcctccagtgaggtagggtccctcatggacttaggtggytcatggatccccaaaagtgaatgccaagctttgagagtatgtgcgcccttccagggagaggccttaaggaggaatgtttataagggcaatggggcctgaggttgaccaacttgggtttgaagctcccctttccacgtcctactcgtaccatcttgtgtgattcattgagcctctgttttctcacctgtaaagtgagtctaatgatggtaccctcctaataggactgttttgagaattaaataacataaaatacataaggaacctagaccagagcctgacttgaggcagtgcttgaataatgttttagctgtctttggtaatattgtggttcagagaattctatgtcccccatgaatagtt

SEQ ID NO: 860992 - DNA, 561 bp, Homo sapiens
ccacctgccccttgttccagccagaaacgttcttgctcagaaaaacccatttagcctaccaagaaaagaatggaaggcatggagcctcatcttactcatctcttgggcctaatacagagttcagtaaacaaaaggcatttcatagacactaacttgcaggcagtgagccaatttaattgttgcaaaataatatagtcctcaaggagagtataggaaagagatttccaatttttaaaagtggagaggagaccctctttgaggaaaaatattaaaattcctccrcctataaatagaaagacacttgagtatcatgcttaccgagaatcggttgccagtgatatgaagagacccattagaagagcactctcttcagggttttgcccagggcaagtttatcatccttattcctcaaactgtagatcgaagggttaagcatgggaaccacattggtgtaaaagactgaggcaaatctgccatggttcatagagccaggaaaagatgttgttaagtaggtgaatgtccctgacccaaaaaacagagcaacagcaattatgtgggagc

SEQ ID NO: 860993 - DNA, 656 bp, Homo sapiens
tcaatatagtagaacgtgcaagaaaaataacaccgtttatgtttcttttccatcttatgtctcttaaaataaaaaaccattttttaatataaagggaagaaatcaagagaaaagagaattaatgcatatggagcaactacagagtgcctggccttatgctggatgttttctgatgtaatatgttgtttataacaactatacaatgtgtatgtgtgtggcagattgtatttcccaagtatgactatactggtgcacacacacatacacagtcacgcatgtataccttacatcccacatgctcttgatataataggactgaaactcctccaatcaaaagatgaggcctatatgccctaattttgcctctaggcagggacttgggatttttccaatcactagagtatggtggaagtgacgctatgtgactttcaagattgggtcataaaagggtagagcttccaccaggcatgcattctctctctctmtatatatatatattctccctctctctatctctcccctctccccaaacctcttttgacatcccttaaccttcaggaaagtcatgttaaaaccctctggccttgtcacaagataaaatcacataattacatgccataggaacttaactcttgtttatgtcacttaccctatag

SEQ ID NO: 860994 - DNA, 600 bp, Homo sapiens
cgccagaatgaattcagtcacgaaagagccatttccaggtgccattcttctttaagggaatctctggaaacaggggaaaaaaacaaacggttgcattagaggacaacccagctctttccacaatgggtctgcctgagattagcctaacctgtacccacagaatctgcctttacagaacaccgccaattaaccctagagagtgaaggccagtgctgccatatacaagcatgactgctggaaataagggataagggagatggatggaccaggamagaagcgtttttttcccgtctcatcatttcttcattcatttgagccctcccctcacaagtaaaattggaggcagaggcctaagcaaccgacattggcctctaatgaaattagtcggatgcagtgaaaaccaaaacattgtttccaatccactagtaggggaccagagtctaggagaggttacattactgtcccaagtcacagtgaaaaagttataaatctaggacagagagggctctgtccatggaaagggaacttactcagtaaatactgcaaccattgagcttactagtgtccctgaacattctctgctcccccttcaaacacatt

SEQ ID NO: 860995 - DNA, 600 bp, Homo sapiens
cgccagaatgaattcagtcacgaaagagccatttccaggtgccattcttctttaagggaatctctggaaacaggggaaaaaaacaaacggttgcattagaggacaacccagctctttccacaatgggtctgcctgagattagcctaacctgtacccacagaatctgcctttacagaacaccgccaattaaccctagagagtgaaggccagtgctgccatatacaagcatgactgctggaaataagggataagggagatggatggaccaggacagaakcgtttttttcccgtctcatcatttcttcattcatttgagccctcccctcacaagtaaaattggaggcagaggcctaagcaaccgacattggcctctaatgaaattagtcggatgcagtgaaaaccaaaacattgtttccaatccactagtaggggaccagagtctaggagaggttacattactgtcccaagtcacagtgaaaaagttataaatctaggacagagagggctctgtccatggaaagggaacttactcagtaaatactgcaaccattgagcttactagtgtccctgaacattctctgctcccccttcaaacacatt

SEQ ID NO: 860996 - DNA, 600 bp, Homo sapiens
cgccagaatgaattcagtcacgaaagagccatttccaggtgccattcttctttaagggaatctctggaaacaggggaaaaaaacaaacggttgcattagaggacaacccagctctttccacaatgggtctgcctgagattagcctaacctgtacccacagaatctgcctttacagaacaccgccaattaaccctagagagtgaaggccagtgctgccatatacaagcatgactgctggaaataagggataagggagatggatggaccaggacagaagcgtttttttcccgtctcatcatttcttcattcatttgagccctcccctcacaagtaaaattggaggcagaggcctaagcraccgacattggcctctaatgaaattagtcggatgcagtgaaaaccaaaacattgtttccaatccactagtaggggaccagagtctaggagaggttacattactgtcccaagtcacagtgaaaaagttataaatctaggacagagagggctctgtccatggaaagggaacttactcagtaaatactgcaaccattgagcttactagtgtccctgaacattctctgctcccccttcaaacacatt

SEQ ID NO: 860997 - DNA, 569 bp, Homo sapiens
gttatacaatgtagaatgtgctactatgcaatctttacaaagtacattggggttctttccatttaagtgataggaataagacagcctacaccaaaaatgtgtgtaaaactggtaagtcaaggatgtggatgacttcttgtatgctggacaaagtagaatcaagtcatatcatgagtgggtgtgtctsttctcacttttttcctgcttaattctaccagggttttaatcttagatgggctctcacatgtagtttttgaaaaggagccccccagaactcctaggtttaattataacttcagggataaaaattgattgttaaaaatcattttggcagagaaaaactatagttacgttaatattccagactaatcaggaagttggacagctctgacacgagggtttgacatgtgctaactggacaagtttatagtctatgacatggacaagagagtccataaaaatcacatacagtgtgttccatgtatcagaaaagatcctgccaaaaaagccagtagtatgctatgcatttcctaaagaggatatttaaacagagaattagttatacagat

SEQ ID NO: 860998 - DNA, 569 bp, Homo sapiens
gttatacaatgtagaatgtgctactatgcaatctttacaaagtacattggggttctttccatttaagtgataggaataagacagcctacaccaaaaatgtgtgtaaaactggtaagtcaaggatgtggatgacttcttgtatgctggacaaagtagaatcaagtcatatcatgagtgggtgtgtctgttctcacttttytcctgcttaattctaccagggttttaatcttagatgggctctcacatgtagtttttgaaaaggagccccccagaactcctaggtttaattataacttcagggataaaaattgattgttaaaaatcattttggcagagaaaaactatagttacgttaatattccagactaatcaggaagttggacagctctgacacgagggtttgacatgtgctaactggacaagtttatagtctatgacatggacaagagagtccataaaaatcacatacagtgtgttccatgtatcagaaaagatcctgccaaaaaagccagtagtatgctatgcatttcctaaagaggatatttaaacagagaattagttatacagat

SEQ ID NO: 860999 - DNA, 502 bp, Homo sapiens
tccaaagggttaagtttctggtgttgacacagggccgcgaagcccccaaactggggtttagcctgagaaggttcttggcttcacccaggaaagaattaaagggcaaaccaaagatgttagaggccaactttttttttgtttttttgagacagggtctcactctgtcacccaggctggagtrcagtggctcactgcagaatctatctccgaggttcaagtaattcaccccactcaacctcgtgagtagctgggagtacaggggcgcaccaccacacacagctaaatttttatatttttagtagaagatggggtttcaccatattggccaggctgctctcaaactcctggcctcaagtgatccacccacctcagcctcccagggtgctaggattataggcatgagcccctgcacctggcctagatgccaacttttattgaagcggtgacctacagcaacagcagagggactgctccttgcagagcagggctaccctataggtag

SEQ ID NO: 861000 - DNA, 673 bp, Homo sapiens
gcaaaacagcatgatgcacatatcttgatacgtaaccctagattcaggcttctaaatataagagacagttctgggccaccaattaccaaaaaaaaaaaaaaaaaaatcttgtaagataacgttcatactcatgggttacaaccaattcttaaaaaatactcacgaatattgaatatttaagtctggggaattgccctataaaaatatgtccctgcaccaaaacactttgaattctggtttggacaagcacaaagagaggcaggcataaagatgactcaggcatcacctacacttgctggagaagccacagaaagaaggaattccctttccaatacattcattcattcattccagtagacatctatttatcaggggtcaggagagggaagtatgaagttgcctctgtgcattscctgcatgaggcatcagagagtttcatctcgagtacctgttccaaacctcgggtgagcagccagtcagacctgcaatgacccggtcacggcgttcatctctcttcctgtcccagtgtagaatttcccagtttgcacccacactggttcactgatgcacccaagctgtctgctcctggaactgtgaccaagtgtttactcccccaggtcacgtggaatcccatgcatggggactagttgtactagttgtactagttggagtg

SEQ ID NO: 861001 - DNA, 625 bp, Homo sapiens
tatgtcaaaagcatcgtttggtatgctaataagaagactagtgagtggggctgtgggatagcctcaggatgggagcctcagaggaagcaaccttgtgattagagaattggaattttcagttctacctcaggggctgcaggataaatttatcactaatggccaatgatttaatcattggcctacataatgaagtctccayaaaaaaagagagagagagtttgcagctagctgaacacatggagagtggcaagcctggggagggcacggaagcttcatgcctcttcctccatacattgctctacgcatctcttccatcgggctgttcctgagttgtagccttttataataaattagagatagtaagtaaaacactttcctgagttctgtgagccactctagcaaattattgaacccaagaagggagttgcgagactttcaatagaagcacaggttaacaacctagactttcagttgacgtctgaagtagggggcagtcttgtgagactgagcccttaacctgtgagatctgtgctaacttcagttagtgatagaattaaattgaactgtaggacaaccagctggtgttggaaaattgcttggtgtgggaaaaagccacacatctggt

SEQ ID NO: 861002 - DNA, 606 bp, Homo sapiens
aacatgcagatttgttatatatgtatacatgtgccttgttggtgtgctgcacccattaactcatcatttacattagmtacatctcctaatgctatccctccccccttcccccaccccacaacaggccccggtgtgtgacattccccttcctgtgtccaagtgttctcattgttcaattcccaattatgagtgagaagatgcggtgtttggttttttgtccttgcgatagtttgctgcgaatgatggtttccagcttcatccatgtccctgcaaaggacatgaactcatcattttttatggctgcatagtattccgtggtgtatatgtgccacattttcttaatccagtctatcattgatagacatttgggttggttccaagtctttgctattgtgaatagtgccgcaataaacatacgtgtgcatgtgtctttatagcagcatgatttataatcctttgggtatatacccagtaatgggatggctggatcaaatggtatttctattcctagatcctttatttatcagacaagcaaatgctgaggaaattgattatcactaaactgtttctatgagaaatgctcaagggaatcctaaacctggaagt

SEQ ID NO: 861003 - DNA, 634 bp, Homo sapiens
agtaatccttcataagtgaaggagaaatacaattttttaattgtttgatagagttttattacattatcagtaatactataaaatgtacatttgatacaaattaatgttcaatatctgtaagtttttggtgcattttattatagagtgacacctatttactttgggtaatttaaattattcatgcagggttgggattctggttattctgttcatgaataaggatataaaatgtggtatattagaaatattatattttcaaggactttttttctatttaaaaaatttctttttttttaattttactttaagttctagggtacacgtacacaacatgcagatttgttatatatgtatacatgtgccttgttggtgtgctgcacccattaactcatcatttacattagatacatctcctaatgctatccctccccccttcccccaccccacaacaggccccrgtgtgtgacattccccttcctgtgtccaagtgttctcattgttcaattcccaattatgagtgagaagatgcggtgtttggttttttgtccttgcgatagtttgctgcgaatgatggtttccagcttcatccatgtccctgcaaaggacatgaactcatcattttttatggctgcat

SEQ ID NO: 861004 - DNA, 670 bp, Homo sapiens
tatacccagtaatgggatggctggatcaaatggtatttctattcctagatcctttatttatcagacaagcaaatgctgaggaaattgattatcactaaactgtttctatgagaaatgctcaagggaatcctaaacctggaagtgaaaggatgacatttaccatcatgaaaacacacaaaattataaaactcactagtaaagcagtcacacaaagaagggaaagagaaaggactcaaacggtatcactatagaaattcaccagaccacgatgacaaacaataagagaaaaacaaaagagcaaagaatatataaaacaaccagaaaacagctaacaacatgacaggaagaaagctgcacatatcaacaataaccttgaacataagcagattaaattatccacataaaagacatagaatrgctgaatagacttttttaaatgatgcaaccatattctgcttaccagcatatatgcctatcagcatagatactgaaaagcccaccttaccagtaaagacacatatagactgagaaagtaaaggaatgggaaaagatgttccatgcaaacaaaaaccaaaagcaagcagggatatctggacttatatcaagcaaggctgactttaagtcaagaacaagagaaaacaaaaagaagggaattacatgaagataaaag

SEQ ID NO: 861005 - DNA, 673 bp, Homo sapiens
aaaaacatgaaaaagcaaggaaacaagacacctccaaaggaacacaataattaaccagtaacagataccaaaaaaatggacatttatgaaatgcctgaaaaataatttaaaataatgatactaaagaaactcagggaaawacaagagaacatagataaataatacaaagaaatcaggagaaaacaattcctgatctgaacaaaacattcaacaaagagatagatatgctcaaaaagaactaatgagaaatactggaactgaagaactcaatgaataaaatttaaaaatacaattgagaacttcaacaatatactagatcaagcagaagaaggaatatctaaacttgaagacaggtcctcgaaataacaaagtcagatcccaccccaaaaaaaagaaaagaataaagaataaaaaagaatgaagaaagccacatataaacagcataaagtgaccaaatattcaaattgagggagttccaaaagaagagatgggcaaaggcatagaaaacctatttaacaggtcttgaagagatatagacatccaaatacaaaaatctcaaatatcctcaaatagattcaaccccaaaaggtcttctgaaagtacttcatagtcaaactgtcaaaacctaaagacaaagagagaattataaaaacagcaagagaaaagtatcagg

SEQ ID NO: 861006 - DNA, 544 bp, Homo sapiens
ttgattgacatggctaaaaatcaaaaactttgctgggagaaaaaggtaaattacaaaatacatgtgcagtaatgtataaatgcccagatagacaagttctcctccgagtaaggacaagctgaagagagggaggagatggagggaatggtaaggacaaatggagaactttgattctatctgtcrtttttattactctagaattttttacctaagaaaatatggcaaaaagtaatacttgctaaatctgagtagtgggtacatgggtgcgtgttctatgtttctctgtatttttctgttaaaagtgtttcttaatttttaaagcactcaatataagtaaaaatggctgtttcttttcctgcattaataagtagcccccctctataataatgataatgatagtgatgatgatcatgatgatgatgatgatggttttctctcttcctatcctctttttctaagtccttttattaacatctactattttatttctctttatatcatgcttctttcccccaaaaaaattgatatggcttaaaacaataga

SEQ ID NO: 861007 - DNA, 610 bp, Homo sapiens
atttggtgaggtcatgttttcctagatggtcttcatgtgtgtggatgttcatctgtgtctggccattgaagagttagatatttattgtagtcttcacagtctgggcttgtttgtatctgtccttcttggaaaggctttctacgtatttgaaaggacttgcgtattgtgatctaagatatatctgccttagggggcactccaaggccagtaacactgtggttcttacagacttgtatagatactgccttgatagtcttsgataaaattcagaagaaatatttggattaccaagcgaagactcttgttctcttttcttactttctcccaaacagagtgtttctctgttctgagccacctggagctgggggtggtatgacacaagcatctctgtgcccatcaccactatgactgcattgggtcttacccaagacccactataaccactacctggctaccacctattttcactcaaggccttagggctctacaatcagcaggttggcaaagctagccaggttagtgtccttcccttaaagatggcaagttccctcaggccccaggttgatccagtggtgccatctgggagtcagagaccggaatcaaaaacctt

SEQ ID NO: 861008 - DNA, 632 bp, Homo sapiens
gctcccacccccagccaaaggaggcagtgggaagccacactttttccaaggatctgtgcaacccacagatcagggaatcccactcatgagcccatgccaccagggccttgggtcccaagcacagagttgtgcagattctcagcagccactcagctggagagtgcctaagactactgagctccttgagggaagggaagccattatcactgtggctgcctggtgcctaagatgactgaattccaggaaggatgggcagcagccatcactgcagctccagcctgccatttttcccctgctgggactggggagacagaatggtttgcacccaggaggaattccccacagcacagcacaatggctgtggcagatcatggccagrctgcctttttaggctggactctgacccattccctcctctctgggctgggccgccctgcaggaatttcagcaactccagtcagggatttagggacagaactctgatctccctgggactgagcccctgggaagagggggagccatggtctctgtggatcaacagatttagtctttccttctgctggctctgagaaatgcaggcagcccagacgagtgggattccccacagttcagcacagcccctctgccaaggg

SEQ ID NO: 861009 - DNA, 632 bp, Homo sapiens
gctcccacccccagccaaaggaggcagtgggaagccacactttttccaaggatctgtgcaacccacagatcagggaatcccactcatgagcccatgccaccagggccttgggtcccaagcacagagttgtgcagattctcagcagccactcagctggagagtgcctaagactactgagctccttgagggaagggaagccattatcactgtggctgcctggtgcctaagatgactgaattccaggaaggatgggcagcagccatcactgcagctccagcctgccatttttcccctgctgggactggggagacagaatggtttgcacccaggaggaattccccacagcacagcacaatggctgtggcagatcatggccaggctgcctttttaggctggactctgacccattccctcctctctgggctgggcckccctgcaggaatttcagcaactccagtcagggatttagggacagaactctgatctccctgggactgagcccctgggaagagggggagccatggtctctgtggatcaacagatttagtctttccttctgctggctctgagaaatgcaggcagcccagacgagtgggattccccacagttcagcacagcccctctgccaaggg

SEQ ID NO: 861010 - DNA, 626 bp, Homo sapiens
tctctttttttcctttttcttttctttttttttttttggagacagagtcttgctctgtcacccaggctggagtacagtggtgcgatctcggctcactgcaacctccgcctcctgggttcaagcaattctcctgcctcagcctcttgagtagctgggattacagacrcccaccaccatgcccggctaatttttgtatttttagtagagacgcagtttcaccatattggacaggctggtctcaaactcctgacctcaggtgatccgcccgcctcagcctcccaaagtgctgggattacaggtgtgagctactgcacccagcctgcttatctctctcaatccagaaatccacatcaccaccaaagaggtctttctaactagttaatctgataaggtcctgctggtgctatgaattcttgaatggctacattctatagaattatacctgaaaccccttgtgtagcgtaaaagattcttcaagaactcttgctacctaacctggcatatttctgacaatccctatattgtgcttcagcaatagtgaattattactagtttattgtgtttttcaaagcctctatgacttgaacatgttatttcctctgaatggaagtcctctcctattatgt

SEQ ID NO: 861011 - DNA, 613 bp, Homo sapiens
ttttttttaagcaataactccctttaagtttctgctcagggtctttaagcttagtttgcctttcccatcctagtcataactacagtgatcatcttctttaggttcctgcctcagcctgccatttcttagttaagcagttgctaaagagatgcccattcgctttgttccttgaatctttattgggagagtggcagtggtgaagaaggtagggctgggagactacttttttttctaaagtcaggtaactrcagtcgaaccacaaagcttctgaagttctttttacttctcctttctttgtactaattcagacagatatgaacaccatttggcaatattccctgccattttcttttgccttccatttccatttcttttatctataatctgtactctagctaagctctgaaagattgtctttttttagttctcaccatgaaggttgaattatagctctaatttgtttattgcctgcaatacatttatgatacgtgcatatgtgtgtgtctgtgcatttatgaatgtgtcatgcatatatatgtacacatacatactcatgcatgtacacacccacatattcaggcacttatataccattgtacagatgagaaaactg

SEQ ID NO: 861012 - DNA, 615 bp, Homo sapiens
tcttgaaagagttgccaaatcttgtcaaattttgttaatttaaaactttcactatgacacattttaagcatatagacagaaagagagaataatatcaagaaaatccatgtattatcctatacttgttttcacattttagaaaggaatgatgccttacagagaagtagctgttgtatacttcttcctgatcgcattttccctaccccctccccagaggtaacattttcatgattttaaaaaataattcacatgcttgcttttacattatttctatatacaaatggatttatacaaatatatacttagttttagcttttaagcttttaagtaatatctgttttgcagcagttgctttttgttaacattatgtttttgagttttttccatgttgatgggagtgactcccttttgcattcattttaattgctcacagtagyccattgtatgaatattccgcaatttatttacctggtctcttgccaatatataattattctttttccacatttttatttaaaaaacaataatgtcactgtctgcatcttattctgcctctctgcaacatttgccataattgaccatcttttattgtacaatttttttttctcttggctc

SEQ ID NO: 861013 - DNA, 660 bp, Homo sapiens
ttctggtgccttgaacccttacagtaggatctgatcatttgcatttttacaatgagcacctgctcttgttgtccctcagaaccaaatactggtcttactcgtgaatggagggaaagctcatcagcttccttcagcttgcagagctggacttaacaggaaccgggaatacacggagaagaggatgatttctaggcagatgtgtgtgtgtgtgtgtgtgtgttttttttttttttttttttttwaggaagctgaccagtggcagctggagtagctttgttcattacagatgttattggcactgtctttgtagttttctctgtgaagaagaaatggaagattggcaggaagctccactagggggagatgaccagtatctagaattttgtgttgccttttatgtctatttgaccacataggtccaccggttcttttcatttcatcttctcttggtcttgcattccattttcctgtgatcagctggggaacctttcacctctagcagcataaagtaacagcatctgtgatttggaggcgggggcagtaggctattttcccagtagccccagtctttctgcaggaggggaaaatgaggtcaaaagaaagagaacagtaaagtcaagggatagaggtcacctcccttcaccacagatcctgctagcc

SEQ ID NO: 861014 - DNA, 565 bp, Homo sapiens
ggttgtatgaaagaggtgacatttgagctggcctgaaagatgttgggaagtctggaaaatgcaaggtggcaaatagaattctagtcaaaagagcaccatcagccgggtgcggtggctcacacctgtaatcccaacagtttgggaggccgaggctggtgtatcacctgaggtcaggagttcgagaccagcctggccaacatggtgaaaccccgtctctactaaaaatacaaaaattagccaggtttggtggcatgtgcctgtagtcccagctactcgggaggctgaggcaggagaatggcgtgaacctgggaggtggagcttatactgagccgagatcataccactgcactccagcctgggcaacagagtgagactctgtctcaaaaaaaaaaaaaaaaaaaaaaaaaaaggcwccgtcatgggaacactatcatatagacatgtgaaaaagcacaatgtgttgtgaaaagtgcaagtggcaaaacgtggcccaatcacagcctgcattgggctagggatgcagggaaaagagatgacatgtagtgacttgaatgttggctcccca

SEQ ID NO: 861015 - DNA, 577 bp, Homo sapiens
taaaatgaagcatagacagagtgaaaagaggaagtgaatattctaaatggacttcagtatgagggaggttcttctgtctaaacaaaggcatggcgttgagaattagcctgggatgcaaaaggggatttaactatttggtggtgttaggaaacaaggcagaattttaacctgaaataatatgtaatagcaagccctgaagattatgagatagggtatgacatgaaggggcatttaagaaaaatrgtttagacgtagacttcagaataaatgggaaccaagcaaaactaggctcaaagatgttggttaggaggctgcttcagtaattcaattctaatgaaggattggaaaaatatcttcttggtagtttggatttggaagaagaaggagttcaaggttgaaaggaaagtacaaattgtcatatttcctaacatgcaagtattagtcacttactgctgtggtaatgctgtgtaacaaatccctcccaaatttagtggcttacaataatatgcatttacttatcttgcttataagtctttgggctggccagggtggctttgtttctggctgcaacttggtg

SEQ ID NO: 861016 - DNA, 577 bp, Homo sapiens
taaaatgaagcatagacagagtgaaaagaggaagtgaatattctaaatggacttcagtatgagggaggttcttctgtctaaacaaaggcatggcgttgagaattagcctgggatgcaaaaggggatttaactatttggtggtgttaggaaacaaggcagaattttaacctgaaataatatgtaatagcaagccctgaagattatgagatagggtatgacatgaaggggcatttaagaaaaatggtttrgacgtagacttcagaataaatgggaaccaagcaaaactaggctcaaagatgttggttaggaggctgcttcagtaattcaattctaatgaaggattggaaaaatatcttcttggtagtttggatttggaagaagaaggagttcaaggttgaaaggaaagtacaaattgtcatatttcctaacatgcaagtattagtcacttactgctgtggtaatgctgtgtaacaaatccctcccaaatttagtggcttacaataatatgcatttacttatcttgcttataagtctttgggctggccagggtggctttgtttctggctgcaacttggtg

SEQ ID NO: 861017 - DNA, 617 bp, Homo sapiens
cctcaggaaacttacaatcatagcagaaggggaagcgaacacgtccttcacaaggtggcaggagagagaagaatgagagctgagtgaagggggaagcccttgtaaaaccattagatctcgtgagaacttactatctcgagaacagcatgggggaagctgcccccatgattcaattacctccactgggtccctcccacaacacgtggaaattatgggaactacrattcaagatgagatttgggtggggacacagacaaaccatgtcagtcctcagtagaacatactggtctcacctagagagattagattggcaaaaccagtattgggtggggttggagtagggaggggtcaatttttcaatgatctgagaactaaattgtgctgtatgtgcagcctttcaattaaatctggacacaacaatttattaaacgaccagaggtagcagtatttatacttacgcaccatataatcagcgatgagctgggctctgagacacaaggacaaataagagattccttgccttcagggagctaacagtatagtaggagttataggcaagtgcacaggccattcaaacactgagtgaggagaagtaagtacaggattctttcaggaag

SEQ ID NO: 861018 - DNA, 661 bp, Homo sapiens
atcctgaacatgaatgaaatgtctgccagagaaggatcatttcctgccatatttcatgctggcaatcagacttggtctgttttagtagtgctgttagcattttgaacaaatatcttccatattcacagggaggaagatttattaaaatattttcaattaaactcatttcaattcttggtgccaacatattctatttgctcttgtattatatgactctcatacttgactacaccttcagaaagagaggctatgtttagatattaatcctgaggatttctggaaagttggtcattcaaatattttttactactcctttctctttgatatttgatccaaagatttttatccacccagagctagttcattttcaagaagctttatgttwtttatctttttgaaagtccagttttgaagaggggtaaggagttggcacaacatttccagaagctgatcagaaaactaaaatgtatcattatgtgttttctataagtataatccttggaattgttttcctaaatacatttttaaaaatggtttaagaagcgaagcaacaatgtgttaaataaactcttttaggttgccattcagaagcagttcaacaggaattgacaaatttgagtcagagcagtgacctgtttttataaataaagttttattggtt

SEQ ID NO: 861019 - DNA, 613 bp, Homo sapiens
atctattatagacattgaatcagtaattaataacctccccaaacataaagcaccaggcccagatgggttcactggtgaattctaccaaacatttaaggaagaaattataccagtcctctacaacctcttccagaagatagaggcaaaaggaatacttaactcatcttatgaggccggcagtactctaataccaaaagcacacagacattagaaaaaaactacagaccattatctgtcatgaacatagattcaaaaatccccaatgaaatattagcaaattgaatcaaaaaatgtgttaaaagaattttacaccacaaccaagtaggatttatcccagatatgcaagtctggttcaacatttgaaaattaattaatgaaatccattacatcaaaagggtacagargaaaagtcacatgatcatatcaataaatgcatgaaaagcatttggcaaaatccaactagaaatagaggcaaatgtcctcaactcaggacagaatgcacataaaaaacgtacagctaacatacttagtggagaaaaactcaaaactttcttactaagatcaggaatgatgcaaagatgtgtcctctcaccactgctttttaacattgtac

SEQ ID NO: 861020 - DNA, 613 bp, Homo sapiens
atctattatagacattgaatcagtaattaataacctccccaaacataaagcaccaggcccagatgggttcactggtgaattctaccaaacatttaaggaagaaattataccagtcctctacaacctcttccagaagatagaggcaaaaggaatacttaactcatcttatgaggccggcagtactctaataccaaaagcacacagacattagaaaaaaactacagaccattatctgtcatgaacatagattcaaaaatccccaatgaaatattagcaaattgaatcaaaaaatgtgttaaaagaattttacaccacaaccaagtaggatttatcccagatatgcaagtctggttcaacatttgaaaattaattaatgaaatccattacatcaaaagggtacagaggaaaagtcacatgatcatatcaataratgcatgaaaagcatttggcaaaatccaactagaaatagaggcaaatgtcctcaactcaggacagaatgcacataaaaaacgtacagctaacatacttagtggagaaaaactcaaaactttcttactaagatcaggaatgatgcaaagatgtgtcctctcaccactgctttttaacattgtac

SEQ ID NO: 861021 - DNA, 648 bp, Homo sapiens
accactatacatctattagaatggccaagatccagaacactgacaacaccaagtattgatgaggatgtggagcaacaggaactttcgttcactacttgtgggaatgcagaatgatacagccactttagaagacattttggcattttcttacaaaactaaacattctcttaccatacgatccagcaattgcacaccttggtatttatcyaaaagagttgaaaacatgtgtccaaacaaaagcccgcacacgaatgtttatagaaacattatttataattgccaaaacttggaagcaaccaagttgttcttcattagatgaatgaataaattgtgttatatccagacagtggaatattattcagagctaaaaggaaatgagctgtcaaaccatgaatagacatggaagaatcttacaatgtattactaaatgaaataagccaatgtgagaaggctataatactgtgtgatttcaactgtatgccattctggaaaaggcaaaactattgggagagtaagaggatcagtggttgcccggggttgtagagagggagagatgaataggtggaacccagagggtttttagggcagtgaaactactctgtattatactacagtggtggatacttgttatcctacatttgtccaagc

SEQ ID NO: 861022 - DNA, 519 bp, Homo sapiens
ccctcaagcactagcttgctttgggtttggtttccatttgaatgagctgtgtctcttgtctgctggttgaagcaactgtgtcacatttccaaatataaccaacatttctgggcatattcctcaaactggggctcagagtcctgtagtggcactgctgtgacaagcctctaagccactggatactatatggcacggccatccttgatgatttaattaactcacctatgctattcctgtagtggtatttaggagatgtggcattctttagttaccaagaggtattttgacactttgcctggagaaagctatagaatggcagctgataacttgagagcatttgttaagatggcagctgcaytgacattggagtgagctctgatggggtggtaggaagggttttgtgagctttgcatgctcacttctctttcaccttgccagtcaagcatgacagaaggattaacctccttgccatctgcttccctacctctacagatgacagcttgggtacatctgtagtca

SEQ ID NO: 861023 - DNA, 635 bp, Homo sapiens
ctaattttctctaggatatgagtgaaaattcgcttttgtacccatatacacatcactgttttgttctagttattaaaaaaaaaaaaggtagcagaggtgaagtataaaatctttcatgttaatcacagtggcacttaaaaaaatttggggtgctgccccgttatgaagtgtgttacaggcgttggggatgaaggaggaagtttgagagctattattgtttactaaactactgttatagaaaatttgggtgttttgtgtatgatttaggttagcatttaagaaaatgtaatacaaattgttatagcatttttctgattccatcttgaagacccaggattttagaatctgcaaagcaaaaaatgctaacaacaacaaaggcatgctgaaaagcctggatagatctttttcaggggggaatactgtttctcttcacacttctctattcctrgctgatagcaagccctgcatttaattattgaaaacaatgccaacatgaaatggaacttcccagtgctggctttcccctttaatctaagatcatttaatttgccaaataacttgagtgaaggattgaggctgaaaggttaatacaaaccatgttgcccttggcttaattctatcctttctttttatgt

SEQ ID NO: 861024 - DNA, 667 bp, Homo sapiens
aaattcaacgtggaaaatcctgtagtatttagaaaattggaattggttctctaattaagtgatgattaaatctgtgatcctctttgaagacatagcactattatctggacacagctctggaaggtacatttgtgaagatgagcctggataaatgggaactactctaataagctgagatcttttaacaaacatgttggggacaaaamgaatgtggaaagacttatccgtcctagttaagagactgtgatcttttgatctccgatcccacagtcacctgtcaatgcaacacttagaagccatttcagataccttcttaagattgcagctatctgtggatggggtctgaaccatgcttcagcttgccctattcccttacctagtatagatccttgtccctaattttgaggctcagtctgcctgctgctttagtgagttccaatctaaattaatcccattgtttgtgcaatttttgattactgttttgcaattaccctttttctggtccctgccatttgaccgtgccacttgcttaattttatcacaaccccaatttacaccatagagaaactaatttaacgtctcttagtatttgtaggcaggtctaagagcaaagcctacactggtgaataacttcccaccggttttgaagatcatcagtgcaactaaa

SEQ ID NO: 861025 - DNA, 594 bp, Homo sapiens
cttctcagcccactgcaatctaactgccttctgagtcatcccctgtaactaaagcaaaaactctcttaacgtatatttagccaacataatgcaaattgactgatactctctgttgccttcgtgaaacatattggtggaagccaacggcacactctatagctaacgtgctactgcctagtacatacgcggatttttgttttttggttttcttttctatggattttttgttttctctatacagttataggcttaccaagaatcagttgtgtttatttaacctatttatgctgggtattcttattactataattatgtaatttaactgattattacgtaaactcattatataactgttatatgaaatataaatagaaaaaataaaatagttgtttctgtgcaaattaaaytgaatggtttggaaacatttacaattttccattcattgggggagcaagaaaagatcgagggaaaccatacatatctaggattctgcgttcagattgcttcatgagcacctttgagttcttggtctattttaaataaactaaaacagggaatgatagacaatacctttatagatatgatttatgtgag

SEQ ID NO: 861026 - DNA, 627 bp, Homo sapiens
cattccacaaggtggtgtgttttctgtttgaactagctgggtgtagtatatgtattctgaatctaatgatgtgctttttaaaccgttttcttatttttgccttgtttgtagtacatcatttagaatcttgcctctgggtctaacaaattgctcgatgtcaatgcagatacgtatagttgttcccaaatggataacatatgccaatattttctgtattgccctcaatgaacacacttctgggcatattcttgaccctgatcccaataagaagtccaaatgtgttctctctcagcaagatcagcttcccctgtggctattattttaaaaattaaatacacttcagaaaaataatatgatcctttacctgtaaatattatttgcataaatatagacctgaatgaagtttgtgaaataatattagaaattattcagaacaaaaagttaagtattattggcaataaagtccaccaactttaacctctctaaggatytacttagagacatccaaatacctgagattctgcctttttctctcttgcacaataacttcttcaactgagcctgctctcaaatccttattctcaaatgaattctaaggttagtttcaaggaatccaggttaaagatg

SEQ ID NO: 861027 - DNA, 591 bp, Homo sapiens
aaacaagctgaaaaagggatttatgaaaaacctacagccactagcatgcttaattatggtgaaagattaaatgctttccccttatatcagaaacaaagtaagatgtctgccatcatcacttctatatgacattgtactggaagccatagccagtgcaacaaaggaaggggaaaaaaagtcatacagattggaaagcaataagtaaatctgtttttattcatagacaacatgatcacctatgtaaaaaaatcctaaggaatctgccaaaaagctactagaactaatcggtgggtttaataagggttcatgatacacagtcaatgtacaaaaataaattatattttttatatagtagtatttattttagtgttggactkctggtaatcaattcttccagtgtttaattgtctgaaaatattctttcacattcatttttgaaagatattttcactgaggatagaattctaggttggagttactatctttaagcactttgaaaataacaatctattgtcttctgacttccattgtttacattgaaatgtcatgtgtcctttcctctgactacttttaggatttttctctttgcct

SEQ ID NO: 861028 - DNA, 629 bp, Homo sapiens; identical to SEQ ID NO: 860371

SEQ ID NO: 861029 - DNA, 593 bp, Homo sapiens
cctaaactctccgctgtacagcttgtggctccaaaagagacccctttcttcctcttgaggtgaagagagggaagaatgtagaggactttgtcttgcattttggataccagctcagccacagcagcatagggcaccgatcagagtcataaggaccctgttccaggccctagctcccaggcagcacttctgtgttaaaaaaaaaaaaaaaaaaaaaaaaaaaaaaaaaaaaaaaaaaactctcctggatctaagatgcatcacamagtgtcctacatgatctgtcaactattggtcctgttcttcagtcatctctccttaattccctggggtggagaaggggaaattaggaaaagaaaaaagagaaaaagaaattaagtgagagaaaaagaaattaagtgctcaccagtcactgtcccttctacttcctaaatagatctcaaatatgtcccctctcctaccattatctctattcattctgacactatcatcgtctgaaataccaccaccttttccctggacaattgtaactgacacccagttggtccccccatatcttacacttgcctcagtccaatcctattgccacagtacag

SEQ ID NO: 861030 - DNA, 630 bp, Homo sapiens
cttcaaaataatctggggaggggaaagagtgtagagggggctatagaacaaaatataggtcatgaacagataattgttaaagttgggtgatgagagcatggacgttcattaatctattaggttcattaatctattctctactttcataaatttttggaacttccataatgatgaatttcttaaaggagagattttctacaagcatcagaagataacttccaactgacctaactgcaagaatgcacrcatatcctgcctctgctcttgtcattatccatactcctaagtaaggcagactccttcatttgtgtactagaacacataccttctccctattcaaagatgtcattccagtaatttttttcttatctgccctattaatttccccttctctactggatcagttccaatcagcatagaaatgtgctataatttctcacatttaaaaaaaatgtctattgatgtccctgtagccccctctagctattgcccaatttctctgcctcctttagaagaaaatccctcaaaggagttttcttgatttctagtttccaattccattcatcccattctttatagaactcattacaactaggctttcacacctaccactccactgaaattgctctt

SEQ ID NO: 861031 - DNA, 630 bp, Homo sapiens
cttcaaaataatctggggaggggaaagagtgtagagggggctatagaacaaaatataggtcatgaacagataattgttaaagttgggtgatgagagcatggacgttcattaatctattaggttcattaatctattctctactttcataaatttttggaacttccataatgatgaatttcttaaaggagagattttctacaagcatcagaagataacttccaactgacctaactgcaagaatgcacgcatatcctgcctctgctcttgtcattatccatactcctaagtaaggcagactccttcatttgtgtactagaacacataccttctccctattcaaagatgtcattccagtaattyttttcttatctgccctattaatttccccttctctactggatcagttccaatcagcatagaaatgtgctataatttctcacatttaaaaaaaatgtctattgatgtccctgtagccccctctagctattgcccaatttctctgcctcctttagaagaaaatccctcaaaggagttttcttgatttctagtttccaattccattcatcccattctttatagaactcattacaactaggctttcacacctaccactccactgaaattgctctt

SEQ ID NO: 861032 - DNA, 661 bp, Homo sapiens
aactctggctctccaccatcactttcctggctcactaaatgcactaccactgtgaaatgaatattctcttttaactcccaatctacataatcatctttaagccatttcaggatgattcccgcccccttgctcttggttcccaccagacatgacagagacctgcaatttcttgaaaactcccttctcagtctcacctctaagtattttgcacaggctggttcctgtgcctggaacaaccttccaaccttattccaatggttggcagaaatggaaacccctccataaaacccctggcccggagtcaggaccctgggcttggggcttctccagagtcctcagacccaagagatcrgagagtagcaggagagtgttctatataacaccacaatgctggagagcgtattgggtgggggtgggatcggtgagagcatggacattctcccctcacctgtatagggtccacaattacttctgagttcatgggaacctgtggggaagagggagactatgcgagtcaagcaatcttgaaggaaccccaaaggctcaaccccatcccatattcctacccagttacaatgtgcctgggagctgaatgtctaccctctgtgcttccatcttcaaggatacctcttaactgtgttagctcggaacagtgctcatt

SEQ ID NO: 861033 - DNA, 583 bp, Homo sapiens
agaaagatctgccttagaagtcctgagttgggtcactccttctaaagaaatgctcttgtcagaaggtgcctcctcatccaccactctatgccaaaaacctaaaagcaagaaatgctagtgaagtgcacattaactatggtgggagggggcagcccttatacaagtgtgtgtatgacaaacccaggaacaagtccatgggatcgtttgcatgacagtagagttgggttcagttgcagatgaggctgtttagcaattctaggataaagattacaagaatgggccgggtgcggtggctcacatctgtaatcccagcactttgggagkccaaggtgggtggatcacaaagtcaggagtttgagaccagcctggccaatatggtgaaaccccgtctctactaaaaatacaaaaattagctggacatggtggtgggtgcctgtagtcccaggactcaggaggctgaggcaggagaatcacttgaacccgggaggcggaggttgcagcgagccaagattgcaccactgtactccagcctgggtgacagaaggagactccgtctcaaaaaaaaaaaaaaaaaaaaaaaaga

SEQ ID NO: 861034 - DNA, 580 bp, Homo sapiens
tttggctaaatgacttcccacattcgctgcactcataaggcctggatccactgtgaactttctggtgttttatgagactggaatgatatgtaaaaaacttcccacattcactgcactcataaggcctctccccagtgtgaactccccgatgttgaaggagtgcagacctttggctaaaggatttcccacattcactgcactcatatggcctttccccagtgtgaactctccgatgtttaatgaggttagacttgttgctaaataattttccacattcatcacattcatgaggtcgtactgcagtgtgaactctccggtgctgaatgagactagagctttgcctaaaggacttcccacactctcgacattcataaggcttttctccagtgtgaastctccaatggtcattgagactgtagcttttgctaaaggatttcccacattcactgcatatgtaacatctttctgtagtgagggttctctgctgctgaacaagtgtgtgtttaccgctgaatgcttttgtgtgttctccacagttgtaatgagtttttcctctgtgactgatggccccaccgtcgct

SEQ ID NO: 861035 - DNA, 618 bp, Homo sapiens
gctggtgcttaatcagcaaagtcacatacgcatctctagagtctgtcccctatcacttcaaccgctctcattctttaggcaagtttttaatattttctgaagaacccagagctgcctctatgagaccccctcgtccatgcaagtcactatgtgttaacactgcgggtggttaagacctactgaatatcagtcaacaggaaaatctaaaccgatgctgccttgcaaacctcactggcattttgctggtgggaattaagagaacaaagggagttgatatttgctatataaagatcctagatgggaattatatgcctcttrtctatctctttggttcaaaagcagatctatttccttggttacaaagagccccttaccaggctagagaacagaacagacacactggcttggtaatttcaaagaacaaatgtcaagagtgggtgtgtgcatgagggaacagtgtttggaaatgactctgtgggccactaacctacccactctggcaaagggggatgttagtccgaggcaaatggagagtgcaaagagaaaacaagctggtgaggccacaaagtatacaaatgagggaactctgtaacaggcagcttttggtaaaaagacaag

SEQ ID NO: 861036 - DNA, 610 bp, Homo sapiens
cctcatgtgagatgcttagcacaaaactgctgacatgtaaaagtatgtgagaaatataggttgagcctctgtaatcaaaaaaatccaaaatttgaggtgttccaaaatctcacacttttggagcgtgaatatggtgctcaaaggagatgctcattggagcattttggattacgaatttttggattagagatgccgacactgttaaatctaatgcaaatattcaaaaatcaaaaaagaaaattccagagtctgaaatacttctggtgtcaagcattttagatatgggatactaaacctgtcttaacgttattattgtattaattttctgtggctgccataacaactaaccrcagacttagtggctaaaaaacaacacaaatatattattttatagttatgtgggttggaaattcaacacaagcctcactcacccttgtgactatgtgattacattaggcccaggtggcttatccaggataatctccctattttaaggtcagctgattagcaatcttaattccatctgcaatcctaattcctctttgccatgtaatgcaacatattcacaagttcttgggattaagatgtggacatctttgtgggggggtac

SEQ ID NO: 861037 - DNA, 610 bp, Homo sapiens
cctcatgtgagatgcttagcacaaaactgctgacatgtaaaagtatgtgagaaatataggttgagcctctgtaatcaaaaaaatccaaaatttgaggtgttccaaaatctcacacttttggagcgtgaatatggtgctcaaaggagatgctcattggagcattttggattacgaatttttggattagagatgccgacactgttaaatctaatgcaaatattcaaaaatcaaaaaagaaaattccagagtctgaaatacttctggtgtcaagcattttagatatgggatactaaacctgtcttaacgttattattgtattaattttctgtggctgccataacaactaaccgcagacttagtggctaaaaaacaacacaaatatattattttatagttatgtgggttggaaattcaacacaagcctcactcacccttgtgactatgtgattacattaggcccagstggcttatccaggataatctccctattttaaggtcagctgattagcaatcttaattccatctgcaatcctaattcctctttgccatgtaatgcaacatattcacaagttcttgggattaagatgtggacatctttgtgggggggtac

SEQ ID NO: 861038 - DNA, 622 bp, Homo sapiens
ttcaggaattatctgttgatttcctgctatgatggttgggagttgggttcatttctaccaccatctccaaacacatattttctcctgcctcttctcccaagttatgcctttatttttaaattcctttcttgattaccattatactataaataacatatctaaaccttgatttccctatttataaaactgggttttttttttttttttttgagacggagtctcgctctgtcgcccaggctggagtgcagtggcgggatctcggctcactgcaagctcygcctcccgggttcacgccattctcctgcctcagcctcccaagtagctgggactacaggcgcccgccactacgcccggctaattttttgtatttttagtagagacggggtttcaccgttttagccgggatggtctcgaactcctgacctcgtgatccgcccgcctcggcctcccaaagtgctgggattacaggcgtgagccaccgcgcccggcctgggttttttttatttaacattttgtaagggcctcatcttgttatcttccctaacacttctcaacttctgttagctataatttttcttttagttggttttgctaatttttatattctctctttagtccataa

SEQ ID NO: 861039 - DNA, 543 bp, Homo sapiens
ttgcagacacatcaagattcaggtgtctctgtgtctcttccagaaagatttctacagctggaaaaagatttattttgtttctcatccttttaccaaaccaaaacaagcaaagaaacatcaacaacaaaactaggaggtctaacagaagagttatatttctgccctttcttggagacttggaagatctggcaatgtgctcccacttggaagctattgaggctaactactggctgcttcttgccaacaggcaagcactcttcagatctaagaagctccatcactttcattatctgtcaggccctggaggcagctgagtttgcatttgcaaatacasagtagaggtaactgcattttttggaagggaaagttttgagtcatcttgggttaccttttcagcacatccctttgggttgggaattatatggctacggccccacacatagtttcaggtcaaaacacatctgaaaccagagctctgaggctggggtgctgtcatgcttaagtcatcccagttttaagctggggtgacttcaatagggacgg

SEQ ID NO: 861040 - DNA, 598 bp, Homo sapiens
aggtagtgcaaaatccataatgacaaagttcaggacaacaggaagttaaaactcttttttatgttcatgtgaatgagtggttctttctctttaaaaaggtatttatttttactttattttagatcgaggttacatgtgcaggtttgtttcacgagtgtattgcataatgctgaggcttctagaaaacccctcacccaaacaatgaacatagtacccagtaagttgctttgcagcccttacccccattcttccctccctgcttttgcttatttatgtttgttttagtttttgtttttgtttgagacgaagtctcactctgtcccccaggctggagtgcaggtgtgcartctcagctcactgcaatctacacctcctgggttcaagcaattctcttgcctcagccttctgagtagccaggactacagaaacgtgccaccatgcctggataatttttgtatttttaggagagatggggttttgccatgttggcaaggctggtctcagacctcaagccatctgcccaccttggcctcccaaagtgttgggattacaggtgtgagccaccgcacgcagcccctccctgcttttgaagtaacca

SEQ ID NO: 861041 - DNA, 654 bp, Homo sapiens
gtcatgtgtcccggacatagtgacgaagtcattcagattcacaagaaattggcaaagaggagtcactagccagatttcaattccatttgattttcttcttagcagtccttacatctaaaatgattttgtttagtgtatgtctctcctaggacaatggagaacagcatttgtttgtctttctcaagacacctgccaggtcctgagagtccttagcccaaggtagccacgttttatctcctcattaagtgagtctgattccaattccaggccacaagaaatatctctaaactttctacttayggggcttaggtttctccagctaaatcttagagaaaaactcacagtcatcaacagagtggctagctccatatcaacttcccttcatttcttcaaacaggagaatgatgcattgtactgggggagggaggctgcggttagggtggttcacttgcccttttagatccactaaaaagctgaggggtaattgcagatgcaaacctggcaccgttaactgcaaaactccacaccgaattaataaagaattgggcacttagcttcatgtttttgcatcttaacacatgaaggcactttgtaaagggttgaatgaacataattatcaatttccacatgcatattaggattcagccggggcca

SEQ ID NO: 861042 - DNA, 654 bp, Homo sapiens
gtcatgtgtcccggacatagtgacgaagtcattcagattcacaagaaattggcaaagaggagtcactagccagatttcaattccatttgattttcttcttagcagtccttacatctaaaatgattttgtttagtgtatgtctctcctaggacaatggagaacagcatttgtttgtctttctcaagacacctgccaggtcctgagagtccttagcccaaggtagccacgttttatctcctcattaagtgagtctgattccaattccaggccacaagaaatatctctaaactttctacttacggggcttaggtttctccagctaaatcttagagaaaaactcacagtcatcaacagagtggctagctccatatcaacttcccttcatttcttcaaacaggagaatgatgcattgtaytgggggagggaggctgcggttagggtggttcacttgcccttttagatccactaaaaagctgaggggtaattgcagatgcaaacctggcaccgttaactgcaaaactccacaccgaattaataaagaattgggcacttagcttcatgtttttgcatcttaacacatgaaggcactttgtaaagggttgaatgaacataattatcaatttccacatgcatattaggattcagccggggcca

SEQ ID NO: 861043 - DNA, 636 bp, Homo sapiens
gttctgtggttctgcctgccagcatccctcctccccttgtctagtagcagaactttgattctccttcggggaaccagcagctcagtccgtgagtctctgttgaggctaactccaaccccaactccagaggtgagcggctgacccaagcctagcctatcagagcaccacattcctcacacctcagtggcaagcttagggatggacccaagcccaacaaatgagagccctctggggacttttactggtgccaaactgggtggatataaacctggagctgctggggccactacatgaagaggactgccagagagtgaaaccaacaaaggatgcagacctctgagaaatagaaagggaaaaaaagaggagacagacagaaggacaatgggaagttgagagagatactgaaaccagttgatgttatatgagcacctggatccagctgagactgaagccccgctacctttttcttcacataagccagtaaaaatytgtctttttgcttgtgctggtttgagctggattttgtcacttgcagccaaataaatttcccaattcatttttgaatcccaatgcccagaccaggaactcaggaccatagggataggatgggataggatgggatgggttaggatggaa

SEQ ID NO: 861044 - DNA, 672 bp, Homo sapiens
ggcatgggttaaaaagctacctattgggtattgtgcatgctacctgagtgcgatatacccatgtaacaaacctgcatatgtgtacaccctgtatctaaaataaaagttgaaaatatttttaaatactccctaacaagaataaattatttttctatcaaattgtgtgcacacctgtgccaaaaaaaagtacatcagatatgtcaagggggtgggcagatagttaaactcactcatcatgggagcatgggttttggaacaacttgtcaatatctataaaaaaataagaatacaaataccatttgttacagtgrtgttgatttttggttttttttaactgatacataataattggacatatttttggggtgcacataatatttttgatacaagcatataatgtgcagtgttcaaatctgggtaactgagttatctatcacctcaaacatttatcatttctttgtgctgggaacatttcaagtcttctagctattttgaaatattcaataaattattgttaactacagtcactctattgtgctattaaacactagaacttattcctcctatttaactgtatgttggtacacattaaccaacctctcttcattcctcctgctacccttcccaacctctagtaaccatcattcttctctctacctccatgaagtcaac

SEQ ID NO: 861045 - DNA, 583 bp, Homo sapiens
ttggatgtggtcagggcttttgcttttccggtgattacaaattccaaccttctctacctcagccctcatggttatgatcattgctcaaagtagctggttgacaaatccatatgcatatcatttgaccaggcccttgcttttaaaattaagtgtttccaaaactcatgcgaactgtgacctccaatgtgcccgtgtcaggaggtggggcctagtgggaggtgttttggtcaccagggaatatcttttatgaataacttggtggtgttctcttgatagtgagtgagttttcactccaataagacttcattagttctcatggaaatgaattagttcccaggagcatgggttgtaataatgccaggacattcctttagttttatctctttgcatgastccacttcccctttgactttccctgagatggtttgacctaccacgcggccctcatcagaagctgagcaaatgccggcaccatgcttcttgtactttccagcctgcagaaccttgagctaaataaacatcttttaaaaataataataataaaaaaaaggtgtttgaacaactttaaggaaagatgaaaccc

SEQ ID NO: 861046 - DNA, 575 bp, Homo sapiens
cacaataactcatttcctagcctctggcaactagggggcattgaagatcattttagcagggactggaagagaggcttctcagacttatgtgatccaatgggtcagatttgcccggcctggggattagctgagactgcacctactcataaccactcacttggtggattcagaagagaaaacagaaataaatcctatgggtcagggagactggctgactatatcataaaagcccmtgcaaggcaagaggttcttgaaacttggagttaactgggatctgtcctacttccctgaagaagttctaagcaattggctttggaactccaaggacttaacaaataaatcactgggagaccaaagccatcttggttagtgttctgaaaacaaagttaggtcaaggttcacacgtcagtgttaaacatcaagggctaaggctaagctagagtttcctggaggttccttgcaagcttttgggaacctcagagaagatacagctcactttctgatgattaccttaagcagcaagaaaggccaacttttaacactcttgggcctgagagcaaaattttagtagctgc

SEQ ID NO: 861047 - DNA, 535 bp, Homo sapiens
ttattttcattgtaccccttccttttattttgtttccctcccaactcacccaccctgaccccattcccctaaaattaagtctgaccttatgatttctatttctagcaattatcactattgagaaaaaacaagtctagatgagatgaaataaygcctattttgcctaaaacttgctaaaatttcaatgagaatataaaaatgagactaatctgcccgtggctttctcctaattttttaggaccacttttaataaaagcagcccacaaactttattttatggttttacatttggatctttatttctaatagagaattcatttaaattgaaggaaaaactaagtcgtttgcatgcaaatatagcaataagaggagattgcacaagtaatgaatgtggtatattaaccaatctttttgcaatgagtgaccaggaatatattcattctgaatgcgtctctaattcattctagttgttaccataaaagtgcactaagatgtgtatatcactttagattaaatgcaacaattcacagtatat

SEQ ID NO: 861048 - DNA, 646 bp, Homo sapiens
cagaactgtaaataaaatatctgaaataatagacattcctcctgtcttctggggaatttcagtggtggtaatagaatactttctataacaaagccacctatcaatttagttttgtgacactatatctccttggtgcatcttttgtagtaagctttacagtaaatattttcaaaaccagaatttaaaaaattctattacaattgtgtttctcaatcttgattgtgcatcaggatcacctaaagggctctctaaaatattatattttggggccccactcccagttcactgatttagtaagtctgaggtgctacctcagaatttgtattttagcaagttccatattatattratgtttatagtgctacactttgagaaccactgtctaacagaaatagcattcacatatgaaaaaaaaaaatcaggaatcaggcggtatgtgtgtgtgtgtgttagcacttccagcacctggatgagccaaagtctaaacgaaaaaataatgaaaatccttaccaccaataagcttctcttcaccacatcctaacatctggtcagaagaaatacatgcctttggtatttgctttccttctagttataagaatagatgcagcatataaaaggactattaaatatctaggaacaaattaaa

SEQ ID NO: 861049 - DNA, 646 bp, Homo sapiens
cagaactgtaaataaaatatctgaaataatagacattcctcctgtcttctggggaatttcagtggtggtaatagaatactttctataacaaagccacctatcaatttagttttgtgacactatatctccttggtgcatcttttgtagtaagctttacagtaaatattttcaaaaccagaatttaaaaaattctattacaattgtgtttctcaatcttgattgtgcatcaggatcacctaaagggctctctaaaatattatattttggggccccactcccagttcactgatttagtaagtctgaggtgctacctcagaatttgtattttagcaagttccatattatattaatgtttatagtgctacactttgagaaccrctgtctaacagaaatagcattcacatatgaaaaaaaaaaatcaggaatcaggcggtatgtgtgtgtgtgtgttagcacttccagcacctggatgagccaaagtctaaacgaaaaaataatgaaaatccttaccaccaataagcttctcttcaccacatcctaacatctggtcagaagaaatacatgcctttggtatttgctttccttctagttataagaatagatgcagcatataaaaggactattaaatatctaggaacaaattaaa

SEQ ID NO: 861050 - DNA, 553 bp, Homo sapiens
aaatagaataaaatgatttaatatatgcttaattgatgttctggatgaagaaaagagattaatggtacagaggaaatatttgacaagataatggctgagaattttcctgaattgatgaaagacaccattccatacattcaagacgagatatagaagaagaaatcaaaaccaagcattttatgtaagaagcccagaaagaaaaatgcaaaaagaaaatctctaaagcactctgaggaaaaagataccttcctttcaaataaatggtagtaaaagtggtagctgactttctcatggtgagggaggactgaggaggaatagaggaaattggagttcaataatttacagtttagagttcaatatgcyaaaaaaataaaactctaccaatttagagttttatactcaacaaaattgtccctcaaaaggtgaggcaaaataaaaatgttttcagacaaacaaaaacacacattttgttaccaggagaacctcattaaaagtaattctaagaaatgtctttaggaacaaggaaagcgattcagaacagaatgcctgggct

SEQ ID NO: 861051 - DNA, 553 bp, Homo sapiens
aaatagaataaaatgatttaatatatgcttaattgatgttctggatgaagaaaagagattaatggtacagaggaaatatttgacaagataatggctgagaattttcctgaattgatgaaagacaccattccatacattcaagacgagatatagaagaagaaatcaaaaccaagcattttatgtaagaagcccagaaagaaaaatgcaaaaagaaaatctctaaagcactctgaggaaaaagataccttcctttcaaataaatggtagtaaaagtggtagctgactttctcatggtgagggaggactgaggaggaatagaggaaattggagttcaataatttacagtttagagttcaatatgccaaaaaaawaaaactctaccaatttagagttttatactcaacaaaattgtccctcaaaaggtgaggcaaaataaaaatgttttcagacaaacaaaaacacacattttgttaccaggagaacctcattaaaagtaattctaagaaatgtctttaggaacaaggaaagcgattcagaacagaatgcctgggct

SEQ ID NO: 861052 - DNA, 578 bp, Homo sapiens
ctactcttcctagggtaagaaactgggagtggcttgggtggttctagttcaaggtctctcatgaggttgttgtcaagttgtctaccggggctgctgctgtctcaaggctcaatgggggctggaagttgcacttgacagatcactcacttggttgttggtaggcttttagttccttggtggctgttgcccagaggccccaggactctctgtggggctgcttacaacataacgtctagctttccagagtgaataatacaagagagaaagaaaaaataagagcaaggatttaccatggcaaacctcttgtatacactcctctaagkactgaggctctcaaatgctaagattttgaaacaaaggtttatacttaggagaagactatatgtgaagccctgttattataatcagtgttaccatgagtacaaactaaaactgaactgttgaaaaaaaacaaaattatttatattattgttgaccttttatgaaaggaaaatattaattaaggccaggtcaaagaaaaaaaatgcctccctgatctctgaataagagaccctaaaattataggtaatataatggaa

SEQ ID NO: 861053 - DNA, 611 bp, Homo sapiens
aaaatctgcaactggattaaatttgaattcctacaagattccagatagatctggttttcatagttctccacatttctgagtgccctttgtcagaattacatatggatgaacagaggtagagataagtttgacacttacattatcagaagatctaagaatatttgaactaatcagagtttctcatcataagtggttaaatggtaaatatatgtaaaagcaactcagyggaaacaatagaatcctcttgcttcctctctacctatgattggcccaagccctttcaattttttcttctacatatctccaaatctgcatttacttatctaactgcactagcatggcttagttcaagttctcattgtatctcacttgagtgattggtatggttttcttactgtgttcttgcttctagtgtccctacttgtgtgatcttctgaaaacgtaaatatgatggcatcatttgcctacataaaaccattctgtgactctgtgacatgtaggcttgacaggacaaaacccaagaccccaatatggcatatatggctaaccatcacgtaggtctcattcaggacaagctatataattttcccagagcaatgaaaattatatat

SEQ ID NO: 861054 - DNA, 632 bp, Homo sapiens
gttcatccattgtaacaaatacgccactctggtggggaatactgataatggggtgaggctatgcatgtgtggtcacaggggcatattggaaatctctgtatcttctaattttgctgtgaacctaaaactctttaaaataataaagtccttaaaattaaataaaatcagataatgacatctagaaagtttcttgaattataaaaataacttggttttatcttatgtaataatccatttgatattatgcaggacacatggaaatcttaacyatgttcataatctgatgtaatttcaaaacaaaatcctcacatggtaggatgtcttcaaaacttgctactgttgtaaaattaattttgaatgtggaaaacatctctagtgttttccaaggtattccacgttggttgttgatgccaaattaaaatttataattatttattttctcatgtaatgtctacaactaccttttagactgggtcaggtaccgcatatgctttgttggcctctgcatactaagtacctaacacatagttgctactaaatctatattgagagaataaataaaaggaaaaggtccattaggtaactaaatacatgttcagccttgaaagtctttcagcaagtcttaaaagtct

SEQ ID NO: 861055 - DNA, 595 bp, Homo sapiens
gtcatgggaaaagaaaggagagaccattctgagaaagagaaagaagtgagcaatcatcacatccaaaaccctgacgtcagacactttagaaattgtgtgcattggagctgggtgttgctgcagatacattggcagctagttgtgaaggtttgaggccaagtgatgtacttgcaagcacagctagtttcaaactgcacyaataatagttatgactgaaaacaggtgctattctgtcccagcactgtgttaagcactataaacacattgtcacagtaatctctccaataatcttatggaagatggctctgctctccctttttttaaccaataattggaacgatgttacttccctaagttttcagaggcagaggcaatgctacataaaaatatgcttgtttacatgaattaaatcatttggtagaaacaagagattcagccactaatcagagcacagaatttgagagagaatataggacaaaagagaacagaagggtcttgttgttattggccaacatcaaagcactatcaccccgtcttttttagttatgcaaaccactcaacagaatacctgtgagctttacttttgggcagtatg

SEQ ID NO: 861056 - DNA, 668 bp, Homo sapiens
aacagatggcagatggtaggagccaggctcctcattcttggagcgggaacttacaaataggcaagggtggaggctagaatgattgatgtggtgatgaattaaagttgggaacattaataagaattcatgtgaagcttaatatagatacctgtggttacatagtattgatatktatagatatgtgtataccagttaacatatacacatatttctttgctctgtcagctaaacaggcctaaaagaaacaataagcatacctagatccaaaatcttgatttccaataccaatctccaaaaagaaaaaagaaaaaaaaagaaaccagcactccttgaggtaatggctgattctaggattgagacaggaaatatgcaagatgagcttggagtattttgcagtgccagaaaggaaggaagtgccttaaaaaaatcagacagaggaagtggagcaagatggcagaatagaagcctccagcaactgtccccgctgaaagaacaccaaactgaacaattatccacacacaaacaaatcttcataagaaccaaaaatcaggtgagtaatccctgtacctggttttaatatcatatttaggaaaacaatacctggttttaacataatatcagcttgatattaaagaaatcatattaacatcttatgaaaagggtaggaa

SEQ ID NO: 861057 - DNA, 617 bp, Homo sapiens
cgctggcagttgtgcgtagctcactgtcccctccattgtcagacagttctgatgtttttcctcttccatgcagtcaagacttcagtctattgctgaccttcatcagagaggtttgtcctaagctcctcccccaacccacacccctgtttatgttcaaagctggacttcaggaaacagttctcttaagcactgaagaaaaacatatttggcatccactacactccctaactcccactccaatggactctgtttcaaaagctctggacacatagcatagatttctcatgagacctgaccatcctaacaaatatggattgcatttgcattttaccactagaacaaacaaaaagtatttacatttggaagaactgtggctacacttccccatccytccctcagtccccatgttgtttgattcttgcctgcaaagagtaccagaggccactgaacacatctcacattgtttttgggtagtggcaaagtaaaatgccagcactgaagatggtgagcttgagtttcacaagtcatctgtgtaagggagagaagtaactactcactacacctgcacaaagaaaagtgcctggattaagcggactgcacaatgtgagtttgttaat

SEQ ID NO: 861058 - DNA, 618 bp, Homo sapiens
ggggagtgatctactcctaggggtgtgttaacgagggcaagtcttaaactggcaggaacagacatccaggatttgacaaaaatgtttcaaattagccttagactttttcactacaataatatgtattcatttccctgttatttgtgtcttcagggtgcatgakagttgtggggctcatttaacctgaatcagacatagtaaacaagctagggttttcatccagacctctacaactccatagctcacaattgtaaccactgtgcatagccataagttggcatttgacctggtgaccaatgtctcacctggctcttgtcttccagacactctccagttatccaatcaagagtatgatgggtgcccccattgtttaccggatgttgctacagcaggatctttccaggtgatggggctttgaggattggtaagagagtctggccccatccccctgactccctcacatacattcatgcctatctatctgaatctctcgcacacagagagccccatgaagccatttgcatcatcaaagcacccagaaacccagtctagtcctgagtggactttggttccagggaggctgagggcaaacatttatttctcttcttcagttacaag

SEQ ID NO: 861059 - DNA, 627 bp, Homo sapiens
gaaagaaaaatactgggtctcagtcagttaaaagtgcctagtgtggctgccagacttacaacacggaggacaggcttgctggggaggatgctgtcaatcccccatcatcctcagatgttgggaatgttggctttgttccaatccagtttcccttcatggcggtctagccctcaggtgggaccggaaggaggtcctgggtcaactgagggtatctggccgaggctacacctgtgttatccaaaggcccatggacctggtccctgaccacctgttaaggtgtccagtcttttctattgttttttctttcatgattgtcatagttcgtatctcktctttatgtacaatgttaaatgttaagcatgttgcaaaccacagagataatattactgggtagaatgagcatttggcttagtggtcaaacgtataaaattgaaggctaagattagcacagatgaaacaaaatgtgccttagtatctgtacgtaaatttgtggcagaaatgttcttgtcatttccttcattgccaacttagtgccaagcacccgaggcacagaaaagaagaatggcctcacgagggaagcattaatttcaataccatcctacagctggtccttttctttaaacacag

SEQ ID NO: 861060 - DNA, 571 bp, Homo sapiens
gaaataggagagtggaagaggaaacattttcagatgtggatactggagagcttatgaaggactaggactaagcctctcaattacaccaagctatccgtggtggatatccagggattagatgagaatcccactgccatcatgggaaggctaagaaggggcttggtaaaatacacctctctatctcccaatttagtagagggacagctggtcccaggggatgaatttattacacaggtggcccctgaagtcaggagggggctgcagaaatgggctgcgggaccagatggtacttttgagggcctcctgggagtggccacctccatcttttgcagtaggaattgggaggaagtccagaaaagagaggagagttacaggaaaaaggcagaggttctaaragcggtcttgtgggctcatggactccagagtccctgagatgcacctgctgactgctgcaaatatggtagcctagggcactttaggacagcagggggaagccactttgaccctgtcaagtttgcagtgaggaccattggaaagcgaactgtccccagagatgtgggtcactgggtcc

SEQ ID NO: 861061 - DNA, 618 bp, Homo sapiens
atctttgagaaataaaaagagttttaaagattattcataaaatgaaaatgtcttcaaaatgtacacatgtgatccaaattatgtagacatgcagttcatatctgaaataattcagatattaggcttgctaaatgctttaaggtcataaactgcttctttggcttttgaaaactgttcaacttgcctgctttacagttggtaaggcctggggacatatggagttaaccacaccactaactatgctggaaaaagycagatcttatccacacctaatacataattaaaataacttaccaggttttaaaccaaaattaaaatggctgagagttaactttgtaatatatagtggagactagtgaaaatagatttacatgcaaagtttgtaaggagagtaaaatgtggttttggtaaaagattataagaaggcatgggaatgtaaatttctgcataagtttagagggttaaagaattcctggcaagttaaaggtttgaacaaattgtggaaggtataaagggttataaaaggtttataagaatctcacttcatggtcaaactcagattggatggatttttctgtaaggtttcattaccaaaaaatgaggttgacattaatagtt

SEQ ID NO: 861062 - DNA, 627 bp, Homo sapiens
taaagggaaagggggcatggaaggaaggatgatgtctagggtttttattaagtacactcaggtctttccttatagccctttctcagtagaacaggttttgaggcagaagcattgagttcatttgtggtcaggctaacttagagtatctatataaagccaatatgatatatatttcattggtaatwggttagatatttaatttgaaatcagagagaggtcaaggctttaaatgtgttttagggaattagctacataacaggagagaatgagacaaacaaagagcgcatttggaaggagaactgttggttgaagatgagcctttggagaacagtaatatttaaacaatattgagaggaagatgatctcatggacactactgagagcaaagaatcagaaaaggcaggcatgatgacaaaaggatgaaagacagcaattcaagaagagttgattagcactgctgtattagtccatttttatacttctatagagaaatacccaagactgggtaatttataaagaaaatgagatttaatagattcacagttccacatggctggggaggcctcacaatcatggcagaaggtgaaggaagagcaaaggcacatcttacatggtggcaggcaagag

SEQ ID NO: 861063 - DNA, 617 bp, Homo sapiens
aaaatggactaatacaataagttgataccaggtattggggcactgctttaaagatacccaaaaaggtcaaagcaactttggaactgagtaacacacagaggttggaacagtttggaggactcagaagaagacagaaaagtgtaggaaagttkggaacttcctagaaacttggaagctccaaagacgggaagacgtgagaaagcttggaacttcctagagacttattgaatggctttgaccaaaatgctgatagtggaatgaacaataaggtccaagctgaggcggtctcagatgtagatgaggaatttcttgggaactggagtaaaggttgttcttgttacccaaagagactgatggcattttgcccctgccctagatatctgtggaactttgaacttgagagagattatttagggtatctggtggaagaaatttctaagcagcaaagcattcaagaggaagcagagcataaaagtttgaaaaatttgcagtctgatgatgcagtagaaaagaaaaacccattttctgggaagaaattggttattttacataagtaaagaggaggcaaatactaatctccaagataatggggaaaatgtctccagggcatgttggag

SEQ ID NO: 861064 - DNA, 592 bp, Homo sapiens
tcaaaatgttttccatactggcttactgatttaaattcctaccaacagtatattcttatacactttaagtttttcccttttctccaatcctctccaatgcttattatttctcatcttttttataatagccattctaacaggtgtgaggtaatagctcagtgtaaktttatttacatttctctgatgattaccgattttgagcattttaaatatacctgttggccatttgtttgtcctcttttgtgaaatgtctattcagatcttttgcccattttacaatcagattatttgttttctcactattgagttgtttgagttctttatatatattggatattaactcttcacctgatgtatggtttgcaaatatatcctctaattccgtagattgcctctttgttctgttgattgttttcatggctgtacagaaacttttcagtttgatgaaatttcattcatccatttttgctttttctgcctgtgcttttggtttcatattcaagaaatcattgctcagaccaagcttatggagattttctcctatgttttcttctaatacttttacagtttcagatatcacgtttgtaatcca

SEQ ID NO: 861065 - DNA, 597 bp, Homo sapiens
tgaggtccattaagttcatttttaatttagagtaatacattcttagttaaatagtctcaattttaaaatcatttctatttttccactaacttttttattgttcatattgaacatatttattttagtccttgagcataatcattacagctatagcactgttattgaaatccttctcaactaattccaacatctgagtctttagttttctccattgatgttgtttttctcttgcaaatgagtatgtgttcctgtgtctttgtgtatctagtaattttagattttatatagaccattgtcattaatatactgtagagattctggattttgttttgtttattcatttcttttagcctgaggctgcatggattctgtgtatttcagggatcagccatggatttgggaagaatttatacacaaaatttgaagttcctcttttctgactctcyctcctgaaatttttccataaaaattgaaaactcactccatgccatttatttcttcaaaggtagatttttcctaatttatttttgtgctgcctaatctctaatgcattctgaagttgttcttttttttttttgtgattgtttgtttgttttt

SEQ ID NO: 861066 - DNA, 550 bp, Homo sapiens
agggagctattgtgtgaggctccagttgcattaccgcttggagtttgatgggccatccctcttgtctcttctcagctgcagtcataaatcactggttggttcacaagaatatactttactcaattgtcaaaagctgcaaataactcaaaagaacagcttctttgactctgaaaagcaaaacaacggattagcaatgttctaagcaagaggtcaaaaatattacttcagtcttccattagttcagtccacccagtcaactcttgttcgcrgtctctaaagttatcaaaaacctgcccttgaggactataatccatcttttgaagaggatcaaaataagacaattgtctgtgaatgtcaaaatgtcctagggtagttacagtcaaaaacacgattgacaaagaaatttagtcacctctgtggtctacaataacccaacaaaataaccctaattatgattaataacacatactcagacatcagaattttagaaatcccatactattttagaacacatattaacattattcactaaaatataacctgaaaatta

SEQ ID NO: 861067 - DNA, 622 bp, Homo sapiens
tcaactattaatgtcaacctcattttttggtaatgaaaccttacagaaaaatccatccaatctgagtttgaccatgaagtgagattcttataaaccttttataaccctttataccttccacaatttgttcaaacctttaacttgccaggaattctttaaccctctaaacttatgcagaaatttacattcccatgccttcttataatcttttaccaaaaccacattttactctccttacaaactttgcatgtaaatctattttcactagtctccactatatattacaaagttaactctcagccattttaattttggtttaaaacctggtaagttattttaattatgtattaggtgtggataagatctgrctttttccagcatagttagtggtgtggttaactccatatgtccccaggccttaccaactgtaaagcaggcaagttgaacagttttcaaaagccaaagaagcagtttatgaccttaaagcatttagcaagcctaatatctgaattatttcagatatgaactgcatgtctacataatttggatcacatgtgtacattttgaagacattttcattttatgaataatctttaaaactctttttatttctcaaagatta

SEQ ID NO: 861068 - DNA, 607 bp, Homo sapiens
aaaaaaaaggatacacatagttgaaggggaaaaagagatagatacattgtaatctgttcccacagagctggatagagtggcttcctgggctcctgatggttttttgtttgtttgtttttgcttttttttttttttttttttttggttttctaacaagtagctggttatgcccttatgagagctggttgattgccatattcctcaatcctgtgaaattatccacgggtccttgaaatagaatactttttgctagtctgaataggtttatacatcttgcaacttaatgaagcttatttaagacaacatttatgacagacgatgggccaggatttactcccaaatctcacttgcttacttaaaagtttccattcttactaacgacacctttatgtgatcctcacatgatatgctcaccaatgtataatccyaataaatactaggagcctatgtagtctagtctttgcataatttggcagtagtagaaactagagttcaaatcctcaaaactcaataatgtttgcttaaacagaaaccagtgaagtttatttagacaaaatggtaatggtttgggggttcacactgattttaattggaaatcttcctttaa

SEQ ID NO: 861069 - DNA, 584 bp, Homo sapiens
atgtgaacaggaaaaaataaaatattttaccccaaaatatatttctttgacatattttgaaatggctgccatttggctagctaatagaggtggccttgcaaagccatcttttatggggggaagtgtacatctatagagaatatctattaatgcagccatgccctgccctctttttgtagggaaaaagctgagtgttgggaagaaagctgaggcagggcttgcacgtctggtgtaatgtcctctggaatgtgtctagacttgctggctccttgcttctagccttcctaggctcctagattgattgtattcccattatctaaagtagcagaacatrctccttataaatgctataccatcacaggtgttcatcatgcacctgatcttttgacctcctcattctcaccacctgtttctttgttggattaccaataaatagcatgggctcccagggctcggggccttcacagcctccacagtcttgatggccccctggtcccactttacttctcaaactgtctttttctcaatcctttggctctgccagacttcattgcccccacaacctggtgttgggcctgatcagc

SEQ ID NO: 861070 - DNA, 641 bp, Homo sapiens
ctagctgggtcctgtcccacggtcctacatggatcatctccctgacaaccagcatcttagcatgattcagatgaatattacttctaaaaccctgagcttcacaattctcccaaaaaattgcattatcctgggagctgattcaactgatgctccactcaaatttgattgctatagtcacagtctcaactatcatgaggattgaagaagtaaaaatccatgcagatcatgatacttttcagaaaacatcaaatagcarttgtgccatgtcttttatctcagtgtgttggttctttttttgtcccactatttctttttttgttattacgtcgcagaaccaaggttttttttgtttttgtttttgttttctaaaagaaacgattacaaaagattgctgtttccgctgcctatgaaaacagaggaagctagtcctaaggcttctgctggaaggaagccctatttctattttcattggaaggttctcaaagcaagttaatgaggatttctcagggcccgatgtttgcctcttgccctccataatgtcagccaattatcatgcagatatatttcatgaaattccatggaatagatacatttcatggagctttttcctacagcattttttttttttcaaatcctggaac

SEQ ID NO: 861071 - DNA, 641 bp, Homo sapiens
ctagctgggtcctgtcccacggtcctacatggatcatctccctgacaaccagcatcttagcatgattcagatgaatattacttctaaaaccctgagcttcacaattctcccaaaaaattgcattatcctgggagctgattcaactgatgctccactcaaatttgattgctatagtcacagtctcaactatcatgaggattgaagaagtaaaaatccatgcagatcatgatacttttcagaaaacatcaaatagcaattgtgccatgtcttttatctcagtgtgttggttctttttttgtcccactatttctttttttgttattacgtcgcakaaccaaggttttttttgtttttgtttttgttttctaaaagaaacgattacaaaagattgctgtttccgctgcctatgaaaacagaggaagctagtcctaaggcttctgctggaaggaagccctatttctattttcattggaaggttctcaaagcaagttaatgaggatttctcagggcccgatgtttgcctcttgccctccataatgtcagccaattatcatgcagatatatttcatgaaattccatggaatagatacatttcatggagctttttcctacagcattttttttttttcaaatcctggaac

SEQ ID NO: 861072 - DNA, 736 bp, Homo sapiens
caagaggccagccgtgttctgaaacagcgaaggaagcacgagctgatgaagggggcgtgtattgtaggaagggcagcgcacagagctcctctgacatcactggaggggaagctttatctttcagccatttgccctgttatgtaaacatcttaaagatcttctaaagcagcccttggtttctgaaggcacctgagaaagtgagtgtcattagttaggctgctattagtyaggctgttggcgtctgtgctggaagaatccattgcttggagggatggcctggacaaggctcaggtctttggggcttgtctccatgcagactggaccgagccagggtcactggaagatctgcttgaactgacctcagcctctaaagggcacctctttctccaagttgcttcatggaaacgagcaaactctgcccatttggaggcagcggctcttttctctgctcagatgtaaactgagtttattttcatttcacaatcagtaaccagcttaagacagaattttaaatgtatgtataaagtttacatataaatcccaatacaccttttctaacatctgcctggggagcagcttatttgggggctgacacaggcttgttttaccactttgcacatcttttcatcctatgtaattgtaaagaagacaatgtgtggttctcgaaacaatctcattgtccagtgacagcacgatgaaataaattgcagtgaacacatatgggaactatcaggcc

SEQ ID NO: 861073 - DNA, 646 bp, Homo sapiens
actcggcttacaggaccctgagagggagtgcccccttccatttcgcaccctggtcatctcttttgttttatgctagtctcgaccctagtgaagaggtgggaatcttctgaaacatgaatgagagagtgatgataatagataaatgtggaagtgggatatcaagaaacagaggggagtccctgcctggtgtgctgtttgttctgcagaaatggggtcgggaaatttgatgaagaaaagctttggcctgattcccatggagaatagcgtaaggaatttttttttttttgcagccctgagatcttggcaaccagcacattatcttactgcttttcacttcaagaacctgaggttagaagtgaagtgctttgcccccactacactggaggttggtaggaggtgggtaaggtggcagtgggactaaagtatagatcttcagagagcgacagagagtggccttgagtcccagtgtccgggctcaaacatggctccatcacttcccrgttgggtaacttaaggaaaggggcttatctccatgtctctgtttcccgattcttaaacgagggattatggggttcctttgagggtgatcaaaatgttttggaaatagagctggtggttgcccaatgtggtgaatagactaaatgtc

SEQ ID NO: 861074 - DNA, 604 bp, Homo sapiens
ttacaacgatgtgttatgtggaaagaagagaaccaatggtaatttcaattgtcacagagatgagattaacttgatataagcacctaaggcaatctttctttcatcaaagatcaaggaggacaccataaccaacaaacaatggccatcctcaaggctctgcacagyttaagattacagattaggtcctacactacttccagatcaccaataagtgtattaatatgtccataaaggatcactgataaattgttgactggttatcaaggaagacacataagtgaacgtacaacatgtctgcatcattatcttcaaaatggaagtctcatttgttaaaatttttgacatacaaatgttctctgatgaatacccataggccctatgttcctggcatgcccaggagtggtaccaaaagccctgctgcagtagataatgtcacagggaactttaagctgtttatgagaaacattaggaaatgagaggccactgtgcagggcagatggtgggatggatccagccagatggtcaatggtggtctggaacaatcttccatttgtgaagatggctgactgctgactctgaaggcagaaggaactttaagcctgtg

SEQ ID NO: 861075 - DNA, 604 bp, Homo sapiens
ttacaacgatgtgttatgtggaaagaagagaaccaatggtaatttcaattgtcacagagatgagattaacttgatataagcacctaaggcaatctttctttcatcaaagatcaaggaggacaccataaccaacaaacaatggccatcctcaaggctctgcacagtttaagattacagattaggtcctacactacttccagatcaccaataagtgtattaatatgtccataaaggatcactgataaattgttgactggttatcaaggaagacacataagtgaacgtacaacatgtctgcatcattatcttcaaaatggaagtctcatttgttaaaatttttgacatacaaatgttctctgatgaatacccataggccctatgttcctggcatgcccaggagtggtacyaaaagccctgctgcagtagataatgtcacagggaactttaagctgtttatgagaaacattaggaaatgagaggccactgtgcagggcagatggtgggatggatccagccagatggtcaatggtggtctggaacaatcttccatttgtgaagatggctgactgctgactctgaaggcagaaggaactttaagcctgtg

SEQ ID NO: 861076 - DNA, 643 bp, Homo sapiens
ccacttgaaactgtgagtccattaaaatctcttttcctttataaattactcaatctcaggtatgtctttatcagcagcatgaaaacagactaataacactgtctctaccaaaaataattcttttaaaaaccagccaggcatggtgacacgtgcctgtatttccagctactcaggaggctgaracaggaggattggttgagcctgggaggtcaaagctgcagtgagctgtcatgatgccactgcactccagcctgggtgacatagagaggctctaggatctgcagcagcagcagtgacatcctgcaatggaggcaccaggttcctcacccgcaaaccctcaccagccagtgtgcagctgcaaatgaagcatcagaaggggtgaggacatctaagactcttaggaagcggaacgatccccttgcaggcccagccttacaagcacaagttgagtgctcagcctgtaactgggactgcacagagtggggaaccagctgacctgggccaggagcacaccagtcatcttggggttttatacttctcaaaataattgctagaggacagtacacagtgtaatcaggaccaaacaaacttcatacccattattctctcacctccacaggctagcacagcttgctctaaacac

SEQ ID NO: 861077 - DNA, 664 bp, Homo sapiens
taaaccgtttgctgtttgatcatatagcctccagtggaaagctgagctggtcacaatccctttggcctttttggctcccaacagataaagagtcaagacccatcggtgtgctatattcaggagacccatctcacatgcaaagacacaataggctcaaaatatagggatgaaggaatatttaccaagcaaatggaaagcaaaaaaaaagcaggggttgcaatcctagtctctgataaaacagactttaaatcaacaaagatcaaaaaagacaaagaagggcattacacaatggtaaagggatcaatgcaacaagaagagctaactatcctaaatatatatataccaaatacaggagcacccagattcataaagcaagttcttagagacctacaaagagacttagactcccacacartattgtgggagcctttagtaccccactgtcaatattagacagatcaacaagacagaaaattagcaaggatattcaggacttgaactcagctctggaccaagtggacctaatagacatatacagaactctccaccccaaatcaacagaatatacattctcagcaccacgtcacacttattctaaaatcgaccacataattggaagtaaaacacccctcagcaaatgcaaaagaacagaagtcataacaaa

SEQ ID NO: 861078 - DNA, 656 bp, Homo sapiens
agctaggtgactgccaaccccagccatgaagtttcaaagtttattttctggagcgggtaaatcagagggtctctagactgagagaaatgaaacaattgagggcagaggtatatattgaaaacaaaagaattcaatatccaaaaaatttacatactaaataccctgtttctcctctaggttctgataatgctggaagccaaatgtattcttattagtcaggcaactagaagtgtcctctctggggaatgtaatcagcctgaagacaagacctaaagatactgataccaattgtttcccaaatgaaatagccctgccataccatcctactaagaagaccacaatggtaaggtcgaatgaagagagctttgaattagcttctcaatatctcaatgttacatatgaagtgwtagccaaaaatcattagctatttgaggaaaatctctaatatgagaaagtgaccaaaagcaactgggatgaaacagatattagagattttaaaaagttgaaaacaaataaaagctatcctcaggtacagaaaatatattgcactcatgaaataataacagaatacttgaaataaaaagatcattcagataacacaaaaaagaagctcctagaaagtaaaatatgaaaaataaggtttggaatcgctcccc

SEQ ID NO: 861079 - DNA, 609 bp, Homo sapiens
aagataaacaaaattgacaaaactttagccagactaagaaaaatagaggacccaaataaataaaatagatgaataaacaaaataagagacattacagctgataccatagaaattcaatgatcattagtggctactatgagcaactatgttccaataaattggaaaatctggaagaaatgaataaattcctagacacatacagcctaccaagattgagccatgaagaaatccaaaacytgaacagaccaataacaagtaaagagttggaagccgtaacgagaagtctcccagtgaggaagatcctgggacccaatagcatcactgctgaaatctaccaaacatttaaagaagaactaataccaatcctactcaaactgctccaaaaaatggacaaagagagaatacttctaaactaattctgtgaggccagtattaccctgataccaaaaccagacagagacacatcaaaaaagaaaactacaggctaatatctcttgcaaatattgctgcaaatatcctcaataaaccagcaaccaaattcaatgatacattcaaagctcactcatcatgaccaagtggaatttatcccagggatgcaaagatggttca

SEQ ID NO: 861080 - DNA, 685 bp, Homo sapiens
tggtgtatttaagaaccttttccccaccaccctcataaaaaagtttctcctaggctttcttctgaaggttttacatcattgattttcacatatataatttgaatatatctggaatatatttttcataaggtataaagttaaacatctgaggttttttctcttcatatggatagcaagtttcctcagcactaatctttcactaatttagaatgtcatgtaccaaactcccttattaaaagaagtccgtgtctggatggatttgaaacattgctctatytttccattcctgtgctggtaccacactgttttcattatgtgtggcagtttcagttattaagttaccatgcctgtgctccaaatccacccttctgctctctgctttgtggtgctgggaccgggactctgcaaaccccatttctgctttgcaatttggggtttgggttaggtttagaactgaggataggattaaggttaggttgaggttagggcccctgttaggctttgccaatagtgggctctcaaaagagatggaaaggcttgggggagaggaataaggacttgctccttcttatctggttataatccctatgtgtctcactccaccctcacatcttcatccagggagcacccgtctatcatggctcagtagttcaaccagttggcagttttcccaacagttgcatag

SEQ ID NO: 861081 - DNA, 604 bp, Homo sapiens
cacacacatcacttctatttacattccactggggacaactagtcacatgaccccacatagaggcaagagaggttcgaataggccaaccaacattgggaaaaatctggaaggtaatgaggttgaggtggcaccaaggacactccacttagccgtggctgagtgtagatgagctacgttcatgtcaacacacttgacagactataaatggatgaacagcaggtgggatctgtctccccgagtgtgaattcccactctgtcctttacttacagagttccctagagcaagtcatccaacctctttgagcctgcttcgctyattagattcagccatacgtaaagcacatagagcacctagcacagtgcctggtagataagaaacattcagtcaatggtatgcaacaatttaggtgtaaactgcaggtacctggaatccagaactcttattccatccagagatgtgtacctatgaggcctgaccctgttgtaggctctgttttaaaattaggagattcaccgggcacagtggctcaagcctgtaattcagcactttgggaggctgaggtgggtggatcacctgaggtcaggagtttaagaccagcctggt

SEQ ID NO: 861082 - DNA, 604 bp, Homo sapiens
cacacacatcacttctatttacattccactggggacaactagtcacatgaccccacatagaggcaagagaggttcgaataggccaaccaacattgggaaaaatctggaaggtaatgaggttgaggtggcaccaaggacactccacttagccgtggctgagtgtagatgagctacgttcatgtcaacacacttgacagactataaatggatgaacagcaggtgggatctgtctccccgagtgtgaattcccactctgtcctttacttacagagttccctagagcaagtcatccaacctctttgagcctgcttcgctcattagattcagccatmcgtaaagcacatagagcacctagcacagtgcctggtagataagaaacattcagtcaatggtatgcaacaatttaggtgtaaactgcaggtacctggaatccagaactcttattccatccagagatgtgtacctatgaggcctgaccctgttgtaggctctgttttaaaattaggagattcaccgggcacagtggctcaagcctgtaattcagcactttgggaggctgaggtgggtggatcacctgaggtcaggagtttaagaccagcctggt

SEQ ID NO: 861083 - DNA, 614 bp, Homo sapiens
tacctctcaaaataccaattcacatatgcatttggcccactgattgcccttctaagaggcagcctgcagatatatccacacgttgtagaaacacacctagaaagatattcttgacaaaaacagtgtgtggtagcaaaagactggaaataacataaccatccatccagaaaaggttaaataaattacagcgctacattttaatagaatacaatgtggctgttaaaataataagggacattgttatgtactgatatgaaatgatattcaagatacatgatatatcagtacacacaaaaaagacatggaacggagcttataatatccttccattgatggaaacataaatgtgctcaagtaatrtatcttgaaaggtccataaaaagcaggatgcagctgttacctctggggatgggggctggtcgactgggatactggaggcgaaaccctgaggaagaattatttgctatattatctttttttattgtaggaggttttttgttttgctttgtttcgtggtttcttttttttaaccaagtgattacttaaatctggaaaattttaaaagccaagaaaaagaccaacactggtggggccaatccattttctctgggact

SEQ ID NO: 861084 - DNA, 633 bp, Homo sapiens
ctcaattccctatatctgccatctggcccatgttccatgggacaggctagggactcagaagttccacacagagaaggaatgaatcccctgcttggccactcccagattccttattgtaaactgcatcctggtgcatttgccacagaggatcactctgagagtataygcaagttattgctcccaggtgcctttaccatatagggagaattcataaggcaacaggttcaccccagggcgggatggagactgccagcccttaggcaatacaattaccaggcctgaggcttccaaagtgctcccacactgggcacaatgggatcaatcagctgagtctttgggaaactccaggtcagaggagccgggggagtccagcgttgacagagcggaggccagtatcctggtgctagaaagggctgcagtaaccactctgttcctgatgctccctagggaaggatcctcaacaagtgtcttattttattttattttttccaagcaaatgctttatttgcatagggacctgaacctagtcccaagtcaacacatataaatgttccgctttttttggactgatattgtgacaacttctccgttgactttgccattcgagtaacattttgatctttcatgccccaa

SEQ ID NO: 861085 - DNA, 633 bp, Homo sapiens
ctcaattccctatatctgccatctggcccatgttccatgggacaggctagggactcagaagttccacacagagaaggaatgaatcccctgcttggccactcccagattccttattgtaaactgcatcctggtgcatttgccacagaggatcactctgagagtatatgcaagttattgctcccaggtgcctttaccatatagggagaattcataaggcaacaggttcaccccagggcgggatggagactgccagcccttaggcaatacaattaccaggcctgaggcttccaaagtgctcccacactgggcacaatgggatcaatcagctgagtctttgggaaactccaggtcagaggagccgggggagtccagcgttgacagagcrgaggccagtatcctggtgctagaaagggctgcagtaaccactctgttcctgatgctccctagggaaggatcctcaacaagtgtcttattttattttattttttccaagcaaatgctttatttgcatagggacctgaacctagtcccaagtcaacacatataaatgttccgctttttttggactgatattgtgacaacttctccgttgactttgccattcgagtaacattttgatctttcatgccccaa

SEQ ID NO: 861086 - DNA, 628 bp, Homo sapiens
gaaaacaaccaggtgggaggctataacctgcagagccataggcgcagagctgccaaagactatgggagcccgcctcttgcatcagtgtgacctggatgtgagacatgaagtcaaaggagatcattttggagttttaagatttgactaccctgctggatttcaaactcgcatggggmctgtagcccctttgtgttggacaatttctcccatttggaatgcctgtatttacacaatgcttgtacccccattatatctaggaagtaactaacttgcttttggttttacagtcttataggcagaagaaacttgccttgtctcagatgagactttggactgtggacttttgaattaatgctgaaatgagttaagactttgggggactgttgggaagccatgattggttttgaaatgtgagaacatgagatttggaaggtgccaggggtggaataatatggtttggttgtgtcccccaaccaaatctcatcttgaattcccatgtgttgtgggagggatctggtgggaggtaattgagtcttgggggaaggtctttcccatgctgttctcatgatagtgaataagtgtcacaagatctgatggttttaagaaggggagtttctctgtacaagct

SEQ ID NO: 861087 - DNA, 605 bp, Homo sapiens
tgagatccactactgggaaattctgggagctccagggaagagctgcacagcacatttctggctaaataaataaggttttctatcttgatttattcattcagcgagtacatgtctccatgtcaaaggctgacctaagaatcttccttataaaaattcagcaagcatatcattgcattttttttaattaaaaggattgtgtgacaagggaagcagtattctacagtttatcaagaatgagtagaggaatcmctatacaaagtataatttgtgccttttttcatatctgactattctatgtacttttttttttttttttttgagatggagtctcactctgccaccaggctggagtgcagtggcgcgatctcagctcactgcaagcgattgtcctgcctcagcctcctgagtagctgggattacaggcatgcaccaccacactcggctaatttttgtatttttagtaaagacagcgtttcaccatgttagccaggatggtctcaatctcctgacctcgtgatccacccgcctcggcttcccaaagtgctgggattacaggcattgagccatcgcgtcagcctttctatgtacttattttgtagaattcc

SEQ ID NO: 861088 - DNA, 605 bp, Homo sapiens
tgagatccactactgggaaattctgggagctccagggaagagctgcacagcacatttctggctaaataaataaggttttctatcttgatttattcattcagcgagtacatgtctccatgtcaaaggctgacctaagaatcttccttataaaaattcagcaagcatatcattgcattttttttaattaaaaggattgtgtgacaagggaagcagtattctacagtttatcaagaatgagtagaggaatcactatacaaagtataatttgtgccttttttcatatctgactattctatgtacttttttttttttttttttgagatggagtctcactctgccaccaggctggagtgcagtggcgcgatctcagctcactgcaagcgattgtcctgcctcagcctcctgagtagctgggattacaggcatgcaccaccacactcggctaatttttgtatttttagtaaagayagcgtttcaccatgttagccaggatggtctcaatctcctgacctcgtgatccacccgcctcggcttcccaaagtgctgggattacaggcattgagccatcgcgtcagcctttctatgtacttattttgtagaattcc

SEQ ID NO: 861089 - DNA, 608 bp, Homo sapiens
ttatttttctttagcaaagggcaagatgaggttagggtcataagtaagttggtttaaggaaaagaaatataaaatattgtgcacactgattttctgaccaaattaatgcacagtgtttaggtattacaaggtcttggaaaagagagaatatgcaaatatattaataacttgagaaataaagaattttaaaatatatgtkaagtttctattcatttcacccttgcacagtggctatatgctctttggagtatcatcctactttaaaatgtatgctattagagcaaagttattatttatcatttatttgaaataaaatatttccttcctttaattataatttaataaacagacttgaacttcacctaaagtcacctaatttgtattaattttagaaatttcctattcccaaatcttaccttgcaagtgtttccccagttccccttaaacaaattgtcaacctttcagaatattaattgtgcaaagacattgttaatagacataacttattaacaagcacctcttcatttcacaggctgtataaaaaggtaaaggctatagttcccatctatagaaaagttagaatcaaattagaaaaacatgattattgg

SEQ ID NO: 861090 - DNA, 627 bp, Homo sapiens
gtacaactcaaaaagctgtaagctgaaaactcactgagagtttgggcagtaagtccctggtgttgctcatacccagagcattattatccccttaatcacctctctctctctctggacagtggtctgtcttgatctttctgggagaggcaacaaagcagctgtggtagaatttgatgccatgttgatggcgttgcactgtttcctcagattytcacatggatgtgctccctcgtggctggccttccatgcagaacagagcagtctctcttcccagaaaggcagctgagcttcccagctgtggtatcttggggaaatgaagcacattcccactgctgtagaatcatcttagctttttccactttgaaagctggttcccagagaaaagatactaggcaatttttttttagagtgctgattgtattactgtcaaatcaatggactaatcacctatatgcattcttctctctccaactatgaaatttttaaatgggagaacagagagcttgggaagaaggaagcaacaagggctttatgcctcggtggtagaattctaagattgaccctcagtgaccctaacccttgtataatccaatccccagccatttgaatgtgggtggaacatgtgaa

SEQ ID NO: 861091 - DNA, 628 bp, Homo sapiens
gatgtatttcatgtatgcatgcctgcatttttatatgtatgtataatatatgagatcacaataatctccccaaaataaataatcacactaattgatcatagttggatgatgcttactacctcattattttgaaaactaaaaaatacatagaaaaaaattcagcatttattattttcctatagaaaytgtaccatttggaagaagagttgtaaatgaggcatttctctttatagaagttcctagctaatgcatgaaaaaaaatgttagaattagactataagaatttttcaaaccccaatgaattcacctaggatgtaggttgctaacaacagcatctacaaacatcataaaaagaaaataagtctccctccagaagaaactaaagctacccacaagcctccccctgcccacaaccataccaccaattaattttcagatttatttgatgaagtctttacacataactatcgatttataggaagctcagaggacagagccgtgtgaaatactatctgcaaaatccagactacagacagaatagcccagtttattaaatgaataaattgcaaagagagagagaaagaagcagagagagagagcaagagagggagcctataaattaaaagtt

SEQ ID NO: 861092 - DNA, 628 bp, Homo sapiens
gatgtatttcatgtatgcatgcctgcatttttatatgtatgtataatatatgagatcacaataatctccccaaaataaataatcacactaattgatcatagttggatgatgcttactacctcattattttgaaaactaaaaaatacatagaaaaaaattcagcatttattattttcctatagaaactgtaccatttggaagaagagttgtaaatgaggcatttctctttatagaagttcctagctaatgcatgaaaaaaaatgttagaattagactataagaatttttcaaaccccaatgaattcacctaggatgtaggttgctaacaacagcatctacaaacatcataaaaagaaaataagtctccctccagaagaaactaaagctacccacaagcctccccctgcccacaaccayaccaccaattaattttcagatttatttgatgaagtctttacacataactatcgatttataggaagctcagaggacagagccgtgtgaaatactatctgcaaaatccagactacagacagaatagcccagtttattaaatgaataaattgcaaagagagagagaaagaagcagagagagagagcaagagagggagcctataaattaaaagtt

SEQ ID NO: 861093 - DNA, 647 bp, Homo sapiens
atgttatggatagtgaagtttacacacattggcatttgttttgagtaaattataggtgggaatagctattttatgctgtggacattgtagagtctaagataagtacctttcctgtgaggttagtgaacggaagtttttggctttatcatttgaggcatttgctctgctcctcctactctgccttttgggtgggcttatcaggttgtccattggcaggcagggctctaagtgcagtaacttgatttgctgttgtagttgcttaggcacagcagcacttccgaaagagtgatggcactgctgaggcgcactgagcatcccactgcaggaaacactgaggtgtgcyctaagcaacaaaaacacctctcccaggcacccacgctcgattttggaagcctcttgttacatatgtgtgatcaggaatagctttgaagtaaatccaagatacgtgcatattacaagtataatatctgagtacttaatatatatcaagtttgaagcttggctgttgctgattgatgtttagctctagacttaaagttgctttcaagtgataactgtcttcattttagacttgggaagatacacatgcaaaatgggaacaagcaacaaaactaatccttagctatccaaaagcccaaatggaagat

SEQ ID NO: 861094 - DNA, 647 bp, Homo sapiens
atgttatggatagtgaagtttacacacattggcatttgttttgagtaaattataggtgggaatagctattttatgctgtggacattgtagagtctaagataagtacctttcctgtgaggttagtgaacggaagtttttggctttatcatttgaggcatttgctctgctcctcctactctgccttttgggtgggcttatcaggttgtccattggcaggcagggctctaagtgcagtaacttgatttgctgttgtagttgcttaggcacagcagcacttccgaaagagtgatggcactgctgaggcgcactgagcatcccactgcaggaaacactgaggtgtgctctaagcaacaaaaacacctctcccaggcacccacgctcgattttggaagcctcttgttacatatgtgtgatcaggaatagctttgaagtaaatccaagataygtgcatattacaagtataatatctgagtacttaatatatatcaagtttgaagcttggctgttgctgattgatgtttagctctagacttaaagttgctttcaagtgataactgtcttcattttagacttgggaagatacacatgcaaaatgggaacaagcaacaaaactaatccttagctatccaaaagcccaaatggaagat

SEQ ID NO: 861095 - DNA, 633 bp, Homo sapiens
tttaagagacaagaaaaacctgtcacacattgatattgatagtaattgataaaataatttgccattctttactgcacacaaactaggctgtgacaacaaggtaaccagaaattgtgtatgctctcctataaataaatgtcttactgttttcaaacttacgtttagttcrttttatttgatggttaaagtattttgaatgccttatcttgtgtctgtatctgataacttttttattgtctctatgtctgtataggtacgtttgtgtgcttgggaatatggtccatgcaattcaaataaaaacgaaactgtgtcagttggttgaagtaacgatggcaaggagagatgacctctcattttgccgagagatgaaatttaggtgagttctcaaaagagcaatgtagggtcttgtaaatcttaatttgttgaatgaagtacagaaatagagtagatatctggttattggtaggaagaaagacataaaaagagagcagtttacatgtttgtttttctctgtgtctctcctcaaatttccctaagctttgtgcctgtggcaagcctccctttttctaaaactctgctgtacttgagctaagaatttgattctgtttccaatctgatagcataactaaaggc

SEQ ID NO: 861096 - DNA, 578 bp, Homo sapiens
cataaccttaaacataactgaaaagtgtccaaattacaggccttacacattactgtgggcttgaaaaataatatagattgtctttaaagcaggcaagaaaatgtataaacttccagaagaatgagtaaaaataaaaataaaaaaacggttcacaccaaaggtagtaatactaggaataaaagagggctcaacactgcaggttcttagaggcaaaagttaataaagccttgtttttggttgtgactctttgccttaaaacattatacacggccaggcatggtggctcaygcctgtaattccagcactttgggaggccaaggcaggtggatcacctgaggtcaggtgttctagaccagcctgaccaacatggtgaaaccctgtctctactaaacatacaaaaattagccgggcatggtggcaggtacctgtaatcccagctactcgggggtccaaggcaggagaactgcttgagcccaggaggtgcgggttgcagtgagccaagatcgcaccattgtactccagcctgggggcaagagctagacttcatctcaaaaaaaaaaaaagaaaaaagttacaca

SEQ ID NO: 861097 - DNA, 578 bp, Homo sapiens
cataaccttaaacataactgaaaagtgtccaaattacaggccttacacattactgtgggcttgaaaaataatatagattgtctttaaagcaggcaagaaaatgtataaacttccagaagaatgagtaaaaataaaaataaaaaaacggttcacaccaaaggtagtaatactaggaataaaagagggctcaacactgcaggttcttagaggcaaaagttaataaagccttgtttttggttgtgactctttgccttaaaacattatacacggccaggcatggtggctcatgcctgtaattccagcactttgggaggccaaggcaggtggatcacctgaggtcaggtgttctagaccagcctgaccaacatggtgaaacccygtctctactaaacatacaaaaattagccgggcatggtggcaggtacctgtaatcccagctactcgggggtccaaggcaggagaactgcttgagcccaggaggtgcgggttgcagtgagccaagatcgcaccattgtactccagcctgggggcaagagctagacttcatctcaaaaaaaaaaaaagaaaaaagttacaca

SEQ ID NO: 861098 - DNA, 578 bp, Homo sapiens
cataaccttaaacataactgaaaagtgtccaaattacaggccttacacattactgtgggcttgaaaaataatatagattgtctttaaagcaggcaagaaaatgtataaacttccagaagaatgagtaaaaataaaaataaaaaaacggttcacaccaaaggtagtaatactaggaataaaagagggctcaacactgcaggttcttagaggcaaaagttaataaagccttgtttttggttgtgactctttgccttaaaacattatacacggccaggcatggtggctcatgcctgtaattccagcactttgggaggccaaggcaggtggatcacctgaggtcaggtgttctagaccagcctgaccaacatggtgaaaccctgtctctactaaacatacaamaattagccgggcatggtggcaggtacctgtaatcccagctactcgggggtccaaggcaggagaactgcttgagcccaggaggtgcgggttgcagtgagccaagatcgcaccattgtactccagcctgggggcaagagctagacttcatctcaaaaaaaaaaaaagaaaaaagttacaca

SEQ ID NO: 861099 - DNA, 536 bp, Homo sapiens
ttctaaccccaacctttaatacaaccaggatgtttttactttcccttttttgtgtaagtagaaagcaaacattggtgaggaaggtagaagatgtgtgtcccctcctctttaattttttttttttttttttgcgacagagtctygctctatcacccaggctggagtgcagtggctcgatcttggctaactacaagctccgcctcccgggttcatgccattctcctgcctcagcctccctagcagctgggactacaggcgcatgccaccatacccggctgactttttgtatttttaatagagacagggttccactgtgtttgccaggatggtctctatctcctgacctcgtgatccacctgcctcggcctcccaaagtgctgggattacaggcatgagccaccatgcccagtctaaaatctgactagtttacaaatagcaaagatttctggaaaacaaagttgggttggtttttttttcaggatcagaaactgttatatttgtattccttctctgtggtgatctagaaaaagctaaag

SEQ ID NO: 861100 - DNA, 516 bp, Homo sapiens
tgcataaaggtgtttatagtattctctgatggtagtttgtattttttaattttcttttgtacttgagatgaaccatatttgcattctaaccccaacctttaatacaaccaggatgtttttactttcccttttttgtgtaagtagaaagcaaacattggtgaggaaggtagaagatgtgtgtcccctcctctttaattttttttttttttttttgcgacagagtctcgctctatcacccaggctggagtgcagtggctcgatcttggctaactacaagctccgcctcccgggttcatgccattctcctgcctcagcctccctagcagctgggactacaggcgcakgccaccatacccggctgactttttgtatttttaatagagacagggttccactgtgtttgccaggatggtctctatctcctgacctcgtgatccacctgcctcggcctcccaaagtgctgggattacaggcatgagccaccatgcccagtctaaaatctgactagtttacaaa

SEQ ID NO: 861101 - DNA, 618 bp, Homo sapiens
tgaaatttgaaaaagtcagagactatcacaacaaaaaagaaacaagatacacaaatagtcaccccctaagttttgttaagaataagacaatcctgcccctcacgcctggctcagtcaccagcaggaggagggcaccctccacagattgcaggagaaggggaaggactcctcctttccctaggtgcacctccactgctgccaccaaggcctggtacagtacccgcaggttcctccccatccccaggtcgggctgggccctgcagcgctcctactcccccttcccagcccccagacttaatgctgataccaccactagcaccgatgccartacaaccgctgtcgccctcaatgcagcagcccaccctacaaggctcctaccaccttgcccccgcgggcaccctcctaccactccagtcgagctgcagtctccgtcgctgccaccaatctcgtgagaccagctgcagagccatatgcaggctccagtttaccacaggtgactcttccttgtcctcctcctccatcctggcttggagcagctgggagggcaaaaccagaaaagcctagaatgggatgcagagagtggtagccttagagcctcaccttgtcacgctggccact

SEQ ID NO: 861102 - DNA, 613 bp, Homo sapiens
gcattcccagcacattctgcagaactttaaaagaaaagggtgggggatggggaattgaatcaatccaacgccacccagagaactgtcctgcatatgtgtgtgagtgatgattgtttggattttaaatatctttaaggagttatcaatattaaaatgtgagttacttargccgggtgtggtggctcatgcctgtaatcccagcactttgggaggccgagctgggcagatcacttgaagtaaggagtttgagaccagcctggccaacatgacgaaaccctgtttctactaaaaatacaaaaattagctgggcatggaggcatgttcctccataccatgctcaggagactgagacatgagaattgcttggactgggaggcggaagttgcagtgaggtgagataaagccactgcactccagcctgggcaacagagcaagactccatctcaaaaaaacaaaaaagaaacaaaaaaagtaagttacttaaaaaaaattgcaagaaatgagtctctatagtgttcttttaaaatacgtgtatgaatatattaatacattgagaatgaataaatgataatataggttaactgtaatctacatggtaagttttgggaatcaa

SEQ ID NO: 861103 - DNA, 613 bp, Homo sapiens
gcattcccagcacattctgcagaactttaaaagaaaagggtgggggatggggaattgaatcaatccaacgccacccagagaactgtcctgcatatgtgtgtgagtgatgattgtttggattttaaatatctttaaggagttatcaatattaaaatgtgagttacttaggccgggtgtggtggctcatgcctgtaatcccakcactttgggaggccgagctgggcagatcacttgaagtaaggagtttgagaccagcctggccaacatgacgaaaccctgtttctactaaaaatacaaaaattagctgggcatggaggcatgttcctccataccatgctcaggagactgagacatgagaattgcttggactgggaggcggaagttgcagtgaggtgagataaagccactgcactccagcctgggcaacagagcaagactccatctcaaaaaaacaaaaaagaaacaaaaaaagtaagttacttaaaaaaaattgcaagaaatgagtctctatagtgttcttttaaaatacgtgtatgaatatattaatacattgagaatgaataaatgataatataggttaactgtaatctacatggtaagttttgggaatcaa

SEQ ID NO: 861104 - DNA, 593 bp, Homo sapiens
aggagtttctgatgtatacatattcatatacacacatttacatatattgcaagcacctatatccatttaggtgtatcaaactttggctctttcatgcatacatataccgtgctcatttatttaaaagagaaaaattactaaaaaaaakatttttttttaacaagaatctctgtttgctaaagttataaagatacctcaagcatgaccgtgatataaatattcatgttcagcattacagaaaagtgtgccttctagtatttaagtctcacaattcctataaactcttagggtctgtgtcactttttaaatcaggaaaaaatagtaagaagaaatgatcacttgaataatgagaaacaacctaaagtagtctattgcttccaagttgagataattgataaataaaataatttgagccaatttgtattagttcttctttttaaatttacagaaaactgttttgacttagtttcaaaaatatgcaaatattagactaactattattttttcttggcattattctagatacacctatacaggtagagcaaaacacagagcaagcactcagctggagaatttaatcaatgcagacaagc

SEQ ID NO: 861105 - DNA, 603 bp, Homo sapiens
tgtagtgagctatgactgtgccactgcactccagtctggacaatacagcaagaccctgtgtctagacaaacaaacaacagccaagtagctataggctctgtgtttaataaccataagaatcaaaatacaatctactgtgtaaagaacatggaaaggtataaaactaggcacatagaccaatggaagagaatagagaacccagaaataaagccaaatacttacagccaactgatcttcgmcaaagcaaaaaaaaaaaaaaaaaaagtaaagtggggaaaggacacccgattcaaatgttcaaatggtgtggattaattggcaagccatatgtagaagaaagaaactggatccttatctctcactttatacaaaaatcaactcaaggtggatcaaagacttaaatctaagacctgaaaccataaagattctagaagataacatcgaaaaactcttctagacaattggcttaggcaaagagttcatgaccaagaacccaaaagcaaacacaacaaaaacaaagataaatggatgggacttaattaaactaaaaagcttctgcatggcaaaagaaataatcagcaaagtaaacagacaacccacaga

SEQ ID NO: 861106 - DNA, 617 bp, Homo sapiens
gtggtttgaaagtagaaatcaataataggagaaaaaatggaaaaggtaaaattatgtggaatttaaataacacactactgaacaatcaatttgtcaaagaagatcaaaatggaaaatatcaaaaaatttctgaatgaacgaaaatggagatacaacataccaaagctatggtatgcatcgaaagcatttctaagatgatatttgtggcaataaatacctacatgaagacaaataaatatctcaaatattctaattttacaccccatggaactagaaaaagaagaacaaactatacccaaagttagcagaaggaaggatataatgaagatcagaacagaagtaaatgaaatagagactagaaaaacaatacagagatcaagaaaacagttggttttttgaaaagaaaaacaaaattcaaaaacctttagctagatggattaaaaaagagaaaagaatcaaagaaatraaatcgaaaatgaaaaagaagacagacaactgataccacagaaatacaaaggattgtaagtgactactatgaacagttatgtcaaccaattctataacctagatgaaatggatatttagaaatgtactacctatgaagattgaatcatgac

SEQ ID NO: 861107 - DNA, 661 bp, Homo sapiens
cctcgacacacaaactccttattctggagatgaaagcaaaaaagaaattagggctatataactgagtggattacagacagagccaaaaaacatgacactggcagtaactgaccacatgccccataccaagacactataacaaaaattacgctggaacaatctgaaaagtttgcccaattgttaaaaatgcagataaagatcatgagttcactctctactgcatttaataaggcccaatagaatgcctcactcttcccggttcacttgcatgaggtgcaaagaggtggattctcagagcaccaaagtatgaaaacaaaacaattgtatccctctaaatgttaataagcacatgtgtaaagattatttttataaagtacatatcaaattcatgtgggtaatttcacaatttggaggaaaagtaaatttgttgtctgctttttgtgtgtgtgtgtgtgtgtgtgtgtgtgtgtgtgtgtgtgtgwgtattctgccgttcatgatgctctccttcagttaagaatggtgaaggttatttctgaggtaggttaagacagctggaaagatgggaaggtttccaaaaagtacctgaatgatctgattagatatgacggatctctgacattttaatgataatgaagttgtaattgagcacagtcattga

SEQ ID NO: 861108 - DNA, 443 bp, Homo sapiens
atcaatactatggtgttacaagcatattgacaggtgaagtgacatagtattttggatttgcttcaaaagtggttgagggtatagttgaagtaagactgaccatgagttgataatagttgaagctggatatgggtacctcatgggggttcattatactattctctctacttgtacatatgcttaaaattttctaaagtgaagaagtaactaaataaataagtactattattatctaggtgtatattgctccaaagctgtattccaggtttcacgagctttttggtatatgctaaaagacagatgygtggtttctcttgtaatatgtctgagtatctccaagaggatgaggtataagatggatttctttattcctgtgtgagttcatttttggaactccttttaacgtagaacttgtaaaaaatgcatacacttcttcagatatg

SEQ ID NO: 861109 - DNA, 636 bp, Homo sapiens
aatttgagtgaattttccagagtgtgctgtgcacaatacattcaaatgaggatatgtgctaagtccagcccagtgaggagtgcttagtagttatgagattatcaatatattcctcacaaagatgccatgcgagatggtagtagtatttactgagatgttatctttaaatcgatcacctgaaaacactcttgacaagaagctatcatcagacatggaaatattacttttttttttttttttttttttaracggagtcttgctctgtcgccaggctagagtgcagtggcgtgatctcggctcactgcaacctccacctcccgggttcaagccattctcctgcctcagcctcccgagtagctgagaccacaggcgcctgccaccacgtccagctaattttttgtatttttagtagagacggggtttcaccatgttgaccaggctggtcttgaactcctgacctcaggtgatccgcccacctcggcctcccaaagtgctgggattccaggcatgagccaccaggcctggccggtatattgcttccttcaacattacaagagatagggtcaaatgcgctatagcatacaatacttaaagtggaatcaaggagataatgtaccacacacaatgaatgaaatg

SEQ ID NO: 861110 - DNA, 629 bp, Homo sapiens
agtctatgtgctgacataggctgaatataactcctatgctcaattaagagataagcttaccatcaaagaaatagaaaataatttgtttttgcatgttcaattttggttactatatgctatagcagaaaagaaaaaatactatataatatgtaataattgacacctttaaatctgaggttggccacatatttagagtctttaaacatttgtagctataatacttttgtaaagggctaatattgagctctaaatatgaaggatccatgctgaggaattccagtcagtgcttcaatacttcaagataartaatttgttgttatgaatatcatataaagttatcagaaacaagtaaaactttcaatataataatacactattattaatataataatctaatctgaattatggcagctcactaaagttgacgccactctattgctgctaccaaatctaaggtaatttaatttcttatattcagcatcatgtctgtgaatgtactaatgcactcagagtaattacttattgaaaacattaagaatgttctgatttggggtacttgatttcatgtgcatattttaaaggtactatgtcattttcccaataaactttattttctctttctgtaagaa

SEQ ID NO: 861111 - DNA, 544 bp, Homo sapiens
ggttcaatatgtcaaagagtttccagagctgctcaacaagggaagagctgggagatcctgaggaggtactgggtattaaggacaggatcctttaacagacagaagtttggtccagataatgagcaagatcacttgttacatgaacgttctgtggtgctaggtttacaaaatgcatgccatagaaagatgttaatgaaaacttacccttttttttttgcacaacaaattttggaggcagattaatacaaatggtaaagacacagagtggggtcagacttcctgacagmtctgtcaataagctctgctcattattagctgtatcacttgggcaagttactgacggtttctgtgcctcaatgtccccatttggaaaatggggctaataacagcatatatttatagtgttgttatgatgattctatgagtgagtacatgcgaagtgctttgaaaagcacttggttcagattaatcttctgtactcttccaccaaatgttagtgtcttcttctccacaaaattatatcatatttgactatacaaaagga

SEQ ID NO: 861112 - DNA, 516 bp, Homo sapiens
gcagcaaggagagcagtgtgttgggatgacatgggaggtttaaaaatctgtcaaataacaacaacaaaaaaaattcttgtccctgtcatcaacttccatgtcatgaggataaaagggaagtttgaaaaattatttgagaaaatatggtaagactggcagcaaattgtaactttaaaaattagtaggcacattaggcaagcttctaccacacctctttcttacccagattcacacacacaaaccaggctgtccaaagcacagtcctgcttaattagatactgaggagccaaaacttttccaccccctcccctcagtccctaagacacaacacatcagtttccatgattgctgttcagcagaaccaggccaatctggttttytgcagcttgcctattaaaaagtgactttcacaccctcctgggttatgtaccaagacctttgcccttttgtggcttagcagaatgatttatttgtgtcattagtcaatctattatttcatccaaaatatttccatta

SEQ ID NO: 861113 - DNA, 509 bp, Homo sapiens
atgacctagagttagagattatcttccaaaagtacctgaaagattatttaatctaacttttcccttaaaaaaatcaggggacatttttaggttaattgatttatctaaattttcagagctggtagatgatagagctaagacatgaggccaagtctactgaatcctaggtaagtaagaactgtagcatcctcagtaagcatctgacatttggctgggagtccactatttattactaactcactaattgagcttgtgttgaatatttsgatttctggaccttaagttcacagaaccaaagacttttagagctctggaatgtcaaagttttcaaagaccctagatgttcataacacaaacaaacttcttgcagccccttggcctctcacctttacctaggagaatctagttataaaaatcttaaaatatgagctacattgctattatagtgtgagtctgtaatgaaaatgagctcatgataacccctccatgtgtgagtaaaaggcgttttt

SEQ ID NO: 861114 - DNA, 509 bp, Homo sapiens
atgacctagagttagagattatcttccaaaagtacctgaaagattatttaatctaacttttcccttaaaaaaatcaggggacatttttaggttaattgatttatctaaattttcagagctggtagatgatagagctaagacatgaggccaagtctactgaatcctaggtaagtaagaactgtagcatcctcagtaagcatctgacatttggctgggagtccactatttattactaactcactaattgagcttgtgttgaatatttgratttctggaccttaagttcacagaaccaaagacttttagagctctggaatgtcaaagttttcaaagaccctagatgttcataacacaaacaaacttcttgcagccccttggcctctcacctttacctaggagaatctagttataaaaatcttaaaatatgagctacattgctattatagtgtgagtctgtaatgaaaatgagctcatgataacccctccatgtgtgagtaaaaggcgttttt

SEQ ID NO: 861115 - DNA, 638 bp, Homo sapiens
atattaaataatctacccagtttgtgtgaaaatttataaggaacagattagcagattctgccaaagtcaaacacattctactttattccaacttttctatttttggcgggctgcaatacaggctactttacagtaaaagaggtggctgactgttgatttacttttcaaattcgcatggacaaaactgaggcaaaatgaagagcctgaagagtatcttctctgtttctttagttactagagggccaaataaatatgtttggaaacttacagcaaacaactaaaaccacattmcccactatacaaacatattaataaataaaatatttaaaaattatttcgaaatggtctaaatagtaccaactccacaatactttgcactgaatcaaagctgccaattttatttctgccaagttttgtttcaaaacagaaataaacttttctatatgttcagcatgatctctaatgattaaagatagttatttacatttccctgaagcttctaaaaatgttttcttatcagtttgctttagcacagagggaagagtgtgaagtgatgtttacttgaacaggtgaagaagaatcaataagtcaatttctaaatattttacctgaaggaaaagacattttaagagagactg

SEQ ID NO: 861116 - DNA, 638 bp, Homo sapiens
atattaaataatctacccagtttgtgtgaaaatttataaggaacagattagcagattctgccaaagtcaaacacattctactttattccaacttttctatttttggcgggctgcaatacaggctactttacagtaaaagaggtggctgactgttgatttacttttcaaattcgcatggacaaaactgaggcaaaatgaagagcctgaagagtatcttctctgtttctttagttactagagggccaaataaatatgtttggaaacttacagcaaacaactaaaaccacattacccactatacaaacatattaataaataaaatatttaaaaattatttcgaaatggtctaaatagtaccaactccacaatactttgcmctgaatcaaagctgccaattttatttctgccaagttttgtttcaaaacagaaataaacttttctatatgttcagcatgatctctaatgattaaagatagttatttacatttccctgaagcttctaaaaatgttttcttatcagtttgctttagcacagagggaagagtgtgaagtgatgtttacttgaacaggtgaagaagaatcaataagtcaatttctaaatattttacctgaaggaaaagacattttaagagagactg

SEQ ID NO: 861117 - DNA, 619 bp, Homo sapiens
ctgaaggattatcatcaaatagcatttagttagagattccaggaatgtagctgatttagggcacagcacaaagccctttctttcttcacatcccaacttttccatcacaatgggaattcccagaagtggctggcctgcaytggttttaaaagaggtcctctgcaattccacttccattatctctgccttactgaggtgaaattttgttttcagggacagattagatctttcactctggaaggaagcacaaaaagcatttttctaacattgtttcaggggtagactcatttttcttctttaattgggattctagagccacttaacccctgtaggctcaggctcactttactcttgggaacaaatttcacccattaacagggacctatatgttgtgcccatagctaatccatttagtttcagcatctgggtctccttcataattaagatttctacccctttttcagtgagacaattgaaaaatttttaaaactcacatttaaataaaactattcacagagttttagaaaagctatttttataaaccagaatttaataccaacacatataactgaccagcaacatgacttaaaaaaaaggacagcttgtaatatttgtacaa

SEQ ID NO: 861118 - DNA, 619 bp, Homo sapiens
caacatggtattggaaattctggccagggcaataatcaggcaagagaaataaatgaagggtattcaaataggaatagaggaagtcaaattgtctgtgtttgcagacaacatggttttatatttagaataccccatcatctcagccccaaaactccttaagctgagaagtaacttcagcaaagtcgcaggataaaaaatcaatgtgcaaaaattacaagcattcctttaatccaacaatagacaagcagagagccaaatcacaaatgaactccaattcacaatcattacaaagagaataaaatacccaggaatacagctaaagagggatgtgaaggacctcttcaaggagaactacaaatcactgctcaaggaaataagagattacacaaacaaatggaagaacattccatcctcatggataggaagaatcgatatygtgaaaatggccatactgctcaaagtaatttatagattcagtgctattcccatcaaactaccattgacatttttcagagaattagaaaaaactactttaaatttcgtatgggatcaaaaaaaaacctgtatagccaagacagtcctaagcaaaaagaacaaagctggaagcatcacactacct

SEQ ID NO: 861119 - DNA, 641 bp, Homo sapiens
accaaggtttgaaaacagacagactggcttcgaaattccttatcactgttctattccacctcatattacttttctgaaggaaaatttttctgtagtttactctcttttactatatgaaaaccagaaagtactagaaagataacattgcattttgttagctttaaaaaaaatccgtttaccatgtattgttcctttatgcccttatttatggcatctcctgatcatatggaacatatttgagaaagccaaaactcctacaagcatgctcaatatcctatacaaactcagtccccaaggaaggtacccaagagtacattgctctgtaaactctgagactgtattcctaacttgtagaaggcagaattgtaaccaaagatggtctttcaygaagccatctgtgtttatcagtattctgccctagagaagttctgggtcaggtcttatttcaggtcagctcgtctttgctctggagtgaaatggaacgaatgagaatgtcttcccagaagccatgtgcagggtcacttcagatgctggagaatttccagtaaggaagagaatcaaagggtcaggatgaaattcttacaggccaacttggaacaaaccacatccttttttaatgtacttggacatttacgattgat

SEQ ID NO: 861120 - DNA, 611 bp, Homo sapiens
ctgttctgtgattcctttttcatgttatgtccaaagtgtatataattgtcttttgtaaaatcttcttgtcagacatatggaaactaaaatcttgccttgatttttttcccaacagagtttcatctcctcatttcgcagtgctgctaaaatacttgccctatgaatattttccttctttctagagcttaaacacagctgaaaatgtaaaactgggattttaaactagaaataaaagtaaacagtaatatataaactgtgacagayacagaaccttttattaagtctgtatatgacatttttaaatggtggtacatttattttgcttttgaagcagcgtttgcaatttaaatgatgaatatttggagatggagattataaaatgatcctatacaaggtcaaggaggaaacactgaatttccagggaaacctgacatactacttaacatttaaaaagtgacatgacctcagtaggaattaaacaatacagaagtggcctccctgtccataaactataatttaattgacctccaacagtcctacattgatctgaagacacaagaaagaacatacacgcaattcagtctgtgagaagttgattgggggttgtccaa

SEQ ID NO: 861121 - DNA, 506 bp, Homo sapiens
catggaaaaaatgcaaaatggagcaagaaaaccaggtttctgcctataaggcagcctaatagtaaagcttggacaaattcagagccaaattttatttggctgtaaatgtggcaggcaggactctaagacgactcccatgaccctgttccctggtggtgttcctgtgattacataatgtcacatgacaaaagagattttgcagatgtaattaagattactcatcagttgaccttaaaatatggagawttatccaggtgggcctcacccaatcacatgagctcttaaaacagttttctctggctggtagcaggagaagtagtcagagagattcaaagcatgaggaggatctgacatattgttgctggatttgaggaaggagcagccatgtgccaaggactgcaagtggcctctggcagctgacagcacctccccccaccggctgactgccatcaaggaaatgcagacattagtcttctgaaaacaaagaaacatttctgccaatagca

SEQ ID NO: 861122 - DNA, 620 bp, Homo sapiens
tgtctgctctttaccaattaggggacaatttattaatttcattctcacttgcaaaaaaaagtctgacaattagagtccaataaagtgtgtagtagagattgttttatttatcatcactctttgtaaatttttcaagtttattgaaacatttaaaataattagtaagtgttgtcagaattataagatttaagtacctataagactttgttacaatgtataacatttcttacaagttgttcacaaagctgttaacaggaggtagggagtgaatttgattctgtggaaatatycaaggctagaataggtatacctgggtcagggttagaggtactcaggtcagagagatcacttcatttgcatcagcagtggccaaagaagactagagagtcaataataatagacggtgtattagtttcccagacctgcaacaaaccactgcgacagtagtggcctgaaacaacagtaatttattctctcacagttctagaggccaggtgtgtgaaatcaaagtgtcaacaggaccatgtttcctctgaaggctaagggagaatcttttcttaagtaaccccacccaatctctactttcatcttcatgtgacctttttctctgtgttcctgtc

SEQ ID NO: 861123 - DNA, 622 bp, Homo sapiens
tattgtggtggcctaccatagaacctacaatatctccaagttatgcctgtggtgtgtgtgtgtgtgtgtgtgtgtgtgtgtgtgtgtgtgtacttgaatactatttggcctttaaaaagaacttactgtcatttgtggcaatactgatgaacctggaggacattatgctatatgaaataagccagacatagaaaaacaaatactgcataatctcacttatatgtgcaatctaagaaagtagaatgcatagaaacagagagtagaaaggtggttacagggrgtgagaaaaaccaggaaatgttggtcagaaggtacaaagattcagttatgcaggaagaatccattctgtatatccaatatacagcatggtgactatagtgagtattattgtattgtgcacttgagatttgccaagagattaaattgtaagtgttttcagtgccaaaaaagaaatagtaactatgtgaggtgatggatgtgttaattagcttgatggtggtaatcattttacaatttatgtgtatataaatacatcataattaaatatatataattaaatacattataattaaatatatataatttttaattgtgaattatacctcaataacagtaagaaaaa

SEQ ID NO: 861124 - DNA, 622 bp, Homo sapiens
tattgtggtggcctaccatagaacctacaatatctccaagttatgcctgtggtgtgtgtgtgtgtgtgtgtgtgtgtgtgtgtgtgtgtgtacttgaatactatttggcctttaaaaagaacttactgtcatttgtggcaatactgatgaacctggaggacattatgctatatgaaataagccagacatagaaaaacaaatactgcataatctcacttatatgtgcaatctaagaaagtagaatgcatagaaacagagagtagaaaggtggttacagggagtgagraaaaccaggaaatgttggtcagaaggtacaaagattcagttatgcaggaagaatccattctgtatatccaatatacagcatggtgactatagtgagtattattgtattgtgcacttgagatttgccaagagattaaattgtaagtgttttcagtgccaaaaaagaaatagtaactatgtgaggtgatggatgtgttaattagcttgatggtggtaatcattttacaatttatgtgtatataaatacatcataattaaatatatataattaaatacattataattaaatatatataatttttaattgtgaattatacctcaataacagtaagaaaaa

SEQ ID NO: 861125 - DNA, 622 bp, Homo sapiens
tattgtggtggcctaccatagaacctacaatatctccaagttatgcctgtggtgtgtgtgtgtgtgtgtgtgtgtgtgtgtgtgtgtgtgtacttgaatactatttggcctttaaaaagaacttactgtcatttgtggcaatactgatgaacctggaggacattatgctatatgaaataagccagacatagaaaaacaaatactgcataatctcacttatatgtgcaatctaagaaagtagaatgcatagaaacagagagtagaaaggtggttacagggagtgagaaaaaccaggaaatgttggtcagaaggtacaaagattcagttatgcaggaagaatccattctgtatatcyaatatacagcatggtgactatagtgagtattattgtattgtgcacttgagatttgccaagagattaaattgtaagtgttttcagtgccaaaaaagaaatagtaactatgtgaggtgatggatgtgttaattagcttgatggtggtaatcattttacaatttatgtgtatataaatacatcataattaaatatatataattaaatacattataattaaatatatataatttttaattgtgaattatacctcaataacagtaagaaaaa

SEQ ID NO: 861126 - DNA, 622 bp, Homo sapiens
tattgtggtggcctaccatagaacctacaatatctccaagttatgcctgtggtgtgtgtgtgtgtgtgtgtgtgtgtgtgtgtgtgtgtgtacttgaatactatttggcctttaaaaagaacttactgtcatttgtggcaatactgatgaacctggaggacattatgctatatgaaataagccagacatagaaaaacaaatactgcataatctcacttatatgtgcaatctaagaaagtagaatgcatagaaacagagagtagaaaggtggttacagggagtgagaaaaaccaggaaatgttggtcagaaggtacaaagattcagttatgcaggaagaatccattctgtatatccaatatacagcatggtgactayagtgagtattattgtattgtgcacttgagatttgccaagagattaaattgtaagtgttttcagtgccaaaaaagaaatagtaactatgtgaggtgatggatgtgttaattagcttgatggtggtaatcattttacaatttatgtgtatataaatacatcataattaaatatatataattaaatacattataattaaatatatataatttttaattgtgaattatacctcaataacagtaagaaaaa

SEQ ID NO: 861127 - DNA, 612 bp, Homo sapiens
atgaacaaagcaatcctttggatataatacaaatatttagaatgaatgagtgtgctagataactttagaaaaacattctttctgtggaatatcactaaatatttaaatgataacaaatgacagaataatagaaagcaaatattttagtaattttagaaatattatttgrtatcaacattcatgacattaagcaaaataatctttaacaactaatgtcattaagccatgagtcatgaagttctatttgggaattcttcaaattttgggaggacaaattaaaagcaaaacgtcaactctgcctcctcacaattttacaaaaaggaaaatctccaaaatcatgtacaacaacatccttgacaaattatcttccaactagttgtaatagaatttaaagaatatgaagaaaagacaaaagtgttagtgagtaaaaaaagaatccaagatatagcttgctcatccattgacctcatttgaaagacaatatgttttattcttacaagtattacccaaggagtatattatcaactgatagtctgagaatttattgtctttacacaataaccgtttaaaacttgaccaccacaatttgataataaaacggtaacaatattt

SEQ ID NO: 861128 - DNA, 491 bp, Homo sapiens
attctgaaggtctcctctacttagaggtggacactgacaacagatgtttaaacacaaaccttggaatgaaataaattataattcacaccgtcaatttttctacctggtttaagagaaagagaataggaccatgtatcacatttcatttttcaccccagtaatacttattaccactgtgactttgggtcaaccatttacmccctctctgttagcttctgcatctgtaacacaggataattttgccaacattgggtaattctggcacatattgacctcataaatgttattttgctctaaaatttttaaaaagtaatatcaataattttatggcatacttccatttaaatcctacagccttctgggagttagagagcagttgcttctattcagtactattagggtgaactaaaatatcagaaacataatttgcataatgtcatgcatgaggtatggtgaatagcacagcctggatttgaacctgtttcctgaga

SEQ ID NO: 861129 - DNA, 631 bp, Homo sapiens
atatatataacaattcattgtactatggcaattatgtttgtttaaaagtttcaacttgactgtgtagatgggatagcagtatgatatcttcatcattttctctgccttttcattaatgatctataatttgacacataaaaacattccattccatcagaaaaagaaaaggttaccagttatctttatctgtgcaggtagatatttggaagacataaacaagcttaattaattcaaattaaaacagccagccatatataatgtatcaggtattgtcattactagacagctaccaaatttttctttgtattgcaattttctgcttcccgtgacaataccrttgatactaaaaacctttaactattgcctaaatcacaagtggaagtaatatgaatgcaaaattctttcatcagtgtcctgcaaacctaaaatgcctacattcttaatctaatgttttaagaaattcttccaaccactggagtccatactttgtctctctttggtcgtaactgaacaaacaagatagggcaattacaaggtaaaaactgctaaagaaaccaatctgcctcatcattttaatttgactcttccctttacaaatatttagttagtaaagtgtttttctcaccccaaa

SEQ ID NO: 861130 - DNA, 631 bp, Homo sapiens
atatatataacaattcattgtactatggcaattatgtttgtttaaaagtttcaacttgactgtgtagatgggatagcagtatgatatcttcatcattttctctgccttttcattaatgatctataatttgacacataaaaacattccattccatcagaaaaagaaaaggttaccagttatctttatctgtgcaggtagatatttggaagacataaacaagcttaattaattcaaattaaaacagccagccatatataatgtatcaggtattgtcattactagacagctaccaaatttttctttgtattgcaattttctgcttcccgtgacaataccgttgatactaaaaacytttaactattgcctaaatcacaagtggaagtaatatgaatgcaaaattctttcatcagtgtcctgcaaacctaaaatgcctacattcttaatctaatgttttaagaaattcttccaaccactggagtccatactttgtctctctttggtcgtaactgaacaaacaagatagggcaattacaaggtaaaaactgctaaagaaaccaatctgcctcatcattttaatttgactcttccctttacaaatatttagttagtaaagtgtttttctcaccccaaa

SEQ ID NO: 861131 - DNA, 589 bp, Homo sapiens
ctttgtagcatattcttttctcccattccccttctgccaggctagtaagaccagtgtcataagagttctaggaaaataaataacatctaagtcctatctctgtacaaggtgcttagtacctgaaagattagttttcaaacaggcagtgaataaaacaggtgtgatgtttaaaaattatcctatttagtaggtatatacacaaacacatacatatatacacatactctctctctmtatatatatatgttgatagagatatataatatatatgttgataaagatatattttatatctatcatatcacatatgtcatacatttatctctatcatatatatcatatttatctctatcatataatgtatatcatatatataattcatgttgatatatatatatattagagaaagagagagagaggatcacaaagaatgggaggagtaacatttgcaaaattgaaaaataggagatttttaccatatcctcccataaaagcatcaattttaagagctacctacaggcaagagtatctctgagggagtctagaagtccaacagagaagttccagaacataactggagcaaaaattc

SEQ ID NO: 861132 - DNA, 655 bp, Homo sapiens
agatactggttctttaaattatatttagtcttacaatgtttaaggaaaggaaagatttgggaacacaagatgtgaggagataatcaactacatatatgatcacaaagaaaatataacttataaatgtttttatgatctcaaaaggtattaactcttatggatatgccttctgccattcaatattttgatrgatactaacatttctatcagtatttctataatcttcataatcccatcaggaaattgtctcctgaatgtatcctcacttatccccattatgcactactttaaacataagctaaatatacaggatttttaaggtagcctattgaaataatttctaatttctcatggactaaattacacccttgattaatttgtaaaaagtgagtttaactgtattatttttaaggttttaatgctttgatataaaagtatcacaatatctagctatagtcacactgaaatttttcaattgcaatatatactgaccattagaaactgttttaattatagtccactgagtgttcatcttttttgtgactttggaaaattgaagatttcttcaaagagagaagatgtttgttcttttactaaagttcagtttggctatattcttagaaatctcttgtgtcttgcataggatttgaatcgg

SEQ ID NO: 861133 - DNA, 582 bp, Homo sapiens
gcagctatgagcagtgaaatttacccttgaggtacacaaaaaaatgccccattatccctttgctgtgggagcagtgctgatgctagtggctcgctctttggtcctggctctgactccaccagcagtaacaaccagcagtggtggaggctgtgggtgcaatagacttttatcatggccactcttctggaagatgtcactgccagcaactcctgactcagctttggcagcagctgccgcatcgaagactgttgtgagtggggaaaggtaatggggctgcaggaatgtgaggatgtagggactttgggacctccaaggcaggatgcagtctagacctccaaggcttggctttcaaaatggcaccttgttgtagctgcttaggactctgggggtgtgttggatccagaataagctcactctctaaagcartaccttctcacagtctccgggcagtttccagtgatggtcttaggtcctgtaagggtcaaaggaccctcccatggctaggattgaaggagtccctaatgggaatgtgtactactggggatctctcacttattctttttccaaactggatagtctctc

SEQ ID NO: 861134 - DNA, 640 bp, Homo sapiens
tgtattatagtgtattatattaaaatgaaaataatggttgtattaaggaaaatataccagcatgttaattaattttcagaattataaaataatactgttttatggaaaatcttattaaaatttttgaaaaactattttcagttcccctttgaggtaataaaatatgtctggtcactgataaatctctgattgaataaaatacagaagacaaagagtaaatgcattgtcactgtataatttgtgaccaaaagagagacagcagcaaaraacgtaagtagagtctgagcaggtttatccatacatttaactgctcttgtcctattctctggctccctgaaaacagacattacttcttgtgccaataagaaagtcactgtacataaatgaagttagtgatagcagcagactgagaatctgcaattaagaagtcacctttggaaaggcctggagagaaatttaagtgttcatgctgcaaagtactagatcatgaaaggaaaaaaatcagatataatataaaaggcattaaactgatcctaagtgattggtcactcgttactgctgcatatatctattgtttcttcctctaggttggacatagtcaatgtcaacatcttgattgttcacaaatctacgaggcctg

SEQ ID NO: 861135 - DNA, 640 bp, Homo sapiens
tgtattatagtgtattatattaaaatgaaaataatggttgtattaaggaaaatataccagcatgttaattaattttcagaattataaaataatactgttttatggaaaatcttattaaaatttttgaaaaactattttcagttcccctttgaggtaataaaatatgtctggtcactgataaatctctgattgaataaaatacagaagacaaagagtaaatgcattgtcactgtataatttgtgaccaaaagagagacagcagcaaaaaacgtaagtagagtctgagcaggtttatccatacatttaactgctcttgtcctattctctggctccctgaaaacagacattacttcttgtgccaataagaaagtcactgtacataaatgaagttagtgatagcagcagactgagaayctgcaattaagaagtcacctttggaaaggcctggagagaaatttaagtgttcatgctgcaaagtactagatcatgaaaggaaaaaaatcagatataatataaaaggcattaaactgatcctaagtgattggtcactcgttactgctgcatatatctattgtttcttcctctaggttggacatagtcaatgtcaacatcttgattgttcacaaatctacgaggcctg

SEQ ID NO: 861136 - DNA, 614 bp, Homo sapiens
ttcataagcataataaattgctgtggctttatgccacaaagtgtgggtggtttgcaacacagcaatagacagatagccagaataccaaggatgtcaaagtggcttgtaaagggacatcctattactatatgaaaactaaaatactgcaaaagccctaggcaggcatacactttcattgtggcattattgataacaaggaatagatacatttgtaagattaaatgaggcagaaatgatgtatacattaataaaacagaaaactatgcagccattaaaatagcataaaatgaagayagcaatcaggaacatgtgtatgttcttaggttaagctaaaatagaaacaccaaataatgtacaattaggtgtgcatttgttaaaacatatataatatttatgaagagtactaaaagtctgtgcaaaagaaaacttctgctaacattaagtattaaaaatttgaatgatgttgtaccagatttttaaaatattttatagagttatgttttctataaaagtgtatataatatacaggtagttccacatttcataaagagtttggtaattaattcttccaaactgggtggggccacagcagaaaaaaaatgaagaaatgtttg

SEQ ID NO: 861137 - DNA, 614 bp, Homo sapiens
ttcataagcataataaattgctgtggctttatgccacaaagtgtgggtggtttgcaacacagcaatagacagatagccagaataccaaggatgtcaaagtggcttgtaaagggacatcctattactatatgaaaactaaaatactgcaaaagccctaggcaggcatacactttcattgtggcattattgataacaaggaatagatacatttgtaagattaaatgaggcagaaatgatgtatacattaataaaacagaaaactatgcagccattaaaatagcataaaatgaagacagcaatcaggaacatgtgtatgttcttaggttaagctaaaatagaaacaccaaataatgtacaattaggtgtgcatttgttaaaacatatataatatttatgaagagtactaaaagtctgtgcaaaagaaaacttctgctaacattaagtattaaaaatttgaatgatgytgtaccagatttttaaaatattttatagagttatgttttctataaaagtgtatataatatacaggtagttccacatttcataaagagtttggtaattaattcttccaaactgggtggggccacagcagaaaaaaaatgaagaaatgtttg

SEQ ID NO: 861138 - DNA, 685 bp, Homo sapiens
ctgggaatattattattattatttgacacagattctcaccctgttgcccaggctggggtgcaatagcacgatctcagctcactgcaacctctcccttccgggttgaagagattctcctgcctcagcctcctgcgtagctgagattaaaggcatgccaccatgcccagctaattttttgtgtctttagtagagatggggtttcaccatgttggccaagctggtctcgaactcctgacctcgtgatccacccgccttggcctcccaaagtgctgggattacaggcrtgagccccgcgcctggccaggaatattattttacccaagagaagttttaatctgtcctaatatccacagatcaacagaatatgggtatcaattacttaaatgaagagcttgataagaatttccaaaaggcatgatagaaagataattgtaaagggggaaacaaagaaagattgggcttaagaatgattagtggagatccaagaggagagcactttgtttggggaatgttattcacgtctacagtaaaaattagggaatttcatttgtaaacaggatggaatctaccagtgttaatggtagttgtcatggatacagttaagcttttcaaatcatctgaaaataatcagcctatacctgtcaatggaacattaagtatagaggaccagagaagtgaagacaaa

SEQ ID NO: 861139 - DNA, 617 bp, Homo sapiens
ccttgagaactgaagcaagataaggatgcccactcttaccactcctattcatcatagtattggaagtcctagccagagcaatcaggcaagagaaataaacaaaggtgatcaaaataggaagagaagaagtcaaactgtctctcttcctggaaaaatatgattctatacataaaaacccatagattccaccagaagrcttctagaactgacaaacaccttcagtcgaatttcagaaaacaaaatcattgttcaaaaatcagcattatttatctacaccaataacatctaagctcagagccaagtaaaaaacataatcccatttacaatagccacaaaataataaaatacctaagaatacaccttatcaaggaagtgaaagatctctacaatgataattttaaaatactgctcaaagaaatcagagacaacacaaacaagtagaaaacattccatgctcatgaataggaagaatccacattgttgaaatggccatacttcccaaagcaatttaaagatttgttgctattcgtatcaaattagcaaagtcatttttcacagaattagaaaaaactattctgaaattcatatagatccaaaaaaatattcaaataccaaaa

SEQ ID NO: 861140 - DNA, 663 bp, Homo sapiens
atgaatgttttattaaaaacgtatgtgattataagaattaaagttatagaaaaattataaggaaaagaaaaatcaactgagcactattaacaccagataagtatgactgtaaatatttctcaagagacagatacatatagaaatggacatgtaggttgataggcagaaataaagtttttaagaatgagataaggatttcacacattattttcagaggaattattaaattttatttgaatttcaagtcaaatgaactctgaagaagtacattcaaaattgacaaactaagtatttcttaacaagaatatatacatatatacattatacaattatatacacagagaaagatataaataaattttgatatgttattgaaggattaatttgacacttatgattgctcctctccccttaggtatatgctagatttccagttaagtggaaataattctggcacagaggtacttaagaaggaagaccagaccatrggtcttcaaataaaaactgcaatgtcagcaataaatgtcaaattgtttccccaacttattgcctggccctaaaaatagcaagcccaggtgagattcttcaggaataggtaggctctcaaatatactttatatctattttccatgctggatcaacaaagtaagactttactggatg

SEQ ID NO: 861141 - DNA, 651 bp, Homo sapiens
cctgaagtccagacctgccaaagaagaaaactaccttcagtgcttcccctgagtttttcttaactgaacctatattgtaggaaggaagactaaaatctgtcaacaaaccaggacagaacttttgtcacaaatcattttccattctgtgggcccaagaggctttgccctagaccattatatgttcttcaagaccactgaattctccctagtaattatttcttgtccctcgacagaattcctcttctccctccttcctacaaactgttttgccaggattcaagcctcccctttttctgtaatcttaagatggtatataagctcctgcccttcattgggaagttggatcttcattctgaaggctttcatatacacaagttaaataaaattatatgtcttttctccaattaatatgmctcttgcaagttcccattagcccttacatgtattttacataatgtcatcttatattctaccatcatgtgtgtgttagtaattaatgtattgcctttcacctccaaatttacctttcaatatatgttctgtaataatagatggaattccttcgagtatttcccttttaaagagagtacgatgttaagctgtgtcagctgagagtgctcggctggcaggaagttcccagaggaaggagct

SEQ ID NO: 861142 - DNA, 643 bp, Homo sapiens
cgaggagatatatctaggagtagaattcctaggatataggccatgcatatcttcacatttactagatactgctactgatattgccattgtagtaattgttcttactattggttttatactaatcacattcccacttgatattatattcacatgatcttatgttagtataagagttatactgkggttcattaaattcattgaaaactattccttctttttctattctcaggaacagtccatatatagggatcactcctacagttgtgtgccacttaatgatggggatatgttctgagaaatgtgttgctaagcaattttgccattctatgaacactacagagtgtacttacaccaacctatgaacattacagagtctactacacaactaggctagatggtatagcctattgttcctaggctacaaacctgtacagcatgttactatactgggtactgtaggcaattgtaatacaatagcaagtatttatatatctaaacatagaaaagggacagtaaaaatatggtataaaagattttttttaaaaaaggcacaactatgtaggccattactgtgaaatggaacttgcaggactggaaattgctcaaagtgagtcagtaagtgggtagttagtgaatgtaaagg

SEQ ID NO: 861143 - DNA, 643 bp, Homo sapiens
cgaggagatatatctaggagtagaattcctaggatataggccatgcatatcttcacatttactagatactgctactgatattgccattgtagtaattgttcttactattggttttatactaatcacattcccacttgatattatattcacatgatcttatgttagtataagagttatactgtggttcattaaattcattgaaaactattccttctttttctattctcaggaacagtccatatatagggatcactcctacagttgtgtgccacttaatgatggggatatgttctgagaaatgtgttgctaagcaattttgccattctatgaacactacagagtgtacttacaccaacctatgaacattacagagtctactacacaactaggctagatggtatagcctrttgttcctaggctacaaacctgtacagcatgttactatactgggtactgtaggcaattgtaatacaatagcaagtatttatatatctaaacatagaaaagggacagtaaaaatatggtataaaagattttttttaaaaaaggcacaactatgtaggccattactgtgaaatggaacttgcaggactggaaattgctcaaagtgagtcagtaagtgggtagttagtgaatgtaaagg

SEQ ID NO: 861144 - DNA, 605 bp, Homo sapiens
ctgaacttgtttatcagttctaatagtttattggtggatctacttttccatttatagaaagtaaaaatcaagcataactatagtatataggaggtaaggtacattcttagagtaaaataaaaaaacaatgaagtcactaccaaaaatgtattattacagtaactatgtctcargagctcgtggggggttgtgattttgaagtgataaaagcaggcctttcacggtgctgactatgtttgctttatctatacttagagtggtgattactcagtatacacttcataaattttttatgctatacatttatattttatctatttttctttgtgagttgtacttcacaataataataggtttaaaagatctaaacaggacatccagttagaatttttgacaaagctcagtgtcatggtctggggattggaggtgagaccatgaggagggagagggtattatctaattattatgatttcttcaaacagtgcatattccacataacatatataacatatttcatcaattccaggacaaaatcaaataaaagatgcacaattactttatgcaccaagaaaggaaaaacaatgctgacaaactatggcacaaca

SEQ ID NO: 861145 - DNA, 557 bp, Homo sapiens
aacaagaagctgtttccttgaagacattgctttcagtcaccatacatgtctaaataatttagcttatcattcattctatgtaggaatgagataagaaaggatatgatggcaggaaaagaaatgctattcattttttatactttagttttattttcttaggatctatatcctatatatatatattttttaaagcactaatttattgcagtctttattttagaaaaatgtgaagcatttttttctcccctaaaatgaatatatttagatgacaagtctttagtgctggtagaggaactaattgattttgtactatagtargaaagtgtttatatgtttcaccagaaataaaatatgtagggtttgtatgtaatcttctgtgtttatcctatgttgatttaccttaaatttgcaacatacatatccacataaatattcatgactttcttatatttcattaaaatgttttatggcttcttaaaatcatcactgtgcttctaaatatttttacgtaaaatcattgtataatgctatactgtgatatacatgaaagtttatct

SEQ ID NO: 861146 - DNA, 659 bp, Homo sapiens
atcaatattgtgaaactgatcatactgccaaaagcaatctacaaatttaatgcaattcccataaaaataccaccaccattcttcacggaattggaaaaaacaatcttaaaattcacatggagccaaaaaagagcctgcatagccaaagcaagactaaacaaaaagaacaaatttggagggatcacattatctgatttcaaattatagtataagaccatagtcaccaaaacagcatggtactggtataaaaataggcacatagaccaatggaacagaatcgagaactcagaaataaacccaactacttacagccaactgatcttcgacaaagcaaatgaaaacaaagtggggaaaggccacctattcaacaaatagtgctgggataattggcaagccatgtgtagaagaatgaaacyggatcctcatctctcaccttatacaaaaatctactcaagatggatcaaggatttaaatctaaaacctgaaactataaaaattccagaagataacattggaaaaactcttctaggcattgccctaggcaaggatttcatgaccaagaacccaaaagcaaattcaatagaaacaaagataaatagcttggacttaattaaactgaagagcttttgcatggcaaaaggaacagtcagcagagtaaa

SEQ ID NO: 861147 - DNA, 608 bp, Homo sapiens
tgtggtccctcattgaaacagaggcaaaagaccaggaatgtcattacttctcagctcccctggctttgggacataacagttacagtactcaatttgggaaatctctttactcccactgtgaaaatatgtccccttttgctaccataaatatttgttcaaggctttccaaagtaaagttgaggattacaaagtttctttcataacatagggaccttttatcccttagacagtttctttgaactgtaagacaaatttgaaacagaataaaggaggaggtagatgaaatagacacagaaaagatatcagggattagtcagccatataaccagtgcttgaatataattttaaactccytgatcttagatattagatgcaaaggagcattatctggctttttatccctttccttttcttcttcaaaatgtagttctcccttgcaggacataatttttgcctggattatttcagggccagaaaaaaataaactttatacaggtagttcagagatagaatatgtgagcatggtgtagggagaagaccaaaattaagaccttaaggatgaatctttaagttttttggcttacctcatgtcacacataatgtattat

SEQ ID NO: 861148 - DNA, 617 bp, Homo sapiens
catttcttagtaagaaaaccatagagaaggaaatgtacacctgcagatgtacactcaacttctgaggtagacaggcagggccaacctacggtattgctctgtgtactagctgtgagtagggtcggcagcttcacaagaaacataagtccagaagtgacaagaaatccacaggcagactctcatcaatccatcctcttggcttaaagttgaaagccaacacctgtcaaagagttagttgttatgcattatcaatcacatttgtatgcatgaagkcatctgctcctctcctgccagagcctaatgtagtgaaaagcagaaggtttactgagtgctggaaaagggaaagagggcgactggaggggagaaggatcacagaaagacaatctcaggagcactaggagataaaagctattaaaagataaaattatgttaattccagttattgtgccactacatatataaaatcatggtcaattacaaacttattttcaacatgataagaaaaacctgcatgttgaacacatctttttatatttctaaaaacagaggaggaatgtaagtcacatcataaacgtgaatagctaaattttttcaacacaattccttgattggtcaaa

SEQ ID NO: 861149 - DNA, 610 bp, Homo sapiens
gaaatccattgaacataacaggtattcagtaaatgtaagtctccactcatgcctgtcctgtcctaagagatagagttttaatgaggacaccacttaattttaacacaaatacaatcacttctttcataatcatttcctcctaaatcaaaagctgacacagaactcattttctgtctctggatctgcttcctaatttgtaaaatgaggtggttagattgtttcccttccgatgtcttcaaaatctggatttctacggctttttcctagctttccattggcctgggaaaatcatktatcccagtcatcaaattctcctgtttgctgagagaaagaataagtttaaatgctttggggtgaatagaaggaaaatgtctcgcatttttcctctatgaaagcatctttttccatttttgctagctgcaaagcactatacaagtatacaatttttgtcactcttactatgattcttcttaccactctcactattctgttttctccatctcccacaattggataggagatgcaagtacttcatgttaggataaatatgtaattaggtctatatataactctatatataaatatataattgttcagaaagaacagtata

SEQ ID NO: 861150 - DNA, 670 bp, Homo sapiens
gagactcacctaacacataaagactcacataaacttaaggtaaaggggtagaaaaagatattacatgctaatggacactgaaagtgagcaggaatagctattattatataagacaaaacaaactttaaagcaacagcagttaaaaagacaaagagggacatatataatgataaaatcctaaatatatcactatcctaaataaatatgcacctaacactggagcttccaaatttataaaacaattactgctagacctaagaaatgagatagacagcaacacaataatagtgataatagtggggaatttcagtactcctctgacaacactagacaggtcatcaagacaaaargtcaacaaagaaacaatggttttaaactatatcctggaacaaattgacttaacagatatttacagaacattctacccaacaaccacagaatctatactgtattcaacaacacatggaacttcctccaagatagagcatatgataggccacaagacgagcctcaatacatttaagaaaatcaaaatgacgtcaagcacccccttacaccacagtggaataaaactggaaatcaactccaaattgatttgaaactccagatgtattgaaacgtgggaattaaataacctgttcctgaatgatcaacaatgaaatcaagaggg

SEQ ID NO: 861151 - DNA, 647 bp, Homo sapiens
ggccaatgtatagctcaggctgtggcttcagagggtggaagccccaagccttggcagcttccgtgtgctgttgagcatgtgggtgcacagaagtcaagaattgaggtttgagaacctctgcctaggtttcagaagatgtatggaaattcctggatgcccaggcaaaagtttactgaaggggcagggccctcatggagaaactttgctagggcagtgcagaagggaaatgtggggtcagagccctcacacagggtccctactggggcaccacttagtggagctgtgagaagagggccactgycctccagatcccagaatggtagatccactgacagcttgcactatgcatctggaaaagccacagatactcaacaccagcctgtgaaagcagtgaggagtgagtctgtaccctgtaaagccacaggggtggagctgcccaagacaatgtgaaccccgctttcgcatcagcatgacctggatgtgagacctggagtcaaaggagatcattttaaaggagctttaagatttgactgccctgctggatttcagacttgcatgggccctgtaacccctttgttttggccaatttatcccatttggaacggctgtatttacctaatacctgtaccctaattgtatctaggaag

SEQ ID NO: 861152 - DNA, 569 bp, Homo sapiens
aaatggagtcttatcattaagccatcatggataagtcaatccgtgcccagtagtcaccagcatctgctgacctctgctgaggtgttgtttgctcttgttttgtgttgatgtttatggctgaggccgccaggccctatttatcaggtttgtgagacccaactgaaggcagtcttctgtctacaggcccctttctgcctttctgagctctttttttttttttgcaggattctggaactcatggctgttttctcttcactgtgctggggtttataagactcactgagacttctcctagcctcatccagccagataacatttttggctatttcttctctgctactcaggatccatgttagtaaagaggcttctctttgagtttgcratctcccagcagtgctttttccctgtgactttactaaaacttacctaggtattctcctcattgcctccccactggagtccattccagaggggaggataagtagacggatgataggattctgagacctacatcttaagccttattcacaacttttgaattcccctcccccatctaatcaggcactcca

SEQ ID NO: 861153 - DNA, 588 bp, Homo sapiens
gttccatataaatgttagaattatttttaagcctttgaaaaatttcattgaaatttgataggaattgcattgaatctgtagcttgctttaaatagtatggacatttttacaatgttatttcttctattccatgaacacagctatctttccatttatttgtgtctttatcaattttttctcatcagtgttttatagtttttggtctataaatcttttcatctcgttggttaaatttacccctttttgtactgatgctattgtaaatggaattgctttcttgacttcttctttgggcagttcattgttagtgtatagacatgctgctaagtggtgtatgttgagtgctgagccatttgtctagtaacctataaaatgctctgatccttytagaactgggtcttcccttgctcttgtacgtgcccttaaaagctgaatgctcgctactaactgatacagaaataaggattttaagcctaaatctgaggttcgagcttggataagcaaacaaacaattatgtgtcacagtgatatttgatgagagatctttggaagaaaagaatttgattactagttttacaatgataagca

SEQ ID NO: 861154 - DNA, 592 bp, Homo sapiens
agatccagagaacatacggagagactgcctctgatgggagaaggacacgtttactaatataaaaaaggaaagagaaagagatggatgaagatgcaggtaaatttagatgagggttattgttttattccccccatagaaagttaagagctaacttctctatggagttagcggcaaggttatcggctaacagtaagaaagatggaagtgagattggaggtttggggagggaagagagggttaaaaagcagtgttttgaggatgcatgccaacactcccaytggccttcttccaggtggctgccagctcctcctaggacagtccagcaccaagatggctaatgtcaatagcaagactttttggacatatttgaaaagtacaggctgatttggtctagtagtctccatttttttttttgcaaggcttatatctattttttaaaacatcaaacatgctgttgcttcactgcctagaatgcatgcctttattgacacttcaaggatataaagcactacatttttggcttctaagggagaattgtctatttggagtgtgcatacaattctattcttgctgaacacacctgccctgagaa

SEQ ID NO: 861155 - DNA, 489 bp, Homo sapiens
gggcccaggcacttattccactgtgaaagtgaaaggttttcaatacaaataaaccatttaggaagggtaaaagtgaccacagagaatgtctttcatcctctgtgtccagcttgccagtttaggaccatctggtaacctcagatactttcccctccatgctctctgataactaaagcagtccctcttatccaattgtaatgacctggaattagggtagtctctgggcctctattttaaaatccttaaagttttawaatacttactgttgtctaaaacacagacttagcatagtgacttgggtgtcacctaacacatctgatattataatggatttaaagggcatgaactacttttcctctgtaagatgacctgcttggtttctaatccagggcaaggctttataatttagtgaaatagagttaacttaagtttcttaaatgtggccctttgctgtttaggtgcaaggggaaagataaggattcaagaaca

SEQ ID NO: 861156 - DNA, 609 bp, Homo sapiens
caccattcagccgggtgcggtggctcacgcctgtaatcccagcactttgggaggccaaggcaggcggatcacgaggtcaggagatcaagaccatcctggctaacatggtgaaaccccatctctactaaaaatacaaaaaattagccaggtatggtggtgggcacctgtagccccagctactctggaggctgaggcaggagaatggcatgaaccyaggaggcagagcttgcagtgagccaagatcatgccactgcactccagcctgggcgacagagcgagactctgtctcaaaaaaaaaaattttttttaataaaaataaataaataaaaagaagtcacaccattcaaatttctaaggaaatcacaaagactcatcacaggttcacggtgatgagaaataggctccacctcttaatgaaaaagtagcatggttggataaaaaatattattgcagccatttttagaaattataatttgtgatatccttcttcaaccccgccccaaatcaggcttcttaactaaaagtgaacttcttttaatgacctatagtgaagtaaatcacatgctgaaatacattaataacaaaaagtgcagtttgacatattctgct

SEQ ID NO: 861157 - DNA, 627 bp, Homo sapiens
cagtaattacaggctgttgttgttcattgtgactaagcctctcccccaaaggaacgtgagtgataaaaggagaaagagttgctgggcagacaaaatggcaggtgtttaatgccctcccacttctttctgcccccatcccctactctcaacattttaacaaacttgtactgagtaaatagtgtcacttagtgacaagcatgcataggaaatcatctgaccaaacatctcttcagccatgctttatgtcaagctgccaaatatttctctttatttcactacatacctctttagtgataccttaataatctctttcccacagatgactcatctttaatccccttccctttcttctccctcttttaacttgtacctagttaattccagaatcctctcctctcctttgattcatgtttacaaacctctcccccartgctgactgtattcatgtctaagcataagactggtataaatgttatttttttcctttttcttggaaccccatatacattggaatatcagtggtttatttaaaccaaagaaaaagaaaactaaattttttaaacatggaattttgatatgaaaataaagaacatctagtgtccataaaagtactattatttgatactt

SEQ ID NO: 861158 - DNA, 569 bp, Homo sapiens
gtgagagaaaggagtcaagcatgaaaaagttttggcctgcaaaaaggaagaaaggagttgcccttaactaagggtaactaaggacggagaagcctgtgagaagaacaggttgggagaggtatctgtagctcagttctgttcatactaaatctgagatgtcaactggagatatcaaatagacagtcygggagaagtccaagctaagatataaatgtaaaacttctcaaagtatcaatggtatttaaagtcttgtgattggataagatcacccagagagtgtgagtaggtacaaaagtccaaggcactccaacatttagaggttgaaaagatgaaaaggaatcgggaaagaaaaaaaagacagagaaggagcagctagaaaattaagacacaaactaagtgtaatgtgtcctggaagtcaagtgaagaagtgtctcaaggaggagagagtgattatctgtgtcaaaagctgttgataaatcaaggaagaggaggcctgagagatagccatcaatttaacatcatggaggtcatcagagactttaggtagagcagttttgatggcatgatgc

SEQ ID NO: 861159 - DNA, 569 bp, Homo sapiens
gtgagagaaaggagtcaagcatgaaaaagttttggcctgcaaaaaggaagaaaggagttgcccttaactaagggtaactaaggacggagaagcctgtgagaagaacaggttgggagaggtatctgtagctcagttctgttcatactaaatctgagatgtcaactggagatatcaaatagacagtctgggagaagtccaagctaagatataaatgtaaaacttctcaaagtatcaatggtatttaaagtcttgtgattggataagatcacccagagagtgtgagtaggtacaaaagtccaaggcactccaacatttagaggttsaaaagatgaaaaggaatcgggaaagaaaaaaaagacagagaaggagcagctagaaaattaagacacaaactaagtgtaatgtgtcctggaagtcaagtgaagaagtgtctcaaggaggagagagtgattatctgtgtcaaaagctgttgataaatcaaggaagaggaggcctgagagatagccatcaatttaacatcatggaggtcatcagagactttaggtagagcagttttgatggcatgatgc

SEQ ID NO: 861160 - DNA, 569 bp, Homo sapiens
gtgagagaaaggagtcaagcatgaaaaagttttggcctgcaaaaaggaagaaaggagttgcccttaactaagggtaactaaggacggagaagcctgtgagaagaacaggttgggagaggtatctgtagctcagttctgttcatactaaatctgagatgtcaactggagatatcaaatagacagtctgggagaagtccaagctaagatataaatgtaaaacttctcaaagtatcaatggtatttaaagtcttgtgattggataagatcacccagagagtgtgagtaggtacaaaagtccaaggcactccaacatttagaggttgaaaagatgaaaaggaatcgggaaagaaaaaaaagacagagaargagcagctagaaaattaagacacaaactaagtgtaatgtgtcctggaagtcaagtgaagaagtgtctcaaggaggagagagtgattatctgtgtcaaaagctgttgataaatcaaggaagaggaggcctgagagatagccatcaatttaacatcatggaggtcatcagagactttaggtagagcagttttgatggcatgatgc

SEQ ID NO: 861161 - DNA, 679 bp, Homo sapiens
aatccccagtgttggaggtgggacctggtgagaggtgattggatcagggaagcagtttcttatggtttaacactgccccccttggtgctgtcatcacgatagcgagttctcacaaaatctggctgtttaaaagtgtatggcacttccctccaccttcctcctgctctgggcatgtggggtgcttgctccctgattccctttcgccatgattgtaagtttcctgaggcctccttagaagctgaacagatgccagcatcatgcttcctatacagcctgcagaaccatgagctaattaaatctcttttttaaataaatcacttagtctcaggtatttcttcatagcagcatgagaatacaaaaaattgatactgaacagtggagcactgctgtaaagatacctgaaaakgtgaacgtggctttgcaactggacaacaggcagaagttggaagagtgtggaggtcttagaagacaggaagatgaggggaaatttggaacttactacagacttgttataataaattgtcgtgaccaagatgctgatagtgatatggacaatgaagtccaggctgaggaggtcacagatgaaaaaacaatagattttggaggggacagggcagaataatacggtttggatctgtgtccccactcaaatctcatgttaaattgtagtccccaatgt

SEQ ID NO: 861162 - DNA, 605 bp, Homo sapiens
aaaaagatatagacatcaatcaaacaatcacactaaagaaaaattcgagttgtgatgaggttttgttatacaaaagaagtctgaatatttgaatgtccatgactaacttaaatatttctaaaattaacctttcaaacagctgctgacataaacatgtttgctgcataagccaaaacttattaccttgaggctgtggagtaagaaagtcacamtccaggtaagagaaaacgtggtggaagcttttgaacaataaagaaaatatataacctaaatcaaatccttgaaatccttcaaggaagcaggttttgattctatatcaaggtttatataattactttacatcttaatgaaggttaaatttattgtactctccctcacccaaataaacaaatcaagtttgatttcatttagaagttgcctttcctaaaaccctccctgcagatgcttatcactgaatgctgtggtccagagctacacctggtggccatacacaaacttacaagaaaccattctgatcctcaacagaagtttaaaaattacccctctgttaatcaaaaatctctcaagacagcaacaggttatttcttgatagctggggaaagttg

SEQ ID NO: 861163 - DNA, 634 bp, Homo sapiens
actgatgtagtagcaaaaggctggcctcactgtttacaggtagttgcagctgtggccgtcttagtgtcagaggctatcaaaataatacaaggaaaggatctcactgtctggactactcacgatgtaaatggcatactaggtgccaaaggaagtttatggctatcagacaaccacctgcttagatatcaggcgctattccttgagggactggtgcttcamatacacatatgtgcagccctcaaccctgccacttttctcccagaggatggggaaccaattgagcataactgccaacaaattatagtccagacttatgccacccgagatgatctcttagaagtccccttagctaatcctgaccttaacctatatactgacgaaaattcatttgtagagaatgggatacaatgggcagtttatgccatagttagtgatgtaaccatacttgaaagtaagccccttcccccagggaccagtgcccagttagcagaactagtggaacttacctgagccttagaactgggaaagggaagaagaataaacgtgtatagagatagcaagtatgcttatctaatcctacatgcccatgctgcaatatggaaagaaagggagttcctaacctctgggggaaccc

SEQ ID NO: 861164 - DNA, 618 bp, Homo sapiens
gggacccacttgaggaggcagtctgtccgttctcagagctcaaatgccatgctgggagaaccactgctctcttcagagctgtcagacaggaacgtttaagtctgcagaagttgtctgttgccttttgttcagctatcccctgcccactgaggyggagtctagaggcagcaggacttgttgagctggggttggctccgcccagttcgagcttcccagccactctgtttacctactcaagcctcggcaatagcagaggcccttcccccagccaggctgctgcctcgcagatccatctctagactgctgcactagcagtgagcaaggctccatgggcgtgggacctgccgagccaggcatgggagagaatcaccttgtctgctggtttctaagactttgggaaaagtgcaatatttaggcaggagtgacccatttttccaggtagtctgtcacggtttcccttggctaggaaagggaaatcccccaaccccttgcgcttcccagatgaggcaacatctcgccatgcttcaacttgcccttgtgggctgcacccactgtccaactggtcccagtgagatgaaccaggtacctcagttggaaatgcagaaatcacctgtcttc

SEQ ID NO: 861165 - DNA, 618 bp, Homo sapiens
gggacccacttgaggaggcagtctgtccgttctcagagctcaaatgccatgctgggagaaccactgctctcttcagagctgtcagacaggaacgtttaagtctgcagaagttgtctgttgccttttgttcagctatcccctgcccactgaggtggagtctagaggcagcaggacttgttgagctggggttggctccgcccagttcgagcttcccagccactctgtttacctactcaagcctcggcaatagcagaggcccytcccccagccaggctgctgcctcgcagatccatctctagactgctgcactagcagtgagcaaggctccatgggcgtgggacctgccgagccaggcatgggagagaatcaccttgtctgctggtttctaagactttgggaaaagtgcaatatttaggcaggagtgacccatttttccaggtagtctgtcacggtttcccttggctaggaaagggaaatcccccaaccccttgcgcttcccagatgaggcaacatctcgccatgcttcaacttgcccttgtgggctgcacccactgtccaactggtcccagtgagatgaaccaggtacctcagttggaaatgcagaaatcacctgtcttc

SEQ ID NO: 861166 - DNA, 604 bp, Homo sapiens
aagggcttattaaaacacagattgttggctctacccctcaccctgagattcttacttagtaggtctgcagtggagccaaaaatttgcatttctaacaacttcccaggtgatgctgaagcggctgatacaggaaccacattttgtttattctctcaacataaaatctcaaggctagtacagaggctccagaatgatgaccagctccttctaacttgctgttccgccaacctagctcatggcttgcatcctcaaaatcacctcatgatccaagggagctcctccaattctagccatcgtgttagcttcagggtagtagkaaaggagtgaaggcaaagggaacatctcccagcctcgtcacctcctttttaggagccttatttgcaaaaacttagtcaaaaggcctcattacagagaaaatggcaaagatactcttgctgagtacatcaacagtccaaataatactagggatctataactaaggaagactggatattgaataggtaacaaaaaaactctgccatactacttaagtctacatatactccaattaccaagtcctactgattttgcctcccaattattttgtaagtttgtcctgtaggtt

SEQ ID NO: 861167 - DNA, 623 bp, Homo sapiens
ttgttttgcagctatgtgtgaacacaaaatgtaggtaaaggtaattccattcccagcactaataactgactcagatcacagaagcaaatactatacaagccaagatttttataatttgaacttgcttattactcaatttataaatcttgcttacttgttcaaatttctaaattattaatctcattttcaatgccacartccttgaatccatgagtagctacccacattaaacggggactgtgtatttacatttactttcattatacatatacctagctgcatgcctagcaaggcatgattacttgcagattacaggcagattattattattatttttttttttttgagacaaagtcttgttctgtcgcccaggctggagtgcaatggcacaatctcggctcactgcaacctctgcctcccaggttcaagtgattctcctgcctcagattcccaagtagctgggactacaggcacccgccagcacatccagctaatttttttgtatttttagtacagacagggtttcaccatgttgggcaggctggtcctgaacttctgacctcagttgatctgcccacctcggcctcccaaagtgctgggattacaggcgtgagccaccatgc

SEQ ID NO: 861168 - DNA, 608 bp, Homo sapiens
caagtatacaagctctaaagaaaaaaaaccaatgtaaggaaggggtccagtttcagttttctgcatatggctagccagttttcccaaaaccatttattaaatagggaatcctttccccattgcttgttcttgtcaggtttgtcaaagatcagatggttgtagatgtgtggcattatttctgaggcctctgtcctgttccattggtctatatatctgttttggtattagtaccatgctgtttggttactgtagccttgtagtatagtttgaaatcaggtagcgtgatgcccccagctttgttctttttgcttaggattgtcttggctatacaggctctttttggttccatatgaaatttaaagtagtttttttctaattctgtgaagaaagtcaatggtagcttgatgggcatagcactgaatctataaattactttgggcagtatggccattttcagatatttattcttcytttccatgagcatggaacgtttttccatttgtttgtgtcctcttttatttccttgaggagtggttgatagttctccttgaagaggtccttcacatctctcataagttgtattcctaggtattttattctctttgtag

SEQ ID NO: 861169 - DNA, 641 bp, Homo sapiens
ccattgttttaactccctgtagaggccttatttgattggaaactaagctctctttaccagcagaaaactgttgggcagggaaggcaaaatcagatccagcatacatgtctattttggtatgaacaaatggctgcccttttcatgaaagaaatttgctaatgtaatcaacttgccttcagatggctatctggtcaccctttggaatgccattgtatcagggcttcacagtttgtctctactgttggcaggttgggcattcaatattgatgtagccagattaaccttggcaagtggaagcccacattgctgagtgtatccattccaacttttcattttagaactaggaacatgactacaaggtggcttgagggacccactgtagatgggctgagccaaaatgacatgaatcgcctggctttcgtacatcccctttctgaatggtgaatcactttgctgttttgtgtctccaagaatttgtgtcagctcaaagscagtgtctagcaatccctaagatgttcagttatttttatttccctaaagcacaagcaccctggtaaatggttccaggttcttccggaaaagactaaatggatattttaccacatacatttttggcagtgtggcagtatccttcctcaaag

SEQ ID NO: 861170 - DNA, 620 bp, Homo sapiens
acaggtctcatgagatcctcgtgctgttctctgtgtgcatgcctctgagtgcctcaagaagtgcctgttttctcttcccagtgtccagagcatctaacacagtgtgtgacacaatgcaggtgaccatggaaacaaaataattctgtcttgyaaactttcactcagatggtcttaagcactcctagtctgacctcaggctcagattccatatcccagtggaggaacagctaccgagtagcacaggggaaaacattctatgctgtttaactagactgcgtatggcatcttctcttatcaaattggatttggccaaaagaacaacagctgagcactgggaaagttattcttagtatgctcacaaaagagcaactcctcgccttcaaaatagtcctctgcatcatgagtacagatgcactctcctgcagagccaactgctcagacatccctatggtatcagtcagacgcctttggatccaagtgacaacaacccaaaagattaaaccatcaaacagacaacaacagcaactgctctctgggcccaggggaccttaatcattgggcttctgtaacctctaaaagagaggctcagaatgagtctcagagatcctctttccacggtt

SEQ ID NO: 861171 - DNA, 620 bp, Homo sapiens
acaggtctcatgagatcctcgtgctgttctctgtgtgcatgcctctgagtgcctcaagaagtgcctgttttctcttcccagtgtccagagcatctaacacagtgtgtgacacaatgcaggtgaccatggaaacaaaataattctgtcttgtaaactttcactcagatgstcttaagcactcctagtctgacctcaggctcagattccatatcccagtggaggaacagctaccgagtagcacaggggaaaacattctatgctgtttaactagactgcgtatggcatcttctcttatcaaattggatttggccaaaagaacaacagctgagcactgggaaagttattcttagtatgctcacaaaagagcaactcctcgccttcaaaatagtcctctgcatcatgagtacagatgcactctcctgcagagccaactgctcagacatccctatggtatcagtcagacgcctttggatccaagtgacaacaacccaaaagattaaaccatcaaacagacaacaacagcaactgctctctgggcccaggggaccttaatcattgggcttctgtaacctctaaaagagaggctcagaatgagtctcagagatcctctttccacggtt

SEQ ID NO: 861172 - DNA, 620 bp, Homo sapiens
acaggtctcatgagatcctcgtgctgttctctgtgtgcatgcctctgagtgcctcaagaagtgcctgttttctcttcccagtgtccagagcatctaacacagtgtgtgacacaatgcaggtgaccatggaaacaaaataattctgtcttgtaaactttcactcagatggtcttaagcactcctagtctgacctcaggctcagattccatatcccagtggaggaacagctaccgagtagcacaggggaaaacattctatgctktttaactagactgcgtatggcatcttctcttatcaaattggatttggccaaaagaacaacagctgagcactgggaaagttattcttagtatgctcacaaaagagcaactcctcgccttcaaaatagtcctctgcatcatgagtacagatgcactctcctgcagagccaactgctcagacatccctatggtatcagtcagacgcctttggatccaagtgacaacaacccaaaagattaaaccatcaaacagacaacaacagcaactgctctctgggcccaggggaccttaatcattgggcttctgtaacctctaaaagagaggctcagaatgagtctcagagatcctctttccacggtt

SEQ ID NO: 861173 - DNA, 621 bp, Homo sapiens
acattcccatcagggtggtgccataaatattccattttatagatgtaacatttgcagtatagagagcttcagccacttgctaggagtctcagagatgatcaggtgatggaggcagaattaaccacaggctctcttcagagcccacagtcttacccaggtggctcactctctcatyaaacactttttgttactatttttataagccactgcaagttgggcaccaaaatgaatgtgtactcctcagtaatttcatgaggataaagtaaaattcatctactgtaggactaacaccatgtttcttatggctctttcaattatgattgccttctcccctctaaatcaagagttgtgtaatctaaaaatagcagtatctcacacagagatattttatgttgctgacttttataaagcaatgaactgtttgcaaataaatatctctgctatgctttctccatttataatctcaggcaacctcagtctgaggttattccagggcccagggtcaggagatggaacagagaataaaaggtcatacctgaagaaaaaaattatcagtgctctcaaccagttcttacacctctccttttcttttctttcatgatctgtctctaaattttactt

SEQ ID NO: 861174 - DNA, 621 bp, Homo sapiens
acattcccatcagggtggtgccataaatattccattttatagatgtaacatttgcagtatagagagcttcagccacttgctaggagtctcagagatgatcaggtgatggaggcagaattaaccacaggctctcttcagagcccacagtcttacccaggtggctcactctctcatcaaacactttttgttactatttttataagccactgcaagttgggcaccaaaatgaatgtgtacycctcagtaatttcatgaggataaagtaaaattcatctactgtaggactaacaccatgtttcttatggctctttcaattatgattgccttctcccctctaaatcaagagttgtgtaatctaaaaatagcagtatctcacacagagatattttatgttgctgacttttataaagcaatgaactgtttgcaaataaatatctctgctatgctttctccatttataatctcaggcaacctcagtctgaggttattccagggcccagggtcaggagatggaacagagaataaaaggtcatacctgaagaaaaaaattatcagtgctctcaaccagttcttacacctctccttttcttttctttcatgatctgtctctaaattttactt

SEQ ID NO: 861175 - DNA, 556 bp, Homo sapiens
actggaaaaaataatgtacatgagagaacagaggaaacaaaaatcttagggaatcagtgaaagcttgatgtacatctcaaagtttctggtggttttcctagctgaaaaaacaattaaagggatttctttcaagtttytggggcacacaggagaaaccatgagggtgatgtcccacaacacaagcccttcttttgtaggatggtcccaccctctgcaaagctcctctccacactgcagacgggccttttacttgcccccaaaccatactcctgtattactcagtagcgttttgctgaatcttttattcccttaatacaaaagtactccaaacactctaggagcgtttgactgagtgttaaactgttctgctcagaagacatatagcattaagttgtccaaaatcagttgcaaatcactcagcatcactgtatgtattctctattttttttttttttttttttttttttgagatggagtctcgctctgtagcccaggctggaatgcagtggtgcaatcttggctcactgcaacctccgcctcccaggtcccagttcaa

SEQ ID NO: 861176 - DNA, 556 bp, Homo sapiens
actggaaaaaataatgtacatgagagaacagaggaaacaaaaatcttagggaatcagtgaaagcttgatgtacatctcaaagtttctggtggttttcctagctgaaaaaacaattaaagggatttctttcaagtttctggggcacacaggagaaaccatgagggtgatgtcccacaacacaagcccttcttttgyaggatggtcccaccctctgcaaagctcctctccacactgcagacgggccttttacttgcccccaaaccatactcctgtattactcagtagcgttttgctgaatcttttattcccttaatacaaaagtactccaaacactctaggagcgtttgactgagtgttaaactgttctgctcagaagacatatagcattaagttgtccaaaatcagttgcaaatcactcagcatcactgtatgtattctctattttttttttttttttttttttttttgagatggagtctcgctctgtagcccaggctggaatgcagtggtgcaatcttggctcactgcaacctccgcctcccaggtcccagttcaa

SEQ ID NO: 861177 - DNA, 606 bp, Homo sapiens
tccaaacactctaggagcgtttgactgagtgttaaactgttctgctcagaagacatatagcattaagttgtccaaaatcagttgcaaatcactcagcatcactgtatgtattctctattttttttttttttttttttttttttgagatggagtctcgctctgtagcccaggctggaatgcagtggtgcaatcttggctcactgcaacctccgcctcccaggtcccagttcaagcaatactcctgcctcagcctcccgagtagatgggattacaggatcgcaccaccatgctcaggtaatttttttatttttagtagagactgggtttcaccatgttagccaggctggtctggaactcctgaccttgtgatctgcccacctcagcctcccaaagtgctgggattagaggtgtgagccaccaggcctggtcatctctytctattttttaaagtacctttcatttactggttcaggtagttttgatccataaagacaaaaatccacattactaacagaatttagagatctttagttgacaaaataaaataactttttcgtcacctaactacagcatgatgttgatgcctctcagatccttcaaattaat

SEQ ID NO: 861178 - DNA, 606 bp, Homo sapiens
agattctctttatgtgcccagcctgctgcaatctataggtgatcagggcaataggcgtatctggccataatcagctctgtgaccctcagcaacttatgtaactctccgggtctcccttctctcatctgtaaaatgggaataataagactgcttcatagtactgtaagaagagttcaatggcatataactctcaggaagccattgctaagtaaaacaaaaggatcctccttctggcctcattccttcagtttcctccttgacccattcctcatgctgtcttttagggtgggaccctccaattagtctttcaggtactcctttsagttaaacatttttgagcacagtcaccaatatatatttatatatttataaattttatacctatagtgctttgttaatatgttttgtgcattctgaaaacacacacatactacacagaagttttcaaagaatgaggtaagaaagtcaatagaaataggaatttaatcatgttcttcatgcactccaactaatcatctagggctccctcttctgctctctagcctccctggccctgcaggaggagtgttcccctgtgggatcctgtatatcccatcttcttgggag

SEQ ID NO: 861179 - DNA, 682 bp, Homo sapiens
ttattgctttttggcttcatgaccatcaactggaatatttccagggatgatatattttgggtgggaaaatcattatttccttcacaaccagctcataaagtgtgatgaaaactcagcactggagtaaagagtttgccattaggcatccactctctatctttggatattaactcaaatatctaacacccaagagacattattgggcaaatcaagaaaagttctatgcttgacgaaaagtaactaacaaaaacagctaattttaactaaacactaggcatgatagtaagtgctcaatgtgcacgatcttatttaatccttaaaaaaatacctatggggtagatttattattatccctgttttacagaaaatgatcctatgaccaaagaggtagaatcaggagttgaactcagatcttcctgagttcataccttaaaatttttgttttaataacatcatcagtttctcctctctctttctctctctctccctctctcayaagattcacttcccccttttctaagaacccaggaatgtcaaactctctataagaatgagcttgcctgaatcataaaggagattctgagccagatattggaacttcttgttggtacccctaggtctctttgcatttacgtaaccgtagtacttttgttccccattaagtagggatgctgtgtggctg

SEQ ID NO: 861180 - DNA, 566 bp, Homo sapiens
gagcaattttaaatggtctgagttatttgggaaaggtcctattttgacatatccagaatggattccctccatcagcatgttttctattgatgcaaggaaaactaatatgtattctaattgtgcagaaattggtgaaatttatacaaagggtgttttgtgttttttttttcccttcccaccattttcattgcccttggcaaaagactttagacccttcacataatggaaaattcaaaatgttcgaygtaaatcaaataattagtaagaaacaggttttaaaaagtttttttttagaatactctcgcaagatggtgaacttgttttttctggcttgggacaggatttcatagctcacttttgagactatatggtacccaacttttaacagaattgagtcttttaaatattctcttttctgaaaatatgctggtggtaatgacagtgattgaattagctatagcaaaaagacattgcgttagtctagttcctttctcctgaatagctttttgctaactggttactatagagcattgggcttcacagaaatttttcacaattttcacctt

SEQ ID NO: 861181 - DNA, 632 bp, Homo sapiens
gcaaattttgcagggcttaacttaaaagtttctagaggacaaacacttgtgttggtggaaggccatggtgtgacaggacacacaggctcgcctgctggagagcttttatgagccttggcagcacagcataagagaacagatgattcagatcctcttcttgtgaaatccaaattatgtattaatagaatatgtgctgtgactgttttccttgatacaaatgtaaggtaatagtctcagaatttcagatctaattgctttgttttggattcttgtcatctaaatttaatcctaaaaaatgcatgcttaattggatgattcttcatcgtgttgcttttttgtttttaatctacacacaaggsgtcagagtgtatatattagaagttatattaaatattttaatttttcatataagaccttcatataaaatgtattttacacacacacaaaaaagagggtattctaaagcctcactatgccaagtgtagactataatccagcagcagcagcagcatcaccttggagcctgttaaaaatgcagcatctcaggctctatcctagacccattaaatcagaacctgtattgtaataagaatcccaaatgatttatatatgcatcaactttgaaaataact

SEQ ID NO: 861182 - DNA, 678 bp, Homo sapiens
atcttagctacctactagaaatgggttagctaggagaatacacaaacaacagacagaattaatatttaattaattcttttactatgtgaaaatcatagaaaagtggaaaggccctttttctcttgaggcttctctgaacaaattcaaatatatttagagtctgtagaattctaacttcaccaactcaaaaatttaactaatctaatgccatttttcaaagtttaacagtatgaagatctgccggtagaataacaaaggccgaagaacaacaagcaaagagcagattggtttggtttggtttgtttttttttcttaaaattttttgagtacaatacttggggaaaagaagactgccttctcctgaagatttcttagggcttaccctgaaagctagccttcatgccctgacaatccacaatgagatcaccaacaagggaggagtgggagtaacaattcagtcaataaggatgctgctatgaggaatctttttgaaaacccaccgtactcyttgtatggcagttcagattgttcagacctcttgggacatcttcccagtatgtctttttcatacgaaaaagacaactgtctttgtcccaagaggtcaaagtactcatgttaaggctgatcccagacaactatacaaaatgcagacattatagctgtcaggcctctgagccc

SEQ ID NO: 861183 - DNA, 568 bp, Homo sapiens
atgaatattttaattagtagttaattcccctttgaatgtgtagcagctatgaagtcctaggcaagaactgggcccaaatttatctcctaagtgatatatcatcactcttagaaaacgttttaagtagtaacctacgacataaattaaacagattacagaaatcatttacttgtgaaaaaaagaaaagtaaaaggcagagtttgtgtactgtggaaaattacagatttcgacatccattatygctttcatgaatgaagccttaaagtcattgaagagaaaaaaaatttcctgagtattttctaatgttgctgtttgttccaacagttgcttcagatcatacaatcaatccttcattcactttgtttgtgaaactagttactcatggtcactcaatttccttcatattgaatcctaacagaggcattgaccaggactattgttctcaaaggttaaaataccccatgaatgactacgtcattgccaaagtatgtccaggtcatggaaacaaactcaacaacatggccaaagactcctggaggagggacggaagacctgaattttgatctgg

SEQ ID NO: 861184 - DNA, 568 bp, Homo sapiens
atgaatattttaattagtagttaattcccctttgaatgtgtagcagctatgaagtcctaggcaagaactgggcccaaatttatctcctaagtgatatatcatcactcttagaaaacgttttaagtagtaacctacgacataaattaaacagattacagaaatcatttacttgtgaaaaaaagaaaagtaaaaggcagagtttgtgtactgtggaaaattacagatttcgacatccattatcgctttcatgaatgaagccttaaagtcattgaagagaaaaaaaattycctgagtattttctaatgttgctgtttgttccaacagttgcttcagatcatacaatcaatccttcattcactttgtttgtgaaactagttactcatggtcactcaatttccttcatattgaatcctaacagaggcattgaccaggactattgttctcaaaggttaaaataccccatgaatgactacgtcattgccaaagtatgtccaggtcatggaaacaaactcaacaacatggccaaagactcctggaggagggacggaagacctgaattttgatctgg

SEQ ID NO: 861185 - DNA, 549 bp, Homo sapiens
attactctgatacaaaagccagaaaaacacactacaagaacagaaaactgtaaaccaatatttctgttgcatattaatgcaaaaatgctcaacaaaatacagtcagctcaccttatccatggattccacacctacggattcaacaaaccatgggttgaaaatattcagaaaagaaatattccrcagatttccaaaagaactaaacttgtatttgccacatgctgggtactacactgaattcacacgaatgaaatgatgttcaggcattgaattaggtattgtaaataatatagagatgatttaaattatatgggaggatatgcatagatcatatgcaaacactatacagcattttatttaaggcatttgagtatctgcaaatttttggtgtctacagaatttctggaaacagtctcccatatataccaagggactactgtgctagcaaattaaattcaacagaacattaaaaggattatatgccacaactaagtggaatgtattcccagatttcaacatacgaaaatcaaccaatgtaatataccgcat

SEQ ID NO: 861186 - DNA, 549 bp, Homo sapiens
attactctgatacaaaagccagaaaaacacactacaagaacagaaaactgtaaaccaatatttctgttgcatattaatgcaaaaatgctcaacaaaatacagtcagctcaccttatccatggattccacacctacggattcaacaaaccatgggttgaaaatattcagaaaagaaatattccgcagatttccaaaagaactaaacttgtatttgccacatgctgggtactacaytgaattcacacgaatgaaatgatgttcaggcattgaattaggtattgtaaataatatagagatgatttaaattatatgggaggatatgcatagatcatatgcaaacactatacagcattttatttaaggcatttgagtatctgcaaatttttggtgtctacagaatttctggaaacagtctcccatatataccaagggactactgtgctagcaaattaaattcaacagaacattaaaaggattatatgccacaactaagtggaatgtattcccagatttcaacatacgaaaatcaaccaatgtaatataccgcat

SEQ ID NO: 861187 - DNA, 623 bp, Homo sapiens
cttaaaaaattaaaaattgaattattatatgacctagcaattctacttctgggtatacatccaaaagaattgaaagcagaatttcatagaaatattcacatactggtgctcagagcagaattattcaccatagccaagagatgaaatcaactcaaatgtccatctatggataaaaggttagatacagataatgtggtatatatggataatgggatattatttaaccttaaaaaggagaaaaattctgtcacaatgctgcaccaygcacgaaccttgacgacattattctaagtgaaataagccagtcccaaaaagacaaatgctatctgaattcactcacatgaagaatctaagttagtcaaattcatagacacagaaactagaacggtgtttgccaagagtttggagagaagggggaagaaaagaggagctgttttttaatgaggatagagtttcagttttgcaagacggaaaaattctggagaaccagtacaatatgcagttgcttaatataactgatcagaatgcttaaaaacggtaaagatactacattttatgttatgtcttttcttttttttacatggagacagaattcaaatacaatgttcatagatgttttcctg

SEQ ID NO: 861188 - DNA, 623 bp, Homo sapiens
cttaaaaaattaaaaattgaattattatatgacctagcaattctacttctgggtatacatccaaaagaattgaaagcagaatttcatagaaatattcacatactggtgctcagagcagaattattcaccatagccaagagatgaaatcaactcaaatgtccatctatggataaaaggttagatacagataatgtggtatatatggataatgggatattatttaaccttaaaaaggagaaaaattctgtcacaatgctgcaccatgcacgaaccttgasgacattattctaagtgaaataagccagtcccaaaaagacaaatgctatctgaattcactcacatgaagaatctaagttagtcaaattcatagacacagaaactagaacggtgtttgccaagagtttggagagaagggggaagaaaagaggagctgttttttaatgaggatagagtttcagttttgcaagacggaaaaattctggagaaccagtacaatatgcagttgcttaatataactgatcagaatgcttaaaaacggtaaagatactacattttatgttatgtcttttcttttttttacatggagacagaattcaaatacaatgttcatagatgttttcctg

SEQ ID NO: 861189 - DNA, 649 bp, Homo sapiens
attttgatgttcattgcaatgctgttggtccaaacaagcaaaatgtccatcaggtaggaactagttaaataaaaggttgtatatattcacgtaattgcccactaagtggaaattaagaagaatgaggaggatacatatgtaccaacaatattgttttagttattgattgctatatagctaaacattcaagtgtaaagcaattacttattatgtttcacatgccatagaaagactagaggtggtcttctgttccttgtgccgttgtctggggtcactcatagtgctgcattcagctggcagctgaaatggggctggaacatccaggaagactcactaacacatctctcagcyggttgccacctggaacaacttcggttcctttccatacagattcccctcattcagaaggctagaaccacttccttacagcatggtagtgggtttcaagagggaatgaaccaagagaacaagccctagcttacaaattcctgtcaagtccctgcttgcatcaagcttactagtgtttcactggccaaagcaagacagacagatggccaagcccagacacaatttgggagaagactgtacaagggtgcatattccaggaggcatggttttttggggatcatcagtttaacagtctaccgca

SEQ ID NO: 861190 - DNA, 649 bp, Homo sapiens
attttgatgttcattgcaatgctgttggtccaaacaagcaaaatgtccatcaggtaggaactagttaaataaaaggttgtatatattcacgtaattgcccactaagtggaaattaagaagaatgaggaggatacatatgtaccaacaatattgttttagttattgattgctatatagctaaacattcaagtgtaaagcaattacttattatgtttcacatgccatagaaagactagaggtggtcttctgttccttgtgccgttgtctggggtcactcatagtgctgcattcagctggcagctgaaatggggctggaacatccaggaagactcactaacacatctctcagccggttgccacctggaacaacttyggttcctttccatacagattcccctcattcagaaggctagaaccacttccttacagcatggtagtgggtttcaagagggaatgaaccaagagaacaagccctagcttacaaattcctgtcaagtccctgcttgcatcaagcttactagtgtttcactggccaaagcaagacagacagatggccaagcccagacacaatttgggagaagactgtacaagggtgcatattccaggaggcatggttttttggggatcatcagtttaacagtctaccgca

SEQ ID NO: 861191 - DNA, 579 bp, Homo sapiens
atgatttccacattgcctaatcaaataatttgtagtcctcatttcctctgacttgcaacatttggtatagttgctctctccctgctttttgaaacactttttccccattggtttctagcataaaactttcacttgattcttcttctctgctgtccacttcttcctgatctcctttgaagatttctccttatcttcccagcttccaaatgctgagggcccaaaggctgagtcgcaagagacttctctcatcctttaagtgatcttaaatttatctattcatcacctcttgacttcccaggaaactttaataagcatcttaaacttaatgygactaataccaaactcctgattccctatacccttccctgtaattctgctcctccttatgtattcatttactaggcatttttaaactaatatctcatttagatattagaatattcttagaataactcagttatctatcattcttgccattttacaaaggaggaagttaaggattaaagatattaagtaattgatacaatgtcataaaaagagccaggtctgtttgactctaaaacttggctgtttctacta

SEQ ID NO: 861192 - DNA, 774 bp, Homo sapiens
atgtttctctgttatatcccaaatcttaagaccttgtgttagcagaaaagatgagtgcagatcatcctaccctggaattctttttacttgtcaaggacaatcagatcccaagagagcactttgtatatttttgctcaatgaaacgttcaaatttttttcttgtacactaatgttgaaaacttttttggaaacataccaacttgtattgaccttgtaagkactccagttcctttttggctctgattttgtcttggagttataaaagaaagaatatactttctacatttttcgacaagcatatggttaaacgtggtatgttaaatatgatttgtttttctaaagaaaatgcatttaatcagcatcttttggcctttattgatcacagtcatgaaaataaaaatgtttagaataatactagtgatgccaataaggccccttctgctctaaaagaatactacttctcccactcctgggctgacaattttggtgattaatattaatcctttccattaaagcagagactttatcaccagaataccaccattatctgcaaacatgatctgcacactactattgtgtccccattattgctttagccctgacatagcaaagatgaggctcatgggcagtcatcatcacctcctgaacccctggccttactgctaaaccttatcattcttccctgctaatcctggatcagaacccaaatcagaccaaagaattgtcttcaaccaattacttccaatacccatgatctagaaagcaaatccatgc

SEQ ID NO: 861193 - DNA, 559 bp, Homo sapiens
gtaagtagataaccatacatcaaatagagcttctaagagagaacactggaattcagcaggaaagtgacagggaacaactgaggcatagaaagagaggaaagcgaaacagccagcctggctgggattggttcaaagctaggagaaactctctattgtagggaaaagacaactaagatatccccagttgttcatattctcactatggacccctgcaatcctagccacaagagagtttctttgcccttatggactctgatactagtacaggagatgtctrgagtctacatagtgacattattccagagaaggggtttgtgctgagtcccacccaccccctgagacccaagcagctgcagcacagggcccttttgagagcccagtccccaccagctatatccgcctctggagcccaacagcccctgaatctccacattcctgaagctccacttccatcccccaacatccattcagagcactgtagcattgcaccaccagatgcacccagcaatgtggctgcgtctcaaggactctaaccaaggcagtgtcctataccctgggg

SEQ ID NO: 861194 - DNA, 615 bp, Homo sapiens
atctcatatatttagaaactaacccataggtaaaaaaagaaattgtaatgaaaattttttacaactttaatatattttatccatttttaagaaatctgaaatgtgataaatgtattaaagctacctataataaaaaattacacaagtacatacactgaagtcttgaagtttctcaaagactgttataagtcagtataagcactggataagaagaaatttctagctgataattactcagctatggacaaatatttaggtattgctgggatactcacaaatatttaggtatkgctgggatacttgtctatgaatggcgctatgggtaaaaagcttacaaagccagactttttaactctcctcctgtaaatacatgattctcagtatccattgacatgggaaacacgttggagagttcctgatgtttgtgattatactcccagcaataattattccacccaaaacgatattcagatataaagagcctgaaaaaataaggcttgatgagattttttcctaagatcttcctttccctgcccaaattagtcaaagtttaagtacacctattttaataggcctcctacaaacaacatcaaacttcaacaagcaaaaacatac

SEQ ID NO: 861195 - DNA, 595 bp, Homo sapiens
aatgtttcaagacgtgaagaatagaattatttatagaatgtattggcttcctctgaacaatgctcaaggagagatatatctcctcacttaatggcttacaaaacaggttctcttaaatatcagacatgcaatgagcacatttctattctatgttctctctctaatgaatggcacttataataagaatgatrtaggttaccaatgattattttctttgtatcaggatgtgttacatgctttacatgtcttatatatatatactcatggcaagaaaacaaagtagttcttaagattattattattatcactatcatttaattttaaagatataaaatctgggaccacaaaagtttaattagtccaaggccatgtacccagtaaacattcagttccaggtatgtagttcccaaaagcctggaagatttcctccattccatgatttcatttgcttttccttgttatcagccagctataaaacaaaatccaaataggtatgtgtataccccaaagtgagaaaaatatgattgcttttgacagtctttcaggctccagaataaaacacaagaattgtgttgacctggagcaagaaattatt

SEQ ID NO: 861196 - DNA, 614 bp, Homo sapiens
aacaagaagtggaattgctcagacatcctggccagcagttggactattcccggagctccaattgcttttccatctgtgaatcattctgctaaaaagggaagagtctagccatctggtctacagtaggtcaagtgctcaccttttgttaaggaggtgaactttgattgaaagckccacgtaagccactgcatataatgtctggtagtggggggaagagagcaggaggggaaaatgacttctcaaaagctcaaagagaaaaagcctgctgttaccacacacagagagaatgtatgctaaaaaaaaaaaaaaaaagtgcaacctgctggtacaaatagcatatacatgtatttgaactagttcatttcacttgggtaaaaatatgccattgtcttagaataagagcaaagaacatctttaaaatacaaccctagtcctcatattatccaaattcataggccaccatgctatgcacgttgagttagctaaaagttaatatttaatgcaaatattcaagatggcaagataaaactcattaaatggaataatattctttcaaaaggttaattattcatactcaacgcaatggctattttggtgtctacttttaatagctg

SEQ ID NO: 861197 - DNA, 609 bp, Homo sapiens
taatcctcacgtcggtgaaagcctttctaacatccccaattcagattccgttttgccgttactagtctcacagaaactggcacttctccttaaaaaaaaaaacttatctaaattttccatttataagtgattattttgtaagcattgtttgttgataataatatctgcatcctcagctgstaagttctgcaagggtagagtcatgtctgttttgcttgctacacctgtttggggttactgagactaccctcaagtttgataatttgctaagaggactcctaggactcagcagatatttgtgcttacagttgtgattgttggagtgaaaggataccgtgcacaatcagcaaagggaagtggcacatgggtgacactcagggaaattgagcgtcaacttccaagcatcctttcccagtggagtcacacagaatgcacttaatctctccagcaatgagttgtgacgtgtaaaacgttgccaaccagagaaactcagagacccattgtccagtgtttatactggggctaatcacatagagaccctctgccaagcacatacctaaatcccagactcccagaaggaaagcaggtgttgaggacacaccacattgt

SEQ ID NO: 861198 - DNA, 392 bp, Homo sapiens
ctctgtctcctgccatgcaaaagcctacagggacaagagcagatgaagtatctcacatactctgcacctttcctttggtccaaacaacacctctgctccttcctccaggtcctggcttggtcttcagcctcctagaatttctccctatccacctacagtcctcccrtgagctctccaccccacagcccatctacaatgtcccctgatccagaaaacagctgaaacactgctgaactttgaacattcactaacttttctgagttcatgccttttttatttccagccatttcctacatctaatatttattcaaactccatccattcctcaaagccccaaatactttcctctgatccctttaatcagaaggaactattctgaattcacagtctat

SEQ ID NO: 861199 - DNA, 653 bp, Homo sapiens
caaataggttaaactaatttagagagagtctgaataaaatgttgaatgtataattcattctgattaacaaataatctttaaccataaagaaaatttcctcttggatgagaacctttgattactaagagtttcaaacttcaaatgcaagtttatcactccttttaggaaaagaaatatagcagaaacttttgcttttacttcaaagtaaaactacactaatggacaaataagttttacgttgttcattctcatgtatttttattggaccttaatggatgtagaaaattctgattgtgttaccttaatctaatgaaagactcttaaaaggtaatgactgtcacagaccctgtttctccaattggktcttctctgataattcatctagttggaatactctgtaattatatagcatttagattctcttctcaatgtactcattgtttttatgtcaattgccagaattcttcagggcagaagaagctgggcctttatttccctctactgcttccttggcaattgtttgaagagtactatgaagactcttttttaattcctctcacttggaggtaagcctttataaaggcagtcataatgtggaaagcggagacttgtgctgagaatgacattgtttcataaaaatgtcagtgattatt

SEQ ID NO: 861200 - DNA, 614 bp, Homo sapiens
agttttctagatagcaaagtgcaattgggtctattaaattagaacagaggtggcatcttttatcttcctatccctacagcccagtacctgagctcatttttaatgagaagacaaattaatatttcatcatttctttctaaaataaaaatcggtatgtgaacgcaatgatggtcataagacaggcaggagctygaaaggagaaggagagtgaggcgccaaaggctttggggaagtggagtgggtaacagagggcagtctgggtaagaatagagaagatgcggtgtggtggcaggcacctgcggtctcagctacgggtgtatgggaggatcccttgagcccaggaattcaaggctgcagtgagctaggatagtgccactgcactccagccttggtgacagagcgagaccctctctcaacaataacaaagaacctagccaagggaccgtggctagggggttgggccctttctctctcagatctacctaatggtctgggctcaacttctcctttagaaaaagagcttggtggtggtagattgtgaagacaattaatttcactcttcagctgcttctccaaccccacagcactcctttcattccacttggacttgcccc

SEQ ID NO: 861201 - DNA, 637 bp, Homo sapiens
aaaatatacagtcagaggaaaaagagaaaaataaaaggaatgaagatcacctacaagatatagaaaattacctcaaaagactaaatctaagcattattagtgttcaagagagagttgaacaagaataagaggtagagagctaagttaaagaaataataacagaaaacttttcaaaacttgaaagagagaaatattcagatacaggagcttcagagaataccaaacaaatttagtacaagtaagactaattcaaggcgtataataatcaaacactcagagattaagggcaaagagaggatcytaaatgcagcaagaaaagagagggaaataacaaataaagggtctttgatgtatctggcaacaaacttctcaacagaaaccatacaggtcagtagaaagtggatcaacattttcaaagtagtgaaagaaaaaactaaactgccattcaagaaaactgtatccagcacagctatccttttatggaggagagctaaagtatttcccagataaacaaaagctgacagaattcaccaccaccaggctcattttgcaagaaatgctgaaaagagttcttcaatctgaaataaaaaaatcactaatatagaaaaagaaaacatttgaaggtgtaaaacacact

SEQ ID NO: 861202 - DNA, 602 bp, Homo sapiens
gtacctcatggtgactatagttaacacaactgtattgtatatagtcatgtgttgcttaatgatggggatacgttctgagagatgcatcatcaggcaattttgtcattgtgtaaacatcttagagcgtacttacacaaacctagatggcayagcctattacacacctaggccatatggtatggcctattgctcctgggctgagtggactagatagcataaggaaatagtaacacaatggtaagtattcgtgtctctaatcatagaaaagaaaagatactgtaaaaatatagtactatactataatcttacgagaccaccatcatatatacaatccaccattgactgaaacattatggggtgcatgaatgtacttgaaatttgttaagagagtaggtcctaagtgttctcaccacaaaaaattggtaattatgtgatgtgatgggtgtcttaattagtttgattttggtgatcattttgcaatatatatgtatatcaaatcatcatgttgtacatcttaaatatataatttttatttgtcaattatacctcaatagggctgaaaaacagaatttatcagcaatatcaaaacacactgtaaatat

SEQ ID NO: 861203 - DNA, 566 bp, Homo sapiens
ataaatgcttttcttttttttaatgttttagtttttttgagatggagtcttgttctgtctcccaggctggagtgcagtggctcaatcccggctcaccgcaacctctgcctcctgggttcaagcgattctcctgcctcagccgccctagtagctgggattacagacgcatgccaccatgcccagctattttttgtatttttagtagagacagggtttcaccatgttagccaggctggtctcgaactcctgacctaaagtgatctgcccaccttggcctcccaaagtgctaggattacagaagtgagccaacatgcctgamcggccgtaaacgcttttcacattgtaaatatttgctaacttgtaaccctttatggccattgttatcagtttcctcatctgtaaaatgggggcatatggatcttgctccccaccctcgacccacactgtgcctggcgctaggtctattattatcagacaggggtggggagtcattctgcaagaggtaggtctgttcttgaagattccagcataagtcaactgtccccccatcctggatgttcccccac

SEQ ID NO: 861204 - DNA, 509 bp, Homo sapiens
cacacgtagcagggagtggcatagcaaagatttgaacagagatctgtttatccccatttctacaggatggttaagagcttggactttaaagccaattgtcgggttttttttgttttttttttttttgacagaggctcactctgtcgcccaggctaaagtgcaggggtgcaatctctgctcactgsaacctccgcctcccagttcaagcaattctcctgcctcagcctcccacgtagctgggattacaggcatatactaccacacccggctaatttttgtatttttagtacagagagcgtttcaccatgttggccaggctggtctcgaactcttgacctcaggtgatccgcccacctcagcctcctaaagtgctgagattacaggtatgagccaccgggatttgactctgaactcttctgctgcctgccagctgtgcgactttaagcaagttacataacgtttccgtgcttcagaatcttcatcggtaaaaaggcaacagaaattgtacc

SEQ ID NO: 861205 - DNA, 594 bp, Homo sapiens
gaatgcaaggcataggtgccctggggagagtgatttagaaggaagagagtagatagttaatgctctccctgtaacttaaacctgaatgagcaaaaattagctttatatctctcaactgggtaagcacagtgaatgtagctcaccccaaaaaccatacttcatgctggagtgttccattacacaagggagtagctaacatctgttttcttccttccctccctccctgcctcttccttcyttccttccttccttccttccttccttccttcctccctcccttccttccttccttccttccttccttccttccttccttccacaataacaatttttttgagaacttactcaccgggccagaatatggaagttctctattgatccttctatgggtcaagttgaaaaagtaaataaagtagagtttctgtcttaaaagatcctccaggctattgggcaaagcagcaggtcaacaagtgtgatacaacctgataagccttctgatatagacagagtgcagcgaaagctaaaaggctactagtgcaattgaggaaggagggaactgagaaatgagactagaagcttataagagagctgtgg

SEQ ID NO: 861206 - DNA, 645 bp, Homo sapiens
gcatcaatgtgctggattcggtgaggttctccagaggagctcagcagcctagaataaccagatggtgggttccacaattgatccaggcaggactgactgaaataaaaatgggcaacccctggttcaaaaacaattaagaatttcaagatggcaacagcagagcattaaactaagcctagcacccctctgtgtatggaccctgtgtgtctgcacaggttgcatgcccgtgaagccaatcttggatccaagctgagggttttgccagacaggatggatgaatggataaaaatatgaatcacgtgatggtccaagcagggtagagaaakggggatactgtaaagaagagatgagaatgaaaggagaatattttacacataagtgaaataaatgtaagcaataaaatgtggcagttagcccacttatttattctttatttgcaataaaacagttaactctagcttttaatttcaatgattctttatatttctatagttaccaaatttagttgaagttctagttttgcacagaccttcttaagggagttttgctttacagattttttgaagggagttcaatgtttaaatgagaaagaaaacttgtatcaactagtgtcctttttgtgttgttttgtttactggggtagac

SEQ ID NO: 861207 - DNA, 630 bp, Homo sapiens
gagcatctgtaatcttttttgcctaattccaagtttcttaaggacaagtgcaattcaaatgtaatgcctaactatcatctgaatatcaatatcatacctcaacaggaccaatacccagagagttaaagtgacatggcccatattacttagcatgttaatgtgcctttgagctcaaaaccaaagtcccctgaattctatcctgattcctttctaaccattcccatgagcctttttccatatattctaggtagagaaagtttaaaagggcagttcctctcctttaagttattctacttccacgtgattatttgcccattcttccggaaggtaagtgtcatagctctaaaggcacagtttgagaagtcacattkgcatttaaattatccctctgtctttggtttgctgagtgtccttgagcaaagctttaatgccctgggacagaagatagtgtaaaatataatagtatataccttgtacaattgcaggtgaggtttaaattgattagtacctgcacttagtgggtactaaataaatactagttctcatttcccttcctacccaccgttaattaataatgttttacttcactaatgatgccattcagaacctatcgcctataaatgaagtcta

SEQ ID NO: 861208 - DNA, 453 bp, Homo sapiens
agtcaaatctcatgacctatagtctggcattgatacttattttatttagatacagggtctcactctgtcacccaggctgaagtgtaatactgtgatcagacctcactgtagcctcgatcttctgggttcaggcgatcctcccractcagccatccgagtagctgggactacaagcgcgcaccaccatgtctagataatttgtgtgtgtgtgtggagacaggttctcactgtgttgcccaggctggtcttgaactcctgggttcaagccatcctcctgcctcagactcccaagtagctgggactacaggtgtaagccactgttcctggcttgggctccattttttacaagctgttctttattcggaataaaaagaattagcatctctttttctaagtaatactaagtacaaccactcactgttactagattagtgttctggtttttcttttgaa

SEQ ID NO: 861209 - DNA, 572 bp, Homo sapiens
cagtttgagagaataaggaaaccccattttctctggtggtctgatttgtgacataagtaattccgtgaccacaccacctgaagagtgtgcctaggagatatcagaaccggagtacagcatgaaattagcatcacacactgactacaaaacaaaaacaacaaaatttaagagccgagttttattgagaccagggtgggtgggactcagagagacaacaatctatagaggcaaacacaggagaaacatctgatataaaagagcaggaggcaacaagggaagttgtcatttagaccctcatgggctccacatttttgcaagcactgagctttataaaracctgattcttacactagccgctccaggctatatctgtactgccactgccagacataattggagtgctactgggccttatagagagaggttggatcccatgaccagtccagaaagataactctcaactaggaagaccagatttaaggccattttgaaagatcttgataagccaaagtggggagcctcgctgacttcccaagacttagcttggccaggatctgtttgcccatcaagtt

SEQ ID NO: 861210 - DNA, 644 bp, Homo sapiens
ttatgaagatattttgataagcactattttaaaagggctaactgtgaataaactagatgagtagcaatcttcctacaaagctgtcttatccctaataatagtaaagctatacaaggttttaaaagttatgcacatgtgtatgtttatatatggtattggtatctctggttttttttttttttagacagggtctcactttgtcacccaggctaaactgtaatggtgtagtcttggctcactgctgtcttgacctcctgggctcaagcaatcctygtgcctcagcttctggagtagctgggagcacaggtatgcaccaccacacccggctaactttttgtattttttgtagagatggggttttgccatgttgcccaggctggtctcgaactcctgagctcaagtgatccatctgacttggtctcccgaagtgctaagattacaagcctgagccactgtgcccggcttgtacctttaaaaaaaaaaaaagaactaaagataacgttttggttgaacttaaataatattccttttatatggaaatttggtctcctgtgcaattaataatcaaagtaacccgtgcaattaataatcaaagtaacccagtatacattctctcaaacttaatctttgtctcaaaatatttt

SEQ ID NO: 861211 - DNA, 673 bp, Homo sapiens
aatgaagcaattttgataaaaatatatgagaatatttttcattttgaatacattatttgacttttgatggaaaagaaaaacaccaaagacattaatttatctttataactttaataataagcttataaaaattaaaacaaaaatacaaaaatagaacaaaatagggaaagtgaactaatatgagatcaaattttttttactaaaaaatgtgattgtgaatttaaaaatgcaataaagtatataaacattggatgaaggtcataaacagcaaatagcacttggaaatatcttgtcacattctaaacgtcaaaggaattctcaaaaaagtccaaagaaaaatagtataagccataatttcttatcactttgcaataaaattagaaattaactaaaaagggataagatgggaaaaaaacccaaatcaaatacaragagattttaaaatactttctgaagtaacttgtagaatgagaacttcaatgatagcctacttatgaaataatgatttatctatccatctccctttctctggatgagagcctgggggagggtagtgagtgacacattcacctgccttcttgcttctatagctcttccagtagctggaaaggtacaatctgcagttgactcttgaacagcatgggggcgtggggcgccaatcccctgtacagta

SEQ ID NO: 861212 - DNA, 608 bp, Homo sapiens
gtcacctggtttgtccctggcactgctgctgggtgtcacctcatcataaatccatccaatgttgctgcacatcactgcttcctggtcctcaggaggctaatgctcctgacaggtgccatctgaccatgtcactacctgaagagctgacctgcttcacaggcagggggacagagtggcacatcagaaagccactgctatgcatttcacctacaattaagtgctaaggaataatagtggggcttttatgctacatgcatgttttcctttccattaaatctcagatatgctgtttgcatatcttagttcaggctgctctgaaatccatagggggaaagaaacccttcattaagttcagcagcacygtccggcaatgcagcagcactcctatttatttttccttctgtaaatatttgtgctctctcaggctaaggagtggcctgtgctagagactaaaatatccccatttatatcctccaggtgcagcaggaaacgcctgacctctcaccctgcccctgcaatgacctcaacctcacttatggggaccaccctctgggctgccctaatgcagacccatgatcacctctccaggttgactgccgaatagcagg

SEQ ID NO: 861213 - DNA, 584 bp, Homo sapiens
ctttgtctccttttattaactccaatggaaatcttctgcttttgcctgactgggtctcttacccatttctcaaaagactattcattaccaattttaggctttgactctcacacttcttttttttttctttttggcctagaatgtcccatctcccttgaccttttctaagacaactgtaggccagtgctatttctggatcaaggtagagaggtctagtcttgcctctagaaaacagatgaaggtggcatcgggtgtcatttcatttaaatgcacaaatgcacacataaaagcaaatgcatgcacacacacatatgtgcatatatgcacagatatatacagtaayttaatatgaaaacccttctataaatgactttatatgtataaatttatgtgtaaataatgttatttaatggagataaataaagatgaaaagataccagaaaccatttagaaggagagaggaggaatgttagtagcatttattaagtgcctcctaggcattagtctcatgactttaacctcatttaattttgaaagtaaccataagatgtaggagtcatgagcctcatataaccagtttaatg

SEQ ID NO: 861214 - DNA, 584 bp, Homo sapiens
ctttgtctccttttattaactccaatggaaatcttctgcttttgcctgactgggtctcttacccatttctcaaaagactattcattaccaattttaggctttgactctcacacttcttttttttttctttttggcctagaatgtcccatctcccttgaccttttctaagacaactgtaggccagtgctatttctggatcaaggtagagaggtctagtcttgcctctagaaaacagatgaaggtggcatcgggtgtcatttcatttaaatgcacaaatgcacacataaaagcaaatgcatgcacacacacatatgtgcatatatgcacagatatatacagtaacttaatatgaaaacccttctataaatgactttatatgtataaatttatgtgtaaataatgttatttaatggagataaatraagatgaaaagataccagaaaccatttagaaggagagaggaggaatgttagtagcatttattaagtgcctcctaggcattagtctcatgactttaacctcatttaattttgaaagtaaccataagatgtaggagtcatgagcctcatataaccagtttaatg

SEQ ID NO: 861215 - DNA, 549 bp, Homo sapiens
gctttctgggagtgtcagctccgctgcctgacacaccagcccgtggctctcttctggaccctcggggaaattcagcccagctttgaagtctcagctcaaaggccctctcctacaggaagccttccgagatggcccaagtgggactcgctgggcattctcctggcactcagaggctcggagcacgggcacactagaagcaactttgaccatgaacattcaatcgatctttattgatacctactgygtgcccagactctgtgctaagtgacctttcgggttgccctctttctccccaccagaggtccacatgtgctgagttggctgcatcttgtagctctagccctgggggcagacctggaacctgatggacaacaggaaatgttccttaaagcgcactgcatcagcagcagccaggggtttgcagggccctgagctgggcctggcagggcccacaaaagctcccctaccctgcatggcagtcatgggcactggaagtagcattgggctgccagtgctgagagtcccaggtctggctctgcctgccaggta

SEQ ID NO: 861216 - DNA, 542 bp, Homo sapiens
gtgggaaagtctcaggctgggcctgcgagaggggcatgaaagaaaggagacagacagagatgggccaatgggaggaaagtctgcagaggcagagaggcctgggggtgctggagctggggcagagagaaatggggtggggagacttagttgggtggctgggttggaacctcaatcccaacccttactggctgtgctayctattaaagtatcttaacctctctgggttttttttgtcagtaaatggagctatcagacctctgccaggactgactgggtctgtcatgtgaaggttgagggatgctgtcctaaggctgaaacaaaacagaggcataaactgtgctaagccctctttcctctactcccagccacttacacctgccctttcctccctctggcttagtggctcatccacaaagtgtccttcaggtccatcctcagcctccactcagggcctggggccaaaagagagcccctctgttcataagactcacatattagaaagggacaggcttcccctcctgatacccatataccattccctg

SEQ ID NO: 861217 - DNA, 544 bp, Homo sapiens
cccaagtactaagcatagcagccaatagttatttttcctgatcctctccctcctcccaccctcctttctcaagtgggccccaatgtctgttgttttcctctttgtgcccattggttctcattatttagctcccacttataagtaagaacattaggtatttgtttttctgttcctgcattagtttgttcaggrtaatagcctccagctccatccatgttcctgcaaagacacgatctcattcttctttatggccgcatagtattccatggtgtatttgtaccacattttcttatccagtctactgttgatgggcatttaggttgatttgctattgtgaatattgctacaatgaacatgagtgtgcatgtgtctttatggtagaaaaatttatacgcctttgggaatatactcagtaatgagattgctgggtcaaatggtagttctgttttcagttctttgaggaatgccacactgctttccacaatggttgaactaatttacactcccaccaacagtgtataagcatttccttttctctgcaacc

SEQ ID NO: 861218 - DNA, 558 bp, Homo sapiens
gaacagggtgtgtcactaaaagcctgtgtgcacattcacagcagatgccaagcagccatctgtgtggggccagttggagctcacaaacaccaggcctgtaattgctagaaagggcctggcagtgctagtacctcttcatgccaggccatcttggtacttccaggggktcaagtataatgacaaaataaagccactcttacccccttatagtcacttttactctttactctgtcttctcaatgtttaaggggaggtcttggttagattttgcctgaggcaaaaaacaacagcatcttttactaagaattttacattgttccctaacaaccaccctaaaaaataatattactatcccattctaaccagtacagaaagaggtgagtaaaggttcaaagacaaagagctgtgggtggagggataagtactctttcaggatgtcagattcttagcccagctcatcccctgccacttggtcatgttacaaaagggtaaagttgacaacactgactttgcctgacttttcattgccccagcttgaagagttaactattctaaaat

SEQ ID NO: 861219 - DNA, 618 bp, Homo sapiens
aggatcttgagatgtggaaattatccttattatctgggtgacccaatataatcacaagggtccttataccaggaaagcagagcaggagagtaagaggagatgtgatgatggagactttggagcaatgccttttctggctagaagagggccatgagccaaggaagctggwaaagacaataaagagattgtcctctacagcctccagaaggaaccagttctgccgacgccttgcttttagtcctgtttagtcccattttcagacttctgacctccaaaactataagataatggatttgtgttgtttcatgccactaagtttgtggtgatctgttacagcagtggtaggaaaccaatacaccagaaataatagcagccttcttatctcagtcaagagtccccagaccacaggggccaaaaccagcccctgatagagtcccgtgttagaaacttgtatctcattgagatgtgctacatgctgcaggttacatgcagaccacagtccactgggcctgaagatgttctccctcagagaacacccaccaaagggaagggtacctttctcccccgccacccacaactatttcttttatttctataacaacactgccacattcaaaa

SEQ ID NO: 861220 - DNA, 618 bp, Homo sapiens
aggatcttgagatgtggaaattatccttattatctgggtgacccaatataatcacaagggtccttataccaggaaagcagagcaggagagtaagaggagatgtgatgatggagactttggagcaatgccttttctggctagaagagggccatgagccaaggaagctggaaaagacaataaagagattgtcctctacagcctccagaaggaaccagktctgccgacgccttgcttttagtcctgtttagtcccattttcagacttctgacctccaaaactataagataatggatttgtgttgtttcatgccactaagtttgtggtgatctgttacagcagtggtaggaaaccaatacaccagaaataatagcagccttcttatctcagtcaagagtccccagaccacaggggccaaaaccagcccctgatagagtcccgtgttagaaacttgtatctcattgagatgtgctacatgctgcaggttacatgcagaccacagtccactgggcctgaagatgttctccctcagagaacacccaccaaagggaagggtacctttctcccccgccacccacaactatttcttttatttctataacaacactgccacattcaaaa

SEQ ID NO: 861221 - DNA, 667 bp, Homo sapiens
gggattcaactatgaaatagacactgccatatatttcaagaaactcacagaatagcaatggaaatgtacatgcaaatgtggaaactgtactacgtgaccaagtctaattaagtgccaagggtcatggagagcttcataggggtgatgacagttgacctggtctataagaactccatctggttttcctaagcaaagaaaacagaaaaatcattctgcaccaaggtaacagacccatgagactgaagctcccaggtttggtggtraggactgtgggatttttaaaacgaaaatgatacagacaagctctgtggtaacttgatctttttcatcaatgtaataattttaaacgatgaaaagtcaaatagtgagaaggacttatgaaatgaaaagcagtgtctttagccctgctgctacctgcccccgcctcagtcttgcccctggaagcaatctcttgtttttagttgttctgtgatttctcaccaaaactctaaataatagctcatcgaaaaatgtcagaaaggtgacattccaactgagaacagcactaagctcctgggctagggttccggtgggggtttaagggctggagggaaatgaggacaagctcatcctctgttgtcttatcaactagacgggatagatattgacaccctactctggaagatga

SEQ ID NO: 861222 - DNA, 638 bp, Homo sapiens
agaaaaaaacaaagttcctcttagagaatcaccattatagttcacagacttttttccacaaatatttttgtaacaaaaattagtgtccagtactggttccaggtccagtatataaggggggcttagacatcttcactgtgtcctaacaggtaaaaggttgagcaaactgaaaaataaacaactcttcttaaaccacctgagaagtgagattacggrgtaaaccactgccatgtaaataggagagacaggtaggtggacacagaaaatcacaatttaccagaacagaaacgcatgagcaaaaacctctgcaggaaccagtactagggtaggaaaacctgaactctaatgaatgaattgctggaggctcagcatagacaagtctgaaagataaaaaccccaggatgatccagtcataggagggccttcagactttcgtgaattttacctccaggatctctatgtcctcatagtgaatattggagaaaaatccccttgtgcttccagcagggattttttaaaaagaaaccattctgaatatgccagagctctctcttcttatcaaggcctgccctcaggaaaactatattaccagaacctaaccttctggggctatattagagcctaacctacctggggga

SEQ ID NO: 861223 - DNA, 599 bp, Homo sapiens
ccagtaagttcttgtcttgcaccatttctttgtcagatgggttgagtgtagggtcctgcttttaccatgcttcgctttccattattcccaatttaaatagatctttcttcctgctgttgagtggggtttgttcaatcttgttgttccatggttgtcctcctctagtacaggacttcttactgtggttaaatttcattgtgttggctttgtctgaacattccatcttaccaagatctctttggatcttgaatctttgatacagcataatactcattcctctcaatgttttgatagtgaaaattttgtaggtgtgttttacatttttatctaaatcattggcaccaagtttcaaaaaagaaccaaggaaagaactctgcagcactcarctttagatacagctgaagcttgacactgagtttgagtgttttcatctaccacaaagttcccaccatgaagttgttctaagtgttttgctgacatcaagacatgctatattcaggacaagtttctaaacactttcaaacttctaccaagaggggaatggggttaacctggcttagcaatctggctgaaaattgttctgtgagataaaacgtctg

SEQ ID NO: 861224 - DNA, 651 bp, Homo sapiens
aatgtaatttctatgagttaaaaagtatacaaaaccgtactctttatatactacttacatatttaattttaattattttgaattgaaaaactgcatatattattacaacatgttttgaaatatgtgtacattttggaatggctaaatagagcaaattaatgtatgcattatctatatgattgtcactttttgtggtaagaacacttagtttactctcagtgactttcaagaatacaatgcattgttatgaactgtagtcaccatgctatgcaatagagctttagaacttattcctcctatctgaaattttgtattctttgagcaacatctccccaaactgccctattcttccctcaagcctctagtaacsaacattctactctctgcttttattagttcagcttttttagattccacatataagtgagatcatgtgatctttttgtggctgccttatttcacttaacgtcctccactttcattcatattgttgcaaataatagtttccatcttttaaaaagctgaagagtattccactgtgtatatataccacactttctttatccattcatctgctgatgaacacgtaggttaattttaggttaattctatatcttggctattgtgaataatcctgcagtgaacatggtc

SEQ ID NO: 861225 - DNA, 645 bp, Homo sapiens
tctcgtattgagaagctaattagagataattggattaacattatttttcctaaatcaaagtattctgatactcctctttcctagttttatctttcttttgatcataaggaaataaatgtatccctaacttgtaacatttgggatcttcattctctttaattttcatttgctttttttgtgctttcctcrcctctagctttccttaccatgatgtttaagactgctcatcatctgggcacaatcatgacctcctttgtggccattagtactgtccacatcttcatctcctttctcctgagtgtctctgagacatacagctaaactgaatgtctcagagctcctcatataggctattgtatctgttgtctgtgactggttgttgcttcctgcctcacaacccatgacacttccctgtctaaacaaataagtattacccatacttcaaggctcagttaaaatattactccttcatggccaagtgtggtggctcacacctgtaatcctggcactttcagaggctgaggcgggcagaccacttgaagtcagcagttcgagacctgaccaacatgttgacaccccctctctactaaaaaattagccaaccgtggaggtatgtgcctgtaaaaattagcgaagcgtggaggt

SEQ ID NO: 861226 - DNA, 621 bp, Homo sapiens
gtgtactggataataaaaatgtggtacacatacaccatggtatactatacagccataaaaagactgaatgtcctttgcagcaacatagacatagctggaggccattatcctaagcaaattaacacaggaataaaaacaacaaatatcacaaattcccacaagtgtgagctaaataagcattgggtactcagggacgtaaatatgacagcaatagatactggggactactagagtgaggaggaagggagtggggcaaggattcaataactattggtactatgctcagtacctgtgtgacaggatcaatcataccccaaaccttagcattgtgcaatatacccatgtaacaawtctgcacatttcccccttgaatctaaaataaaagttgaaattaataaaaaaaaatgaaaccaggtttgctggccctgatgctagcaggcacactaagcagttgacttcagggtacaacttgaaaaggacagaagcagttgacttcagggtacaattagaaaaggcccaatttaaagtgtccactaccatcctgtctcagatatggaaatcccaccatgagttttgtcagactcagtcttggtccttgcccacacagcatccctcaaatcc

SEQ ID NO: 861227 - DNA, 672 bp, Homo sapiens
tggcagcacttgaggagcccttcagcccactgctgcactgtgggagcccctttctgggctggccaaggccggagcctgctctctcagcttgcagggaggtgtggagggagagacgccagtgggaaccggggctgcgcgccgcccttgcgggccagctggagttccgggtgggcatgggcttggcgggccctgcactctgagcagctggccggccctgycggccccgggcaatgaggggcttagcacctgggccagtggctgcggagggtgtactgggtcccccagcagtgccagcccaccggcgctgccctcgatttctcactgggccttagctgcccacggggcagggcttgggacctgcaggctgccatgcctgagcctcccacctcctccatgggctcccgtgaggcccgagcctccccgatgagcgctgccccctgctccatggcacccagtcccatcgaccacccaaaggctgaggagtgtgggcacactgcatgggactggcaggcagctccacctccagtcctggtgagggatccactgggtgaagccagctgggcacctgagtctggtggggacgtggagaacctttatgtctagcccagggattgtaaataccccaatcagtacttggtatctagctcagggtttgtgaatgcaccaatggac

SEQ ID NO: 861228 - DNA, 672 bp, Homo sapiens
tggcagcacttgaggagcccttcagcccactgctgcactgtgggagcccctttctgggctggccaaggccggagcctgctctctcagcttgcagggaggtgtggagggagagacgccagtgggaaccggggctgcgcgccgcccttgcgggccagctggagttccgggtgggcatgggcttggcgggccctgcactctgagcagctggccggccctgccggccccgggcaatgaggggcttagcacctgggccagtggctgcggagggtgtactgggtcccccagcagtgccagcccaccggcgctgccctcgatttctcactgggccttagctgcccacggggcagggcttgggacctgcaggctgccatgcctgagcctcccacctcctccatgggctcccgtgaggcccgagcctccccgatgagcgctgccccctgctccatggcacccagtcccatcgaccacccaaaggctgaggagtgtgggcacactgcaygggactggcaggcagctccacctccagtcctggtgagggatccactgggtgaagccagctgggcacctgagtctggtggggacgtggagaacctttatgtctagcccagggattgtaaataccccaatcagtacttggtatctagctcagggtttgtgaatgcaccaatggac

SEQ ID NO: 861229 - DNA, 619 bp, Homo sapiens
tgttgggtgcagtgttatgttcatatccactggaacaagcttgttagttggtctgttcaaatcttctatattctcattggaatgtttttatctgcttgatctattattactgagaaggcatagggcaaatttctgtttaactttctaagaaacttctaaactgtttccaaaggatttataccattttgctttctcaccagtaaagtataaaggttccactttctccacagccttgcaaatacatggtcttttctattttagcccttttagtgagtatgtaatggtatctcattgtggttttgatttgcatttccctaatgactaatgatgttgagccacttttcatgtgcttattagccattcatagtcttctttggtgaaatgtttattcaactctcttgcccattttctaattaagtagtctgttctattattgagttgcaagggktttttatatgttctggatacaagtcctttatcagatctatgacttgcaaatattttctcccattctgtggctgtcttttcatttccttaatcacatcttttaaatcacaaaagtttttaattttaatgaagtccaatttgtcttttcttatatggctcaggcttttgatgt

SEQ ID NO: 861230 - DNA, 641 bp, Homo sapiens
ctagaacttctagaatgattctaaataaaagtggcaaaagcaggcacctttgtcttattcctcacttaaggggaaaaagttttcaatctttcatcatgtcctatgatacaagctgtgggtttttgtcatggccctatcattttgaggaagtttctttctgtttctcctatattgagtatgtgttccattaaaagatattaatgtttttcatatgctttttctgcatcaactgagataatcatgtagtttttttcttcattaatttttattgttgaactatctttccattccaggaataaatcctacttggtcctgttacrtaatcaatccttttaatatgctgagttttgtctggtagtattttgttagagatttttgcatctatattcacaagggatattgatctgtagttttcttgtagtgtgtttgtctggcttataagtagaaatccttaaagaaaacacagaagattgcttgagttagtaaatgaattcagcaaagtggcagcatataaaatcaacagataaaagtaagttatatttctaaatacttgccttgaacaatcccaaaaggaaaaataataataaattccctttataataatattcaaaaagaacaaaatacttaggaataaatttaac

SEQ ID NO: 861231 - DNA, 616 bp, Homo sapiens
tatttgcaacttatattgcagagaaagggtttatattcttaatatccaaagagcttctaatactacagaagaaaataacctagagccctatggaaagatcagagtaatgtttcattcacagaaaaataagtgcaaatgattctacaccacatgaaaagatgctcatagctgctgatataaaagaaatccatatgaaaactacatgaagattccatttttaacctaccagattggcaaagtcctaattttaacagtatattcttttggccaggctatggggagataggcactgctgtatatkgttagtagcaataatctgatgtgtaccacttcaaatcagtgaggaaaagttaaaatagaatccattttttcagaccagacatcaggagtggaattcagcaatgcctagaaaaattatacataccttcatccttctccgcagcaattggaattacatgaatgtatcccacagttacactgacagaagttctaagagacatagatggctgggcatggatttccatagatagaaatactggctcattccagtaattccagcattttgggaggacacagtgggtggtccacttgagctcaggaatttgagaccagcctg

SEQ ID NO: 861232 - DNA, 616 bp, Homo sapiens
tatttgcaacttatattgcagagaaagggtttatattcttaatatccaaagagcttctaatactacagaagaaaataacctagagccctatggaaagatcagagtaatgtttcattcacagaaaaataagtgcaaatgattctacaccacatgaaaagatgctcatagctgctgatataaaagaaatccatatgaaaactacatgaagattccatttttaacctaccagattggcaaagtcctaattttaacagtatattcttttggccaggctatggggagataggcactgctgtatatggttagtagcaataatctgatgtgtaccacttsaaatcagtgaggaaaagttaaaatagaatccattttttcagaccagacatcaggagtggaattcagcaatgcctagaaaaattatacataccttcatccttctccgcagcaattggaattacatgaatgtatcccacagttacactgacagaagttctaagagacatagatggctgggcatggatttccatagatagaaatactggctcattccagtaattccagcattttgggaggacacagtgggtggtccacttgagctcaggaatttgagaccagcctg

SEQ ID NO: 861233 - DNA, 616 bp, Homo sapiens
tatttgcaacttatattgcagagaaagggtttatattcttaatatccaaagagcttctaatactacagaagaaaataacctagagccctatggaaagatcagagtaatgtttcattcacagaaaaataagtgcaaatgattctacaccacatgaaaagatgctcatagctgctgatataaaagaaatccatatgaaaactacatgaagattccatttttaacctaccagattggcaaagtcctaattttaacagtatattcttttggccaggctatggggagataggcactgctgtatatggttagtagcaataatctgatgtgtaccacttcaaatcagtgaggaaaagttaaaatagaatccattttttcagaccagacatcaggagtggaattcagcaatgcctagaaaaattatacataccttcmtccttctccgcagcaattggaattacatgaatgtatcccacagttacactgacagaagttctaagagacatagatggctgggcatggatttccatagatagaaatactggctcattccagtaattccagcattttgggaggacacagtgggtggtccacttgagctcaggaatttgagaccagcctg

SEQ ID NO: 861234 - DNA, 645 bp, Homo sapiens
ttcattcttttttccctaatcttgtcttcatgctttatttcattaagttgatcttcagtctctgatatcctttcttctgctttatcgatttggctatttttacttgtgtatacttcacgaagtttttgtgctgtgtttttcagcaccatcaggtcatttatgttcttctctaaactggttattctagtgagcaattcctttaacctgttttcaagyttccttgcattgcattcctttcaagctaaacatgcttctttagctcgtaggagtttgttattacccaccttctgaagcctacttctgtcaattcatcaaactcattctccatccagttttgttcccttgctggcaaagagttgtgatcctttggaggagaagaggcattctggtttttggaattttcagcctttttgtgctggtttttcctcattttcatgtatttatctatctttggtctttgatattggtgacctttggatggggtttttgtgtggacgtccttcttgttgatgttgatgctactcctttctgtttgttagttttccttctaacagtcaggcctctctgctgcaggtctgctggagtttgctggtggtccactccagaccctgtttgcctgggtatcaccagcagaagctgcagaac

SEQ ID NO: 861235 - DNA, 645 bp, Homo sapiens
ttcattcttttttccctaatcttgtcttcatgctttatttcattaagttgatcttcagtctctgatatcctttcttctgctttatcgatttggctatttttacttgtgtatacttcacgaagtttttgtgctgtgtttttcagcaccatcaggtcatttatgttcttctctaaactggttattctagtgagcaattcctttaacctgttttcaagcttccttgcattgcattcctttcaagctaaacatgcttctttagctcgtrggagtttgttattacccaccttctgaagcctacttctgtcaattcatcaaactcattctccatccagttttgttcccttgctggcaaagagttgtgatcctttggaggagaagaggcattctggtttttggaattttcagcctttttgtgctggtttttcctcattttcatgtatttatctatctttggtctttgatattggtgacctttggatggggtttttgtgtggacgtccttcttgttgatgttgatgctactcctttctgtttgttagttttccttctaacagtcaggcctctctgctgcaggtctgctggagtttgctggtggtccactccagaccctgtttgcctgggtatcaccagcagaagctgcagaac

SEQ ID NO: 861236 - DNA, 612 bp, Homo sapiens
ctatttttacttgtgtatacttcacgaagtttttgtgctgtgtttttcagcaccatcaggtcatttatgttcttctctaaactggttattctagtgagcaattcctttaacctgttttcaagcttccttgcattgcattcctttcaagctaaacatgcttctttagctcgtaggagtttgttattacccacyttctgaagcctacttctgtcaattcatcaaactcattctccatccagttttgttcccttgctggcaaagagttgtgatcctttggaggagaagaggcattctggtttttggaattttcagcctttttgtgctggtttttcctcattttcatgtatttatctatctttggtctttgatattggtgacctttggatggggtttttgtgtggacgtccttcttgttgatgttgatgctactcctttctgtttgttagttttccttctaacagtcaggcctctctgctgcaggtctgctggagtttgctggtggtccactccagaccctgtttgcctgggtatcaccagcagaagctgcagaacagcaaagattacagccttttccttcttctggaagctttgtcccagaggagcacccatcag

SEQ ID NO: 861237 - DNA, 612 bp, Homo sapiens
ctatttttacttgtgtatacttcacgaagtttttgtgctgtgtttttcagcaccatcaggtcatttatgttcttctctaaactggttattctagtgagcaattcctttaacctgttttcaagcttccttgcattgcattcctttcaagctaaacatgcttctttagctcgtaggagtttgttattacccaccttctgaagcctacttctgtcaattcatcaaactcattctccatccagttttgttcccttgctggcaaagagtkgtgatcctttggaggagaagaggcattctggtttttggaattttcagcctttttgtgctggtttttcctcattttcatgtatttatctatctttggtctttgatattggtgacctttggatggggtttttgtgtggacgtccttcttgttgatgttgatgctactcctttctgtttgttagttttccttctaacagtcaggcctctctgctgcaggtctgctggagtttgctggtggtccactccagaccctgtttgcctgggtatcaccagcagaagctgcagaacagcaaagattacagccttttccttcttctggaagctttgtcccagaggagcacccatcag

SEQ ID NO: 861238 - DNA, 612 bp, Homo sapiens
ctatttttacttgtgtatacttcacgaagtttttgtgctgtgtttttcagcaccatcaggtcatttatgttcttctctaaactggttattctagtgagcaattcctttaacctgttttcaagcttccttgcattgcattcctttcaagctaaacatgcttctttagctcgtaggagtttgttattacccaccttctgaagcctacttctgtcaattcatcaaactcattctccatccagttttgttcccttgctggcaaagagttgtgatcctttggaggagaagaggcattctggtttttggaattttcagyctttttgtgctggtttttcctcattttcatgtatttatctatctttggtctttgatattggtgacctttggatggggtttttgtgtggacgtccttcttgttgatgttgatgctactcctttctgtttgttagttttccttctaacagtcaggcctctctgctgcaggtctgctggagtttgctggtggtccactccagaccctgtttgcctgggtatcaccagcagaagctgcagaacagcaaagattacagccttttccttcttctggaagctttgtcccagaggagcacccatcag

SEQ ID NO: 861239 - DNA, 543 bp, Homo sapiens
tatatatatatatatttttgtttgtttgtttgttttgtttgtttgagacggagtctccctctgttgcccaggctggagtgcagtggtgcgatcttggctcactgcaagctccgcctcccaggttcatgccattctcctgcctcagcctcccaagtagctgggattacaggcgcccrccaccacacctggcgtggtgtattttttgtgtgtgtgtgtatttttttgtatttttagtagagatggggtttcaccatgttagccaggattgtctcgatctcctgaccttgtgatccgcccaccttggcctcccaaagtgctgagattacaggcgtgagccaccacgcccagccaggaattttatattttttaaaagtaagaacttaagagatatatagaagatggtgaaatatctaaaatacatgttactggtgctattcttcaagaaaaggaaggcaaaataaagacatttacacgcaaacaaaaaccaaaaaaccgaatttgttgaccttcataaaaaaaatagaatttaagtgtgagtttttc

SEQ ID NO: 861240 - DNA, 543 bp, Homo sapiens
tatatatatatatatttttgtttgtttgtttgttttgtttgtttgagacggagtctccctctgttgcccaggctggagtgcagtggtgcgatcttggctcactgcaagctccgcctcccaggttcatgccattctcctgcctcagcctcccaagtagctgggattacaggcgcccaccaccacacctggcgtggtgtattttttgtgtgtgtgtgtatttttttgtatttttagtagagatggggtttcaccrtgttagccaggattgtctcgatctcctgaccttgtgatccgcccaccttggcctcccaaagtgctgagattacaggcgtgagccaccacgcccagccaggaattttatattttttaaaagtaagaacttaagagatatatagaagatggtgaaatatctaaaatacatgttactggtgctattcttcaagaaaaggaaggcaaaataaagacatttacacgcaaacaaaaaccaaaaaaccgaatttgttgaccttcataaaaaaaatagaatttaagtgtgagtttttc

SEQ ID NO: 861241 - DNA, 589 bp, Homo sapiens
ccctccagccaaacgactaggaacggggcagcctagcaagacagaaactgcatccaaacaccacagaaatatcctcgaggggcttgatttgggaggagtatgttccctcaatcctctctccttgaggtgtccctgttaacttaggtgtgcctgaaatctagggacccattatgacactataatgttgggtctcctgtccatgaaacagtaacagtgatttttgatttgctattaacattcttttgggtacagggccagacattttacacacctaatgctgtttgatccatatgraaaccttgaaaaatcagaagtttttttcttttacttcccattttacatataaggaaaattggatccaaagaggatgagccacctgttccttgtcacatgactgatgaacctcaggtatggcgggttctagggccaaacactctttccacaaccatgaaacgcttcctctgcttttggcctcagcatgtaccactgtgcacagctttgagaagacccacaatcaaaggtctgttggccaggactgtggaaacaggcccatgattgaggaagaggacatttttctagaaacagccat

SEQ ID NO: 861242 - DNA, 646 bp, Homo sapiens
acattacctcctttcataacctttaatatccctcggaaaccctctccctttacattctccatctcttccctggaacatctccagaagggttcgtgattgggttacatacaagtttccgaggctgtaacttcctttcagtcataaatcacctcttacacactcactttttccttctcattgttcttctgtattaatagccccaaatcctgggagcatttgagaactgttccaattttggtttgaaaatcaatttggaagctaatggttggctttgcttagacctccaatycctctgggaaggccagttcctacaaattggccaagccagggattgggggcttctcttaaatgccggatactttggtctcagtgtttttcttctactctgtccctaaaattaaaaagttaattctgggtgggggtgggggagtagagggaacttaatgccttctgttgtatgagttggtagataatttttaaaatggttcatttcatggtaggtcaaattctattacgaaagaaatataaaaatgaaattaccttgtgtttgttaaaaggctctgatgttcttctcatttttttggaaacatctttctcctaaataagttctgcttcctccataggctgctgacctccctcggggaaa

SEQ ID NO: 861243 - DNA, 646 bp, Homo sapiens
acattacctcctttcataacctttaatatccctcggaaaccctctccctttacattctccatctcttccctggaacatctccagaagggttcgtgattgggttacatacaagtttccgaggctgtaacttcctttcagtcataaatcacctcttacacactcactttttccttctcattgttcttctgtattaatagccccaaatcctgggagcatttgagaactgttccaattttggtttgaaaatcaatttggaagctaatggttggctttgcttagacctccaattcctctgggaaggccagttcctacaaattggccaagccagggatkgggggcttctcttaaatgccggatactttggtctcagtgtttttcttctactctgtccctaaaattaaaaagttaattctgggtgggggtgggggagtagagggaacttaatgccttctgttgtatgagttggtagataatttttaaaatggttcatttcatggtaggtcaaattctattacgaaagaaatataaaaatgaaattaccttgtgtttgttaaaaggctctgatgttcttctcatttttttggaaacatctttctcctaaataagttctgcttcctccataggctgctgacctccctcggggaaa

SEQ ID NO: 861244 - DNA, 646 bp, Homo sapiens
acattacctcctttcataacctttaatatccctcggaaaccctctccctttacattctccatctcttccctggaacatctccagaagggttcgtgattgggttacatacaagtttccgaggctgtaacttcctttcagtcataaatcacctcttacacactcactttttccttctcattgttcttctgtattaatagccccaaatcctgggagcatttgagaactgttccaattttggtttgaaaatcaatttggaagctaatggttggctttgcttagacctccaattcctctgggaaggccagttcctacaaattggccaagccagggattgggggcttctcttaaatgccggatactttggtctcagtgtttttcttctactctgtccctaaaattaaaaagttaattctgggtgggggygggggagtagagggaacttaatgccttctgttgtatgagttggtagataatttttaaaatggttcatttcatggtaggtcaaattctattacgaaagaaatataaaaatgaaattaccttgtgtttgttaaaaggctctgatgttcttctcatttttttggaaacatctttctcctaaataagttctgcttcctccataggctgctgacctccctcggggaaa

SEQ ID NO: 861245 - DNA, 620 bp, Homo sapiens
tgggtgagacagcttgacctgctagctggtcaagaaaccagaaaggctggcctgcttgatactcccttttcacacctgagactcagaaaagttaagggactctccaaagccacagagctttataagtggcaaagctaagactcaaattcaggtctactgccctgaaatctgggatgacttgaaaaacttatctacaaaggcttctacaacgatttactaagaaactcccagttaattgatctctaaattgcagggacatcattccagtcatcacgggaaggtctgcaaagtacctatgcrtgtttatgggtaagaaattgctctctgctaggcttgaactcaccatcatggagaacagagacctctaattctggaaagaagttaatgactggggcttcaacctcaagcacagcatgctgcctcctcagcataggaggggagcagggacttgcattgccatctcatccctcagcctcgggcaccattgcccagggaacacagactctgagacatacctagaacagtgcactcacctctgtgcatgaggctgttcattgagaactcagagtctccctgctgggtggctttttgctagctgtgaggcacattcttggacagca

SEQ ID NO: 861246 - DNA, 620 bp, Homo sapiens
tgggtgagacagcttgacctgctagctggtcaagaaaccagaaaggctggcctgcttgatactcccttttcacacctgagactcagaaaagttaagggactctccaaagccacagagctttataagtggcaaagctaagactcaaattcaggtctactgccctgaaatctgggatgacttgaaaaacttatctacaaaggcttctacaacgatttactaagaaactcccagttaattgatctctaaattgcagggacatcattccagtcatcacgggaaggtctgcaaagtacctatgcgtgtttatgggtaagaaattgctctctgctaggcttgaactcaccatcatgragaacagagacctctaattctggaaagaagttaatgactggggcttcaacctcaagcacagcatgctgcctcctcagcataggaggggagcagggacttgcattgccatctcatccctcagcctcgggcaccattgcccagggaacacagactctgagacatacctagaacagtgcactcacctctgtgcatgaggctgttcattgagaactcagagtctccctgctgggtggctttttgctagctgtgaggcacattcttggacagca

SEQ ID NO: 861247 - DNA, 637 bp, Homo sapiens
gacagtaatctgggctatcatgaaagtaatcagagtgactgctagagagtaaccctgggcctcatgtgttatctccaaagggacactacatcctgcataccatcgccactgaacattttaatggactcgtttttcacctgtaactaaatgtcttaaacaggaaaatatactgttagttgcaacccagcgtcccttgccctaaactgaaagacaaattcctcagcctgccctaccaccttttctgccctggcatagcagcaaccgcagaaacgctcctcccacctctttcagccgctgcccttcgtgttgtagagacaggaggccaaggaggccagagggtcagactcctgctggggttgagtctccaaacctagcacaggcccagggagcagctccggaaacaacatcctgagcgacgtccccggaccgtgctgtgcactgagacggacacacacacatcacccagggagccgttcaagcttcctcaaccccgggggggrgaagagtaaatatttctactttgcgcgcgcaaaaatgaaggacgaggacagtaacgggacttgttcaaggtcgcaggcccgagaaaggacatggttggaagagccacgaggaggactgcggtcgctcctctcacctg

SEQ ID NO: 861248 - DNA, 637 bp, Homo sapiens
gacagtaatctgggctatcatgaaagtaatcagagtgactgctagagagtaaccctgggcctcatgtgttatctccaaagggacactacatcctgcataccatcgccactgaacattttaatggactcgtttttcacctgtaactaaatgtcttaaacaggaaaatatactgttagttgcaacccagcgtcccttgccctaaactgaaagacaaattcctcagcctgccctaccaccttttctgccctggcatagcagcaaccgcagaaacgctcctcccacctctttcagccgctgcccttcgtgttgtagagacaggaggccaaggaggccagagggtcagactcctgctggggttgagtctccaaacctagcacaggcccagggagcagctccggaaacaacatcctgagcgacgtccccggaccgtgctgtgcactgagacggacacacacacatcacccagggagccgttcaagcttcctcaaccccggggggggraagagtaaatatttctactttgcgcgcgcaaaaatgaaggacgaggacagtaacgggacttgttcaaggtcgcaggcccgagaaaggacatggttggaagagccacgaggaggactgcggtcgctcctctcacctg

SEQ ID NO: 861249 - DNA, 640 bp, Homo sapiens
gctacaaaccaaatatgctatgtttaataagctctttattacttttaacaggaaaatgaaaatctgagaaatttttcaccaactttcagtgttttggtgataaaaagtcaaaatgatttagaagtgtgttttcatcaatattttttagagagtcaacaatttaaatgcttatataagcatttaatatataagcatataaataactgataaaataatagaagtcatatacatgctcattgttgacctattttaaaaagaaatgaaatgtccaaatgaaggttctcttttagatatcacattgaaaaatattaatagttgatagttggattagaactagcagatgggaaaaataagcaatgaaataataagtttgttctgcccatcttattatatatttcttataaaaggtagatgacttatatttagggccgaaatgctgaaacaatttttttaagtcagatagaaatsattttaagacaatcacatgaatttaaaaaaatatcatctcatttctctgaatagttttaactatatatacataaaatctacaacctaaaactaaatacattgtctgttctcaaacatcttatggttaaagtttggaaacctgggtgacgcgactcaggatttatagttctca

SEQ ID NO: 861250 - DNA, 681 bp, Homo sapiens
acttatctcaaggagaaaactccacgattctacttgtcaaccagctctgcaaataggataattacacacgtgggatttttttttttttctgcctacagttgaaactgggtttgcaaatggctcctgggtaaaaagtattctatagcacctccatctcccagaatgagttcatttaagaggtkccaatgtatagttaacagcactgtagtttggctgaaggaatctttgtgatgctcagtaagagtggattgacatgtgaagctttcatgattgagttattccttcatcatggggcctctctcattcccccacatattgaaaagaatataattattacataaaaatttggagccatgtgctaacaatatgtgccataataaaccatgcatacataaagtctcaaataagcaggtaccctctcagtgtctaacttttcatataaatgccagaataaattatctgcttcagtgatagagcaaagcacttgagggtattaacaaaaagtatccatcagtgacatcatgtaatatgctatatacatcacagaatgacacctttaaaaaatattattgactttagatgggtgatgtggcaggtgcaaagaaggcaaagaaataaagatgacataataaatagatcctaaaggaaagctaagatcaaaaataaactcctgtacttttt

SEQ ID NO: 861251 - DNA, 736 bp, Homo sapiens
aacagccttttttggcagaagtggaaaactcaatcctcaacttcatattaaattgcaaggggccctgaatagtcaaaataaccttgaaaatgaagaacaaagcggaaggactcacaattcctaacttcaaaacttaatacaaaaccacattatcaaaacagtgtcatactggcataaggataaatatgttgaccaatagaataaaattgatagttcagaaataaacccacacacctatggccagttgattttgayagggttggcaagtccatttaatgaggaaaaaccagtctcctcaagaaatagtgctgggactcagccgggcatggtggctcatgcctgtaatcccagcactttgggaggccgagttgggcagattacctgaagtcaggagttcgagaccaacctgaccaacatggtgaaaccccatctttactaaaaatacaaaaattagccgggcgtggtggcacatgcctgtaatcccagctactcggggggctgagggaagataattgcttgtgcctgggaggcggaggttgcagtgagccgagattgtgccactgcactccagcctggccaacagagcaagactctgtctcaaaaaaaaaaaaaaaaagaaaagaaaaaaaagaaatagtgctggcacaactgaatttccacatgcaaaacaatgaagttggacctctctcataccatatacaaaaattatctcaaaatgaatcaattacctaaatgt

SEQ ID NO: 861252 - DNA, 736 bp, Homo sapiens
aacagccttttttggcagaagtggaaaactcaatcctcaacttcatattaaattgcaaggggccctgaatagtcaaaataaccttgaaaatgaagaacaaagcggaaggactcacaattcctaacttcaaaacttaatacaaaaccacattatcaaaacagtgtcatactggcataaggataaatatgttgaccaatagaataaaattgatagttcagaaataaacccacacacctatggccagttgattttgacagggttggcaagtccatttaatgaggaaaaaccagtctcctcaagaaatagtgctgggactcagccgggcatggtggctcatgcctgtaatcccagcactttgggaggccgagtygggcagattacctgaagtcaggagttcgagaccaacctgaccaacatggtgaaaccccatctttactaaaaatacaaaaattagccgggcgtggtggcacatgcctgtaatcccagctactcggggggctgagggaagataattgcttgtgcctgggaggcggaggttgcagtgagccgagattgtgccactgcactccagcctggccaacagagcaagactctgtctcaaaaaaaaaaaaaaaaagaaaagaaaaaaaagaaatagtgctggcacaactgaatttccacatgcaaaacaatgaagttggacctctctcataccatatacaaaaattatctcaaaatgaatcaattacctaaatgt

SEQ ID NO: 861253 - DNA, 641 bp, Homo sapiens
aaggagggctacaaggggccctctcaaatgaatgagttaaagaggtgaaagaagagaaaaacacattgatagtcctggtttgcatctatcaaaattcattagtaataagtatccaaactattttaaatataaatcctgttatacaaaagtgtgcataagaacacacttgtactttcattaggaaaagagagttctgaggggtataaggtgtttttcaagggtcacagaactcagtacatttcttttcacatccccactgcagaagattacacagatatgagcaaacacatgaaaaacaatcacaattactgtttcattaaaaatagaaaaattagttatgtttcaaagaataacaacacatctcttttaccacaactccttgctccttcttttaccaaaagattttgcctggggagttaaattagccattgtgccccaaatttcctcatttctagaaccccacamggacttctgaagaggtttaaaaatgcagtgtttaagtgctgccataacttgtgttttcactgccttcgagggaggcctcaagccaaattcctcttctttcagatcctacagatttgttgggtactgagccaactagggtgtttcttgcactgggctgctgatcctttgttgcatga

SEQ ID NO: 861254 - DNA, 739 bp, Homo sapiens
atcctttgttgcatgaagacatacacatttctacaggagaaggcagcaagtaaatagatagttcatggcaatattagctcagaaagcattaggagaaaattccacaaaggcaataaatatcttccccagcaaaatgtgaagcagagaatcatcagacagtgatttacctactgacaaaaggtaagagaaaaagagaactgcagtcaggctagtcactggatctctggagataacaatggactcttattgtgtccaaagcacatctaggatgcaataatccttgctttacaccatatttactaaggtaacaatatggacgtaaattgacattactgtatgtgtttatgtcttaagttaattttrtttgttatatttctgtacatcatttctcattggtggtcagaggatataaagaaggagtggggtaaattcagaggtgtcaagaaaatcaaagtaacctgctgatttaaagaatgtcatacaaaaggaggtgggtgtttctgactcatccataactcaaaatgcagctccattttgacctcatgaccaggctatttcatcactacgagggaaccgctgttgatgtctacaatgttgatgatcctaaggtcaaaaataaaaaagccaccacccaaaaggctattttaatagaaacttatgacagtgaatccagttcaatagttttcagcttatattttccaaatccaaaactcttcagggtaagttgccattgcttaac

SEQ ID NO: 861255 - DNA, 605 bp, Homo sapiens
tagagtcccatgataggctgtctgcaagttgaggaacaaggaagccagtggtggatcagtctgagtcccaaaacctcaaaagtacggaagccgacagtgcagcctttagcctgtggccaaaggcccaagagcccctggcaaaccactggtgtgagcccaagagtccaraagctgaagacttggagtctgatgttcgaaggcaggaaacatctagcacaggagaaagatgaagaccggaagactcagcaagttggctcttccatcttctcctgcctgctttattctagccgtgctggcagctgattagatgatgtgcctagccagattgagggtgggtctgcctctcccagtccactgactcaaatgttaatctcttttggcaacaccctcatagacatacccaggaacaatactttgcatccttcaatccaatcaagttgacactcaatattaaccattacagatcttatgcttgtttggaggaaaggagagacttgatcaatgaaatacatggcagctagcatgaccacttgtccttaactgtttacgtgactggactagcaatagcaaccagtaggttttcttccatttagaggtaaccttac

SEQ ID NO: 861256 - DNA, 582 bp, Homo sapiens
tttggcctttgcacactggcatgtgttaaaaggcatgatggtcttggcttcttctctatcttacctagaaactgtcctcctaaccctcttagcagctctcccagtttcctagccacatctaccatattcttggttgccagtggactgattttggcttcactgccctgacttaaccagtatacctctccaatgtgactgaakcccatgattaacacccccaacttgtatcattacccctagtccaatcacttagcagcctacttgaggctaactgtcctaccctaatgtcgagaggctgagggaggagaatcgcttgaactcgggaggtggaggttgctgtgagccgagatcatgccactgcactccagcctgggtgacagagcgagactctgtctcaaaaagaaaataataataatatttcccaaaggagtgctactgttactgaaaaattatagacctctttcttaaaaccttctcctttttgtctatcacattgacagaaatcaaagtcatccctcgggatatgctgaagtagtactccttaaagtgtgctccaggaaaccagcattggtgtaacctggg

SEQ ID NO: 861257 - DNA, 636 bp, Homo sapiens
cccttcggaacttggtctgcctggaatgccaagtattaactgagatgttcaatgcatttaaagggaataaaggattatttttaaaccctctcgttccatttacccttcttccttccatgaaggctgcatggcagaatggaaggaattgaggctttggagctgagtggcctcgttagagagcccacttgtgttgctcaccagctgtgtgacagaaattacttaacttttaggagcctcagttttctcatctgcaaaatggaagcaataccttatagtatagattaagccataatcatagggagctgcctcacgtgctgcacatagacagacaacaaaaatgtacgtattcacatttttccctgttgggtaataatgtatagaacatacataagaatttaatttcagcacaaagcgaatctcaatgctatctgtaactgttaaagaaaactcttttactatcttaaatgcctcttkgcttttatgaactctgtttcatagttaaagtggtagccatgaagtccaaggacattgtaacaggattataatttgtaggtgcaaactcaggactgcccttggagacaaaaaaggtacttaaaattgatggtcacactggatttagtaactcaagtccaaaga

SEQ ID NO: 861258 - DNA, 691 bp, Homo sapiens
tagagattatgttatagttgtagtgttggccatcaaacccatcaataactaacatataagagcaaacgttagttcaagtttccctgtcttggtggcaattcgacccacattgtctttccatgtcctggttgttctagctttgctacaattccaagccagtggacagcaaaccacagcctgaggtcacatcccacctacctgctgttcttgcacggccygcaagacgagaatggttctggcatgttcaaatgattgcacaaggccgggtgcagtggctcacacctgtaatcccaacactttggaaggctgaggtggaaggattgcttgaggccagagttcaagaccagcctgggcaacatagcaagaccctgtctttacaaaaaatttaaaaatcagccaggcttggtagtgttcgtctgtagttccagctactccacaggctgaggcgggaggatcgcttgagcctaggagttcaaggttgcagtgagctgtgtttatgccactgcactccagcctgggtgacagagtgagaccctgactcaaaaaaaatttttttaatttaatttaagaaaaaaaagtaagagtttgtcaaccccaggtctaagcctgattgctttctgctgttaaaaactgatcaaatccactgtttggacttctcagggtacagtctatttgacgtccaatcttttca

SEQ ID NO: 861259 - DNA, 630 bp, Homo sapiens
cgaaataaagcgagaagataagattagagaaaaaaagagtgaaaagaaacaaagcctgcaagaaatataggactatgttaaaagaccaaatctatgtttgattggtgtacctgaaagtgacggggagaatggaaccaagctggaaaacacccttcaggatattacctaggagaactttcctaacctagcaagacaggccaacattcaaattcaggaaatacagagaaaaccacaaagatattcctgaagaagagcaaccctaagacacataattgtcaggttcaccaaagtagaaatgaaggaaaaaaatgctaagggcagccacagagaaaggtcagattactcacaaagggaagcccatcagactaacagcagatctctcggcagaaaccctacaagccagragagagtgggggccaatattcaacattttaaagaaaagaattttcaacccagaatttcatatccagccaaactaagcttcataagtgaaggagaaataaaatcctttaccgataagaaaatgctgagagattttgtcaccatcagacagacttgtcctacaagagctcctgaaggaagcactaaacattgcaaggaacaaccagtatcagccactgcaaaaacata

SEQ ID NO: 861260 - DNA, 630 bp, Homo sapiens
tcctgaaaactgaaaataaaatcttcattaaaacccatttatgcctagtgttccattattggaacgctaagcttgtgggaatcatgtatctcctaccgctcaagaacatagccaaggtctgtttcttcacacacaaaaaatgtgcagcctccggcataaatgtgtcaatgcgttaacaatatacacaagatgtatatttccaggtaaaatttccaatttaccttttcctgttctaaataactcccacaaaactattcacgaatcctaaaaatacatttaccagttatgttaaatttggaacaatacattcaaagtgaaaatggtaagtaatttaaaatgcataaccaaaatgtctttccatacattcrgaaacaaacagactttcttctgttatgcacgtgttgtattttataatgtattatgttaccaaatagaacagacctttagtaattgctcaagtagcggcttcatctctctcagcctccagctcctaacacctgtaggttgttgccacctcttctgtttttcttgaaatgctttctagaagcacaaaaaaatagtgatgaaaattgggtaatttttaatacttacaaaacataattctgcattagctttataggaatactcttt

SEQ ID NO: 861261 - DNA, 686 bp, Homo sapiens
ttgatttcatatcatgagactttgctgaagttgctaatcagcttaaggagtttttgagctgagacgatggggttttctaaatatacaatcatgtcatctgcaaacagagacaatttgacttcctctcttcctatttgaatacactttatctctttctcttgcctgattgccctggccagaacttccaacactatgttgaataggggtggtgaaagagggcattcttgtcttgtgccagttttcaaaggaaatgcttccagttgttgtccattcagtatgatattggctatgggtttgtcataaatagctcttattgttttgagatatsttccatcaatacctagtttattgagagtttttagcatgaagcgatgttgaattttatcaaaggccttttctgcacctgttaagataatcctgtagtttttatcattggctctgtttatgtgatggattatgtttattgatttgtgtatagtgaaccagccttgcatctcagggatgaagctgacttgatcatggtggataagctttttgatgtgctgctggatttggtttgccagtattttattgaggatttttgcattgatgttcatcaaggatattggcctgaaattttctttttttgttgtgtctctgccaggttttgatatcaagatgatgctggcctcatattatgagttagg

SEQ ID NO: 861262 - DNA, 624 bp, Homo sapiens
aattatgtggtcgattttagaataagtgctacacaggcccctcttctccatgtttggtgctgagaagaatgtatattgtgttgatttggagtggagagttctgtagatgtctattaagtctgcttggtccagagttgagttcaagtcctgaatatccttgttaattttctgtcttgttgatctgtctaacattgacagtagggtgttaaagtctctcactattattgtgtgggagtctaagtctccttgtaggtctctaataacttgttttataaatctgagtactcctatatttaggatagttatctytttttgttgcctcaatccctttaccattatgtaatgcccttcttggtctttattgatctttgttggtttaacatctgtttttatcagaccctaggattgcaatccctgcttttttttttttttttttttttttttttttttttttttttttttgctttccatttgcttggtaaatattcctccatccctttattttgagcctacgtgtgtctttgcacttgagacgggtatcctgaatacaggacactgatgagtcttgactctttatccaatttgccagtctatgtccttgaattggggcatttagcccaccca

SEQ ID NO: 861263 - DNA, 624 bp, Homo sapiens
aattatgtggtcgattttagaataagtgctacacaggcccctcttctccatgtttggtgctgagaagaatgtatattgtgttgatttggagtggagagttctgtagatgtctattaagtctgcttggtccagagttgagttcaagtcctgaatatccttgttaattttctgtcttgttgatctgtctaacattgacagtagggtgttaaagtctctcactattattgtgtgggagtctaagtctccttgtaggtctctaataacttgttttataaatctgagtactcctatatttaggatagttatctctttttgttgcctcaatccctttaccattatgtaatgcccttyttggtctttattgatctttgttggtttaacatctgtttttatcagaccctaggattgcaatccctgcttttttttttttttttttttttttttttttttttttttttttttgctttccatttgcttggtaaatattcctccatccctttattttgagcctacgtgtgtctttgcacttgagacgggtatcctgaatacaggacactgatgagtcttgactctttatccaatttgccagtctatgtccttgaattggggcatttagcccaccca

SEQ ID NO: 861264 - DNA, 580 bp, Homo sapiens
aacagttacagaatacacattcttctcatcagcataaagaacattctccaggataaacaatatattaggacacaaaataaatctcaataaatttttaaaaatcaaaatcatatcaagtatcttcttagactacaatggaataaaagtagaaatcaataacaagaggaactttggaaactgtatacatacattaaacagtatactcttgaatgaccactgggtcaaggaagaaattaaggaggaaatcgaaacatttcttgaaaaaaatttgaaatataacataccaaaacctatgtgatacaacaaaagcagtgctgagagggaagtttatagaaataaacatccacattaraaaagtagaaagacttcaaatacacaatctaatgatacatctcaaggaattaaaaagcaagaacaaaccaaaccaattagcagaagaaaataaataataaagatcagggcagaactaaactaaatcgagagtaaaaacaaattacaaaaaatcaactaaatgaaaagttggttttttgaaaaaataaactgataaaacactacctagactaatcaagtaaaggagaaa

SEQ ID NO: 861265 - DNA, 589 bp, Homo sapiens
gagttctgtagatgtctattaggtcctcttggtgcagagctgagttcaattcctggatatccttgttaactttctatctcattgatctgtctaatgttgacagtgggctattaaagtctcccattattattgtgtgggagtctaagtctctttgtaggtctctaaggacttgctttatgaatctgggagctcctgtattgggtgcatatatatttaggatagttagctcttcttgttgaattgatccctttaccattatgtaatggcctcctttgtctcttttgatctcggttggtttaaagtctgttttatcagagactaggattgcaatccttgctttttttttttgttttccatttgcttggtagatcttcctccrtccctttattttgagcctatgtgtgtcattgcacatgagatgggtctcctgaatacagcacactgatgggtcttgactctttatccaatttgccatctgtgtcttttaattggagcatttagcccatttacatttaaggttaatattgttatgtgtgaatttgatcctgtcatgatgttagctggttattttgctcattagttgatccag

SEQ ID NO: 861266 - DNA, 589 bp, Homo sapiens
gagttctgtagatgtctattaggtcctcttggtgcagagctgagttcaattcctggatatccttgttaactttctatctcattgatctgtctaatgttgacagtgggctattaaagtctcccattattattgtgtgggagtctaagtctctttgtaggtctctaaggacttgctttatgaatctgggagctcctgtattgggtgcatatatatttaggatagttagctcttcttgttgaattgatccctttaccattatgtaatggcctcctttgtctcttttgatctcggttggtttaaagtctgttttatcagagactaggattgcaatccttgctttttttttttgttttccatttgcttggtagatcttcctccgtccctttaytttgagcctatgtgtgtcattgcacatgagatgggtctcctgaatacagcacactgatgggtcttgactctttatccaatttgccatctgtgtcttttaattggagcatttagcccatttacatttaaggttaatattgttatgtgtgaatttgatcctgtcatgatgttagctggttattttgctcattagttgatccag

SEQ ID NO: 861267 - DNA, 562 bp, Homo sapiens
caccaccttacgttgtagaaatgcgttaaagtttatgagaaggttggagaaagttaagtggaattttaaaaggcagaggatttagaaatgttaactaaaactcgatttccccaagaccccatggaaaagtcctccagaagttaargcctaccagaaaatgattcacttcctaaccttcctttttctcctaggggtttcattctctcttgaaatacctttgttttaagttctctattttttggatctccttccaacatctattttgcagacaacctcattctgtctgagtaaaagtcttgaccctgaattcatcccatttccctaactgggaccatcagcaggacagtccaggatggacactgtcagccaatgagcagtcttctacaaagtcttaccaaatatgcctctctaaggggtatttgttggttgttccttgtacacacccacaccctatctctcacctcctctccttttctcccacaaacactacctgatttcctgtttggggagtcactctctccctatgctgggccatgagattggggtacgattctcctctccc

SEQ ID NO: 861268 - DNA, 562 bp, Homo sapiens
caccaccttacgttgtagaaatgcgttaaagtttatgagaaggttggagaaagttaagtggaattttaaaaggcagaggatttagaaatgttaactaaaactcgatttccccaagaccccatggaaaagtcctccagaagttaaggcctaccagraaatgattcacttcctaaccttcctttttctcctaggggtttcattctctcttgaaatacctttgttttaagttctctattttttggatctccttccaacatctattttgcagacaacctcattctgtctgagtaaaagtcttgaccctgaattcatcccatttccctaactgggaccatcagcaggacagtccaggatggacactgtcagccaatgagcagtcttctacaaagtcttaccaaatatgcctctctaaggggtatttgttggttgttccttgtacacacccacaccctatctctcacctcctctccttttctcccacaaacactacctgatttcctgtttggggagtcactctctccctatgctgggccatgagattggggtacgattctcctctccc

SEQ ID NO: 861269 - DNA, 688 bp, Homo sapiens
gttttgaaatggaatcattcataaaaatccttccaaccaagagaaaccctggaccagatggattcacagctgaatcctaccagatgtacagagaagagctggtactacttctactgaaactattccaaaaaatcgagaagagactccttcmtaattcattctttgaagccagcatctctctgataccaaaacctggcaaagagacaacaacaaaataagaaaactgcaggccaatattcatgatgaacataggcaaaaagaaaaaaaatcctcaacaaaatatcagcaaaccaaatccagcagcacatcaaagagtttattcaccatgatcaagtagactttattcctgtgatgcaaggttggttcagaacacacaaataaataaatgtgattcaccacataaacataattaaaacaaaaaccatctgattatctcaatagactcagagaaagcttgtgataaaatcgaacatcgcttcatgataaaaaccctccagaaagtaagcatcaaaggaacatacctcaaaataataagagccatctatcacaaacccacagtcaacatcatactaaatgggcaaatactagaatcattccccttgagaactggaataagacaagtatgctcattctcaccattactattcaatatagtaatggaagtcttagccagagcaattagcaagag

SEQ ID NO: 861270 - DNA, 589 bp, Homo sapiens
agagcttgaccatttttcaatctgaatatattcaggataagatgttccctaaagatcacctgcgacgggaccacttctgatttattaggcaggctgagcatcccaaatcacgcagagaaaagaaacaataataattcaacaaaatgactaccatttattgtctgctagattccaggcattttgcacatattaacytcacgttagctgcacaacaatcctgtgagttagattttattttcagatgaagaagcttgtttcagaaattaacttgcccaggccacacgcagcatgcagtggtcaagctaagatgcgcacctgagtcagactgactcttgagacagacggttacatactgccttatgaaaggactatttatgcaaagcaactctcaaatgctgaagagccgagaaaccaaagaaggcagacaaatccagtttgtctgaattgggtgatgtattgagagaacttacagacagaagcatggtcttgggtggctgcaagacaggtaggtctccgtgctgttgtccctcagacccaaggcctatatatcacaggaaaggggtgtatgtgttctaccaagacagttaaa

SEQ ID NO: 861271 - DNA, 590 bp, Homo sapiens
gaggctgtaaggcagacccctgaattccaaagttgctgggagtattgggacaatcaggcttgacaagagacacttacagacaagaagacagaaggagacagaggcacccacatgataaagagagtcaagcagcagctacccacttctggttccttaaacgttctaaataaacagtggaagcttagtcttctcttggttaatctttcatctctccagagaatgtggctttagttactacccagttttcttatcagaggaaaccaatgtatacaaaggcaatggagttagtccagaagcctttatctaattatattatcagaagtcaatggttrgccttaaacagtgcccacttctctagagtctaagacagggaggtgagaacaagccaggccagagctcaggatagagttgagtagggggcaaaatttcagctccagtctggactcagtggctcacgcctgtaatcccagcaatttgggaggccgaggtgggtggatcacttgaagtcagaagtttgagaccagcctggccaacatggtgaaaccccatctctgctgaaaatacaaaaattagccaggcatggtggcggg

SEQ ID NO: 861272 - DNA, 705 bp, Homo sapiens
gctaggccattgttcacctatcaaattaggaaaacattaaaggctggtgagggtgcagtgatcaattgctaatgccccaggaaaaaaataagaaaacaattttcaacattcaattgccccctatcacctagagaaaaagtccaaagacctcagcaaggcctatgagactctccagagtctcatcctcaccttcttccccaggcttacctcctaccatgccacagctcccacctgacactcacagtactgaascagctaacatgtcctgagcatggcatggaatgtcatgtctgcaagatggccctacctggatgctctgtcctccacttccaccttcccaaccccaccctgtcttctcctaacacctactcctcgacagactattctgagatgtaaccacctttaggaaactctcatgacctgggtttggtggtcctgctctgcgctgtcatcacacacacattccctcccttagcccttaccacactgtattgaaaatgactctttatggttttctttccaccttagattatatgcacctcaagagaggcattatctttttattcattcatgcatctctgggcctaatccagtgcagatgctcaacagatgactcttgaactaatcattcatgtaataaatcaattattctattctgcacaataaatttttgccactattctggtaaatgcaaattttatttta

SEQ ID NO: 861273 - DNA, 705 bp, Homo sapiens
gctaggccattgttcacctatcaaattaggaaaacattaaaggctggtgagggtgcagtgatcaattgctaatgccccaggaaaaaaataagaaaacaattttcaacattcaattgccccctatcacctagagaaaaagtccaaagacctcagcaaggcctatgagactctccagagtctcatcctcaccttcttccccaggcttacctcctaccatgccacagctcccacctgacactcacagtactgaaccagctaacatgtcctgagcatggcatggaatgtcatgtctgcaagatggccctacctggatgctctgtcctccacttccaccttcccaaccccaccctgtcttctcctaacacctactcctcgacagactattctgagatgtaaccacctttaggaaactctcatgacctgggtttggtggtcctgctctgcgctgtcatcacacacacattccctcccttagcccttaccacactgtattgaaaatgmctctttatggttttctttccaccttagattatatgcacctcaagagaggcattatctttttattcattcatgcatctctgggcctaatccagtgcagatgctcaacagatgactcttgaactaatcattcatgtaataaatcaattattctattctgcacaataaatttttgccactattctggtaaatgcaaattttatttta

SEQ ID NO: 861274 - DNA, 627 bp, Homo sapiens
atggacatggaatacatttgttaaaaagccaagttgaacttctagagattaaaaactacaatggctttgattttaaaaatacactggataagatgaacagcaaattaaacattgcagaggaaaagattagttaacttgaggagattgaaatgaaatagaaaaasaaggatttttaaaatgaagaatgtagcaatgagacaacttccagtggcctaacatactggtatttagagtgtttcaagaagtatggggcaggtgggagggcagaaacaaaaattttataaaatgatggccaaatcctttccaaattttatgaaaattataaatccacataaaaaagttcaaagaaccccaagcacaagaaacatgaagaaaactacagcaaagtcataccgaaattgctcaaagccagttataaaagaaaatgttaaaagcgtccagagaaaaataactcattacctacagaggaataaagataaggaagacagtagattcctcaccagaaacaatgcaacagagaagacagtggagcaatatctgtcaagtattggaagaaaaaaaaaagctgtcaatctaaaaatctatatctagtaaaaatgcctccaaaaattaagcaaaataagtctt

SEQ ID NO: 861275 - DNA, 627 bp, Homo sapiens
atggacatggaatacatttgttaaaaagccaagttgaacttctagagattaaaaactacaatggctttgattttaaaaatacactggataagatgaacagcaaattaaacattgcagaggaaaagattagttaacttgaggagattgaaatgaaatagaaaaacaaggatttttaaaatgaagaatgtagcaatgagacaacttccagtggcctaacatactggtatttagagtstttcaagaagtatggggcaggtgggagggcagaaacaaaaattttataaaatgatggccaaatcctttccaaattttatgaaaattataaatccacataaaaaagttcaaagaaccccaagcacaagaaacatgaagaaaactacagcaaagtcataccgaaattgctcaaagccagttataaaagaaaatgttaaaagcgtccagagaaaaataactcattacctacagaggaataaagataaggaagacagtagattcctcaccagaaacaatgcaacagagaagacagtggagcaatatctgtcaagtattggaagaaaaaaaaaagctgtcaatctaaaaatctatatctagtaaaaatgcctccaaaaattaagcaaaataagtctt

SEQ ID NO: 861276 - DNA, 548 bp, Homo sapiens
gattttcttaaggcagacaaaatttttctgtcctcttttgccaatgaggatctctgctatattgactgccttctatatgtcatataggcagtgcgctagattctgttcttatatctcataaaacccctccaagatgaagaatggtattcctatttcacacagaggtaactgatactcaaagaagttcactaacttgcccgaggtcaccaagctagcaggtggcaaggatgaatttcaagcttaggacatctgactccaacctcaacycagtccccagatgaggtgcttgcctacaggagtctcaagaagatgccagggagtaaatcagcttattaatattttgtaaagcttccaggaaatgacaaaacttgaattcacagggctgtgaatattgtgatagtcaattcaggggtctagcttgcagtgtatgggatcatattcttcctcacacagtaacccagaaagagagctgggcagggcacaggattgggagacagctggttcagtgtgcggtaggaccaggattcaaaagacttgggttctcattc

SEQ ID NO: 861277 - DNA, 582 bp, Homo sapiens
gcctgcaacaaaaataaacgttattatcatcccacgttccgtattacaactattcttgtgtctatctttcccttgggatgccagaaaacaaatctaattcttccctgagacagttcttcagatatttgaagatggtgcttcagggtcctcctgagtctttgcttacccggataaacaaatactccaacccactttcagacactcattggtaagcaagagtcggtgctgtgcacacagtaattttccagctgctgttgtgtgtgaggcttcagagacgctgatggagcaaatgatgaaccagccacagcagggctggaggggtatctgaatcatgacctctgcmaaaaaaaaaaaaaaaaaaaaaagagggggaagtggctgaccctgaacaaaccttggcccatctccagagcttcaccagctacattcattgtccacccattgtaagaacccattttagtagaagagaaacgagtttcccccaaagttaacctgcatcattttagacccccagtccctgcccaaaaggcatgattagtccttccaaaatccagattgtgtgttcatggatccaatattgag

SEQ ID NO: 861278 - DNA, 594 bp, Homo sapiens
gattttttttttttttttttttttgtagaaaagtgacttaaaaggaattccatcctgagcatttcacaacagctccagagtttctctctctctctctctctcctctctcagctggtcactcttccaggccaggatamccccaccctaaccaccaccttgtttttctccacctggtctctggccagaccaacccagcgcccctgttaacagccccaggaagaagggaaagggggctcactgatcaggggtgctccccgcagagctgagaccatggtgacaatggcagcagcagcagtggctcaaaaccctgcttcagctcaagatgtcccccacaaccttgccagggccccaggcacccagtgttaagagaacaatggggaaggcaggctccaggccaacggagggccttctagaactccagctctgtgagctcatcttccacaaacagcgccaccacagagctttgactagcccacctgagcccttccactcagggtccagaggcagagcaggatatctaatcccagcccccttgcacatctctgccccacacacacacacacatacacacatgcgcgcgcgcacacacacaca

SEQ ID NO: 861279 - DNA, 594 bp, Homo sapiens
gattttttttttttttttttttttgtagaaaagtgacttaaaaggaattccatcctgagcatttcacaacagctccagagtttctctctctctctctctctcctctctcagctggtcactcttccaggccaggataaccccaccctaaccaccaccttgtttttctccacctggtctctggccagaccaacccagsgcccctgttaacagccccaggaagaagggaaagggggctcactgatcaggggtgctccccgcagagctgagaccatggtgacaatggcagcagcagcagtggctcaaaaccctgcttcagctcaagatgtcccccacaaccttgccagggccccaggcacccagtgttaagagaacaatggggaaggcaggctccaggccaacggagggccttctagaactccagctctgtgagctcatcttccacaaacagcgccaccacagagctttgactagcccacctgagcccttccactcagggtccagaggcagagcaggatatctaatcccagcccccttgcacatctctgccccacacacacacacacatacacacatgcgcgcgcgcacacacacaca

SEQ ID NO: 861280 - DNA, 594 bp, Homo sapiens
gattttttttttttttttttttttgtagaaaagtgacttaaaaggaattccatcctgagcatttcacaacagctccagagtttctctctctctctctctctcctctctcagctggtcactcttccaggccaggataaccccaccctaaccaccaccttgtttttctccacctggtctctggccagaccaacccagcgcccctgtkaacagccccaggaagaagggaaagggggctcactgatcaggggtgctccccgcagagctgagaccatggtgacaatggcagcagcagcagtggctcaaaaccctgcttcagctcaagatgtcccccacaaccttgccagggccccaggcacccagtgttaagagaacaatggggaaggcaggctccaggccaacggagggccttctagaactccagctctgtgagctcatcttccacaaacagcgccaccacagagctttgactagcccacctgagcccttccactcagggtccagaggcagagcaggatatctaatcccagcccccttgcacatctctgccccacacacacacacacatacacacatgcgcgcgcgcacacacacaca

SEQ ID NO: 861281 - DNA, 579 bp, Homo sapiens
ttccctgctgtgaggtctgtgggatgacacatgccacccaggaccccctgccccggagaaggaaggtttcctagttgttgcttatctttggagtctgggatcttttgggaaatgagtccctggatcttgggttctgagttgtgtcaccattgcgggggaagggtgggttatcatttctaaactcagtgctggttgacacttgcagaggagaaaggagtttggaaagcctccagggttgtcaaaacttcctgcctctcgcccttggcatgatcaccaaagcagaaatcaggatgttggattccaacccgggggagtggtgtggttacgaatgtggcctctgcaagcagacagcctgggttcaattcccagcttggccattttctagccgtgtaatcttargcaagatactaaaccgctctgtgcctcagtttccccatctcgtggtcttgctttgacaattaaatcatactgaataaatgtcagccattactgctgagctgtgccagatttgtgacgggtgctcgacgtgccttggggcctcccctttccctatcagagcagtgggaagcatcacaacat

SEQ ID NO: 861282 - DNA, 598 bp, Homo sapiens
actcctggcatcaagcaatcctcccacctcagcctcccaaaatgctgggattacaggcatgagttactgcacctggcctacgcctgtctctacaaaaagagctttttataaattagctgggaaagaatccacagaccctttgaaagatgcagcaggctgcagcgtactctgtgagacaggtgaaaaactgtmaattcccagagtgtgagagggggagagtcttcctccaagcacacattcctaccagggaatctgaacctctagtccacaggagaaggctttaaccctccccagagccggaatggatttagggagtggcgtgaaataaataaacgtagaagcagtagtgggaagtgcctcgtaggcattcccagtctctattgtgaatggagggaagccattcctgactgtatcttacaggggccctcagggaagccagccaacaaactcagggaggggtcccaaggtgaaagaagctcccaactgaattttatgatataatctggagtggggatgaactcccttgagcagaaaccagtgggcaagcgagaagtgtgcaggagacacaagcatacatgctgggtgttcagcttaccag

SEQ ID NO: 861283 - DNA, 598 bp, Homo sapiens
actcctggcatcaagcaatcctcccacctcagcctcccaaaatgctgggattacaggcatgagttactgcacctggcctacgcctgtctctacaaaaagagctttttataaattagctgggaaagaatccacagaccctttgaaagatgcagcaggctgcagcgtactctgtgagacaggtgaaaaactgtaaattcccagagtgtgagagggggagagtcttcctccaagcacacattcctaccagggaatctgaacctctagtccacaggagaaggctttaaccctccccagagccggaatggatttagggagtggcgtgaaataaataaacgtagaagcagtagtgggaagtgcctcgtaggcattcccagtctctattgtgaatggagggaagccattcctgactgtatcttacaggggccctcagggaagccagccaacaaactsagggaggggtcccaaggtgaaagaagctcccaactgaattttatgatataatctggagtggggatgaactcccttgagcagaaaccagtgggcaagcgagaagtgtgcaggagacacaagcatacatgctgggtgttcagcttaccag

SEQ ID NO: 861284 - DNA, 630 bp, Homo sapiens
aaatctgacgaattcctttgtatgactggattttttttttcttgtaccactttaaatttgcttccacgcagaatagcagccaggcaaacagatgctccatcctaaggtgtaggaatttcttgtaggcggaaatgatttgttaggcgaaagcttccgaaacggttttccatttcacagtctcttccggtgccaaagtccagcaccaacgcctggttctggggtccgaccctcatgcagccgccgccgcgctcctcgtggctggacgagccggaactagcttcctccaggagctgctgctgctgctgccgtcactgggcgccgccgcacagccaaacggcgttcctccctctccgcttccctgagaactcgcggcccttctccmccaccaccagcatccgcggggaccgagaccggacgaaagtggcggggacccaaggcccctgaggagggggcgccgggcccgggagggggcgcgggacgggcatgggaccgggtgggcgcggcggcagcccactggcgccacttcgagctcgaggagacccagactgatagagcgcggaggcgtttccagaccgcagcgacaggcgtttccagaccgcagtgacaggcgtttcaagtccgcagcgcgga

SEQ ID NO: 861285 - DNA, 600 bp, Homo sapiens
ctgcttctggcgagagcctcaggaagcttccaatcacggcagaaggtgaagcgggagtaggtgtctcatatgatgagacagggagcaagagaaaggaggttccagtctccttttaacaaccagatcttgcatgaactcattacctaatcatggggaatctgcccctatgacccaaacagcacccaccaggccccacctccaacgctggggatcacatttcaacatgagagttggaggggacaaayatctgaactctatcaatgttatatccaagaaatcatagccaaatccaatgtcatgaagcttttgccctatgttttcttctaagatttttatagttttacgttgcacatttagatatttgatccattttgagttaatttttgtatatggtgtgaagtaagggtccagcttccctcttgcatgtggatttccagttttcccagcaccatttgttgaaaagacagtccttttctcattgaatagtcttggaaccctagtcaaaaatcatttaaccatttatgccacggtttatttctgggctgtctcatgttccattggtttatatgtctgtctttttgcctgtgtcacactgtcttg

SEQ ID NO: 861286 - DNA, 627 bp, Homo sapiens
cccttccctctaccattcccagcctctgttaatcaccaatctattctatcttcatgagatccactttcttagctcccacatatatcaatgagaacatgcaacatttgtctctttttgcttggcttatttcacataatgaccttcagttctatccatgttgttgcaaataacaggatttcattctttttaatgactgaataatactccattgtttgtatatactgcattttctttattcattcatctgttgataggcacttagattgattccgtgtcttggctattgtcaatagtgttgcaataaataagggagtgcagatatcccttcaatatattgatttcctttcttttggatatatacctggtagtggttagttttttaaggaatctccatgctcttctccatagttgctgtactaatttacattcccaccaacagcatatgagcgtttccctttttctacatccttgccarcatctgttattgcctgtcttttggataaaagccattttaactggggtgagattttacctcattatggttttgatttgaatttctctgatgattaataatgttaagcattttgtcatacagttgttggccatttgtgtgtcttctttggagaa

SEQ ID NO: 861287 - DNA, 614 bp, Homo sapiens
ttctaatattgaactgaaagtatgacgattttaccaaaataacaactcaagaaataaaccccgaggtgtagagttgtatatgtgatagctactaagcaagttcaaaaatcagcagaattttacacttcttccttctcctactcttccattgaaagataaatgtccaagccatacattgtctatttaggctacaataggaaaggctgacccaggcatagcactaattaattagagagctccatcagtgtcaatttctctaagtatatttaaaaatcagttatctctatagtagccaccagaagtcatgtaagtctaaaaaaaagagctatgaaaatatgttcagaagaatatagtgccatcaacgttctgaggtcatattgtcttggaatcaatacyaatagatttggaaacaaacaagaagtgagtcacatctgacacagtaggtaagatgtcatattgtgtatgagtgaattcttgatttcatatcagaaggcttcacttatgtccttttataagacttatcagattctaagttgtggaagaaaatacactattggagaaatgaggagaaggtatgccagcagggccatggaaataagttgtcatatgaaaaa

SEQ ID NO: 861288 - DNA, 661 bp, Homo sapiens
cattccattccaataatgacactattgttcagatccctctatttgagtggtgtgatacttttcttttcaaaattctgatccgtgtgaaatcttactccttcaagccgaggttaatttttacaatatcctgtaataataaattgccacaaggcctaatataattcaaacgatggctaacagatgtcagaccaagtgagtatggtcaataatcaatcaaaacaaaaatattctattttttttctaaaaaactatgtagttctaaagtaaagcaataattttttatctggttcgtaaatttaaatgtaatttcaaaggagtattataaatgctcaaagattctaatttcagtatttaaaaatctctattcagcgtaataaatgcttattcagtgatcatcaccaggatctacaacaggccctgatgatatgtgtgtaacccacattgccccaacttatcagcccaaaactcaaactgtaagccacccaaattgccataaaatatttgttctctgacattaytctttaaaatcattcttctgagacttaggatgagttcatggagctggtccagaggagagagagtagactacccttcccatcagaccccaaggccattctagaaagtgacctgaactgatttacagatatcctttccccactgc

SEQ ID NO: 861289 - DNA, 602 bp, Homo sapiens
tcagcctctgattggttgtggaaagcaaccaatcagaggctgaagttacaaaggttacatcctatgcaaatgtctgattggttgtagaaagcaaccaatcagaggctaaagtgaatttccaaagttacacctctgtgcaaacaaagacttggcccacaatcagtctgattggttgtggaaagcaaccaatcagaggtattttcaattttccatctggcacacagaaaagggagtgggaatttgcaaagggagtaggctctggtccttttgttacttaggtgtgaaaagttgaggtttttcttttgatttagtcctaggaagtcagtgtgaattggccttaggttccccgcygccagaccctattctcctgcctcagttcctaaaagagcttccttcccttattcttcaatgtgtactactatgggaaacgtgttttatttttagcatatctcaattaatccatcctcaaagtccttatttattctaccacaagtggaattctgaaatctcctttggttatttcatgtgcaaaccagttttgatatttggcttgatgtcctaagtcattttccttcaccatctgactttgaacatttgaggac

SEQ ID NO: 861290 - DNA, 659 bp, Homo sapiens
aactaacacaggaacagaaacccaaatattgcatcttcttccttataagtgggagctaaatgatgagaacacatggacatatagagaggaacaacacatgctggggtctgttggagggtggaaggtgggaggagggagaagatcaggaaagtaactcgtggggactaggcttaatacatggctggtataaataatctgtacagcaaacccccacgatacaagtttacctatttttcaaaccctgcacatgtacccctgaacttaaattaaaagttaaaaaagaagcagtcataataaaagtagaaactgagattttagacactccccaaataaaaagatttaatcagttcctaatactgcaattgtcataggcatcatgtataaattttttaatcatgcaaaaattctctcccaataaatrctattatctagatgtctatatctggattctaatactcaccatacaaaaaacccacaaatgattcaactttcccatgcaatttgttctggaaattatcagctaaaccttcaacatgctgatgagtagtatttctggggagaattaaattaagaaaatattatttgtggtttcagattcaccatttcttctgcattcatagatacccacatctgtcaatgcttttaaatacttagacaat

SEQ ID NO: 861291 - DNA, 656 bp, Homo sapiens
ggtgatttagatatttcagaaccaagatatctacaagacaaataaactcttctcttgccaactcaatgttgctaactggctgcatttcattgcatatctcttttaacttaatttctatttttaattgtggcaaaatacacacaacataaacactaccagtagagtcatttttaagtctacagctcaatggcattacgtacattcacactgttgtgtaaccatgaccaccactcattatcaggacttttccatcttgcaaaagtgaaactccatacccattaaacactcactctccattctcatctcccttaggccatgasagctagtgttctactttctgtctctatgaatttgaatgctctgggtacctcacagaagttgaattatctgggtacctcatagaagtagaattatacagtacttcttattttgttattggcttatctcacttagcatactatcctccaggctcatccatgttgtgtcagaatttccttcttcttaagaatgaataatattctgttgtatggtggtatgtgctataccatgttttgtttattcatccatccactgaagggcacttgtgttgcttccaacttttttggctattgtgaataatgttgctctgaatatgggtgtgcaaatatctcttcaag

SEQ ID NO: 861292 - DNA, 646 bp, Homo sapiens
agcatctaattaaacaaaagttaattactaaagcacagtgagacaccactttacatctattaggattgatatgatttttaaaaacacaaaataggccaggcacggtggttcacgcctataatcccagcactttgggaggccaagatggccagatcatgaggtcaggagttcgagatgatcctggccaacacagtgaaaccccgtctctactaaaaatacaaaaattagccgggcatggtggcacgtgcctgtagtcttgctactcaggaggctgaggcaggagaatcatttgaggtggaccctgcagtgagccaagattgcaccactgcactccagcctgggcaacaaagcgacactctgtctcaaagaaaaaaaacattaaaaaaaamctacttcttagtgtgacaaaataaaagaatgctgaggacggtgtcagtccagatcaatgctactagacacaaccttccacagcccaccctcaaggggctgccttaatggcatcctccactggtgcacatcagacactgcagaccaccgtgcatcgcagccaagtccaggaaatgaagacgaaagaaaaagcatccattcctgagcttatgccaagtctcaggcactattagttgacaaagcctatctcatttaaggc

SEQ ID NO: 861293 - DNA, 589 bp, Homo sapiens
ccacttgaaatgttgagaatgccggcatggctggacaccaggggtcagttcggtcaaagaacagcggacgaggggctcacaggaaccagttcacaagttttggtacttgcgctgcatccccaccagcagaagtgccgatatggttaggatatttgtccccacccaaatctcatgttgaattataatccctaatgttggaggtggggcttagtgggaggtgtttgggtcatggaggcagattcctcatggcttggtgctgtcctcacaatagtgagtgagttcttgcaagatctggtcatttaaaagtgtggagctattccaccccactctctctctcttgctcctgcttttgttatgggaattgcctgctcccattttgcctttcatcatgagtaatgcttcctgaggcctccycagaagcaaagcagatgacaccatgaagcatgctggcaccatgcttcctgtacagcctgcagcactcttagccaattaaacctcttttcctcatgaattactcagtctcaggtatttctttatagcaatgccaagaatggcttgctacacttgccacaccatagaaactagcaaa

SEQ ID NO: 861294 - DNA, 646 bp, Homo sapiens
aagatttattgggggtaagaagagctaatgcctatgaaagataaaggagaaaggagcagaagtacggagagaaaagacagctttcagactgcagtccagatctaactctgggacgcaagagagggaaggataattctgttgaaagagcatcagactgtgatgcggctgtaagagtgtctcaacgagcccagtggggagttccagccaaagattgcccaggagaagagtcgcactttgggcagaaatggacaggcccgagcaaccctgccatgttctgtcattggctgggggccacccaggaggcaacatggtctgacttgaatggtgtggatccgaggctgcagcctgtcagctgtctgcactccatgcaacaggtcctttgaatggcatgtgttcgtggctgccataaactgcagcctgccttttagccttacctcctttgctcttgctctctgacccygtgttctggcaacactggcctgactacacgccgtatcacatacaaccaactgcccataccaaccccaaccctgacctttgctcactcagttctttctgcctggaatgccactccttcccagttatacccagcaaaatcctaatgtgctttcaaggcccaacttaaaaatcatcttctctggttgac

SEQ ID NO: 861295 - DNA, 648 bp, Homo sapiens
tctgatgacactgttgagccaccctaccgacctggcctacctacctctggacttctttgtataagataaataaacttctgcctagtgtaaactgctctgattttgctctttttccttttataacgtagctgactgatccctgatgcatacagggggcagaggctactatagtagttcaggtaaaagataaggaagtttggatgagggtggtgacagtgaaggtgatgagaagtaggaggagtaaggatgtatacttttttttttttttttttttgaagcagggttttgctcttgttgcctagrctggagtgcaatggtgtgatctctgctcactgcaacctccgcctcctgggttcaagctattctcctgtctcagcctcccaagtagctggcattataggcacctgccaccacgcccaactaattttttgtatttttagtagagatggggtttcactatgttggccaggctggtcccgaactcctgacctcaggcgatccacccacctcagcctcccaaagcgctgagattacaggcatgagccactgtgcccagccggatgtatacttttattgtacagctgccaggatttactgatggatcgatgatacgagaaagaaatgcacctagtttgaactgtaggattt

SEQ ID NO: 861296 - DNA, 551 bp, Homo sapiens
ccttcctccaactttttgttctattgaggcactcagttaattggatgctgctcactcatattggggatggcaatgaactttacacagcccattgattcaaatgctaatctcttccagaaacatctagatagacatgcccagaaataatgtttagctggatatctgggcatctcgtgtcccagtcaagttgacacataaaattgcctwtcacatctactacttattaaattgaaaaataagataattgaatttccttgtgacaaaagtagtctgttttgaaactataatacttgtagattcttggtatgagtcatgaaaatgatgtaaattggggctcacaaataataagcactttttgcaaccatacctttctctgtttctgttttttccttcttcctacatggtccttagttggctatttgatttttttctttgcctgtgtctgacctggaaacttctacagtttgaacaagtttccagtacctgatactttcccatggagaagcagttcattttgtaatttgaggctttggaaaaactccttttcatta

SEQ ID NO: 861297 - DNA, 636 bp, Homo sapiens
gcctccagctctgttgtttttgcttaggattgtcttggctatacgggctcttttttggttccatatgaaatttaaagtaggtttttctaatttggcatagaaagtcaatggtagctttatggaacagcattgaatctatcaattactttgggaagtatagccattttcacaatattgattcttcctgtccatgaacatggaacttttttccatgtgtttgtgtccagtctgattttcttaagcagtggwacacagttctccttgaagaggtccttcacatcccttgtaagttggattcctaggtattttattctctttatagcagttttgaatggaatttcactcatgattttgctctctggttgtgtgttgttggcgtataggaatgcttgtgatttttgcacattgattttgtatcttgagactttgctgaagttgcttagcttaaggagttattgggatgtgacaatggggttttctaaatatacaatcatgtcatctgcaaacagagacaaattgacttcctctcttcctatttgaataccctttatttctttctcttacctcattgtcctggccagaacttccaaataacctctcattatagttttagttgttaattttaacatccattga

SEQ ID NO: 861298 - DNA, 636 bp, Homo sapiens
gcctccagctctgttgtttttgcttaggattgtcttggctatacgggctcttttttggttccatatgaaatttaaagtaggtttttctaatttggcatagaaagtcaatggtagctttatggaacagcattgaatctatcaattactttgggaagtatagccattttcacaatattgattcttcctgtccatgaacatggaacttttttccatgtgtttgtgtccagtctgattttcttaagcagtggaacacagttctccttgaagaggtccttcacatcccttgtaagttggattcctaggtattttattctctttatagcagttttgaatggaatttcactcatgattttgctctctggttgtstgttgttggcgtataggaatgcttgtgatttttgcacattgattttgtatcttgagactttgctgaagttgcttagcttaaggagttattgggatgtgacaatggggttttctaaatatacaatcatgtcatctgcaaacagagacaaattgacttcctctcttcctatttgaataccctttatttctttctcttacctcattgtcctggccagaacttccaaataacctctcattatagttttagttgttaattttaacatccattga

SEQ ID NO: 861299 - DNA, 637 bp, Homo sapiens
agaatggtaacctgcccccaaatcacacaactagtagtagtagagccaggactaggagccctgttctttaaaagtaaatatattattactgctaaaaagaaagatagcattgctgaaagtgtgaaaaaactgaaattgtaactacaaaagaaaataacaacattgcagaaaatatgaaaaaaaaaaaccttgaaagcaagaaaaacaaactaaaagaaaaaatcttactgggtgaccatggacctgtcatctcatctctctgaacctcagttgtctcatttttaaagaaagggaatgaggataagcacagcgacggcagccagtacatactgagcaccgccttaccaaatttccaagtctgacctttccctgcaggcttcatgcaagtatacatatttcgtacggctataatcatgggaagcacaattttgtttgccgtttttcacctgacactatcttgtaaagtttttctattgactacacaractcagctagcaccgtcccagcagttgcatttttcaaggttgattaacccctgtccctggtgctggatatttcttgccaccaagttttcactattttggctgatgctgcaagaaacatcttttggcttctgagaaattctccaaagtcagag

SEQ ID NO: 861300 - DNA, 628 bp, Homo sapiens
atctgacgaattcctttgtatgactggattttttttttcttgtaccactttaaatttgcttccacgcagaatagcagccaggcaaacagatgctccatcctaaggtgtaggaatttcttgtaggcggaaatgatttgttaggcgaaagcttccgaaacggttttccatttcacagtctcttccggtgccaaagtccagcaccaacgcctggttctggggtccgaccctcatgcagccgccgccgcgctcctcgtggctggacgagccggaactagcttcctccaggagctgctgctgctgctgccgtcactgggcgccgccgcacagccaaacggcgttcctccctctccgcttccctgagaactcgcggcccttctccmccaccaccagcatccgcggggaccgagaccggacgaaagtggcggggacccaaggcccctgaggagggggcgccgggcccgggagggggcgcgggacgggcatgggaccgggtgggcgcggcggcagcccactggcgccacttcgagctcgaggagacccagactgatagagcgcggaggcgtttccagaccgcagcgacaggcgtttccagaccgcagtgacaggcgtttcaagtccgcagcgcgga

SEQ ID NO: 861301 - DNA, 652 bp, Homo sapiens
aaaccatttcgttagcagcatagtcccaaatgcaacattccctttatcaatcaagtctaaaccatgtggcttcaatgcatctgtcctgctaaatctgctaaaactcttaaaagagcagtgcaaaagagaaaagacatctttccttttaaatggcagacaatccttataagacattctctagggttctattctgaaggctattcaatttgatttggggcactttttaaacagccatttggcactttccgtttggagttcttaggcacagtgtgacagagtcagcttggtgagcccttccccatgcattcggtacagcagctgaaactcagcaggcagctggtgggactcctgccacttggtggtaaatttggttccttttttgtcatagtaatggtatggaagatcttcccttgtgttggggtcaaatccaaamggccaaaatccatacaagtggatctcttcacatattgctgatgcaagggtgtacataagaatacctgtgctcagccgtttaggtgacaaatgtttgtttttccagtacctgtggaacaataagtacatttggattcagaggtcagcgttgaaagtttcaatcagcaaggtctatctgactgggctgggtagtggatttgttactgtaacttaaatagtg

SEQ ID NO: 861302 - DNA, 674 bp, Homo sapiens
cttgtttgctactggactgaagtgctcaaagaatatcaaatatcagtggtgtccaaataagagccaaatagatatgagtcagtacagcactatctattattaaaatatgaagatggtaatagcagtgggtgtagctgaatatttaatagaaatgagatgataatctcattaaggtcctttgaataatgaaacagggagttttttctacttgattatatagaaacacaatttagttgaataaatctaatccttagaaaacatggctattataaatcctgaaaatatttccatattctagcaattcagtacataaacaaggcaagactgatacttagaactaatttcasgttgctttcatattgagctttaagtaaaattaagtatctcttcttaaagtttagctatttaaaacattcaagagagactggtaacatgctactgctgctagattctccgatgttaagtaaacccagtgaatttcttataacttttgcctaaatgtagcaggaatgaaatgaaatgctttgcacatcatccgttgcttggaattttaatttaaaaatgacttcattcttcaaaatagaggcaacagcaactgaaatctttgaaactccccaagttaccagtaccactcttacaagttgttaaaaaggtaaggcagatttaaaatgcta

SEQ ID NO: 861303 - DNA, 645 bp, Homo sapiens
atgaaagtttccagagatggaggtggaaagagaggacggggcagggagggcaacagaactgaacaaagatgtggaggcagaagagggcaagtcttgacaggagccagtaaatagatcagcccccttggagtaaagtcaaaacagccaagatatgtagggcacttaggtgctagggcattgtagatattatctataatctttgccccactcctatgaggaaggtataaaattattctcactttatagttaaagaaattgacattaaaagaagttaaggacttgctcaaggtaaagcccctctggctggaaagcccaccctttcygctaatccacactgtgtgtaagtgagtcccaggacagagagctggagatgtgtacaggcctgcggaggttgaaacaatcatgttttggcagtgagaactaccattgcttctactgacaatgatgacgatgatatcatccaacacttactgctcacatgctatgtgttgagtgtaacactgggcattttacataactgatctcattcaatctctattccattcccctgaggatataatgaccaccaccatttcaagagttcagaatcaggctcagtgaggttgactttatcaaggtcatattgttagtgtgttccagaagagg

SEQ ID NO: 861304 - DNA, 643 bp, Homo sapiens
caaatgcatatatgacagttacaactctaactgcagactgcatcggcatgtaaaatttaggtcaccagtgggctctctccatgtttgaatgtggtgattctaatggtcagcgaggtgtgcataggagagtcacaatctcaycttcaggtgggccttgtatcagcactctctctactaccttaagactgtatgacacatgggtgagctaaaaatgttctgtgacctttgtacaagtaaaagacacaagaccttgtttgttgtcctacccctcactatgtgagtaaaaaattgcttctatcagctgggtttatgtatgagaatcatcatcacgcttttgagcagggctcatgtatgtgacacaaagcccactgtaaacagggcctgtgaaaaagagtagaggcacattacctagatgctgggcccagtgatataattttattttgtgggtaggaccaagacagtagagaaatgtcacatcactaggttctgaacttagtgataagtaacaattatccctgagggcagggcccaaaaaaaagtcacactacctaggtgcttggcccaggtatatgttaagatcctaactgtatgccaggctcagacaagagagttaaattactcaggtgctgggcaaagctatata

SEQ ID NO: 861305 - DNA, 643 bp, Homo sapiens
caaatgcatatatgacagttacaactctaactgcagactgcatcggcatgtaaaatttaggtcaccagtgggctctctccatgtttgaatgtggtgattctaatggtcagcgaggtgtgcataggagagtcacaatctcatcttcaggtgggccttgtatcagcactctctctactaccttaagactgtatgacacatgggtgagctaaaaatgttctgtgacctttgtacaagtaaaagacacaagaccttgtttgttgtcctacccctcactatgtgagtaaaaaattgcttctatcagctgggtttatgtatgagartcatcatcacgcttttgagcagggctcatgtatgtgacacaaagcccactgtaaacagggcctgtgaaaaagagtagaggcacattacctagatgctgggcccagtgatataattttattttgtgggtaggaccaagacagtagagaaatgtcacatcactaggttctgaacttagtgataagtaacaattatccctgagggcagggcccaaaaaaaagtcacactacctaggtgcttggcccaggtatatgttaagatcctaactgtatgccaggctcagacaagagagttaaattactcaggtgctgggcaaagctatata

SEQ ID NO: 861306 - DNA, 613 bp, Homo sapiens
tggttctagtcattagagtcaacacctgctgtatgttgggtctaagtgtcatgcacatccctgtgaagagagtccaccaaacaggctttgtgtgagcaacaaggctgtttatttcacctgggtgcaggtgggctgagtccaaaaaaggagtcagcaaagcgtggtgggattatcattagttcttataggtttgggataggtgtacaaagtacattctcacgggtggggagaatattacaaagtacctttttaaggtggggggagactattacaaagtaccttcttcagggcagagggagaatatatcgtatcagttagggtggggcaggaacaaatcacaatggtggaatgtcatcagttacggctattttcacttcctttgtggatmttcggttgcttcaggccatctggatgtatacgtgcaggtcacaggggatatgatggcttagcttgggctcagaggcctgacaataagtacatgagttagaatctcaatcacggactggatttgttcataggagcatcagttgctcctgtgagctgtgtcttcttagaagagttatagcctcacaagtgtacttaattttgatctgaatgtcaccaacctacctgt

SEQ ID NO: 861307 - DNA, 741 bp, Homo sapiens
cccaaagtcaaaaagtcaaaccgctcacttgcctttgaagtcacctgcttggccctcttccaagtgtactttccttccttttgttcctgttctaaagctttttaataaactttcactcctgctctaaaacttcccccagtctctctttctgccttaagcccctcagtcaattttttcttctgaagaggcaagaaatgaggttgctacagacccgtacccatgcggattcactgctggtaacatgttttggtgctgtgtgacttggtaccttttgctgctaacatgctttggtgtgcatgactcagatatgtcccctagtggtgaaagacctttatgcctcaccttcattggctagaggcagctaacccctctatatgattttcttttccctttcactctatggcttactaaccagctcccagaatgattcctctcagccacaagtggctctgtttccatgggctwtctctctgctcaccctgacagatggtttgcaggggtgggaagaaccttggggtccatgctgagtagaactgatgcacttatggccctcctggacaggagactctcaagagtaatagggctaaagctgaacaccatgaaatgtcttagggttcctactaaaattgtctctttccccaaaacctgcactgtctattctcctgtgttccctgtgtgtgttcagaaatggccttactcacctgctggactatctgcttccggggcacatctgcctctttg

SEQ ID NO: 861308 - DNA, 649 bp, Homo sapiens
gacaactatgcttatacctgaacttagggtcaaagatataatcatgggtctatactagcagaaaggtctcagagcagactgtgacttttatgcacactctacaaagtcctcaggtggtgcagaaagagttccaacagagcccagcacacaggtgagactgtgccactcatatgcacacccagtcaacagtaaagattgtcattctgtctcatgaaaacagccaatgattgagcttctgaatctcagacttggaggcagtcaaaagttagaaaattgactatcatacctggatctcattcacaggtgggtttgtgactctcarattcaacacaactctgaggctgtgacttcattaaggagatacagtccacacgaggaattaagggtctcatggacagattagtctaccatctagattgtgactctttacgtaggcccaacatacatgagctattgaatcttacacctcgaacctagatacatatgggattgttaatctcatacctggacattcctgcaggtgtgattgtgacatagattctgcctgtcatgtgactgatttaactctactccctgggcccagcccagagctgaaattataaaatttcattgaaagcagcaattaggtgatgtagctgcatgctcctgc

SEQ ID NO: 861309 - DNA, 684 bp, Homo sapiens
aaatatcaattaaagattacaatgtatacaaaacagggcaatacattcccatccaaaatatcataaaattttcagaaaaaaaaccttaaaaaaagaaaataaattgggccgggtgaggtggctcacacgtataatcccagcagtttggaaggcagcgatgggtgggtcacttgagcctaggagaccagcgtgggcaacatggcgaaaccyggcctctactaaaaatttgtaacaatgctgcaattattatgagtatgtaaataattcttcatatgactatatatgttaaattttatatatgtgctgcattggtttttattagtctacatttttacttttatactcacaccaaattgttttaattttgtagatttgtaatgagttttaaaatcaggaactgtaatgcctttaacattatttctttttttgaagattattgggtattttattgtctcattagattccgtatacttttggagttgctgtttctgtttcttcaaaatgtagtgtgaacttttaaagaacatcccattgaatctgtagtttacattgaagagtatggatatcttcaaaatatttatctcaacctttgaacaggagcatgctcctaagtgtgttaatttctatacatttataactttttcagtttttttctattattgtttcatgctctcatttcatttt

SEQ ID NO: 861310 - DNA, 699 bp, Homo sapiens
ctcctagcccccctcaatctgacaggtcccagtgtgtcatattcccctccttgtgtccatgcattctcattgttcaactcccacttatgagtgagaacatacaatgtttggttttctgttcttgtgttagtttgctgagaatgatggtttccagcttcatccaygtccgtgcaaaggacatgaactcgtccttgtttatggctgcatagtattccatggtgtatatgtgccacattttctttatccaatctattactgatgggcacttgggttggttccaagtctttgctattgtgaatagtgctgcaataaacatacgtgttcatgtgatttataatcttttgggtatatactcagtaatggggttgctgggtcaaatgctatttctgattctagatccttgaggaattctcacactgtcttccactatggttgaactaatttacactcccactaacagtgtgaaagtgttcctatttctccacatcctccccagcatctgttgttttctgactttttagtgattgcattctaactgtcatgagatggtatctcattgtggttttgatttgcatttctctaatgaccagtgataatgagcatattttcatatgtttgttggctgcgtaaatgtcttcttttgagaagtgtctgtttatatcttttgcccactttttgatggagttgtttgtttttctg

SEQ ID NO: 861311 - DNA, 656 bp, Homo sapiens
gggttgtagtacatgtacttgtatcacagattttattgtacacattttgtactacaggaaaacctgaggtagttgttccaactttgctcaacatcagggaatttatattgaagaataaccctgcaaatttaataaatttggaaaaacattttttcaaaaactacagattataaaacacaaatgcgtttatactaaaatatgtttttgcagatacagtaaatataaaaaatatttaatccaaaattaagtttatgtaaatatcagctaattcacagtagaaatacctgtcactcaaacttcagatattacactaaatcagactgctgagtataggaaaaaatccaaaactaaagttggcaaaargaagaattatttgtatataactttaaaagaagtagatctttgaagagttataattaaatttaaagtatacttttttcttcaaaacacagattttttttttttccagacacattggcttactgtggccaatactttgtgatgccaaggtgggcagatcacctgaggtcaggagttcaagaccagccttgccaacatagtggaactaaaaagaaatgtttactaaacatgtttactaaaaagaaataaagaaattagccaaggtctagcttccaggttcatgccattctcccacc

SEQ ID NO: 861312 - DNA, 572 bp, Homo sapiens
aagatgtaaatcaaagtgacagtgtgatactatttcataccagtaagaatgacttattaaaagtaagataaataagatgttgaagttgtagagataaggaaatctttctacactgttggtgggaatgcaaattaattcagaacctgtgcaaagcagtttggggacttctcaaagaactagaaayagaattgccatttgaccaatcaagccgattactggatatctgcccccaaaaagaataaataattttgccaaagagacaccagcactcacatgttcattgcagcactattcacaatagcaaaaacagaatttaaccagttacccatgaatcttttattggataagaaaaatgatgtacttatacaacctccaatactatgcagcaacagaagagaatgaagtaacgtcttttgcagcaacatgaatgcagctctgcttcaggccattctaagcaaattattgcatcagaaaaacaaatgccacatgttctcactcatacatggatgctaaaaattgggcgcacatggaaacaaagatgaaaacaataaacactgagaattctaaaaaga

SEQ ID NO: 861313 - DNA, 587 bp, Homo sapiens
tatgaagtgtctccttcgcttgcagtctccttgtctacccctttgtccatccactatgaaaggactcccttctgttccttaatatggacaatttctattgaggactcattgttctaagaattgtctcatctcctcctgcatcctcagtgcccgatctttggcttctatgaaggaargtgggtagtgcttatggcagggccagttctacctttctcagtatgttctggcctgggtatgtagccccattttctagtggttaccttgacatcatgaagagtttatgtctcttttgccctagatttgggcaatagtcattcattgggcaacaggaaataacacaagtcagcatctcattaaaaataaagtcattcaggaaagtggacgactaatagtttctaatctagagagcataggagaagaaatgtttaccacacacaaagtattagtgccttttatatcatcaagacaaaaataacaggaaaaagacaaacacattatagtgaaaacttgtttttcctgaccagcatctattctgcatgttccctgatgccagaaactcacatttcttcagggcaaacccccttccc

SEQ ID NO: 861314 - DNA, 587 bp, Homo sapiens
tatgaagtgtctccttcgcttgcagtctccttgtctacccctttgtccatccactatgaaaggactcccttctgttccttaatatggacaatttctattgaggactcattgttctaagaattgtctcatctcctcctgcatcctcagtgcccgatctttggcttctatgaaggaaagtgggtagtgcttatggcagggccagttctacctttctcagtatgttctggcstgggtatgtagccccattttctagtggttaccttgacatcatgaagagtttatgtctcttttgccctagatttgggcaatagtcattcattgggcaacaggaaataacacaagtcagcatctcattaaaaataaagtcattcaggaaagtggacgactaatagtttctaatctagagagcataggagaagaaatgtttaccacacacaaagtattagtgccttttatatcatcaagacaaaaataacaggaaaaagacaaacacattatagtgaaaacttgtttttcctgaccagcatctattctgcatgttccctgatgccagaaactcacatttcttcagggcaaacccccttccc

SEQ ID NO: 861315 - DNA, 587 bp, Homo sapiens
tatgaagtgtctccttcgcttgcagtctccttgtctacccctttgtccatccactatgaaaggactcccttctgttccttaatatggacaatttctattgaggactcattgttctaagaattgtctcatctcctcctgcatcctcagtgcccgatctttggcttctatgaaggaaagtgggtagtgcttatggcagggccagttctacctttctcagtatgttctggcctgggtatgtagccccattttctagtggttaccttgacatcatgaagagtttatgtctcttttgccctagatttgggcaatagtcattcattgggcaacwggaaataacacaagtcagcatctcattaaaaataaagtcattcaggaaagtggacgactaatagtttctaatctagagagcataggagaagaaatgtttaccacacacaaagtattagtgccttttatatcatcaagacaaaaataacaggaaaaagacaaacacattatagtgaaaacttgtttttcctgaccagcatctattctgcatgttccctgatgccagaaactcacatttcttcagggcaaacccccttccc

SEQ ID NO: 861316 - DNA, 682 bp, Homo sapiens
atggacactttccacagttatagatgtgtgctactttttttttactgacttcagaatattccactgatggacatcttaatcctctactgattaatcccctactgatgactgtttgcatttctttgctgtttgccaaccacactgcaaagaatatcctcatgtctacatatcttatcttttggcagtgtttctatgaagcagattcctagaaatgggatcaggtcaaatgggatgtagttcacatagtatatgcattttaatatttgctaagtagtagtgtttatgctttaaagagttggaacactacaattctaaacatgtttggacacaaaaaatagattatttgaaacgaaataagcatagctcgtaaaaattaacacgtttggttttcacacaaatattttgaatttctctttcttctgcaaaaaggaccctagcttagtatgsatttcttgtacagataatgcaggcaatccatctattaaataacttacctttcacagtaaacctatagacagcatcctgctccacacagaagctgattgtcttttccttctctaacattagctatttattttgtagagtgtagattctagagaaataatgtataatacacctgttgccatatgcagatacttaccacatttagaaaacagtggtgaattctattgacagtggctct

SEQ ID NO: 861317 - DNA, 682 bp, Homo sapiens
atggacactttccacagttatagatgtgtgctactttttttttactgacttcagaatattccactgatggacatcttaatcctctactgattaatcccctactgatgactgtttgcatttctttgctgtttgccaaccacactgcaaagaatatcctcatgtctacatatcttatcttttggcagtgtttctatgaagcagattcctagaaatgggatcaggtcaaatgggatgtagttcacatagtatatgcattttaatatttgctaagtagtagtgtttatgctttaaagagttggaacactacaattctaaacatgtttggacacaaaaaatagattatttgaaacgaaataagcatagctcgtaaaaattaacacgtttggttttcacacaaatattttgaatttctctttcttctgcaaaaaggaccctagcttagtatgcatttcttgtacagataatgcargcaatccatctattaaataacttacctttcacagtaaacctatagacagcatcctgctccacacagaagctgattgtcttttccttctctaacattagctatttattttgtagagtgtagattctagagaaataatgtataatacacctgttgccatatgcagatacttaccacatttagaaaacagtggtgaattctattgacagtggctct

SEQ ID NO: 861318 - DNA, 682 bp, Homo sapiens
atggacactttccacagttatagatgtgtgctactttttttttactgacttcagaatattccactgatggacatcttaatcctctactgattaatcccctactgatgactgtttgcatttctttgctgtttgccaaccacactgcaaagaatatcctcatgtctacatatcttatcttttggcagtgtttctatgaagcagattcctagaaatgggatcaggtcaaatgggatgtagttcacatagtatatgcattttaatatttgctaagtagtagtgtttatgctttaaagagttggaacactacaattctaaacatgtttggacacaaaaaatagattatttgaaacgaaataagcatagctcgtaaaaattaacacgtttggttttcacacaaatattttgaatttctctttcttctgcaaaaaggaccctagcttagtatgcatttcttgtacagataatgcagrcaatccatctattaaataacttacctttcacagtaaacctatagacagcatcctgctccacacagaagctgattgtcttttccttctctaacattagctatttattttgtagagtgtagattctagagaaataatgtataatacacctgttgccatatgcagatacttaccacatttagaaaacagtggtgaattctattgacagtggctct

SEQ ID NO: 861319 - DNA, 642 bp, Homo sapiens
acctgttctcccttctaaactccttctctcttgggttcccactgagtctagcatacaggaaaatggaagaaaagaattgagagacaaaatcatggcacatttttctaccttttaataagtttcatttttggatacagccaatgcctcatatatgtgggttccacatctgtggattcagtcaacaatggatggaaaatatttgggaaagaaagcacaacaggccagrtgtgatggctcacacctgtaatcccagcactttgggaggctaaggtggatcatttgagctcaggaattcgagaccagtctgggcaaacataacaagaccctgatcctacaaaaaatatcaaaattagtggggtgaggtggcacatgcctgtagtcccagctacttgggaggctgaggcaggaggattgcttgagccccggaggcagaagttacagacagctgagatgacgtgactgcactccagcctgggcgctagagcaaaatcctgtctcaaaaactaaataataataataacaaaatacaaataaaaaacaatgcagtataacaatgatttacatttacatttattaacagcacttacattgtttaggtattctaagtaatctggagatgaaagtatacgggaggatgtgcat

SEQ ID NO: 861320 - DNA, 625 bp, Homo sapiens
agttccctggctgtgatgttaatcaatgtcaacttgattggattgagggatacaaagtattaatcctggttgtgtctgtgtgggtgttgccaaaagagattaacatttgagtcagtgggctgggggaggcagatccactcttaatctggtggacacaatctaatcagcttccagctaatataaagcagccagaaaaacatgaaaaggagagctgggcctagcctcccagcctacatctttctcccatgctggatgtttccttgtgatcgtgtaagttaacacttaataaatctcccctctctctmtatatatatatcctatgagttctgtccctctaagagaaccctgactaatacagattttggtaccaggagtggttctagagaaacagaatattaaggattgagttctttcgttggttttggggtttctggaattggctgcttaatatggttagaccccaaaatgctaaggactgtatgtctaatagtatggagaagactgatagtccttggtgtgaacggtttagatagttaagcaaaataaatgcatttgacactcctgatttcactgctcatgagaggcaaggagtttagtgactctatacataatacctttgaccata

SEQ ID NO: 861321 - DNA, 531 bp, Homo sapiens
aagtggacagctgcagcactacagcccctttctaggacatccctgaaggagagcagtgaagggaaatgttcccagtgggcagaacttcgagcagtgcactttacatgaaatgagaaatggtcaggtgtgcgattatatactgattcatgggctgtagccaatgacttggctggatggtcagggacttggaagaagaatgattggaaaattggtgacaaagaaatttgaggaagaagtaygtagatggacctctccgagtggtcaaaaactgtgaagatatttgtatcccctgtgagtgctcaccaacaggtgacctcagtggaggaggagtttaataatcaagtggataggatgacccattctgtggacactactcagcctctttccccagccacccctgtcatcgcccaatagacccatgaacaaagtggccatggtggcagggatggaggttatacatgggctcagcaagatggacttccactcaccaagactgacccggctatggccactgctgagtgcccaatttgc

SEQ ID NO: 861322 - DNA, 594 bp, Homo sapiens
ccgggctatcctctcacaactctcaaggtggttggcgagtttaggcagcaactgccagttaatagcagaaagagaagctaggaagagggaagtcaggggcccagtgtatgcatgtgtgtgggttggagaagggtgcaaaggtgataagagaagagaagagtggcataagggcttatgtttggcaccgttaagacttactgtgaacctgacatgcagagatggagggcctcaagagggtctttctcttgstgggatggttctctgatcacctgtccactccatcagtgaaggacgggtcccccactttaaatagtgtgagatggctgaacccatgacacctgacactgaagagatgagatgaatagcacatagaattagtgtcacctatactcacagcctgagggaggaggatactgcatgccatgcagtgacccacagaggttccacttgggagcagggtgaaccagcagaggctgtggaaggcaggctttgcattaggatggtgcaagggtaatcgtggtttttgccattaaaagtactcctgcaggaagatgtgattagctttttttgtgggctgacagggacttgagactc

SEQ ID NO: 861323 - DNA, 594 bp, Homo sapiens
ccgggctatcctctcacaactctcaaggtggttggcgagtttaggcagcaactgccagttaatagcagaaagagaagctaggaagagggaagtcaggggcccagtgtatgcatgtgtgtgggttggagaagggtgcaaaggtgataagagaagagaagagtggcataagggcttatgtttggcaccgttaagacttactgtgaacctgacatgcagagatggagggcctcaagagggtctttctcttgctgggatggttctctgatcacctgtccactccatcagtgaaggacgggtcccccactttaaatagtgtgagatggctgaacccatgacacctgacactgaagagatgagatgaatagcacatagaattagtgtcacctatactcacagcctgagggaggaggatactgcatgccawgcagtgacccacagaggttccacttgggagcagggtgaaccagcagaggctgtggaaggcaggctttgcattaggatggtgcaagggtaatcgtggtttttgccattaaaagtactcctgcaggaagatgtgattagctttttttgtgggctgacagggacttgagactc

SEQ ID NO: 861324 - DNA, 565 bp, Homo sapiens
cttctaactgcactggagagtttacagaaaacataagctcagggctttcaatccttagttgaagacaaggtcagagaaacagctaacatgtattctgccctaaggaagtctgcttccattttatctgagatgagaaccaaatttgacaggttgactatgaattacaaagcaagttgaatctcagctttgccaggtctctcatatttaaactaaggcatgaagaggggaaagtagggccttacagattgcaatgattctgacaaatatgagcaccttaacttcccagagctgcgctgactctctctaccagcagtcacagccccagctcccctgagraagctgccacccccttgcctgaagtttctataataatttctactgaatgtcttggagagctatagtccattgcctctcattgcctcagaatactgggaggacaagagtcataatccagctgcactccaaaggtgaagtccaaaatctgacctgggaggagatagaatacatgctcaaatactaaaatattttgccaagttatatcagcactaatctaaggaatatgtgt

SEQ ID NO: 861325 - DNA, 687 bp, Homo sapiens
cagtctctcttatgctcaggctggccacagcggctttcctggatatgtctttgtcctggttcaatcctggggcgggggagcagtgttgcccgcaccttcctaacagagccagcctcccaagtagagcagctgaagagggaaaacagtcactgcgggctgcaaaactcattgtctggagcaacatctgggggctggggcaggtcctcggcccaccrtggtgatgaaaagtgctcaaatcatcaaagagtaaaaattctacaccaaaacccacactttccacaatagtcatgtgggtttctcctcctagcctgagggcatttcttgggtcctcctttctgtgcatgattctccagctccaggacagcccatctccagcacactctggacaggttatgcctgattctgcctgacatgctccaggcttaagaaactggctcctgtgagcctgggctgccacccatctccctggctctgggttccaaccctggcttcctggggtgcttgtggcatgggatggagttaatggtcagcctgggagttggaacttccacattgtgttagcctttaaaacatcagtgtcagccaggaactcagaaaagataaagaccccagattgccaaaagccccttctcttaaagggatgagtcaaaggctttcttcctttcccacatcccaggcaggattcat

SEQ ID NO: 861326 - DNA, 644 bp, Homo sapiens
cacacattatagaatctctgtgtatgctagagaaacaaagatgaatatgatttatcatttctgatcttgaacagctcctattccaaaagaagagacagataaataaagagataattatcatatcacagggaatcttaatctaaagttcactgacccttaagtggaaaagggggctttggctgacatcagtgtttacatcaaaatatcatattagttttccaaaaggtcrtatcatactgcaagcaattcatctctctagagcgtaaatactttgcctcatcttctcaccgtcgcaactggaacacatacacacacaatggtgaaattcatttgagaaaaattggttcaaataggagaccattgttatatataactcacagtaggcccacatgttaactcatacttttgggttgttttctctgttgctggcctacttctaaaaggcttgcttagctgctatctgcacacctcagctaactaaatcctgtttctattccagtaactagttaggtttaatgagcacaaaatctgtttactgacaatcttcgtaccagtacccatgttggatattgctaagaatcaagacactcttagccactgcaaatatactttcaaaattcttatcaacccagtactttagccag

SEQ ID NO: 861327 - DNA, 632 bp, Homo sapiens
ccaagactgtcatgcccttacacatagaaggctatagagtgagccttctcaacagtgccactattggcatatcaagagaggtaagcctccacagtggtgacagtggtgatgatggtggggctagcctttgcactacaagtgctggggatggttggcagcatccctagcatcaaaccactagatgccaataacatgctcgctctcacaccagtgagacaaccacatcatgtcaccaggtgttaccacatgcctttgggaagagagagtggggagatcactcatctctgtttgagaaccattgctgttaagaaccaaacttctggctatgttcataatacatcccgttctgtctcttattttccaaactctccgtgactttttgctcacgtctktctctcatattaattgcagaaacacttcaaatttctgaagatccatacatgcccatagctctttaataatatttaatctttgattttatgttcttggaataatttaatctcccttattagacagtcgctatcatgtgacccaaaacaaagcatccccaccccctttttttttctataaagctgcgtttcccaaatatattccatggagcactggcactagctgtttgatatttgtaaatg

SEQ ID NO: 861328 - DNA, 636 bp, Homo sapiens
ccaaaaggaaccaactccggacacagtactttgccatttttgtttcttaatgtgcatgcccaggaagttgcttctccctggggcctgcctttaattaacactttaatgttgacaggtgtggaccatcagaaaatggcctctccctggcaccggctgccaatttatcacctttagagaggcaatgcaacaattgccaaatcatcacctgaactttctagtgggtcagggagagctgtctcctgccccactcatgcctaacctgtaacaragtgacaagaacagactggagaaaaagtaggatggagaaactggactcaagagcagctcatggaacctgagctaggtcaatacccaggttaaaattttattcaggggatttggagaagagcactccaacttgtagccagggcaatttctgtgactagtgatctgaaatcctaggcttatgcctggatcccagtattttttcatagttaccaggggcctaactgttgtcctggctggcttgagggtgaaggagttgaaacttagaagatcagcttgtgaatagccctgtaagacttggctctggacttatctaggcaatatcatttgttatcctgggtatggcttggaacctgagatttttcacagtgt

SEQ ID NO: 861329 - DNA, 603 bp, Homo sapiens
gacaccatgcccagtcacatcacatcatagcttttgtttttgttttgttttgtctttttttgtaggggaagtgtcataggttttcgataaatatttgttgaatttggccaggcgcagtggctgatgcctgtaataccagcatttggggaggccaagtcgggaatttgagaccagcctgggcaacacagtgagactctgtctccaaaataaataaataaataaataaataaataaataaataaaaagtagctgggcgtggtagcctgcacctgtagtcccagctacttgggtggctgaggtgagaggatggtttgagctcaggagttggaggctgcagtgagccatgattgatgccactgcactccagcctgaacgacagagcatgaccgtgtctcaaaaatggatagatagatagataggtagatatatakatagatagatagatttgttgaatgaatgaatgtgtgaactgtttatatatatatatttgtgtgtgtgtgtgtgtgtgtgtgtgtgtgtacaatgatcagaggcatacccagatgtgtggggcttccaagcaaatatctccaaaaagaacttctttccttttattaacttgaa

SEQ ID NO: 861330 - DNA, 642 bp, Homo sapiens
tcagtaccatttattgaatagggagttctttctgcattgcttatttttgtcaaatttgtcaaaggtcagatggctttgggaataatgtcttgtttttggattctctattcggtttcattggtctatgtgtctgtttttgtaccagtaccattctgttttgattgctgtagccttatagtacactttgaagttagataacgtgatgcctccagctttattctttttgcttagaattgttttggatatttaggctatgtttatattccataaaattttagaatagtttttttttctatttctgtaaaaaatgacatttgtagtttgccaggaatagcattgagtctgtagatgcctctggacaatatggccattttaatgatactgattcttccaatccatgagcatggaaagtttcttctatttatttgtgtcctctatgatatctttcagtagtgttttatagttttccttataaagatcatttgccacctcrgttagatgtattcttaggtatttactttttgtatgtctgttgtaaatgggatagcattcttgatgtgagtctcagcttgaacattattggcatataaaaatgctactgatatttgtacattgatttttgtaccctgaaactttcccaaa

SEQ ID NO: 861331 - DNA, 578 bp, Homo sapiens
tgtctatagctctttttttcagcatattacaaattgcaaaactttctaccaacaaactcctatcaagtcaaaaacatattccctaacctacgacgtagactatgccctgcagcccagtatcagttgtttacttgataggatcaggatcatgccctatggttgctgtctaaacctatcatgtaccatcacactgattctcccagcatgttctctgatagtgtaacccttcatgggctccagcattgctcttccagtctcctggactactttgcaccttttyctctctcttcatattgtcaacaactttctccaaccctgggtctcgctaatgctcttgcttattgtatccctgatgggaaggaagaaaatctacaaaaccacttgtgtctatatttgtacataagatcttccttcctgaacttatggatgaaatgtcacttcttgtattgaagactaattcctccacagctttgctagatacaattcattaaacttctcagggctttgttccctaaaatatccatcttatttccctatataatcagtttttcactctctgctgtataattcccatcata

SEQ ID NO: 861332 - DNA, 657 bp, Homo sapiens
ctactttggagaaatgtctattcaaatccttagccactttttaaaataggattagtaggtttgtttttgttgatatgattttactttgagttgcagaaatcccttttttattttgttaattaatctcattggatatctggtttgcaaatattttctcccatttgataggttgccttttcattttgttgcttattatctttgctgcacacaagcttttagttagatgtaatcccacttgttcacttttgtttttgctgtctgtgcctttggtatcatatttatgaaatcattgccaagcccaatgtcatgaagcttattctccatgttttcttctgttactattacagtttccggtcttaaatttaargccttaatttattttgagtttgtgtttttgcgtatgatgtaagataagggttcaaattaagtgtttttacatttggatgttgttttcccaatactatttgttaaagaaattattatttcccattttatatttttgtcacccttgtcaaagttctgttgaccataagtgtatggatatatttctgggatataatattctgctctattgatctatatatgtctatctttatgctagtaccatactgtttcaattagtgtagacttgtgctatactttggaatcaagacgtgt

SEQ ID NO: 861333 - DNA, 582 bp, Homo sapiens
attacagcattttatatatgtctatatatttacctttaccaattagttttatactttcatatactgttatgttatggtttagcatcctttcatttcaacttgaaaaaaaatccctttagtacttcttctaaggcagatatagtggtaataaaattattcagattttgtttgcctgggaaaatctttgtttctttcaattttgaaagatagttttagtgagtataatattcttggttgtcagttttttcatttctttcagcactttgaatatatcatccttctaactactggcctgaaaggtaaaaatctgctgttagtcttacagagattctttgtatatgaaagtttcctttctctttctgattttgggattttctttgaatttgacaatttgattttaatgtgtcttggcrtgtttttctttctttttcttttttggtgcatcttatttagaatcctttgagctttctgcatttggatttccagtttcttccacaggttttggaagttttcagccattatttctttgagtaaactttatggttctttctctctctctcttgtcttttgaaatttccataa

SEQ ID NO: 861334 - DNA, 654 bp, Homo sapiens
tgaggcatgacagggacttcattcatatctaggtcatactcaccagacattgactggatgcacgacattgatcatccagtcttgagaaaacagcaagcacagaatgatctattgggattcatattgcatgcacacttctctctgcccatgttcctttttctcttcactcatttgggggccttgagctcatatttaaaacatttttctcaaacctgtctccagttcttagctttgggttagccctgaaaaatcatcacttaatccttctagcactatctcttagatctcaatacccaccctatactcttttcatactccttccctaaactactgcaatgctaataaagttgcagcyttagaactccacaggttgctacattctctcaggttgtgcctcttttcttcctctttgagcttctccttcctctcagtcccatgggtccttcctgtgttgcagcctcacgttccccacagtgccgcatcttcatatttgaatttcagatttagaagtcctaatggcaatttttcattcctttctaccccaagtgtgacccaatccttctttgtaatgtttaaattccataattaaaaaatgataattttattacactacaatgaactatctctgtgtaactaaagactctgtaaaacaaa

SEQ ID NO: 861335 - DNA, 629 bp, Homo sapiens
gtgaagggggagcagacctgccaaatggtgagagagagagcaagagaacagggaaagaggtgccagactcttttaaacaactagctcttgcatgaactaatagaatgagaactcacttgttaccacaagtatggcaccaagtcatttatgagaaatccactttcatgatccaaacacatcctaccaggtctacctccaacattggaggtcacatttcaacatgagattttgagggtacaaacatccaaaccatatcagttttcatactttagtcaacctaaatatgttatgtttaatacatcagtttctrctttatacttatagataatcatgaaaataaccagaggaaaaatgattctaatattcatgcagttaaaaacaaaacaaaaattaagtgatataatagtactttgacaaattatcaaatctatagacttttaataaggagtaatgtatctcactttaccacagtaaaagattgtaagtttgcatttgtcttaggacatcaaaagcttttacttttttaaaattgaactcataggttactatttacttccaatttttgaaaatctcagagcacagaacactccacacacacaaaaaaagttagtatttttatcttttctctg

SEQ ID NO: 861336 - DNA, 662 bp, Homo sapiens
attagtttattgaaacttatcagcatctcctctatcaacatttcttttcttttgaaaggcaccgcacgttactttgtgggaacctatggacagtgttcttcaaactgagagacatgtgtaccctggaatacctacttaccaagggtggagctgatatggacaatttttaggcagtcactttccagctcatattctcattttcatagatactatttgcaaaatctatttgcctgagaagacacttgctgtaaagctgttctgtcagttcccacactttctgaccaactcccagccatcattcattctcacttactttgtactactaaacaaaaaaacaatgaaattcactgttgcctaagaagcatcctttaacttctaacacgtgtatgaaaactaagacattggacagatcttggtcatgtcaatttttagacttccccaaaattgaggatgtgcatgactttactgattgggtaacaaatgcttttacaattcaagtgctttccaatatttgctttcaacaarattgaaagatggtcagataaggttgtcagttaataaatcattaaaagcaatgtttggtaaatgatcacaatacagtttttgcatacaatagagaagggatttagataattaagtgatatatctatggtagaactcct

SEQ ID NO: 861337 - DNA, 642 bp, Homo sapiens
gcctgtttaggtagaatgattcacttgaagacatcaagccatatgttctactctgttggattttcaagaggcctcatgaccaccgcgttaaagcactgaacaccatcaactgtggtggagaaaaaagtgctggtccccctgaccaataaagaaaataccacacagaagtatgatattttgccaccatgatactgatagggaggaggaagaccttagaggtatatkgtttttaaggggagggggctctgggtttgaatcctagtttcactccttattagctgtgtgaccttgggccagctatttaactaacctctctgagcctgagttttctaacctgtaaaatggaaataatgacagtacctacttcatcacatggtcattaagaataaaataatgaatgtaaaacttatttaggacttgcaataaatattagtgttcctgctatactcactgtattaggttcccgtggctgtattagattatcatagactaggtgccttaaagcaacagaaacttagtctctcacagttctgaaggccagaagttcaaaatcaagatggtgtcaagattggctctttctggaggtcctgagggactgcccccaggccccacagttgtaagatcacctccagctctctataa

SEQ ID NO: 861338 - DNA, 488 bp, Homo sapiens
agcatgatagaataactgacttcacactctgtattttgaaataataaaaagaataatgtattacccatggggaaaatcactcttccagaatttcaacaatcttgttgatggctgttgtgagacctcagttcttgtcttattagtttaaaagaacttaaagaagagacacacagcaaaggagctgcrgcatagagcaatttattgcaaaagagaaagaatattctaaaagctgggtgcagaatagacagtgcaccctgagagaggattcatggcaggctgctcataaagaagagaaagcatggactggccctagggagactacccttatgggaatcttacatgattattcataagggtgtggaaggagatgttactagtaagcatattgtgggtggtcctctggatgcacatgtgcagtagctgtacatgcttattcataggtcgcatgtctcattaacgtcttaaatctccacccaggggttttttta

SEQ ID NO: 861339 - DNA, 488 bp, Homo sapiens
agcatgatagaataactgacttcacactctgtattttgaaataataaaaagaataatgtattacccatggggaaaatcactcttccagaatttcaacaatcttgttgatggctgttgtgagacctcagttcttgtcttattagtttaaaagaacttaaagaagagacacacagcaaaggagctgcagcatagagcaatttattgcaaaagagaaagaatattctaaaagctgggtgcagaatagacagtgcaccctgagagaggattcatggcaggctgctcataaagaagagaaagcatggactggccctagggagactacccytatgggaatcttacatgattattcataagggtgtggaaggagatgttactagtaagcatattgtgggtggtcctctggatgcacatgtgcagtagctgtacatgcttattcataggtcgcatgtctcattaacgtcttaaatctccacccaggggttttttta

SEQ ID NO: 861340 - DNA, 650 bp, Homo sapiens
tatatataggggcagaaaaatgataatttataaacatgtatctgtcaaggttgagctaaaattccattgtttcccagtaataagaaaatactcatttcatttctgacccattcatttaccaagtagtactaccaatcccccaaagaacaggagatacagaatctttatcaaggaaaaaaaatgccctttggcaatagtttagaggagttttcttttgtatttccatgttattctggaggaaataagataatgacacgcacattcagaatgtggccattctgcaggacaaatgaccctgtttcttgaacaaatwagtagcatttaaaagaggaaagagattggcttacattaagagaaaccttaagaaacttatgaagtgcaatgtgtggtctttgtctaaatccaaactgtaaaaaagaccctttaaagacaatcaggcattatagtgttattaatacaggtatatttttatatcagtctaagcaaaacatcacctactgcatttcaaagattttcaaactaactttagaatttctaccattttgtattttctcaccactgctcctctcaactttcataatatctttgcttagtttccttccttagaaaggagagtctgaggcaaagacttatgtgtgagtacttgattg

SEQ ID NO: 861341 - DNA, 648 bp, Homo sapiens
tcaccgtctgcccttatgatcagtcaaataagcaaaatctaaatccccggctccctccctgtgcaaggagctaccgctattcccatgaacagggcttgcaaggcctggaagactttctcaaagtcacgaccttttaatgtctcattgatagagaaacccagagaggctggacttgtaattactcctgcactaacctgttawctttctatatgaaaaaatatttaactttattaacagaattgaaagagtcaaataaaatctagaataccttttattctattaactaactcagtagttctttttaaaacctgggaaaagattaaaagcaaaagcaataagtcagcaattagagcctcttgtccatggtggtatttgttaattctggaaagacatgcatgaaagactgagaaggtgacccatgcttttaacagtttctggggacttaagggagaaaaaccagagcctaggattcaccaagtgagagggttagcgatcaccatgttttgaactggaacccaaaaagaccatactaaagaaagttcctctcatggatggaagcctatctttgaatcatctcaatccttgaaattagactaagatgacacagccaagcatggtagctgatacctacaattccaacactttagg

SEQ ID NO: 861342 - DNA, 624 bp, Homo sapiens
actgatcaggaaaaaaaaagaaggcacaatgattaatttaaggtttgaaagaggtgatgtcactgcagattctttaaatattaaaaagataataaaaaaatacaagacacttagaaaacctagatgaaatagacaaatttcttgacagatgaaaactgccaaagcacactcaagaaaaattagatcacctcattatactacaygtgttaaagaaattgaattgacagtaaatttcctctctataaattaaaccccaggcctagatggtttcacttgtgactcctaccaaacatttaaaaaaatcattccaattctacataagcttttccagaaaactaaagtaaaagaaataattcccaagccacttatgagaccagtatgctcctgaaaccaaaactagacaaaggcaataaaagaaatgtatagactgaaatctctcatgaatgtagatgtcaaaattcttaataatactttagcaaaatgaatccaacaatatattaaaaaggataacgcattatgtccaagtgggttttattccaagggttttgcaaagttggtttaacaaaaatatggctattcaattgtttcagcacaatatgaactgttcttacacatctaaattca

SEQ ID NO: 861343 - DNA, 645 bp, Homo sapiens
ttttccaatttcttattgccctattaccaggtcctcaagggctgctcactctcctcccagcgccttcttgtaagatgacaagaggataaagtgagagtcaaagaacttctttctcttctggaaaattttgggtgatttactctgctcttttgccaaatatttatggatccaaatatttacggaacgcctactaagtgatgagccttgtaaatgcaatggtcatcaaggccaaattgctgcctcaggcaaggaggtgacaatcctgctgaagtaggatttgagggcataccaagtgccttgacatatattaacccccacaatgttcgcagcaacccaagaagtagttaggcactattattattttcattttgcaactagggaaactgaggaacttgtccacagctgcagagcaagttcgtgacagagctagggttcaggctcaagtatgaggctccagagtcagycttccatgccctgaacgataatctataccaactcctgcctattatctactgatgcagaaaaaacactgcagacaatacaagttgcatttgttcacaattctgcatgtgagaaattggagcaggaaatagcagagatagctcatctctgttccacatctgtagttcagctgggataactcaa

SEQ ID NO: 861344 - DNA, 594 bp, Homo sapiens
ctatcctttacctcttcagtctatttgctggcattgattattaaacacttagctctttaaattaaggaaattctctatagctatctcatgtttcaagcacttgcttatgaatttggcacatatattgtttctatgcactctgttaatagaaagagataaaatagctgccatgaagtcatggttgttctgtgttggatgcttattctctcttgtttatcttcctttagccttttaaattgtaaaactgccatgataacattcaatgaattaggaggaaacacatacatttcattcctgccaccctcgggcaacagattttccttcccagtttgacgttacacttccttatactttacaggrctctgaatgaacaggccggtcggactcacacaccctatcagactgccctttgaagtgcattctaactggctattcacttattggtctcctctacacagcaaactcttgcgaggaagagggttttattttgttaggatttttaccccagcttatagaaaagtgcctggcacatacaagttattcattagatgtttggtgaataaatgaattagtatctagtgaatggagacagca

SEQ ID NO: 861345 - DNA, 600 bp, Homo sapiens
ctccctgccagtacagcagtctgaagtcaacctgggatgcttgagcttggtgggggaagtggcatccgccattactgaggcttgagtaggcagttttcccctcacagtgtaatcaaagctactgggaagttcaaactgggcagagcccatgacagctcagcaatgctgctgtagccagactgcctcagggcatcyatgaaagaaaagcagcagccccagttagggccttatagataaaactcccatctccctgggacagagcacctggggaaaggggtggctgtgggcacagcttcagcagacttaaatgttcctgcctgccagctctaaagagagcagcagatctcccagcacagcactcgagctctgctaagggacagactgcctcctcaagttgggtccctgacccccatgtctcatgactgggagacacctcccagcaggggtcaacagacacctcatacaggagagctccggctggcatctgacaggtgcccatctgggatgaagcattctgtgctgttctgcagcctccgctggtgataaccaggcaaacagcgtctggagtggacctccagcaaactccagtagacctgcagc

SEQ ID NO: 861346 - DNA, 551 bp, Homo sapiens
tgcccagggacatttttctcaattatttcctcaaatacgttttccaaacttttagatttctcttcttccttgagcacaccaattattcttaagtttggtcgcttaacataatcccaaaattcttggagactttgttcatttttttaaaattcttttttctttgtcttgttggattgggttaatttgaaagccttgtctttgatctctgaatttctttcttctacttgttcarttatattcctgagactttccagtgtattttgcatttctcgaaatgtgtcctgaatttatagatgttgtgatcgttttttatttatggtctctatttctccagagattttttcatctatatcctgtaacatttttaaactaatttctttaagttggtattcatctttctctggtgcctccttgagaagcttaataatcaaccctctgaattctctttctggcaatttagagactgctttgtttggatccattgctggtgaactagtgtgatcttttgggggtgttaataagccttgttttgtcatattaccagcgttgtt

SEQ ID NO: 861347 - DNA, 588 bp, Homo sapiens
taaaataaccgtttcaggtccatcccttacatggcaaagtaaaaagctggagtcagtacacagtgttggggtgggggcagcgtttgggggcgacgagttttgtgcaccgcgctggagtaccctgcacataaggtccgctcatgggcttctcagtacggactcgccggcgggaacaattaattgakcaaagcgcccctttctgggctggagcaaggttcgcggctgcagatatctcaagctgaaggcaagagcccaggcgaggcgcaggcaggccacgtggctgttccctgctgagactcgcagctttggtcttggaaacctcagggtgtggagctgcttgggccgactgaagggttcagctttttgggagaagtgagggcgagtgttatttctccagcgaggtgtaaacaagactgtgctttcatgggagggacaaattgcagagttgatcccttaccatttttacagaaatactcagaaagtgactacagcttgtcaactggcctgtttagtgagccgctgccttactgtaaaattgtctgaaaatcagattcgacttgacctccacttaatttcagtagcactcta

SEQ ID NO: 861348 - DNA, 588 bp, Homo sapiens
taaaataaccgtttcaggtccatcccttacatggcaaagtaaaaagctggagtcagtacacagtgttggggtgggggcagcgtttgggggcgacgagttttgtgcaccgcgctggagtaccctgcacataaggtccgctcatgggcttctcagtacggactcgccggcgggaacaattaattgagcaaagcgcccctttctgggctggagcaaggttcgcggctgcagatatctcaagctgaaggcaagagcccaggcgaggcgcaggcaggccacgtggctgttccctgctgagactcgcagctttggtcttggaaacctcagggtgtggagctgcttgggccgactgaagggttcakctttttgggagaagtgagggcgagtgttatttctccagcgaggtgtaaacaagactgtgctttcatgggagggacaaattgcagagttgatcccttaccatttttacagaaatactcagaaagtgactacagcttgtcaactggcctgtttagtgagccgctgccttactgtaaaattgtctgaaaatcagattcgacttgacctccacttaatttcagtagcactcta

SEQ ID NO: 861349 - DNA, 510 bp, Homo sapiens
tgtatgtcaacacaataactgtgtaaaagcttattcttctttcatgaccctggtagccttaatgatgtttgaacacctttccctatataaaaactcattctctttctctttaaatgatgatttgattcataaactcaactgattctacatttttctatctgaatatctttaaaagtaaaaaaaacaaactaaagttataaaatgtgaagttttcaatccagaaataaaacgaaaaagtaaaaaacacaataaattrgggtgcgaacagtaccgcaagtgaaattttcaaataaatgttaatctttaaaatagctgacattctgaactcagcttaaggatgggatgaggagacataggtctaacctgtagaaagtgcaggatcagaatatggaaaagtatggagtcttgaagagcatttttttttttcattttttttttcaggggttgtgcaggctggagagttggtgtcttagctgcccattaaccttgttggaaaacacactcacttca

SEQ ID NO: 861350 - DNA, 616 bp, Homo sapiens
cactgtttttacaccctaatacctatgagaacacatttcattttttcccttctccctcactcatttttagctgtgttggtttcttttccctttgtctttctcttcctctttctctctctctctctagacatggtctcaccctgtcacccaggctggagtggcatgaacacggctcactacagcctcaacctcctgtgttcaagcaatcctctcactcggcctccccagtagctggtaccacaggcacgaaccacaacatccagctaatwttttattttttattgagacgaggtctcgccatgtttcctaggctggtctcaacctcttggactgaagcaatgcttgcaactcttggactcaagcaattctcctgccttaggctcccaaagtgctggtattacaggtgtgagccactgtgcccagccaattgtttctcaaatattatctgactcaatgcctttgcatttctgcttcctctgactgtaatactctttctcagatattcacatatctcactctatcatttccatcactctgataaacgggtccctcgataatcccagtttatcagagaagcactctatattatatcgggtgatcccttaccaccctatat

SEQ ID NO: 861351 - DNA, 606 bp, Homo sapiens
cttatattatctcttctaaatgtaacggatttacttaagcttaaaaatgctggttgtatcagaactaacaactttgaaatggaaggcttcctaaccattttcctgcttcttgactcaccaaacttcgggcagggttttctggttatcctgccactgtctttaacttctttgtggcttctgatagctatcatttaaggattacagaatctccttttggttagtatcatggatggagaaaaccattaacatggtggaagctattacttcttgatccctatgggtcctgaaagatgatgaccttcaggagcatgttcacaagtgctgctctgtgccaagagaaaattcaaaattttaaaacaaatctccyttcactttatccaagtagccttaaatttatatcaatcatcttgtttagcaaagtgatttgatatactctttttatcgtcttcctagagtacagactcaagaagacttgtttcaatacattcccttgggatttcatgcagtattcagattgaattttgagcttatcctgtttctttatgtgagagccacactggccctcctacacagcattaacttaaagaccctttaaaagcgaagtgc

SEQ ID NO: 861352 - DNA, 630 bp, Homo sapiens
cagcctcttggggctgtctgtagccatataaggagctggtcaagagctatttatcagaaaagttcttgagggcaaagagaacctacagggcacttcaattagctgagcagtccccagctctgatgtgcctgcagctgtcaccaggaaggggtatcaactattcaaatggcactgttattgcgctttcatatgcaaggkctacaaagtgccccccttcccttcatcaactcctttgaacatctttgcccatatttgcctaggatcttggaacttcagaaaatactagcatttaaaaattgccaaggtattggcaagtaggtgttttaatcacaatgtcaaatgagactgccccctaatcaatggccaccacagccaaagacaagttcaaaagatcctttgggaaatctgcctcccttttctacatgatcccaataacagagaatttgagtcatgacagctgtcccagtccttaatgtctttgcctgggacaaatgtgattatatccactgaaaaccccaaaccaaaggggccctatggcatccacagtgagaccagtaagttccttttgggtctcggtgggaaacatttttatacatgtagattttcaagacttgtatatttgccttcaaa

SEQ ID NO: 861353 - DNA, 570 bp, Homo sapiens
tagagggtcccatgtactctataagcatttgagttgtgttgtgtcaagaaacactgtgaacaggaaaggcaacttgatatccagaggtgatttcaattctggcaagagaaaattgctgtcacctgcagcatgaatatagcccaaactgatcaacctgacataaaatgaatggctgggctccataagcwatgtttctatatgtaagacttggcattggtttctgttgctggcagattgggaattccacagttgcagtggtagatcagcaactttagtgcaatatttttgcttctgtgtcccattgacctagggctgcccttcacatattctggtttgcacaagcattaaaaaactgaattgattcatatacgtgtcccacatagtgatggcacagaagctccgaggtcagaaaggaaggcatacagagtggagtggaggcaagatgttgtcaagggacatctgtatgcagctggttaatgcaccaatggccaaagcaaaaatggattgagaggatgtgatgcagaacatattgagccatctgatattacatctctttaagaaagaagtctt

SEQ ID NO: 861354 - DNA, 641 bp, Homo sapiens
ctgcctggaaatcaaaagaaggaataaattctggcaacaatcagttatcttggtagaggacccttagcctcagtggagacctgcagaaccgtccagcactttgacttcagcctgcttagaggctgagcaaagaatccaaacatgctgtgacctatagagcttctgacctatagaaactatgagataataaatttgcattgtttaaaggtgctgagtttgtgtgaatttgttattgcagcaatagaaaactastactagtagtactactaatattacaagaattaaaggaattgacacatgttggagtttagggagtaaataaatcacatctctttcttctctcaaataaaggaccaagtgagaaagaagacagaaaggataaatggaaaatttactaataaagactgaattgcatgacacgacctcaatgtgtggccatcataggctttctaatatttttctctggaaataaatgtacacttctagtcatgatcagagtcaaatacgtcaggcatcctctgtagaagtagattatttactacgtggttgaggagagactaaatagcagcatgaaatagtatgagagagaccatgtgcttgggctgagcaaggttatttcctgctcacaaactcactaattg

SEQ ID NO: 861355 - DNA, 633 bp, Homo sapiens
ctttctgtgtaatattgttaaagttgggatcctttgattacatgatagcttgaattctaaatacagagatgccatcagttaaatataaaataatattggggcaaaattagccatgccacttggaagtcttttgaaaggtttgtgtttatttttctaacctatatattactgtaagaggcatacttggaacaacccccccacaaacacatatactaattaactaatccagcagcggcataacacacagggagttttatcctttatgaaggcctggcatatgcatcacatttaacacagccctagctcacagtactttatctacttggctagaaaacaaatggccacagaaattcatgctagtcaatcyattttttatatattttggagtaaaaaggatgtaaattcatctgagtagataactagcatacaaagaattcaggttgagtgtgctacaattaaaaatggtcaccacaagaagctgaaatattaggagtgttcaggggcattactgagagtcttcaagcaaaaagggttttcccagctgtcactgtaattacaatgaaaaaattttacttcctaaggatttcatctagaacacattatacataacagaatatacatgcattcaaatgt

SEQ ID NO: 861356 - DNA, 652 bp, Homo sapiens
atggatagtagctgcttctattttgtgttttagagttttggactttttgcagaaacaataattatttatcatatactcacagtctgattccctatcagagtttcttgtttttttttttttaacctattggattgacacattgattcctaaatgtcaaaatttctcataggctcaatgaacaactgctgtgtacattcctttactttctttaattgaggcttcctagtcaactggttcatcatctcattgtatttgattgttctacctttcccttcttttgagacggagtctcgctctgtcaccaagttggagtgcagtggcatgatctcggctcactgcaacctctgccycccgggttcaagcaattctcatgcctcagcctcctgagtagctgggattacaggcacctgccaccacgcctggatacacttccctttcatgggctgaaacatgacctacatatacagtcacgtgctgcaaaattgtggggtttttttggccagtgatggaaaacatacatgacagtagtcccataagattataatggagttgaaaattttctatcacctactgacatcatagctgtgataacatcttaatacaattactttgtttttaaataaatttagtgtagcctaagtgtacacagtaa

SEQ ID NO: 861357 - DNA, 575 bp, Homo sapiens
ctcacaccagtcagaatggctattaataaaaagtcaaaaattaatagatgctggagagggtgaggagtaaaaggaatgcttttacgctgctgctgggagtgtaaattagttcaactattgtggaagacagtgtgacgattcttcaaagacctagaggcagaaataccatttgacctagcaatctcattactgagtatatacgtaaagaaatataaatcattttatcataaagatacrtgtatgcatttgtttggtgcggcactattcacaatagcaaagacatggaatcaatccaaacgcccatcaataatagactggataaataaaatgtggtacataaacaccatggaatatactatgaagccataagaggaacaaggccatgccctttgcagggacacagatggagttggaagccattatccttagcaaactaatgcaggaatagaaaaccaaacaccatatgttctcactaggaagtgggggcagaatggtaacacatggacacattggggagggacaacacacattgaggtatgtcagggagggccaggggagagacagcatcaggaaga

SEQ ID NO: 861358 - DNA, 650 bp, Homo sapiens
tgggacccaccttttcagtttatttctatttcatatcacagacttttataagctgtctagactaccaaggaaattatgctttttgtagttatccagagactcatgttcctttcaagtttttggtctgctataccctaggacatagatctgcaaacttttttcttctgtgaaggatcacagtatatattttaggctgagcagcccacgtacagtctctgttgtgcaattctgcttatttatgttcttattataaatcctttaaaatgtaaaaaccatgcttagcttgcaaccacacaaaaagatcatgggctagattggcctacaagctttactttcccagcccctgcagcccaggcaagatggtcggcattggtatggtggaagctggacagtggctatgttcagtttccagcaagcagtaaggaagaagagagtgtggaggaggtgtgygtaatgtcttaaatcctagaaatcactcaggacttcattagaggcaaagaaagcttagttggtcaactagccacagatatattatataggaaaaaggaagaatgggattttgtgaatgataagcaatttcccttcagtggttttgaagaggtgacaaattattaccctatctaggacaaccatgcttcagatttcatgac

SEQ ID NO: 861359 - DNA, 641 bp, Homo sapiens
atgagtatacttcatgaagtaatggtttgtctgtaagtttatactggggataagtataagttatactgggaggtgggggaagaaaagataattagtggggccctgaggtcttgaaggaaaactgggcctcaattatatgtcatggaaatataaatcccataagaatattttttagctggtccactttgtgggaggccccatgtcttgtttggtgatcacatacgtacctagaagccacagaggaagacgttcattaaagtattgtttacataagcaaaaatcaaaaataatctaatgctaactattaagagtatgattaaataaatggtattaaatgcactgtacatttatttagtggaatattaggcaaccactagtacatggttatgaaacytaagtagcaccataagaacttgttacaatacttaaaagcaaaaaaagcagcatacaaaataatattcatactatgattacacttgtgtgaaaaatgcatgcataggcagaaaaaagattgaaaagaaatatgtcaaaaagataatgattgagtgaagttcatgcaattaagagtgtttttttttgtttttacttcccaaataaactataatgtagcagtattagcttgcatttcaaaaaataattta

SEQ ID NO: 861360 - DNA, 656 bp, Homo sapiens
agagaatacctgacattgggtactagcatattcaaacttcctgaggcaaattttatttcagagataccaagtagaactgagcacaatatttagaagcttaaaatcttgagattggttgtgagattttgagcaaggtatttaatgttatgatagtataagttgatacaggaggatatgcaagattgaagagtaggaaggaaaaaccttggaagcatggagaccaaccatgcaataatccagatctaaggaaataaagggtgtggcartgcaagtgaaaagaaagggtgaaagtagatattctgacagaaattttagtctggtgatgttttttcaatgaggtggagtaagtgagaaagaaatacaggatgacttcaacgaacctcactgactggaaaaaaaaagaaaagaaacaggaataaatgaaaactaacttgcggaaggagatgtactatttacatagcttccatttactccatgaagtgcaatttccatcctgaagaattctgtggcttcagaagcctatcagctaaaccttgtataacacagtatattttataaaatcatagggtgaaagggcaaacttgggagaaagatttgacaagtaatttcagtctagaaattttaggattctcttctatcataaagtttacaattat

SEQ ID NO: 861361 - DNA, 661 bp, Homo sapiens
actaataggatttaatttctagagtactgcatgtagttctgggaccctgccaactaggaggaatagtaactaagaaagaagagtaatcaatggtgattaagttaaaatcagaacacaagccatagtgcccccctctttttaaagcaggtctggaacattttcctgattatacatcaatgtcaacagaaaatgtctcakataagggggctgatagtgctataaatcaggcctttctatttaccgggttacaacttctaaccattatagattagatagatagatatatagatagatagatagatagatagatagatagatagatagatagatagagtttccatatgagatcatctgcaacgaacagtaatagtaacatttacttgagccagggaattaaatactctgggggaatttcctagaggtgacttgatcctaccttcaataaaggtagagaagcaggactctaagtgcagagagtcagtagagaagagtgattaagtccacattaatgtcaattaatgagaaaagaactatttaggaacacattggttgttctgagtggagagtctttacttgtcccactcctctagcagaagctattttaacctattacgctttggggaaaatttattagtttgtcactgtaattcggaactgatcc

SEQ ID NO: 861362 - DNA, 605 bp, Homo sapiens
tacagatttgtgtttaaatgtatacttacaaaaatttcaattcacaaattaaatttttaaaacacacacactttcaaagagtttctctttagaatgatacttaaaaataataacagtcaatctccctcatatatttacaaaatactcctggctccagagctgagttttttttttttttcctcaaatatctcttctaaaattatcaacaccttctcatttagttctccatttgttcaactttgtgccttgaacatatggcaggttcagaatagtgtgtagttgccaggtaaataccatgttaaaagtaactgatccaaagtaacttgaccaagcgtaacacacagyatttctaatcaaataagcaaactagtgatgaactagattccctctattatatttccagaaataatatgttaccacattgtgtctgtgatgttcaggactcacagaactttataaataacctacttttacaaaaagcctgcactccaattaaatttttaaagagttaaagtctgccatttaaacaacaaaaacaaaaccactactggaaagttgtctagaaaaggaacaagtcactattcacaaaagaaaaattttgagtt

SEQ ID NO: 861363 - DNA, 644 bp, Homo sapiens
ctatggtcatgttcagagggctcctatcataaaatccactaggcctatctgctggctgtcatggaatcacgcaaaggggccccatataacatatatgcacagaatttctactcttttactttcatgcaggcttgactgttttcaaatgaacactgacttaatatatgattcacaaatttgcaattttgataagtcaaaaactgttcaaagaacatgaaggacttcattaaaattcaaataaggtaaaatttttgtaacctctgaactgcaagatttatatagagagacaagtaacggactcacatttgcacatattaaaatatttttaaaaatttgagagtgraactaggggtcaccttaaaatatattttaactatatatcaatttgttttgaaaataaatgtcatgtagcatacctaacttgaacattgatttctagtactctgtaagtatttgataaattgacaagtgaatggatagacggatgcatgctttattatggtctgtatgagatttcagactcatacagactatgttgggctagtaccaagcagggctcatttactacatcttttactttcaagtttgtcatcattctcttgaataagaactcaaatcacctcaccaatgacttatctctatgc

SEQ ID NO: 861364 - DNA, 626 bp, Homo sapiens
acatttattacccatccttgacattcattatttcttttttttttgacatttaccatttctatagaataggatatgttattgctgcttccacttttgagtttattttgtattgcaactaacatttttaaaagtttcatattttccataaatatcctttcattaatttgacactatttttattgaaaacattttctgtctttttaaccaaagtatgaaattagatatttcttcttcattcaggaagacattgattgtatatgagtattaattttgttgttgttcgccaattataattaggaaatattatgtatagagtagtaaaaagtaaataaattttggctgagtcaatttagaaatactctagcccattgagcctaaataaatacatcagttcttaaggaaacaagcaaaagttgtgtatagtagtccttyggtatgtgtaggggattggacacacatagataccaaaatccataattgcccaagtcccttatataaaatgatgtactatttacatataacctatgcacatcctcctgtatactttaaataatctctagctcacttataatacttaatgtaaaataaatgctgtataaacagttgttacaatgttttctttgggg

SEQ ID NO: 861365 - DNA, 645 bp, Homo sapiens
ttatgttgctgtaaaggaatacatgaggctgagtaatttataaggaaaagaggtttatttggctcatagttttgcacgctgtacaagaagcatggtgctggcatctgcatctggtgagggcctcaagtggcttccactcatagcagaaggggaaggggaaacacgtgtgtagaaatcacgtggtgagagaggaaacaagagtgaaggaggtgccagactcttttttacaaccagctctgtgggaactagtagagtgagagatcactcaccatcacaaggatggcaccaagacattcatgaggaatccactctyatgacccaaacacctcccgtgaggccccacctccaacactgggggtcaaatttcaacatgagatttggaggaaaaatatccaagctataggagtggtctacattttaaaagtgaaaaaatgaaaacatcaatgttcagctagtcaagaagtatgaacattcttcacgttataaaacaaatcaaactttaaaacaataacaaaaacaaatggttgatttgcctttctgcccctccaactgttttgttgtgtttgctgatttgatggcttgtttttaggacatccatcatatctgatggaaactgtcccagggacaatgtagctattgggttgt

SEQ ID NO: 861366 - DNA, 573 bp, Homo sapiens
aaaagattaaggaacaatgaagccactctgaagacaattttttaaaaagccactataaatgtcataacaggagatttctagcactaaaaagaaaaggaaaaagccttagggttccaggttcttctaagtagctgagatactcaagtggagaagtgctttcctattgaaactccaacttaaatagcacaaactattcttggtgtaagacaagaattaaatattagatactggattgtaagaatgggcacggttttattttgttagtaaaatgatatgttagaatatcttttaggttcatgatagaattagatagttmcagatatttaaagtttctgtgttcttatgggaccaaagagacagcaataaagtaaaatagacaagattacatgatgagagaagaaaataaaatggtaaaggagaaaagaaagcagtagaaaaggtgaaggtagcagaaacattttaagaaaaccaatagaaatgtggaaggtgggttgatagaaatatataaatagaatccacagaggaaacacaaataatcttaaatgtaagtaaatttcaaaataattttacttt

SEQ ID NO: 861367 - DNA, 639 bp, Homo sapiens
agttattggctcactctacctcacaactagctgctaacaaacaattgctaaatgaatgaatcactctacacttttggactggatgatccctctgccagggaaagcttttttccttcccactctgcctctccttttgtgtatttctcaaacctactcatctttcaggactaagcttgagtttcactttcactgtagtctcctgacttttttcyaagcagaaaaaagttgtgcttgttatttcatagccaatccactatctatcacatttaaattaatactttaattatttaataaaatatgttttttaaaaagtatgtatgctttcagggtgagaaatatgtcctatttattcatttttgcatttctatcacctaggacagtttctgacatatagcaagcacttaatgtctttttggatgaatgctgaatgttatcatttgttctcaggtgaaatgaacttatgcctatctctgtggcagagtcttccaggggaatactcaatatatactgcctccttcttccttactaacaaacatgactatattagagaagataatgtgtactggtaaaaactaatttctctctccctcaaagttaggggtatctatggaacatagttttaatagatgacacatcagc

SEQ ID NO: 861368 - DNA, 625 bp, Homo sapiens
catcccacaagcttgggttggtatcctcaccagaagtatgacctgaggccctattgtgtgccagcacctatgctgggcacttggacatgaatcctccctgtgaggagctcacattccatctgggacaacaaatgaggagatgacagtgtcctgcagtgagtatgaaggagcagtttgcatgcaactaagtcacctgatcctaatagcacctctttgagggaggcactattattagccccattttacaaatgaggaacctttaggccacatggtaataagtgacagagcctcagctaggacacagctttggctaattccaagtcttggctcttaaatcctgctctatccttggtataaaatgatagctaatgctgtggtgttgtaagcagtgagtattgggcactgtcccacaatataggctygggggggcaggttcagattttgcccttttcatacagtcccactgtagttgtttgttagggaaatgggcaaattgcccttgtcttaggtggggaagctataggtggaggcaaagcagaactataggtgctcctgtcacctggattcaggtatcaccagggctgtgggaccctcatgcaaaaagctctttgttctgcagccttgt

SEQ ID NO: 861369 - DNA, 588 bp, Homo sapiens
agtttactacatgagtttagaagagataaaacgaagctctatctccccccaggaggtggccaatttatggaactcagtatcccaactattaggtgaaaatgaataattttaaaaggtttagataaacttgtagatgctttatttatwtgaattgtcaggaaaaaagatatggttgtatggttgagaagtttattctttactttttggagttcagggaaaactcacatcatgtggtgacacagaatatttgactaaatggaccaacatcttgactcagagtgaaaattcttaggaataacaacagtcttttaaaaagtatctttcctttcttttccaatataagggaaaaggaaactttagtcgggtaggtggtaggaaaaattaccctatgtgaaagcttggtgttcatgttgaaaactatataaatgccaactagaaaagggaaaattgaagggggcaaaaggtgaagctcagaaacctagtcgtaattttgcataaagtctagattaaacaaccaaaaaagtgtgaacatattagtgtaatgaagccaataatatgatgaattattgatgataaaatagtaaaaat

SEQ ID NO: 861370 - DNA, 640 bp, Homo sapiens
tctttgcagtttttgccagtcctataagttaaaaagtagtttttagtgaggtttattcatttgtttgttcattcagcaaatttaacaaacacttcctgtgtcccaggcactaatctaggccctagggatacagcagtgaagagaagacagttatggtctctgggctgttggaacttatattctaatggaggtggggagagctcaggaaacactacaaatcaataaacactcatctcttttcatgtttattaacctttgtacttattccataaattactgggttcatatcctttacctgtttttctattgacctgttcacttttttcttattaatttgyagttcattatctattgtgacatccatgcaaatgttttctcctataaatacaccttgaataagtcatcatttgacaagttaatgactgtaccagttcttatccatgtatggaattataacagtatacctgacttctttggttggtgagaaagaattggactaagtcttaaatttccatatttcagcatcctctgaggaattcttaaaaattatttttgtatttgtaaaagtacattagaaccatgagtcttgtgtgagacttgaagctatccaggtgaaggggacttaattgaattaatttaa

SEQ ID NO: 861371 - DNA, 564 bp, Homo sapiens
ttctagatttataggcccctggggagctcactttcccttgctgtcataattgtgaatcttttgcccataccccttagattcgactctaacttttccaacccttcttccagcctttgtgacttgccacaggtcatgggagagaagagcgggtggggttccatttgtatgtatcctcccagtacttctatcttttacattttaccactaggactagccggtggtgtcctctgttcccccatgtcacctcttccrtctcccactcgggcatcttgtgtgcaatgcccaaatagtgtgtaactttaggaacagaggagtgtgttaaaagctagaggtgaggaaggggaactgggagaggagaaagaagaccatatattttgggcagccctggttgcaattgtttctaaatcagcactaaaaagtttgcttaagatgttcttcagatacgatgctatgatagtgtagaacctactattctatgtgaaaatgttttcaaagtccacaaacagacagtattttaagtaaaattttagaaagcaatccacctgtaaattgaagattttaatg

SEQ ID NO: 861372 - DNA, 664 bp, Homo sapiens
atactagttattacctggcacagttatttttatgcatatttttacatcagtttgaagacatttaagttgacatagagcaaaaatacattattgtgttatttttgtaatatcaacaaatttagattcatttcatttcggaaaatttgtcataaatgcyagctttctaaacaagaacatgtctagttcatgtggacgtccaaaaatccgtttgtatttttcccagatcaggaattgttttgaagcctttggctatgtttctgtaagcacatggagatttttggaaaaggtagaaatatctgggtaattaaaagttaatggctattttattttcacttaggtaactttttattactctaaaaatttagtagcaagaattagaattatctatatcagagaaaatatgttcctttaatttttttaagaaatcatctgtcttgcaaatgttttctttatgtcacaacaggaaagcttttcagtgagttgagttgtatcttaaagggtaagctgaaagctttctaggcaatgatagtggtgaggagtgggtaagtggagaaaggtgagggaatagcacatttcaagcagagtgaaaacttgtgtgggtacatgagacttggactatttgaagaatagccaggtaggtgaacattctcaaagtagtaccttc

SEQ ID NO: 861373 - DNA, 611 bp, Homo sapiens
attctctaaaaataaactattcactgctaaagaaattatatcaattttttataaattatttatcttcttttttttagacagagtctcactctgttgcccaggctggagtgcagtggtgcgatcttggttcactgcaacctccgcctcctgagttcaagcaattctcctgcctctacctcctgagtagctgggattacaggcgtgcaccaccacacccgagtaacttttgtatttttagtagagatggggtttcaccatgttggtcaggctggtctcaaactcctgacctcatgagccccccacctcagcctcccaaagtattgggattacaggtgcaagccacagcgyccagcctataaattatatatcttatagttaaattatatatatataatttcctttagcagtgaataggtactattttatataatatatagatagataattttatagattatgtaagattatgtaaattaagtaattaagtaatattacatgtaaatacttatgtaattatatagattatgtaaaattatgtgtaattttatgtaattatatagattatgtaaaattatgtgtaattttacataattatatagattatgtaaaat

SEQ ID NO: 861374 - DNA, 696 bp, Homo sapiens
tgcataactagtacaatgccaaaaccaggaaagtggcattggtacaatccacagaccttattcagatttccagttttatttgtacgtgtgtgtgtgtgtgtgtgtgtgtgtgtatgttttatgcagttttatcacatgtaggtctgggtactcactaacacagtcaagacacagaaaacttccatctacagaaagatcccatgttgccattttataaccacacctacgttaccccccacttcttccccacctcctgaatcctagttcctggccatcactaayctattctccatttctatagttttgtcatttcaaaaatgctatacaaatatgtaaccattgggtattggttttcttcattcagcataattcccctgagatccaaccgaggtattgggtgtatccataatttgtccttttttattgttgagcagtattccacagaatgaaggtagcacaatttaaccattcaaccactgaagggcatctgggttatttctgggttttggcaattataaataaagctgttatgaatacccgtgtacaggtttttttttttgtaggcataaatccacaaacaaccaaaaatgaaattactgaattgtgtggtacttggatgtttacatttatagaaaacaggcaaattctttccataatggctgtgacataatacattactaccagcagtgtatgaga

SEQ ID NO: 861375 - DNA, 696 bp, Homo sapiens
tgcataactagtacaatgccaaaaccaggaaagtggcattggtacaatccacagaccttattcagatttccagttttatttgtacgtgtgtgtgtgtgtgtgtgtgtgtgtgtatgttttatgcagttttatcacatgtaggtctgggtactcactaacacagtcaagacacagaaaacttccatctacagaaagatcccatgttgccattttataaccacacctacgttaccccccacttcttccccacctcctgaatcctagttcctggccatcactaatctattctccatttctatagttttgtcatttcaaaaatgctatacaaatatgtaaccattgggtattggttttcttcattcagcataattcccctgagatccaacygaggtattgggtgtatccataatttgtccttttttattgttgagcagtattccacagaatgaaggtagcacaatttaaccattcaaccactgaagggcatctgggttatttctgggttttggcaattataaataaagctgttatgaatacccgtgtacaggtttttttttttgtaggcataaatccacaaacaaccaaaaatgaaattactgaattgtgtggtacttggatgtttacatttatagaaaacaggcaaattctttccataatggctgtgacataatacattactaccagcagtgtatgaga

SEQ ID NO: 861376 - DNA, 659 bp, Homo sapiens
gacatcctaagttcctttgcacaactgaggagttgatggagttccagtgaactgaatactttccattaatccatcccagagagataggtcatctctttgtagcactggtctgtagaaaaaaaatgaagtgcctgagcaagatactgaattttagcattgcttatgtgggggtggggggcrtggattgctccatgggcaaatatatttctggtgtcctgccattcttcctggggtgtaaattcactcttacctaagtgtggggcaaagtctctctcagttgaagcccagtagatgcagttgataaaaccgatgttgaatcccacagttcacagaattctgagatgtaaatactggatttatcaagtcaaattgcatctaatgatgagttgtgtttggcttctgagaatccacagaaaattatcatgtgtttacctagggttactttctcatgactttgttctcttcttttcttgtctgtcttctctctctgccacatgaccaatttgttgcattcaactctgattttaaaggtttccattccactaaccgaaggcctggacttgatatccatgttgacggatgatgctacaattgccgcctggaataacgaaggactgcccagtgacagaatgtccaccgaaaatgccgctatcctaaca

SEQ ID NO: 861377 - DNA, 659 bp, Homo sapiens
gacatcctaagttcctttgcacaactgaggagttgatggagttccagtgaactgaatactttccattaatccatcccagagagataggtcatctctttgtagcactggtctgtagaaaaaaaatgaagtgcctgagcaagatactgaattttagcattgcttatgtgggggtggggggcatggattgctccatgggcaaatayatttctggtgtcctgccattcttcctggggtgtaaattcactcttacctaagtgtggggcaaagtctctctcagttgaagcccagtagatgcagttgataaaaccgatgttgaatcccacagttcacagaattctgagatgtaaatactggatttatcaagtcaaattgcatctaatgatgagttgtgtttggcttctgagaatccacagaaaattatcatgtgtttacctagggttactttctcatgactttgttctcttcttttcttgtctgtcttctctctctgccacatgaccaatttgttgcattcaactctgattttaaaggtttccattccactaaccgaaggcctggacttgatatccatgttgacggatgatgctacaattgccgcctggaataacgaaggactgcccagtgacagaatgtccaccgaaaatgccgctatcctaaca

SEQ ID NO: 861378 - DNA, 647 bp, Homo sapiens
aaatagtattttttttttatgttagcataaaaaagttgcaggagttcttgtattctgaatgtcagactcttattggatatgtgacttataaaaattttctcccattctgtgggctgtcttttcactttcttgttggtgtcctttgaagcacaaaagtttttaattttggtaatgttcagtttatctattttttcttgcttgttttttggtatcatatctaagaaatcattaactgacagttcgtgaagatttatgttttctcttaggagttgtgtagttttggttcttacatttagctctgttgtatattttgagttaatttttgtacgtggtgtgaagtaggggtscaccttcattcttttgcctgtggctatctagttgtctcagcaccgtttgttgaaaagactatattttctcccttaaattgcctttgatccttgttaaagatcagttggccatatttcatatgaatagatcagttggatctattcatatttctgcgttctctgtttcattccattgatctgtttgtctatccttttatcaatatcacaccgccttgattactgtagcttgatagtctggaagccaagtagtgtcaattctctgactttgtttttctgtatatttttgatgattctggatct

SEQ ID NO: 861379 - DNA, 728 bp, Homo sapiens
tttcctaactgctaatgatatcgaacacctttttatatgctaatttgccacccatacgtggttttcagtgaaatgtctctcatgtcttaagctcattttctaaagggattctttggttttcttactgttgagttttgagagttctgtatttgttacagtagtagttcttcatcagatatgtagtttgcaaatatttcctcccagttatagtttgtcttttcatccttttaacagggactttcacaaagcaaaaattttaattttgatgaagtccatattttttcytctatggatcatgcttttgctgtcatctctaagcacttttcaccaagttctacttactgaagatttccttttttgttatcttctgtaagttttatagttttatgttacatatgtaatctgtgatccaccttgaattcattttttaataagatgcaggacttaagtgctgaagacactggctattgtgatttcacagctatactatatctaactgagtgtaaataaaaagtagtttttgagtaattaatactaaatgtaactcaccatatttttatgtatcattttgctatacttcttttaataacatgtaatcagaaaattattataaatataaaaaatgttcaaagaaatcagtaatagagaagttgaaacaacagggaaattaaaacaagaaatgtgagagaaaataagtgggaaaaatttttattgaagacactcctctc

SEQ ID NO: 861380 - DNA, 615 bp, Homo sapiens
ttttgtttgttggtttgttttattggcaaagagaactcatcagatagggggtgtgtgtgtgtgtgtgtgtgtgtgtgtgtgtgtgtgtgtgataaccctttctctgctggagttggtttactttactactgaaatttttaaaatatttgattaaatattttatattaatatttatttttgctttattttaacatgaaaattcaaccagtataatttgggtgggggggaggtgcatacttaatattaaaagcactcgcttatgatcttaatgagttcattaaaggaaagttattaagtaatattaccatagtaaaagtaaagtaagtaaatgaaagttcagctctatcttccagtggttattgcttttattagctcacaatgaaccaacattagcttcttttgctagtgtctctgaatactaacartaaagcagttctgctggtttccacttcactgatctactcttgatttacatcaacggtgaacctttcacttagttacctctttagacttgctttccacacatcctgtttatgtgcagtcagcaggaagaaaacaagaatgtggatatgagcaggaagagaaagatgaagaaataaaatgctttcagaaaag

SEQ ID NO: 861381 - DNA, 598 bp, Homo sapiens
acatatggagattctctctctacaaaaaaattataaaaatagccaggcatggtggtatgcacctgtagtctcagctctttaggagattgatggtggaggattacttgagcctgggagcttgaggctacagtgcgcctcaagcttgggtgacagtgagaccctgtctcgaaaaaagaagctgtacatttcagtattgtttagtatattcatattatataaaagagttccgtaaatttttcattttgagaaactaaaactcaatactcattaagtaacaactgcccattttaccctctccccagcccttgagactcataraaacaaaacacccttccatgttttgtttctatgagtgtgactaattaagatatctcatataagtgaaatcatatagtatccatcattttgttactggcttatttcaggtaacatagtattatcatagtttatcttaaaatatgacaggatttacttaaggctgagtaatattctactgtgtgtgtatgtgtgtgtgtgttcgtgtgtgtgtgtgtataacatggtttttgatgtgtttataagtcaaggaatatctaagttgcttcagccttttagcttt

SEQ ID NO: 861382 - DNA, 750 bp, Homo sapiens
cttacataaatccagatagagccaagtcattttgtcaatgatcaatggttatgctttcttgtggcacttccttgttgctgctgaacatcatggtcttcagggtattgcagatattccatggggcctttgctaggagaattgtggacgaaggaccaaaattatgagcattatttgggagcttgtttgaaatacaaaatctcaggtgacattcaagaccttgtggatgacaatctgcactttaacaagatctccaggtagatcatatgcacgttaaactgagaagcactgttctaaacttgtcagggtcgcacaggtgmgagtctcacctttacagtctctcactttcaaaccacaaggattttctaagtaccatttaaccctcccactaaaataaatgagtcctagattcccttctgtgattcaaaaaattctccttctaagttgcagcgagctaagtttctgtcactgggaagtaagatggataatattgaggtacctggaaagacagacaaatgactctgggtttcacacaccttcaggttaccattactttttttgttcaagtacttaaaatgtagaaatatctcagacttatagaattattttccagatgaaggcctcagttggcctacatgaactatgagattcctatttcacttctaacataatttagatgttattttactaaaagagaatcccctgctaggctctactccaaaatgatgtacattttggaaggatcatttactt

SEQ ID NO: 861383 - DNA, 750 bp, Homo sapiens
cttacataaatccagatagagccaagtcattttgtcaatgatcaatggttatgctttcttgtggcacttccttgttgctgctgaacatcatggtcttcagggtattgcagatattccatggggcctttgctaggagaattgtggacgaaggaccaaaattatgagcattatttgggagcttgtttgaaatacaaaatctcaggtgacattcaagaccttgtggatgacaatctgcactttaacaagatctccaggtagatcatatgcacgttaaactgagaagcactgttctaaacttgtcagggtcgcacaggtgcgagtctcacctttacagtctctcactttcaaaccacaaggattttctaagtaccatttaaccctcccactaaaataaatgagtcctagattcccttctgtgattcaaaaaattctccttctaagttgcagygagctaagtttctgtcactgggaagtaagatggataatattgaggtacctggaaagacagacaaatgactctgggtttcacacaccttcaggttaccattactttttttgttcaagtacttaaaatgtagaaatatctcagacttatagaattattttccagatgaaggcctcagttggcctacatgaactatgagattcctatttcacttctaacataatttagatgttattttactaaaagagaatcccctgctaggctctactccaaaatgatgtacattttggaaggatcatttactt

SEQ ID NO: 861384 - DNA, 561 bp, Homo sapiens
tagatcatgataagaaagttggattttattgtagagcattcagaagccactgaaggtttgtttctaagtaggagagattcatcatgggaatttaaggtctactctggatgctgtgtggagaataaattgtcaggacaaaagagtggaaaaaggagatyagtccaaacttatttacgaaggtctggtaagcatatgatggctttttaatctgtcaagtagtgaagtggttcccaagcagcagtgcctcttctgttggtcacacttcttcatatttgtctgataggaagtcagcaagcccaaatgggtttggatcatttattactcactgaagagcaggcagcataaacttcatatttctcttacttctctttggtccaaaatcccatgggggtaacacagaggtcggcctaggtgaatattgcacatgtagtagatctgtgtcatggttgaaattaagattaagagatcctgatcttgtctaggggctgatggcaaatctgcccctcttcccttccagaaagagacattatctttagtagcctgaaacatctccagggagag

SEQ ID NO: 861385 - DNA, 666 bp, Homo sapiens
acagtgatgcaatagaaaatgagtttcaaatttgaattcgctccaagaacctaaaagacaccccggtggcaagtcatctgggatactcatcattgttcccatggtttgctacaggactcagaagtttttctaattctagtgtgagtaaaagcaactgggctcttgcaacttttcctttttagattcttactaactgcagagaaggtgaaagtatagaaagcaagacattatgaaagtggattatatttgccaatgaacaaagcatgacaaaaaagtatttttatcaagcaaagtgtagaatgaaaagtgtaaataaactgacaataagaaaatcctgttatggaaagtgatatatttagggcagaaagcaagaaaaggcaagaccaagattcccctaggggaattccaatgctgaaaaccccggagcatccagcsggcagccaataccaaatgctgaaaagctggagtagctgagtatcaaccagtggggttccccacaccaaatgtcagaaatcttcaagtatctgggggctggccaatgctgaaaaccccaaaacatcagtggggtggccaacaggaaacccaaaggcctggttagggccacagaacaatgtgactctggtgtcccagagtcaacacaacaggggacttctcataaccaagtgt

SEQ ID NO: 861386 - DNA, 607 bp, Homo sapiens
catattgactgttttaaactgaagcatttgagaaaccacatgtgcagaaataactttctgaccttcccctgaagtgggtcataagacccttatgtgaaaggtatcctccttccacctgaaggaatggagcaaccttgtcttcaaagaggaagagacaccagtagaaatctgaacacacaggcctggctgtttcccctggtttactatagctcataccttgtcctatcacattwctccacaactctccactcttgatcaaatctagcatttaaaacacttattcttcacttccttatgaaggccgcgtgtcaagtgaagctatattataaatttatatgattttctcttataaatctgttttttgttacaggggcccagctgagaacttagaagagtaaatgagaaagatattatattagtctgttttcaccctgctaataacaacatacccaagactgggtaatttataaaggaaagaggtttaattaactcacagttctacatggctggggaggcctcatagtcatggcggaaggtgaatgaggagcaaagtcacgtcttgcatagtggtaggcaagaggtgtgtgcaggagaactcccctttata

SEQ ID NO: 861387 - DNA, 607 bp, Homo sapiens
catattgactgttttaaactgaagcatttgagaaaccacatgtgcagaaataactttctgaccttcccctgaagtgggtcataagacccttatgtgaaaggtatcctccttccacctgaaggaatggagcaaccttgtcttcaaagaggaagagacaccagtagaaatctgaacacacaggcctggctgtttcccctggtttactatagctcataccttgtcctatcacatttctccacaactctccactcttgatcaaatctagcatttaaaacacttattcttcacttccttatgaaggccgygtgtcaagtgaagctatattataaatttatatgattttctcttataaatctgttttttgttacaggggcccagctgagaacttagaagagtaaatgagaaagatattatattagtctgttttcaccctgctaataacaacatacccaagactgggtaatttataaaggaaagaggtttaattaactcacagttctacatggctggggaggcctcatagtcatggcggaaggtgaatgaggagcaaagtcacgtcttgcatagtggtaggcaagaggtgtgtgcaggagaactcccctttata

SEQ ID NO: 861388 - DNA, 611 bp, Homo sapiens
gtagtatctgcggtttctggcattcactggaggtcttagaatgtattcctcatagataagaagggactactgtgcagcaaaacgtacttattggggactgtgggatgagcagaggtgttttcaaggaagatgtgaaaatgctaggaacattccttctgagacctgaagaacaggtaatcagacagcaaaggagaaaaarcaatgtaaagagagaactctgcctttgactcctctttgggctactgtgtggatgataggagataaaaactccaaaaacagtaaatagaaaggaaaaaaatcggattaatgaacaaatgcaagagtgggaagcaaagttgttttcttcgtagaaggattaatctgactcagaaagtgtagaacaaattaagtagtcagagactcaaggacacagctttagtatcagcaggaatgcttcaaatagcttgaaaaagacaacctactggggaataattcttgacattgtgactatgggttgcctggaaatactactggttctatttattattatattctcttgtcaaggtttctctataggaacagtgattacagctgatatcaagattgtagattccacagagactctttttaat

SEQ ID NO: 861389 - DNA, 614 bp, Homo sapiens
attcttacagaatgaattcagttcttatgatttatagtcacttaagaaatatttattcacagtggaaaatttctaaagttattaaagctgtagagaagttgaatcgtaaaataagagtatgttgtactcgtgttttgtgtttgcataaatcttgaaataaactttttggaagttctttgctttcaaagagttatactcccaccttgtggcaaagggctgtagagcaaagacaacagtacctgactcccttggggatcatgggatcaaaaattatttttacaagtgaagaaatgaaaatagctttacaaatattggccaataagtgtaaatgaatgaataaataaaaaagtaaatttttaaacamgaaagtaaaattaagaaataaaatactaacttgagaattgcaaatctttcacaggcaggatgccgccaaggtaatgatttgccaggtgcattcgtttctttggagacctcagagaactgagtaagccagatttgagcttggaaaagtcaacatgatcagggcactaagagttcgagttacaggcaacccccactgtgtctcagatactcaacttaggtagaacattgaacatgtgttagccagttgaagt

SEQ ID NO: 861390 - DNA, 623 bp, Homo sapiens
aagaagaacacatttcaagtggtcacactgaggttaatgaaaacaggcacatttacagcatacgaaaaggcaatacaacacaagtatgttcactttttgatagttttattggttttgtgatatattttttaaaaaggaaagactaaacttttcttcatgaaaaaactgttcagttatttttagacactttcataaaaactcaaaattgtaggtttttgctctaccactaagaaaatgttcatataatctaaattttgcattcttttaagaaactatatttatatcttaccactatagcccaaatattccaaataattttatcctatagacagccattttttttwaaaaaaaaaggaagagataagttgacaaaacaatatgctaaatataacacagccatcagcaggacagtggtattatatgaccagtaattgaagttttcccatcactttgctctcagaaaaaaagccagtgttaaaaatcacatctttactgaatgtgaaactaaatctaagtagattaaatgacttggccaagtcctttctgtaaatttgtggcaaaggagaatttctcagtgcagtaattacatctttgccttccagaaggccatctacaatgagatt

SEQ ID NO: 861391 - DNA, 623 bp, Homo sapiens
aagaagaacacatttcaagtggtcacactgaggttaatgaaaacaggcacatttacagcatacgaaaaggcaatacaacacaagtatgttcactttttgatagttttattggttttgtgatatattttttaaaaaggaaagactaaacttttcttcatgaaaaaactgttcagttatttttagacactttcataaaaactcaaaattgtaggtttttgctctaccactaagaaaatgttcatataatctaaattttgcattcttttaagaaactatatttatatcttaccactatagcccaaatattccaaataattttatcctatagacagccattttttttawaaaaaaaaggaagagataagttgacaaaacaatatgctaaatataacacagccatcagcaggacagtggtattatatgaccagtaattgaagttttcccatcactttgctctcagaaaaaaagccagtgttaaaaatcacatctttactgaatgtgaaactaaatctaagtagattaaatgacttggccaagtcctttctgtaaatttgtggcaaaggagaatttctcagtgcagtaattacatctttgccttccagaaggccatctacaatgagatt

SEQ ID NO: 861392 - DNA, 627 bp, Homo sapiens
cccttacacaaagcaggcaatctatatttaataaaggaattggtgaatttttgaacaatccttgtcaagaattatactaacagttgtaaaagaatgcttacaaggtgttcatatgcaactaaatactttgattcatttttcagataaaagtgaaggaggaagaagatgagtagggctgtacagggtggagagggtggcaactctgctttagacaagtgyttttcccactttccataggcagtagatgtggcaaaaagatggctctttaagaggagacttagcctctgaccattcataggctgtatgattatggtcaagacactagcaactttctgggccttgctccgccaccccttcataaaagaagttgatgaagtgataaacaatagttcctcctcacttgtaatcatatcagaagactgacactattagggatcttaaagttcatctagccccagaatggcaattcagcattatcttacatgctgatcttggcctatcagtggcagcttctcgcagtgttgagaacgattctgaggctctatttggacttagcggataaggcagccttgactgccataatgatgtctgctacaaggcgggaggaaagtggcagcaaataagtca

SEQ ID NO: 861393 - DNA, 563 bp, Homo sapiens
ctcctatagggcttgtccctttgttcatgaggaaagatgggaccagaatgctgtgggatgcaaaatcaattcattagatcacagggtgcctggaaagtggtgttagatttttgactttagagagagggtctagcagacactcaaccacttaccagatgtccctgagtctactgctcaaagtcaagacagtctttccttccagggtaacacttttggtagtcaataaaatgtgcatgacagcagagggtggcactggycctaaggaagaatttacactgggctttgtctctcccctctggtgtgtttgtttcttacccttggagggtgatttaggatggagagctgagagggtacccaagagccaaggggcatcattttccattccattcctcaccagctggacaaaatagtactatgccttgatattgtggtactgactaccctatagcatttgatgcttaaaaagcattttcacatactggatctttggagtctccctaggacagtagtatgaaggagaatttgaacctcagcataagtgacttgcccacgggaatatgttt

SEQ ID NO: 861394 - DNA, 549 bp, Homo sapiens
aaccaaacaccgcatgttctcactcataggtgggaattgaacaatgaggacacatggacacaggaaggggaacatcacactccagggaaagttgtggggtggggggaggggggagggatggcattaggagatatacctaatgctaaatgacgagttaatgggtgtagcacaycaacatggcacatgtatacatatgtaacaaacctgcacattgtgcacatgtaccctaaaacttaaagtatcataataataataataattaaaaatgaaaggcagagatttcagattggattaaaacagaaaaatgcaagtatatgctgcctaaaagaaacacgctttaaatatagagacacaaatagcttaacagtaaaaagatgggaaaagatacaccatgttaacatagtcaaaagatagctggagaggctatattaatatcaaagtagatttcagagcacagattattacctgagataaagagggtcatttcatattagttaagtggttagtttaagagaatacaatcctaaataattacacactaataataga

SEQ ID NO: 861395 - DNA, 619 bp, Homo sapiens
acttgctgtcacttcattgtactgccatagcccaccctggtctacttctgagttatgctttcaaccaacttccatgtcccaattccatattccatgtctcacaggaaccaagacagatcagagttaggaatcttttctctcactaactgtgcttatagacaccattactctgatgcagcttgagaagcattcactgttaggggtcgcagatgttacctggaacaaagtctgctctcaccatatccctgaaaatacctaacatattctcawgttgtggaaagtcagtggcagggagaactcataacccagctatttagccacacatcttccctacctacatcccccttcctcttcccacaatctccgagaccaggaaaaaagcacactttcaaacttctcaagattaaagctctatgatccattctgatatgtcaaaggaggagctctatcacatagaaatttctctttctctcaacaaagcccagtttttaaaatcattatctaaagatgcgagaaaagtcatctggtttgagactcaatgctgattggtgattttcttatttattaattaatacattcaagaaatatttcttgtgaaaattacttctcaggtgtggaa

SEQ ID NO: 861396 - DNA, 627 bp, Homo sapiens
taaggtctcatatctattaagaaaatataatttgtagttaataacctactcaaaaataaatgctaggcccagatgacttcattagtaaattctgttaaatgtttaagaaagaaagaatgccaatcctacacaaaatctttcagaaaatagaagaggaagaaacacttctyaactcgttttatgaagccagcattacctcagaacaaaaatcagagttattataaaaaaaattataggccaatatcattcatgaatattcttaacaaaattttagcaatatataaaaaggctacatcatgaccaagtagggtttatcccaggaatgtgagcttggtttaactttcaaaattcaatcagtataattcacagcacaataacagagtttttaaaaaaataatcaattcaattcttcagaaaaaacactgacaaaattcagtacccaatcatgaaaaactctctaagcaaactaggaatataagggaacttcatcaatctgataaaggacacctaggaaaacttacagctaacatcatactttagggcaaaagtctgaatagttttctccttattattgggaacaagccaaaaacatctgctctcaccacttttatttgacatttttctaga

SEQ ID NO: 861397 - DNA, 642 bp, Homo sapiens
atccttctagaggacaggagtctttggaaactatttcaggaaggtcctcaataaaatacttgcaaactgaattcaacaaaatcatggttcaacatatgcaaataaaataatgtcatacatcatatcaggaaggtcactctccacctcctgagagccaatagcccttaagaattgctgaggagatattatttcaggattatggcagttgggagtcaggactagacagcagctccaactcggatggacagagcagtgtacggaggctcacatcatgaattttagctccagaatgactgcaagaactaacaaggaatcmtgagaagaccctcagaccctctgaagaaagcagagtgctcctgcaggacccaggagacactccaaatactctacaggaagacccactaaaggagagtccaaggtcagacacgcctagccctgcccccacctgatggtactttccaacccaccctggtagctgaagacaaagggcatatactcttgggggttctaaggccccacccactgccagttcctctccatactaccacagctgatgctctccaaaaagcaccacatgccagcaggaggccaaatcagcacaaaagtaaagcattaaaccaccaaaactaagaacccccacag

SEQ ID NO: 861398 - DNA, 642 bp, Homo sapiens
atccttctagaggacaggagtctttggaaactatttcaggaaggtcctcaataaaatacttgcaaactgaattcaacaaaatcatggttcaacatatgcaaataaaataatgtcatacatcatatcaggaaggtcactctccacctcctgagagccaatagcccttaagaattgctgaggagatattatttcaggattatggcagttgggagtcaggactagacagcagctccaactcggatggacagagcagtgtacggaggctcacatcatgaattttagctccagaatgactgcaagaactaacaaggaatcctgagaagaccctcagaccctmtgaagaaagcagagtgctcctgcaggacccaggagacactccaaatactctacaggaagacccactaaaggagagtccaaggtcagacacgcctagccctgcccccacctgatggtactttccaacccaccctggtagctgaagacaaagggcatatactcttgggggttctaaggccccacccactgccagttcctctccatactaccacagctgatgctctccaaaaagcaccacatgccagcaggaggccaaatcagcacaaaagtaaagcattaaaccaccaaaactaagaacccccacag

SEQ ID NO: 861399 - DNA, 620 bp, Homo sapiens
ctctcatgttcattgcagcattattcaaatagccaagatatggaaacaacctaagtgtcagacgacagaggaaatgaataaactgtggtacctatatacaatggaatattatttagccctaaaaatgaataagatcttgccatttgmcacaacatggatgagcctggaagacattttgctgagtgaaaaaagccaaatagaaaaagtatagttccaggaatctaacgtacaacatgacaactctaggtaataaaattatactttacatggaaaaaataaatacagaatgtgataatattttttatttttgtagagatgagggtctcattttgttccccaaactggtctcaaactcctggcctcaagtgatcctcccacctcagcctctcaaagtgctgggattacaggtgtgagccactgtgcccagccttgatatctttaaagaaagaaaaaagtctatgtcaaagtgtgtcctttacaccatctgcagtccttatttaaaatattgacaattggggcccctcacagttctactgaatcatatttatgtggggtgtggtctagaattcttcatgtttaatttaaaaaagcaaggcgattccaaaataaaggtattaaac

SEQ ID NO: 861400 - DNA, 657 bp, Homo sapiens
gacagctaggttaattctgtgtctttgctattgtgaatagcgctgcaatgaatatacaagtaagtgcatgtgtgtttttagcagaatgatttatttcccttgggtatatacccagtaatgggattgctgggtctaatagtaattctgttttaagttctctgaggaatctcaaaactgccraattaacttacattctcagcaacagtgtataagtgtttcctcttctctgcagcctcaccagaatctattaagcttttttaataatggccattctgactggtgtgagatggtatcctattgtggttttgatatgcatttctctaatgattaatgatgtcgagcatttttttaatgtttgtaggccactagtatgttttcttttgagaagtgtctgttcatgtcctttgcccacttttttatggggttgttttttgcctgttgatttgtttaagtttctcataggttctggatattagacctttgttggatgtgtattttgtgaataatttcttctattctgtagaatatctgtttactctgctgatagtttcttttgctgtgcagaagctctttggtttaattaggtcccacttatcaatttttgtttttgttgcaattgctgttaagttctttgcctaggtgatttccagaatggta

SEQ ID NO: 861401 - DNA, 618 bp, Homo sapiens
tcaggtgtttattggccatgtagattttctctctactatgaaatatttgtttttattgtttaatcaattagattatttttcttgtccatttgtatagtatacatactaaaacttgatcatctttacttatggatttgtttttagttgtttttgttgttgttgttgttgttkttttttttttttttttttttttggagagacaagactttgctgtgttgctcaggctggtcacaaactcccggcctgaagcaatcctcccgattcagcctcccaaagcactgggactacagatgtgagccaccatgcctggccttaattttgtctagctgaatatgtaatcttttagagcatccaggtttcttatcttacctaagaaagtcattccaccctggattacatgtgtagtctagctgtaattctaatatatttaatttttttgcatttgttattacttcatttgaaatgtattccagatactgtgttaaaataagagcccaaacttattctctttcagttggagagtcaattgttatataactatttattaaataattcatcttttaccaatgaaattgaaatactttgtcatatattaaatgcttatgtgtactggaatca

SEQ ID NO: 861402 - DNA, 616 bp, Homo sapiens
acaggagggctgtatcaatcctacactgtcagcaaaggtctgggttgcccggcaaggtaaagaaagcctgcacaggtggggcctcagaccatctgccttcacgtttccaaaaaaggtccaactgctggatggtatcaaaatgaacagtgcctccctgaagccaagctagtccttcttgtaaatcataatttggccaaacctttgtgtagaggsctataaggtgtttttccttcagagtccaagaatcaaagcagtcccagggtttaggatacactctagaggagtataagctggggttggtgaagatagctggttgcccattctgaaagacagggaaatagaggtgtccctcatttcccttctttctttcagtgataacctagggtgtgatggagagaaagtgggcatcccccctttctcttccatctttttgtccccaagtcccagtaaccttggcaggtgccacccatgggtgcaaaagtggctttcatccacattaacgggaggtctgggggtggaagtgtccacccttatgcttgtatgccctatctccctggctgtcgacaacatttgagttccctgggccttgtctatgtcaaggagcatggcctgcttt

SEQ ID NO: 861403 - DNA, 616 bp, Homo sapiens
acaggagggctgtatcaatcctacactgtcagcaaaggtctgggttgcccggcaaggtaaagaaagcctgcacaggtggggcctcagaccatctgccttcacgtttccaaaaaaggtccaactgctggatggtatcaaaatgaacagtgcctccctgaagccaagctagtccttcttgtaaatcataatttggccaaacctttgtgtagaggcctataaggtgtttttccttcagagtccaagaatcaaagcagtcccagggtttaggatacactctagaggagtataagctggggttggtgaagatagctggttgcccattctgaaagacagggaaatagaggtgtccctcatttcccttctttctttcagtgataacctagggtgtgatggagagaaagtgggcatcccccctttctmttccatctttttgtccccaagtcccagtaaccttggcaggtgccacccatgggtgcaaaagtggctttcatccacattaacgggaggtctgggggtggaagtgtccacccttatgcttgtatgccctatctccctggctgtcgacaacatttgagttccctgggccttgtctatgtcaaggagcatggcctgcttt

SEQ ID NO: 861404 - DNA, 616 bp, Homo sapiens
acaggagggctgtatcaatcctacactgtcagcaaaggtctgggttgcccggcaaggtaaagaaagcctgcacaggtggggcctcagaccatctgccttcacgtttccaaaaaaggtccaactgctggatggtatcaaaatgaacagtgcctccctgaagccaagctagtccttcttgtaaatcataatttggccaaacctttgtgtagaggcctataaggtgtttttccttcagagtccaagaatcaaagcagtcccagggtttaggatacactctagaggagtataagctggggttggtgaagatagctggttgcccattctgaaagacagggaaatagaggtgtccctcatttcccttctttctttcagtgataacctagggtgtgatggagagaaagtgggcatcccccctttctcttccatctttttgtccccaagtcccagtaacyttggcaggtgccacccatgggtgcaaaagtggctttcatccacattaacgggaggtctgggggtggaagtgtccacccttatgcttgtatgccctatctccctggctgtcgacaacatttgagttccctgggccttgtctatgtcaaggagcatggcctgcttt

SEQ ID NO: 861405 - DNA, 617 bp, Homo sapiens
gtgaggtttaaaggagtctgtgtatgctcttagatttatgtttactttggccccaattttcagaatttgaaagtaaacttaatcgactgtggatgagagatgtatctgctttctttgttgaatatataaggctcccctctcccggcttcatgtattttgctttcagttttctgtttttattttgggaggttttttttaggtgaatttttaaggatgggcattgattaaaattatctttattgtaacaaatttatattcaagttctaatcagttttaaattaggagtatctaaaggactgtgcagagacattctgatgatgcgtcacttgatgtcattttgatgaaaatgggtagtagaaatactactttcccaaaaagcatcgttaagtatgattccttcaataattctctgaaatagcagaacaygtgccagcattctttctgataaatgtttggccaagtacatatctcatacagatgatacactgaactcatatattttatgtctgtcaaacacacatttccaaaaaaaaaaaaaagaaaaaaacctattatcttagcactgcgtgctacaaataaattatcattcaactcatcaagtgcatatgtaatgttta

SEQ ID NO: 861406 - DNA, 617 bp, Homo sapiens
gtgaggtttaaaggagtctgtgtatgctcttagatttatgtttactttggccccaattttcagaatttgaaagtaaacttaatcgactgtggatgagagatgtatctgctttctttgttgaatatataaggctcccctctcccggcttcatgtattttgctttcagttttctgtttttattttgggaggttttttttaggtgaatttttaaggatgggcattgattaaaattatctttattgtaacaaatttatattcaagttctaatcagttttaaattaggagtatctaaaggactgtgcagagacattctgatgatgcgtcacttgatgtcattttgatgaaaatgggtagtagaaatactactttcccaaaaagcatcgttaagtatgattccttcaataattctctgaaatagcagaacacgtgccagcattctttytgataaatgtttggccaagtacatatctcatacagatgatacactgaactcatatattttatgtctgtcaaacacacatttccaaaaaaaaaaaaaagaaaaaaacctattatcttagcactgcgtgctacaaataaattatcattcaactcatcaagtgcatatgtaatgttta

SEQ ID NO: 861407 - DNA, 644 bp, Homo sapiens
aacttgcaagagccaattgttaagttttcaggaattttgtgagccagttgatcttacaccagtagcctgaattcagccattgttatttacatcccagaaggggccaaattctcaaatcacggctttttcccccaccgaaagccaattgctaagtatttatcagtacaccattggataaattcacttttttcatgaatggtttaattcattgacacccagattttcagagtaatttctcagctgctttcttgccttttctgccatctcatagcaattcgcccaaatcaaatcaatgttttaagatttaaattagttcctactatcaagatgctcaartataaatgtgtagtcagctaatatgttattgatgatattaaaaaaataaatcacataagataattcgtggaatgcacttaacacattgctttgagccatagaactcattcagtaaatattgtttgttatttttattagcactaatctcctgctattcattaagcacatcttcacttataaaaaaaacgccatactattcttcaatatgacaaattttttcttatgtctccaagtttatctccaatctgaaatctcctctcatcctcctttcccttaaatatttccaggaccagagcaaggctcagctt

SEQ ID NO: 861408 - DNA, 644 bp, Homo sapiens
aacttgcaagagccaattgttaagttttcaggaattttgtgagccagttgatcttacaccagtagcctgaattcagccattgttatttacatcccagaaggggccaaattctcaaatcacggctttttcccccaccgaaagccaattgctaagtatttatcagtacaccattggataaattcacttttttcatgaatggtttaattcattgacacccagattttcagagtaatttctcagctgctttcttgccttttctgccatctcatagcaattcgcccaaatcaaatcaatgttttaagatttaaattagttcctactatcaagatgctcaaatataaatgtgtagtcagctaatatgttattgatgatattwaaaaaataaatcacataagataattcgtggaatgcacttaacacattgctttgagccatagaactcattcagtaaatattgtttgttatttttattagcactaatctcctgctattcattaagcacatcttcacttataaaaaaaacgccatactattcttcaatatgacaaattttttcttatgtctccaagtttatctccaatctgaaatctcctctcatcctcctttcccttaaatatttccaggaccagagcaaggctcagctt

SEQ ID NO: 861409 - DNA, 644 bp, Homo sapiens
aacttgcaagagccaattgttaagttttcaggaattttgtgagccagttgatcttacaccagtagcctgaattcagccattgttatttacatcccagaaggggccaaattctcaaatcacggctttttcccccaccgaaagccaattgctaagtatttatcagtacaccattggataaattcacttttttcatgaatggtttaattcattgacacccagattttcagagtaatttctcagctgctttcttgccttttctgccatctcatagcaattcgcccaaatcaaatcaatgttttaagatttaaattagttcctactatcaagatgctcaaatataaatgtgtagtcagctaatatgttattgatgatattaaaaaaataaatcacataagataattcrtggaatgcacttaacacattgctttgagccatagaactcattcagtaaatattgtttgttatttttattagcactaatctcctgctattcattaagcacatcttcacttataaaaaaaacgccatactattcttcaatatgacaaattttttcttatgtctccaagtttatctccaatctgaaatctcctctcatcctcctttcccttaaatatttccaggaccagagcaaggctcagctt

SEQ ID NO: 861410 - DNA, 607 bp, Homo sapiens
ggtaaataagaaaaatactgtgagcattttcttcttaaagttgtagcaatatattcccgttttgttactttccataataagagtacatgtctagaatattttatatattactgaagcctgatatcatttttagtatattcttaattaagatgttttattatatgaatgttttatgaaatagaaacaatgtctcataaaaccaaatatctgcataaagttattacctatttataaatatttttattcactgatttttctgtaaggagagtaaatatgatcrcaatgtttaatgtattactaaaaagaaacacatgatgtttaaaaaagttaccctgacatttttcaaactgctcttttatgcaaggcattggctgcattctatgttgggaatagagagcaaactactggaagagcaagaaacaacattataaacgggagatgctatagtactggcgcataataggtctacctggaatgttttaacatttttaatttggcctttataaatctacattgtgaacgagactctgttaagcagtatatgaatagattaatttgaaagttatcagaatgtgtaattgagaaaagcaccagtgttttgttagac

SEQ ID NO: 861411 - DNA, 651 bp, Homo sapiens
atcgtggaaaactggggggaaagtcagtaaataaacttaggtggattggtattttgtaaagcaatcaaaatgctagacaattctgtgtcggttgccatagaatgaatggtcagctcacagggagaagaactcaggagtttacatgaagctcttattttgatggttggcacagggacacaataggtacaaaatccgtggtttttattattcttgatgataatgttacttactgataacactgtccaccatgtctttaaacaatactgaaaatatgttcccatgtgtttactcaataccaaacttagctttatctttaccattttgattaagaactttctaaaatttcttctttcatgttgtaatcatataatttggatgtattagatacacagcataacattatgttgctgtctgaagcattaaaataatatctgtaaacttttagatatcagtaccattgtctctaggctaaataatgagattaaggataataatagcacaaatgtattyggtgttttttatttgtcttgctctataccatatattttacatatgttgtgttatttaatcctcagaacagccatatgaggcacatgtcatttcaaggtatacatttctgtgttactttaaaatatgaagaaaatgtgattc

SEQ ID NO: 861412 - DNA, 610 bp, Homo sapiens
gaaacccaaattctggggaaggtattattgcattttcagttgtatgcaggatggttgcttcatgttagtttcatcacattaagtgaaattattactttgtgcattagtctgttctttcattgcaataaagaaatacctgaggctgggtaatatataaagaaaagagatttaattggctcacattctgcaggctgtacaggaagtgtggcgtgggcctctacttctggtgaaggcctcaggaagcttacaataatggtgggaggcaaaaggatagtaggygtgtcacatggcaagagtagaagccagagagagaaaaggaggagatcttagactcttaaacaaccagatcctaagtgaactgagcaagaactcactcatcaccaaggggactgcactaagccattcatgagggattcaccatgatccagtacctcccaccaggccccatctccaggaccaaagatcacatttcaacatgagatttagaaggggcacacatccagaccatatcactttgttattgtttttatttggaaataaaatatagtttaaagacatatgtatgcataccaagttgacaagggctattctgacttgtgggacttaattt

SEQ ID NO: 861413 - DNA, 606 bp, Homo sapiens
aatcgaatttggtctgttcatctatgcaggagaaaagtaaggataaatactgatattaaaaagtctgcaaaaatcattttcttttaaaaattatttgttctttctctcagggagaaatgctgtagatttctttccaatgtgcctaaacatttttccccttagcttcaaatactgcattcctaagtacatccacaagttcaggtagagcaaatcttagatgtgtataaaaagttgaatgattttaattttcaartaataccttcttttatggcacaatggctgtgacaagattagccagaatcacagcactcattttatgaagaaaaatatgaagtcagtgacagtcattttatttatgcgtctgtctgcacattcacgtctaaatccttctggcatttgaatatacagcttccaaattcaggatcttgtcgggaggcatgagtcattcagaatccagcagaaatgacaagcgctggaaaatctttttgtgggtccttaatttcagtcttttatagagttagcctttttataagctgatgtcactgtggaaccaagcaaacaccagtaaacaggcaaacagcttcttggctctctaacatgcaaagg

SEQ ID NO: 861414 - DNA, 561 bp, Homo sapiens
catcctcttgtataatttaaatcatccctaaattacttatcatactaatactatgtacataatattatgtacatatttgttatactgtgttgtttcaggagtattgacaagaaaaaactatgtacatgttcaatacagacacaattgccctttttctgagtgtttttgatctgaggttggttcaccccatgcatgtggaacccactcaattcaagggttgtctgtattaaattgtaaagaccractcaatcaggaaatttcagtacctaaataatgctttgacaaaaatgttaattttaaaatgtatgcatctgacttaaatgtgtttttatttatttttatttttaaaaatttcactcaagaagtatagaaagtgtgtttttaattaattaagaaagtctttacagggtcatttcacgtgattgagaggtaaggacactcacccaaaggcatagttataaaaaatataaatgaaactatgatatcaggaagcagtagtgcccacagaacaaacaatcacggggataatcagtaaatgtccaattccatcactaacttata

SEQ ID NO: 861415 - DNA, 610 bp, Homo sapiens
gaaacccaaattctggggaaggtattattgcattttcagttgtatgcaggatggttgcttcatgttagtttcatcacattaagtgaaattattactttgtgcattagtctgttctttcattgcaataaagaaatacctgaggctgggtaatatataaagaaaagagatttaattggctcacattctgcaggctgtacaggaagtgtggcgtgggcctctacttctggtgaaggcctcaggaagcttacaataatggtgggaggcaaaaggatagtaggcgtgtcacatggcaagagtagaagccagagagagaaaaggaggagatcttagactcttaaacaaccagatccyaagtgaactgagcaagaactcactcatcaccaaggggactgcactaagccattcatgagggattcaccatgatccagtacctcccaccaggccccatctccaggaccaaagatcacatttcaacatgagatttagaaggggcacacatccagaccatatcactttgttattgtttttatttggaaataaaatatagtttaaagacatatgtatgcataccaagttgacaagggctattctgacttgtgggacttaattt

SEQ ID NO: 861416 - DNA, 578 bp, Homo sapiens
cctttatgaagctcacattccagttggggcagacaggcattaaaaagggtgaaaaatacatgaaatttagataataagtgtaagtcaaaaaacaaaaacaaaaacaacataggagacaagaactaatataggaggactaatattttagatagtgtgtgccagaaaggcccttctcagaggtgacttttgcgtaaacatgacttgccgatatccaggggaaaagctttccaaataaaggaaatagatgtccaacaaytctgagatgagatcaatactggtatattcagggagcagcaagaggcccatgtggccagtacactatgaagagtattaggagataaaaagaggaaaatagagaatcatcagggaactggattatggagcaccttggaggttatgagaaaccatgaaggctttgagctttggcatgacaggataacttacatttttattttttttttagaatgacacaacctactagaatgaaaatagagtgaaggtaggctagtcctgaaataaggaaactgattagaaggcattgcaataatcaaggataaagatggtgccttggaccaggg

SEQ ID NO: 861417 - DNA, 636 bp, Homo sapiens
agcaaatgaccttattttcaactttctatactttagtttcttctctgaaatatcccttttgtctgaaactcttcctttcttcaaatccaagggaacatcttcacttcctttcaatttcataaatttacctaaattatttccaggtttcctggaaactctaatattcacccattctcataattatttttgataggatatgaagtaaatgtcagtttatttttctgcttataattttgcaacttaagttatatcaatagtttaagaattatacaacacttatctaccaaaatattacccaactttgtgtgaagaacattggtaaaagcttcctacagattattaataaatgccaactaataatattacgctgatgaaagggaacaaatgccaaatgacaactcaacagycatcctaaattatattaaaatttgaatataaatagatgttcaaatgcaaaatagataatttttatccgcatatatttactggttaggcttttttgaaattacaattataaagtaggcaaacttggttataagcatttcttatctgatatattagtgtttttttattatttttcttacaagcacctattatagtaatgttctctattttccatttaaatttaaattggat

SEQ ID NO: 861418 - DNA, 636 bp, Homo sapiens
tcattcccacatttttgcattactgctgaagtctggaaattagtcttcatcacattgttctttcattccctctttactcaaatgcctaattaatcttctttaagcatagcttaaatcattctactctctttttcaaaaatcagtagcacctctgaccttctattttgttagcctttagttgaatttttrttttgctcttttctgggagatgaaatattttattttgtcactctactcctaaagtgagtttatatgtcttactagtgcataattcatctcacctgatacacttttaacttatttatatgttgaaagtaaatgcattatataactatttgggccaaactctgttttaggtcccagtaatatgaaggtggatatgcagttgagggaaaaaaaagacaaaaatacacagcatttgcctttgaagagaccaccagtttgttatggcagcagatgataaaaccagtgattccaaaatagaattgagaaaaaaacgagagtacagacaggaaaggataatgtttcagaaaattttcagtggtaggtggggtgctaggtaaaggtgagtcaccaggaggtgtaccaggtgtgttgtatagcacaacaaaactgccatacaatatagtatattca

SEQ ID NO: 861419 - DNA, 636 bp, Homo sapiens
tcattcccacatttttgcattactgctgaagtctggaaattagtcttcatcacattgttctttcattccctctttactcaaatgcctaattaatcttctttaagcatagcttaaatcattctactctctttttcaaaaatcagtagcacctctgaccttctattttgttagcctttagttgaatttttattttgctcttttctgggagatgaaatattttattttgtcactctactcctaaagtgagtttatatgtcttactagtgcataattcatctcacctgatacacttttaacttatttatatgttgaaagtaaatgcattatataactatttgggccaaactctgttttaggtcccagtaatatgaaggtggatatgcagttgagggaaaaaaaagacaaaaatacacagcakttgcctttgaagagaccaccagtttgttatggcagcagatgataaaaccagtgattccaaaatagaattgagaaaaaaacgagagtacagacaggaaaggataatgtttcagaaaattttcagtggtaggtggggtgctaggtaaaggtgagtcaccaggaggtgtaccaggtgtgttgtatagcacaacaaaactgccatacaatatagtatattca

SEQ ID NO: 861420 - DNA, 636 bp, Homo sapiens
tcattcccacatttttgcattactgctgaagtctggaaattagtcttcatcacattgttctttcattccctctttactcaaatgcctaattaatcttctttaagcatagcttaaatcattctactctctttttcaaaaatcagtagcacctctgaccttctattttgttagcctttagttgaatttttattttgctcttttctgggagatgaaatattttattttgtcactctactcctaaagtgagtttatatgtcttactagtgcataattcatctcacctgatacacttttaacttatttatatgttgaaagtaaatgcattatataactatttgggccaaactctgttttaggtcccagtaatatgaaggtggatatgcagttgagggaaaaaaaagacaaaaatacacagcatttgcctttgaagagaccaccagtttgttatggcagcagatgakaaaaccagtgattccaaaatagaattgagaaaaaaacgagagtacagacaggaaaggataatgtttcagaaaattttcagtggtaggtggggtgctaggtaaaggtgagtcaccaggaggtgtaccaggtgtgttgtatagcacaacaaaactgccatacaatatagtatattca

SEQ ID NO: 861421 - DNA, 663 bp, Homo sapiens
ctcctattattaacatcttgaattaatgtggtatatttgttacaattaatgaaccaaaattgatacattattaactacagtcaatagtttacatcgggtttcagtctttgtattattcaattttatggaatgtagagaaacaaaaatgcacaatataatatgtgaaccattacagttacagtattgtacagaatagttttcctgccctaaatatctactattttttttcattcatctctcctctcctcccaccaccaccctaaatctcaggcaaccactgatctttttactgtttctatagtttttctttttcaaggttgtcatatagtgggaatcatataatatacagcttttacagatggccttctttcacttmgtaatatgattctaagtttcctccatgtctttttatggctcggtagctcatttcttgtcatttttaaataatattctgttggctggatacaccacagtttatctccaaccattgaagaatatcttggttgcttccaagttttgacaattatgaataaagctgctataaacatttgtgtgaaggtttttgtatggacataaaagtatttttaaactcacctggacaaagatcaaagaatgaatgctgaatcatttgctaagggttttatttcactttgtaagaaactg

SEQ ID NO: 861422 - DNA, 618 bp, Homo sapiens
aaaacaggccaggcgctgtggctcatacctgtaatcccagcactttgggaggccaaggcgggcagatcatgaggtcaggagattgagaccatcctggccaacatagtgaaacctcgtctctactaaaaatacaaaaattagccggacatggtggcrtgcctgtaatcctagctattcaggaggctgaggcacgagaatcgcttgaaccaaggaggcagaggttgtagtcagccgagatcgtgccactgcactccagccataaaaaaaaaaaagggaacacattttcccaaagtaattaaaaggaatttccttccagggataggtgcaagaattaagcttaaactggacaagacacttttctctcaagcaattaataagtaaacagaagtggttgaagaatgagaacaagcttgatgtttaaaccttagccaaaaaataaagaaaaaaatataaattattagtatctaataatcacttggatactaatcatttgattattggacactagtaaaagttaattaaaagtaaattaactaataaatgttaatcaaaatatttctcctctcaacctgaataaatgttcaagaaaatatttaacttacttccaatatgttttac

SEQ ID NO: 861423 - DNA, 643 bp, Homo sapiens
agccccttgacctacctgacctcaaatggccactgtcatctttagtatcattaatggtggttttctgcccttgctgcatgtcaggcttatcaagggacattaaaaattattgatggcttaggctctatgacagaaaaattacaacagaacatttcaaaaggtcagttacagccatcagtattttttaaaaattaaattaaaatttgaagccaagggaaaggaagtatcatcaccttcaagataaaaatgttattccctcttatctctatttggccagtttagaaagttcaggragactttcttcactaaactacctttccagcaaaaaataaccctatgaagtatgagatattgaaatattaatttgctttgcttttctccgttcttcctcatagtcaaaataaatcaataattataaaattattcacccaaggactcttgcctctgagtctgatatgcttttgtatgtcttttctgtactaaatttactgtttccttttataagtcaaaagcatgtgtctggtctagggaattcaagtgaagagaattcaaaattagaatgaggaacataaaacatagcacctggctgtgcccagttacttaaatcaagcaagctaataactcaggtagaaccaactagcct

SEQ ID NO: 861424 - DNA, 593 bp, Homo sapiens
accgtcactctcctgaagaaaaggactttggagacaattgttgtttttttttttttttagttttatcaagctgtatttaattttggtgtgtcaatatgacagatgtcaaggaaacttcttggctttttttcttaatctcttcagcttaagggggtgtctgrcagcctgattttggtgatgagctggctgtcacagctgtaagtagcgccaaggagaatagataaaaagatttttgaaacttaagggtatattggtagaattattgtgaacagaagcagtccattttctgaagtggtttcatgaatatactctatcatgaagatatagatattgatatgaatgtatatatattatatatctatgtgtatatgtgaatatatgtaaaatgatcaaaataatttatgcctggactaactttcaaacttcttatttttattatttttcttaatctcatatctcaaagaaaccaatttctaccaattcttgctttcattaaaaaaattctaacagtcttagccataattgattactattgtccattcataagcattccattaaaaaagaaagaaaccaggctgtgggttttaatttaa

SEQ ID NO: 861425 - DNA, 578 bp, Homo sapiens
gccaaagtggtataaacattaacttattttgattttagaagacagatattagtgagaagtaataaaatattgccagccttcataggcaactcatcatcactgttaaaactaaataagaagaaaagacccagttatgcctaacatggaccgatgttggttgaaaggtagatagaccccataactggctagccacatttgaaggctataatcatagaagatgggtgaaggaaatgcacaacaccaaatttgcaacatagactcatttgacgaaggggaaaatatgggacattttaaggaaaatgtcagaggaaattgcttgatagtatgaactacttatgtgtgwttcttaagaaaattgtctccttaggaaattgtgttctcaaaatgtcttaaataaaaatagacataactgaatattctatattgtggtcagacattagaaaacttgtttttacctgtcataactcctcattctcctgaggaagacttaggatttgtctgagtttgagggttctggagacgtactcaacctgtttcccattcaagcctgataacacgaatcttaggctaagacccca

SEQ ID NO: 861426 - DNA, 596 bp, Homo sapiens
tctatgcaattgtcttctctgcatgatcacctactaagtctgctccatgactcctccttcacatctactgatagtcagattttcttctgtttgtatcaagatttcatgtgatttatcacatttttttactttaaaacattataattgagtaatatttgttttagcttatgtagctatttcctatcactttacaaaggtctttgttaggttgtaaatttttttaactacacaagccattagatgtgtacatactcttacatctttcttgttctttccataaaacgtgtcctatctgatgcacwaggatgatattaaggtgaaagctttttatcatctaattttcattttactttcacagtcagactggattttcaatatatttttgttataaaaaactattacatatctcttgtctactttaggcatcattccacctattcctgtataacaggaaatgcgaataggcctctcactagcttagatgatgttctataagagagaagacaagatcagttatttttatatttctaaacacatttgagactggttaaaagaatataaagctatcttttggcttaatattctttattgataga

SEQ ID NO: 861427 - DNA, 584 bp, Homo sapiens
gatgggaggtaattgaatcatagggggaggtctttcccgtgctgttcttgtgatagtgaataagtctcatgagatctgatggctttataaggcagagtttctctgcacaagctctctttttttgcctgctgccattcatgtgagacatgacttactcttctttatcttccaccatgattgtgaggcttccccagccacatggaactataagtttaattaaatgtctttctcttgtaaattgcccagtctctggtatgtctttattagcagcgtgaaagtggactaatactgtgtgtgtgtgtgtctatatgtgtgcacgtgcacgcatgtgtgtgtatacaggcatacctcagagatawtgcaggttttgctccagaccactacaataaagcaaattttgcaatacagtgagtcaaggaatttttttttgttctctcatgcatataaaagttatgtttacactatgctgtagtctattcaatgtgcaatagcatcatatctgaaaacaatgtaaatatcttttgaatactttattgcttaaaattgctaataattatatcagcattcagtaagtcataatcttt

SEQ ID NO: 861428 - DNA, 584 bp, Homo sapiens
gatgggaggtaattgaatcatagggggaggtctttcccgtgctgttcttgtgatagtgaataagtctcatgagatctgatggctttataaggcagagtttctctgcacaagctctctttttttgcctgctgccattcatgtgagacatgacttactcttctttatcttccaccatgattgtgaggcttccccagccacatggaactataagtttaattaaatgtctttctcttgtaaattgcccagtctctggtatgtctttattagcagcgtgaaagtggactaatactgtgtgtgtgtgtgtctatatgtgtgcacgtgcacgcatgtgtgtgtatacaggcatacctcagagatattgcaggttttgctccagaccactacaataaagcaaattttgcaatacagtgagtmaaggaatttttttttgttctctcatgcatataaaagttatgtttacactatgctgtagtctattcaatgtgcaatagcatcatatctgaaaacaatgtaaatatcttttgaatactttattgcttaaaattgctaataattatatcagcattcagtaagtcataatcttt

SEQ ID NO: 861429 - DNA, 680 bp, Homo sapiens
ataaaagttatgtttacactatgctgtagtctattcaatgtgcaatagcatcatatctgaaaacaatgtaaatatcttttgaatactttattgcttaaaattgctaataattatatcagcattcagtaagtcataatctttttgctggttgcggctcttgccttgatattgatagctgctcattcatcagggtggtgggtgttaaaggttgtggtggctgtgtaaatttcttaaaataaaacaatgatgatctttgtcacatcagctgactcctcctttcacaaaagatttctctgtaacctgcaatgctgtttgatagcatttcatccacagcagaacacctttaaaaatggaatcaaccctttcaaaacctgccaccgccttattaactaaattgaggtaatattccaaatcctctgctgtcatttcatcaatgttcacagcatcttcaccaggaatagattacatctcaaaaaaaagaaaaaaaacacttyctttgctcatccataaaaaaacactcctcatccattcaagttttgtcatgtgattgcagcaattcagtcatctcttcaggctccgcttgtagttctaattctcttgctgtgtccaccacatctgcagttacttcctctactgaaatcttgaactgctcaaagtcatccatgatggttagaatcaac

SEQ ID NO: 861430 - DNA, 660 bp, Homo sapiens
ataatgagtaaaaggatggttaccagaggctagggagagtaatggggggctgggagggaaaagtcgggatggttaatgtgtaccaaacaaatagtaagagagaatgaataagacctactatttgatagcacatcagagtaaatatagtcaataatcaatatacatttaaaaataactacaatagtataaatatacatttaaaaaatcctgtaattgtgttacaggattttttgtawcacaaaggataaatgcttgagaggatggatacccatttcccatgatgcgattattacatattacatgcctatatgaaaaatgtgatatgctccatcaatgtatgtaccaactatgtacacaaaaaattaaaaattaaaaaatattctatttaaaaaatccatatatcttattgtatgtttcttctagagtcaccggctccaccctgatgctttcaaaaactacctatttgttgataaattgtttcagatttctctcttggggtttataactgttaatatctactcagtttttggtttgatatcactggctggctgctgcatgttacttcacactggataaatccaacagagccattttatcatccaacaagaaaaaaggagttagctcagatttttccctttgctgaatgttccactttcgaac

SEQ ID NO: 861431 - DNA, 660 bp, Homo sapiens
ataatgagtaaaaggatggttaccagaggctagggagagtaatggggggctgggagggaaaagtcgggatggttaatgtgtaccaaacaaatagtaagagagaatgaataagacctactatttgatagcacatcagagtaaatatagtcaataatcaatatacatttaaaaataactacaatagtataaatatacatttaaaaaatcctgtaattgtgttacaggattttttgtaacacaaaggataaatgcttgagaggatggatacccatttcccatgatgygattattacatattacatgcctatatgaaaaatgtgatatgctccatcaatgtatgtaccaactatgtacacaaaaaattaaaaattaaaaaatattctatttaaaaaatccatatatcttattgtatgtttcttctagagtcaccggctccaccctgatgctttcaaaaactacctatttgttgataaattgtttcagatttctctcttggggtttataactgttaatatctactcagtttttggtttgatatcactggctggctgctgcatgttacttcacactggataaatccaacagagccattttatcatccaacaagaaaaaaggagttagctcagatttttccctttgctgaatgttccactttcgaac

SEQ ID NO: 861432 - DNA, 646 bp, Homo sapiens
acaaagatgtaaaatcaagtgctggatctcaaaaagctaacatacattacaaatgttaataaaagggataccacaaggttgaaaatttgtaaattgtcaaatgggagattcacacaaacctgctgcaggagttcagacaggcataatctccaaagcctagatccacatgagctgggactcccagaaaaaatgacacacagtaagcagcagggtgtcttagattcytgaggccaacttgatgagcagtcacaaactttggtggcttaaataaacagatatttattctctagccgttctggaggccagaggtccaaaatcaaagtgttggcaggtccacgctccctctggaggatctcagggggattcattccttgcttctccctctggtggctgccagcattccatggcatggcttggcttgtagctgcatcactccaatctctctctccaccatcacatcaccttttcctctatgtctgtcttctcccgaacgtgtttcttataaggacatttgtcagtgaatttagggcccacctggataatctgagctgccctactcatctcaaatccttaaattaattacatctgtaaaggtcctttttccaaatgtggtaacattcacagcttccagcattaggatgtggat

SEQ ID NO: 861433 - DNA, 624 bp, Homo sapiens
gccaacactcaatacctgaatgccgagggctttgctccaatgctgagtccctcctcctggtcacatgggcctcactattggcacatgtcccctgacccctgaccacagacatcactcaggacagtgggttttgctgtagggttgacttcatcaggctgtgtcctccccactggctaccatgttctcaccaccaatttttttttttttttttgagacagactctcactctgtcacccaggctggagtgcagtggtgagatctcggctcactgcaacctctgcctcccaggttcaagcaattctcatgtctcagcctcccgagtagcggagattgcaggtatatgccaccacagctggctgatttttgtatttttagtagagatggrgtttcaccatgttggccaggctggtctcaaactcctgacctcaagtgatccatccacctcagcctcccagagtgctgggattacaggtgtgagtcactgcacctggccactggatgttttcttaacagcatgacaaggaagacttactccctcttcctaacaaagacagtagttttggaggggagaagtgggacagaaaaagtacagttgaaatgttaaaatgtaactgtcaactcttt

SEQ ID NO: 861434 - DNA, 625 bp, Homo sapiens
atccgcctgccttggcttcccaaagtgctgggattacaggcgttagccaccgagcccagcctctttttcccttcgttttattctaatcaaccactgaggttcaaagagggtctctagtcactaacccagccccgccccagcccactcagcccctgtccctggtgtgagccaccgcgccgcccagctggaattcttcagagtagaaaaaagggaaggctttaggtgtgctaattggagtctgtgggtctgaggaagccgaaggcaggctaactacaagtagggcctactctgtcattggttagggacacatacttgatttcatccatttgttcttaaattggaaagggagacaaacattagagaagctgttagtcaagtccttgacaggggttgttkgggactttctcaaggtcacttccttgggaaggagtccttcagaaattcacactgagatctctggactctgcagccagtgcttcttccaaaaattccatccaagtagaagctgtggggtcagggggttctaagaagccccatttctctttctcttgtaccttaagacctgcctggatcaggtaaatgataaggcatcaactcactaggtgctggggatagtgctcggccc

SEQ ID NO: 861435 - DNA, 579 bp, Homo sapiens
ttggctaaatgacttcccacattcgctgcactcataaggcctggatccactgtgaactttctggtgttttatgagactggaatgatatgtaaaaaacttcccacattcactgcactcataaggcctctccccagtgtgaactccccgatgttgaaggagtgcagacctttggctaaaggatttcccacattcactgcactcatatggcctttccccagtgtgaactctccgatgtttaatgaggttagacttgttgctaaataattttccacattcatcacattcatgaggtcgtactgcagtgtgaactctccggtgctgaatgagactagagctttgcctaaaggacttcccacactctcgacattcataaggcttttctccagtgtgaastctccaatggtcattgagactgtagcttttgctaaaggatttcccacattcactgcatatgtaacatctttctgtagtgagggttctctgctgctgaacaagtgtgtgtttaccgctgaatgcttttgtgtgttctccacagttgtaatgagtttttcctctgtgactgatggccccaccgtcgct

SEQ ID NO: 861436 - DNA, 604 bp, Homo sapiens
aggtaacaaacattgccttttttcttgtttgttttttgcagcttatagcatcatagcataatttttgacccaggagtatttgttgaagaatgaatacatgtaaattaataaatgtaataaaccaacaaggtatttcttttagccaggtgtggtgacatgcacctgtagtcccagctactcaggaggctgaggaggaaggattgcttgagcctgtgagttcaagaccagcctgagcagcatagcgggatctgatctcagaaaaaacaaaaagatatttctcttcagtatgctttcatagtttagatttttattttaagtattctatattctaytgggaatcagtaatacatcttcctttcacctctagccaatagcaacccagatcaccttcctgaagcaaacacgccagcaatgttattttaacaaaatccatccatataaaaccaatgtttgtcttcctcggatctttacatttggatattactaatttaatacaccttttaatttctaaagagactagaggaaatcatatgagttccttgattaagttaaatttgaaactttcaaaatatattacaagctcagagaattttaaagtacacta

SEQ ID NO: 861437 - DNA, 617 bp, Homo sapiens
ataggagcaaagaaaactatatttatattttgaatttatattttgaacagtatcattggagcatgacttaaaatggaaaaaaaaagactaaagtggtaattcttattgatgcgtgttgtaacatcaaacacgttttctagtatccctcgtattttttttttgggaggggcgcggcttatygagatattcacaaaccgtacaattaactcatttgaagtatacagttcagtggttttagtatatttagagtgcgcagccatgaccacagtcaattttagaacattttcaacaccccaaacctttcagcaggcacactccactcacgtttttccccatcctctggaaaccactgagctttgtgcctgtatggattttgcccactcttgacatttcctgtaagtggaatcacacagccccactttgtgcctgtatggatttgcccactctggacatttcctgtaagtggaatcacacagccccactttgtgcctgtatggatttgcccactctggacatttcctgtaagtggaatcacacagccccactttgtacctgtatggatttgcccactctggacatttcctgtaagtggaatcacacagccctactgtggccct

SEQ ID NO: 861438 - DNA, 617 bp, Homo sapiens
ataggagcaaagaaaactatatttatattttgaatttatattttgaacagtatcattggagcatgacttaaaatggaaaaaaaaagactaaagtggtaattcttattgatgcgtgttgtaacatcaaacacgttttctagtatccctcgtattttttttttgggaggggcgcggcttattgagatattcacaaaccgtacaattaactcatttgaagtatacagttcagtggttttagtatatttagagtgcgcagccatgaccacagtcaattttagaacattttcracaccccaaacctttcagcaggcacactccactcacgtttttccccatcctctggaaaccactgagctttgtgcctgtatggattttgcccactcttgacatttcctgtaagtggaatcacacagccccactttgtgcctgtatggatttgcccactctggacatttcctgtaagtggaatcacacagccccactttgtgcctgtatggatttgcccactctggacatttcctgtaagtggaatcacacagccccactttgtacctgtatggatttgcccactctggacatttcctgtaagtggaatcacacagccctactgtggccct

SEQ ID NO: 861439 - DNA, 720 bp, Homo sapiens
gcatttgggttttcttcatctctgcaagcttaattggatcaagctctctccccaatgcctcagaagatgttctgtgtttctgtgctgatgtaggaagtttcttgacctgtaagatcctagaccttgataaatccattcccaaaataaaggccactaygtggggtttcttgtgagacagttaaaattctgctgattcctccctgactttactgccaactgcttttacattctaacagacggtctgacctcttcagagtctccgtttcctcttctataaaaagaggatatgcaacaattggaattccataccaccgggatagaacaaacccattacagggtggggacgctttctttgcactcttagaaagtttaaattcataacacatgctcctgtcttcagccaaagtgtaactccaaaattgtttaatttacatttaattatttattctgctgttttgccttctccagttactaatagataattgcataagaggaaatgaaatccaatacacaatggtagtgcgagatcaatttacaggcaaattcctggcttggaaacactgaaatgggacacaagtgattcagtacaaagcaagcagggagatggtacccccccacacacagccctttaattagatccttaacttatttaatgacacctctgggtctggaaagctgttattgtttaagcgtttaatgtaccatacaattcaggggaag

SEQ ID NO: 861440 - DNA, 633 bp, Homo sapiens
ttcctctatgcagtgtttttgttttgttttgtttttattgtggtaaatatatataacatacaacttaccattttaaccatttttaaggtacagctcagtggcattaagtacattcacattgctgtgcaaccattaccaccattcatctgcagaacttttatcatcttccccaaattgaaactctgttcccactaaacaactccccattctccctctctccagcccctggcaactaccattctgctttcygtctctataagtttaacaactttagatatctcatatgagtgaaatcatacagcatttgtatttttgtgactggcttacttcacttagcataatgtcctccaggcttatccatattgtacaatgtgtcagaatttcctttctttttaagactgaataatattttattatgtggacatatgacattttgtttcatttaatgacattcatttatcaatggacattggaattacttcctcctttggccattgtgaaaaatactgctgtaaatatggatgcaaaaatatctgtccaagtccctgctttcaattgttttaggtatatactcagaaatggaattgctgaatcacatgaaaatttcatttttaattttttaagaaaccacca

SEQ ID NO: 861441 - DNA, 595 bp, Homo sapiens
gaatactatgcagccataaaaaggatgagttaatgtcctttgcagggagatggatgaagctggaaaccatcattcttagcaaactaatacaggaacagaaaaccaaatactgcatgttctcactcaaaagtggggattgaacaatragaacacatggacacagggaggggaacatcacacactggggcctgtcagggggtgggggctaggggagagatagcactgggagaaatacctaatgtaggtgacaggttgatgggtacagcaaaccaccatggcacgcgtatacctatttaacaaacctgcacgttctgcacatgtatcccagaacttaaagtataatttaaaaaaaagaaagagaagaataatggtctccaactccatccagattgttgcaaatgcagcaacaattattttattcctttttatggctgagtagtattccacgatatgtatataccacgtttcctgtatccactcattgattgatgggcatttgggctggttccatatttttgcaactgtgaattgtgctgctataaacatgagtgtgcaaatgtctttttcatataatgacttctttttctctgggtag

SEQ ID NO: 861442 - DNA, 681 bp, Homo sapiens
taaatttttgtgatctttcctgttctctgaaaacagactccgttataacacataagtctattgttcaccttggacctatttgattttcacctgtactttcaggcacatgttctgtacaaaggcaaggattcatctgttaacatttttctagcactcagtagctaatggctccccagccctctgcagttctgagtccaggctggcacctaatagtttcacagttggcccagccagtctggcccacaagctcacgacccattcattgtttcctatgataacagcaggctgagccatggttttcaacagctggagcccttagcagcccaccaggtcaggtcaatactcctgtctcttcaggaatccatckggccttcagcaggacctgggaagttactggtgccagcttgctcttctggcttaatgctgaggaccaagtcctctaccaatacctccttcctgtgaagataatgaaagtggcatttttcaagtaataattccataattgtagtgattaataaacttcccaaaatgaatgtcatatctcaacaaaaagccagcagcagttagacccctacaatctgtgaagccttctggggctggggacctgaatatccatgacacccagaccctctttcctggaggtatcagaggttctccttctgtccgtcgtggacaccagtc

SEQ ID NO: 861443 - DNA, 670 bp, Homo sapiens
cagggcacatgaggagaaactgcaaaactgagggcaatgttcaaggggcttggagtgtgagatggctgagaactgctcggagcctgctaggaactttgctgcaaagtaatcacaggcactggcatagaggtgtcactgctagaaatcaaggccatctggagtgttctgcatgggagagaattctattcagttcrctttagtggccctttttattctcagtagaatttctcagtattccagaatgtcagagctaaaatagcacttaagtccattttttccaagcatgttttccatttacaagcaaacaacaacaaaaacaacccaaaaacagaccctgaaacacagagaagttgggtgacttccacagtcacagaattagaaggagataatcgaggctgaaatccaagtctctgctcccaatccaaggcttattcattacacgatgatcactccagccctgcctctcactgtccatgtgtccctgagtaagctaattgattacttcctctttgcccagattctctcatctattaaaaaggaacacaattagcacctctctttttgggttcatatgaggatcaaatgaggtaatttatgcaaagtgcctagcgcagtgtctggctcatagtattcaataaatgtgaattctcattattattactaatgttgt

SEQ ID NO: 861444 - DNA, 670 bp, Homo sapiens
cagggcacatgaggagaaactgcaaaactgagggcaatgttcaaggggcttggagtgtgagatggctgagaactgctcggagcctgctaggaactttgctgcaaagtaatcacaggcactggcatagaggtgtcactgctagaaatcaaggccatctggagtgttctgcatgggagagaattctattcagttcgctttagtggccctttttattctcagtagaatttctcagtattccagaatgtcagagctaaaatagcacttaartccattttttccaagcatgttttccatttacaagcaaacaacaacaaaaacaacccaaaaacagaccctgaaacacagagaagttgggtgacttccacagtcacagaattagaaggagataatcgaggctgaaatccaagtctctgctcccaatccaaggcttattcattacacgatgatcactccagccctgcctctcactgtccatgtgtccctgagtaagctaattgattacttcctctttgcccagattctctcatctattaaaaaggaacacaattagcacctctctttttgggttcatatgaggatcaaatgaggtaatttatgcaaagtgcctagcgcagtgtctggctcatagtattcaataaatgtgaattctcattattattactaatgttgt

SEQ ID NO: 861445 - DNA, 670 bp, Homo sapiens
cagggcacatgaggagaaactgcaaaactgagggcaatgttcaaggggcttggagtgtgagatggctgagaactgctcggagcctgctaggaactttgctgcaaagtaatcacaggcactggcatagaggtgtcactgctagaaatcaaggccatctggagtgttctgcatgggagagaattctattcagttcgctttagtggccctttttattctcagtagaatttctcagtattccagaatgtcagagctaaaatagcacttaagtccattttttccaagcatgttttccatttacaagcaaacaacaacaaaaacaacccaaaaacaraccctgaaacacagagaagttgggtgacttccacagtcacagaattagaaggagataatcgaggctgaaatccaagtctctgctcccaatccaaggcttattcattacacgatgatcactccagccctgcctctcactgtccatgtgtccctgagtaagctaattgattacttcctctttgcccagattctctcatctattaaaaaggaacacaattagcacctctctttttgggttcatatgaggatcaaatgaggtaatttatgcaaagtgcctagcgcagtgtctggctcatagtattcaataaatgtgaattctcattattattactaatgttgt

SEQ ID NO: 861446 - DNA, 562 bp, Homo sapiens
aaggatggtgccttccactttctgggcattttagacattgcaggccatttagtgtacatgattttacccaagctctgtaccagccctgtgagggaagggagccaatgttctccagttagatgtggaagccgagttcccaagaagtcctgcgatctgtccaatttgaggatatttttccccaatagtaccaaggcaaggattcaaatttaggttttgtggttccagggataaagttgttcattatgcacatacaaaaatgatattgatataaaaattagccaggcatggtggtgtgtgcctgtggtcccagctacccaggaggctgaggcaagagaatcgcttgaacccgggaagcaaagcytacaatgagccaagatcgccccactgcactccagcctgggtgatagagcgagactccatctcaaaaaataaaataaaataaaataataataaaaataaattatattggaaatccctgcagaaatctccctgtcacctcaattcagtaagagaaacctagcagaatgtgggagtggcatgcacagagaaagggaatgaaatt

SEQ ID NO: 861447 - DNA, 650 bp, Homo sapiens
ggaagtgtcggcctgaccaatgttaatttccctttcctgacattaataacagcagcagcagctaccatctgtgcaccttaccacgtgccaagcaccgtcctgagtgccttctatggcatgcctctttcagtcctctccacaaygccatgctctgtgcactattattatccctgttttacagatgagaaaactgaggataagaggttaaataactggcctaatctcacgccgctagtaagtgatggattcagaagtcgcatccaggtttttctgacctgacagcttacgctcataacgactccccccagggcctggcactgtgcctggtgctcaccaagggcgtgacgaaaagccagtatgtccacatggcaggaggacatggaactcttcaatggaagagtggtggatcacactgagctccgggaggacactcacacgtgcctgcgaccatgctgcaagaaaagcagggaggcctgcacacaacactgggaaatgtagcacgacccttgctgaggatcagaaatgaatagggatgtggggtgggtagcagtccactgagcatcttctttcctgagtgtcaatttactatacagtcaaaatttacaaggttcaaaacatacaagggaatcatctccagagaaagtcctaga

SEQ ID NO: 861448 - DNA, 587 bp, Homo sapiens
tatggttctatatacttccttttttacatagtaaatgttttactcttataattaaaaatatataataaagttttctagagggaaaacatgatttacaacttttctcctgcaataatatcttaatggcaataattcttacttataaatgatctaaaasatcatttttatttataaattatctgaacaagatctgggaaaaaatacaggttcataagcatattcttaaaaatctactttcttaggcatatagcaatgtttttatgtctccaccaggtagtaaagccagcagaccaacccccacttacctgatggatttgtcacaactgtaagtctggtcctgtgccttgtactcagggacctgacaagccatcatgctgagagcacagccatctcccatatagacttacattaaccaactcaaaagacggatgcatgaaaaccctaatgccaacttagtattatagaattttttttaattgcattttctccacctaggttctgttggctctgttagagaaggggagagcataggttgcagggtctgttggctttattggggttgggagtagaaacacatgagaactcta

SEQ ID NO: 861449 - DNA, 531 bp, Homo sapiens
cacagcgagtataccaattaggaatgcattcaactgctggtaacagawctcagcttacctcctaaatgctaggcaaaatatgaagctcttttcaaatatgatttcttatcttcacagcaaccttgcaagatagttttttttttaataagttaatttttttagataatgaagctgaagcccagagtagttaagtaacttgctcaaggacacaaccttaaaataatagcctctcctgatagtttccaaatcagtaaacattatagcattacttgagaatataaaatgtgtaaatcaattcgtaaaactcaggatcaatttccatgtggcctgatgaaaaacacagaggggcatgttcctaagtggaaaagaggtccagggacagggttatcttttagttagggagtatccacgggttgtacattttgtacttgctacaaatggatagatacttagaggtaagcattacttagagggagaggggttgggtacaaaggacgagtgtgttccctgtggtatatactgtaggttgtc

SEQ ID NO: 861450 - DNA, 686 bp, Homo sapiens
tatgcatttgtggactctattatatcagtataaccatgaaatagagaatagatatatgatttcaggtggtatatataattttgcaattggtgatcccccatcaccattaaaggtgatgtgtacatgttgatacatcagatctagtttggtcactttcttttttttttttttgagatggagtcttgctctgaccccaaggctggagtgcaagggcacaatcttggctcactacaacctccacctcccaggttcaagcgattctcctgactcagcctcctgagtagctgggattacaggtgcgcgctaccatgcccagctaatttttgtatttttagtggagacggggtttcaccatgctggccaggctggtctcgaactcctgacctcatgatctgcccacctcgacctcccaaagtgctggcattacaggcgtgaggcatcacgcctggccctagtttgatcacttgaactaccttataataatctattggattaataaattayagtttttccagtctcctcctgaagaagagttaattttaaaaaatattttttataataatagtgcttctatgaacattcacgtaaatatttttatcttatttctatttcagccattctatttgatgattggtggtataatattgtggctttaatttacattttcctaatgagaacttgatgtg

SEQ ID NO: 861451 - DNA, 612 bp, Homo sapiens
ttcctgaaactgccacattagatcctgcacactctccaggacccttcccttcaggtactcagtatccaggattatcatttaccttgacatagaagttatttcagtagtttctactgatagtcctttgctttctgggaacaaaacctaactgatgttatctgtgctccattgctgctagagcctgtgaccctttcctttattttgcccaatcacctcccaccccactcgttctggactctggagccatctctgctggtctcctgacaatctctggcatttattttctcaataacatgcagatttgggtgtgtagacttctgtttatctagaggtgtgagccatcagggattttatttgctktattaatctacaatgtatacatgagactttttggactgttaggaagggatgtaagcagccactattatctcacaggattctcaaacacatctttcatttttaaaaaagtcacttcaatataaatggacaaacagcatatctatatagatttcttcctctacaatgacatatttcatactctcctctacaggtatatgcataattatatctattaaagactaatataaattaggtcactctgttattctttga

SEQ ID NO: 861452 - DNA, 612 bp, Homo sapiens
ttcctgaaactgccacattagatcctgcacactctccaggacccttcccttcaggtactcagtatccaggattatcatttaccttgacatagaagttatttcagtagtttctactgatagtcctttgctttctgggaacaaaacctaactgatgttatctgtgctccattgctgctagagcctgtgaccctttcctttattttgcccaatcacctcccaccccactcgttctggactctggagccatctctgctggtctcctgacaatctctggcatttattttctcaataacatgcagatttgggtgtgtagacttctgtttatctagaggtgtgagccatcagggattttatttgctttattaatctacaatgtatacatgagactttttggactgttaggaagggatgtaagcagccactattatctcacagrattctcaaacacatctttcatttttaaaaaagtcacttcaatataaatggacaaacagcatatctatatagatttcttcctctacaatgacatatttcatactctcctctacaggtatatgcataattatatctattaaagactaatataaattaggtcactctgttattctttga

SEQ ID NO: 861453 - DNA, 677 bp, Homo sapiens
caagaatccacatttttaagaaggccctgtcctgaagaaggcagaaacaaagcaatgttttctgactctcctcatacattatgtgatgggataatgaaagctagtatcttcttgttgaccatcaggataccttatatacaataaaatatccttaggcttattaatccaaactctgactaaagagagggaaatataaaaatagctcttcaggctcaaatttatctgtcaaaaatgttcagaatttctgccgggtaggtgctctctgatcacattcccagaaatgctccatgctgacaggctattttctargaaccggtttaaaagagataatacatgattcagcagtttgtgctgtgtgttctgaattctctgatttttttaagatcaataatagtggagttatgtgatatctcatttaataattagcatctcagaaaaatccttaaattgcaagcatcttttgtagaagtccaccaagatgttataacttaagagaatcaacaaaggacttatgtcaaaagatatgtcttaatttaaagatgtaagttctattatgatcataaaaatttacttttcctcatctattttttaaaatactagtttttaataaaatcctttaaggtatattttatcatataatttaattcttgcactgaagaatggagtaatttgcctaa

SEQ ID NO: 861454 - DNA, 601 bp, Homo sapiens
attcagcagtttgtgctgtgtgttctgaattctctgatttttttaagatcaataatagtggagttatgtgatatctcatttaataattagcatctcagaaaaatccttaaattgcaagcatcttttgtagaagtccaccaagatgttataacttaagagaatcaacaaaggacttatgtcaaaagatatgtcttaatttaaagatgtaagttctattatgatcataaaaatttacttttcctcatctattttttaaaatactagtttttaataaaatcctttaaggtatattttatcatataatttaattcttgcactgaagaatggagtaatttgcctaaattttttaatcattaaaaggtaatttaccatttctatgtaatttttttcacatrgaaatatggctatattttgcagtgctgttttacattgagaaaaaatgtagctgaaatttagagttgataagaaattttaaatgactttcttcttaattatgttcacttaattttaaataatatttatgttatttattaggtgatgccaaatttaggttcatattttcctaattagaataacccccagatattgtgatatgtattct

SEQ ID NO: 861455 - DNA, 590 bp, Homo sapiens
ggtactttaaaagcatcatgaaaattgtttttcacctttgtgttttaaatgataaaatagcaatattttttcactctttatgtttgaaattatcacctccccaatgatatggaggaaacctctttagaatgagatatggataaaagaaaaagcacagcttagaatctaaagagttgaacctcagagttagctattaacacaatgactacataatcataaattttaaaaattcgaagattctgagactgttttgaatggctttcctcatacataaaaataataaggtagattaaatagtcactaaaatgtcaccattcaactactctggaataataaaattaatagatgtctgtatagaacttggcagttaacaaagctttttcacatatattactttatttaacagtgtttctaggtctaatttgtctcccaaattgcaataaatatrctaaatctaaagacgaatattttccataaataaaaaagttatttgggcaagtaacctaaccggtttcttcatctatagcatagatgataatagatgtttcacagtgctgtataagcagaaattctatccacagtttctttaa

SEQ ID NO: 861456 - DNA, 538 bp, Homo sapiens
actgagctactaaaccagcttcaaaagtcattgatttctagactttctggtatacatggaaaataaatgcttttgcttaaaacaaagggacgtcatgttaactttcaattactggactagctttcttgattcctttgaagaaattttgaaaactrtactttgtcatgaaatttttaaaaattctaagtccctttggccctacttttaagatgttaagagcatactagaacatcaattttttttataaaggatgaggagaaagagagaaaaatccagtcattcatgttctggtagattattggaaattaaaagggagagtgagaaggagcaaggatatcagaggcagagttcttatcctccctcatgctcccacctggtccgcagctcaggttgggtgccatagaggcttccaaatttaaccaggggaggaaagtgtcagaaagctgcaggcccttaggaaatattcccctttcagttctgccatatcaaaatgccctattagtaggtacatgaacatggcagagaaaagcagataaat

SEQ ID NO: 861457 - DNA, 619 bp, Homo sapiens
ttttaattcaaagttttattttgctcatgtaggccaaagtatatttctaggagtatttacctcctcagttgaactcatatgtcactataaatcaatgttgtcatctgatagtaagtaaaggagcaattttatggttggtttaacagatgaaagttttaatagtaaattattcaaggcatgtgaatgttttattattagtagacaaacacacctgagacactagttcagtaatctagttatgttaaatattatatctttaaaatttagccgatttgtatttgtttgttgacaaccaaagctgctcattttacttgaaactgatatttccataaattacaacaatgtttatgttcacytaggatatgcttctgtttattaaagactgttatggtgccacaactcaagtaacaacttgatccccctattcaacaggaccgtaacacaagtgtggtggtagccggggggaaaaactgttaagtgatagggcaataattaagaaaatgtctaaaagaaaattatttataacagacaattttctaattacccaaacttggaggtatatacgtatttttttaaagcatgaaaatcttttttaagcacacagttttctgtttacttg

SEQ ID NO: 861458 - DNA, 529 bp, Homo sapiens
cttctgctcctagcattttgccgccttttttatctggacctcagttttattcttttttttttttaaatcaaaatgtttattggaatgttgtacaaaaaagtttccagtcataaaatgtatattacaaatcattgggaaaaaaaaaaaaagaacaacacatttggcacgcatcttcttaaaaaccgartctctgaaatgaaagtccacgccagccccggatgcagcccagctttgtttgcaggctcttttaagtggattaataagcaggtatattagaactgctaaggtgtaaacatacttctccatctcagttaagatttagccatttttcaatcagcagcaattcacacaaaaaaagacagtttcattaaagtgataccaaaaaggtgaactgtgagacattaagctcagcaaaaagaagacatgatttggataatgtccttgaaactgtacctgtataagccacccccttttcttctgttaacttgtagaactagttgtgagtttacattaaaaataaaataaaatg

SEQ ID NO: 861459 - DNA, 621 bp, Homo sapiens
aaactactgacagattgatagcattctcatagctgaatattacttcaatttcttggtcatcagccaaagggtaatactaaatttaattatgaatatataattgaagaaaatcgtatgctgacaaattcaagactcttcaaaactagaagcagctcacctgaattggatagttttagatttattactgagctaatcttaggaaactcgtttttgaacattaaatcaacttgcataattcagcaataaataaaatcaatcagacaaaactgaactttgtgtcttcttaatattggattatttctgtaaaataattatttctttgtatgagtcagaatagaactaaaacaggtgagtcagtaacatttgtaatattatgttctatgatatatcgrcattgtgaaaagatagatggaaggagatgacttgctgagaaaatgacttcgggtggcagacaatgtgctacgcattgagatacagaagtgaatgatgtcatttgctgctttcatttttattagttccaatcagaggagagtgaaaatcaaaaagggtaatatagtgttgtaagtattaagatggacattagcataaggcagtgtggcaccacaggtcattctagaatcc

SEQ ID NO: 861460 - DNA, 608 bp, Homo sapiens
aaaaacagctgactttgaaatagaaataatagaaatagtgtttatgggccataatgataagaaatggattggatttacttatgacatctttgccaaatcatgtcgtaaaccagtgatataattttatttggttattagaaaattgtgtttctttaaaatatcaaaaataattgactgtgtttcatggattatgctattaaataaaaaagatttaagacactttgcttatcctaagtcagacagaagagggaaaaaaaatcttggcatttgaaacaaagacaggaaataatttagcaatatgatgaattaattctcctaaggaagagggtaatttgataagttgtcctgtcacagcggcatgctgagcatatgacttcctgatgactggggagtttttaattaattaaaactagtgagagagtgaggcagtggacattttgtttataakggacattagatcgaagcatccaggggcctgtggccaatcttcagcgattttgctgagtaaggatggctgagtctctgtgatgagacacattaattatgggcaaggtccaacagcaaggaaaaaccacttcaggggctacctaacaaatgcaagtgggcta

SEQ ID NO: 861461 - DNA, 633 bp, Homo sapiens
cacagatattatttaattggtctgggggaggatcagtggatatttttttaaagtgcctccagttggctttaatgaactgccagcactgagaatcattgcactgaaacttgttcaaagaagccactactaggctagatgaaatgagttgctcagattgcagaagaacctaggaatgctccccaatcctcaagttgaagtttgtagcctgcttttgagccaggcctggagatttggttattagcttggaaaggacttaagaaaactgtctcaattatagaggaaagcagtgtgaytggagaagtcccaggttgtcttggttgttttactcagagaaatttggaggaaaacagatagtataagatgacatcctctttaataaaactccatagacataaaaatatctatgtttaatatatgtaagttaatatggaaaaggataggtgagttataattatatcaacatcagcaagaaatctaaaattgaggttattaacaatattgcacagctggatgcacacagaaaatatagagtattttcttaattattaatgtaatccagagggatgtggcacaacccaaatgcagcaatacccatagtgataatgaaaacacatatacccaggcgaaaatgaa

SEQ ID NO: 861462 - DNA, 595 bp, Homo sapiens
catttttattaaagcttaggtggtcctgtctttagccaggacaaattgtcattcaaatagaatcttgagtcttttcaatatgactctagtattctgatggcttccttactatctagtataacaaaaatatttcaagactgtattggttttgtattgtgacgtaacaaatatcacaaatgtcaagacttaaaagaaygtgcactaattctctcacagttctgtagtgcagaccttcagcattgcatgcctgggttctcttagggtcttataaggctgaaatgaaagtattagatgaattgcattcttatctggaggttctagataagaatttactttcaaggttactcaggttgttgacagattcaggctatcaggctgacgtcttcatttcctcgctggcttttgactggtggtcactttcagatcctagagaccttgttctagttctttgtatacgcatcccctccatcttcaagaaggcactgtatgccaaatctccctcgtgctttgaacctctaacctcttttacaacccacagaggaaaattctctgctcttaaagtgctcctgtgattcagccagctaaccaggatata

SEQ ID NO: 861463 - DNA, 684 bp, Homo sapiens
catatgagattaaacatattttctggatttatccatttcaaacatttttattaaagcttaggtggtcctgtctttagccaggacaaattgtcattcaaatagaatcttgagtcttttcaatatgactctagtattctgatggcttccttactatctagtataacaaaaatatttcaagactgtattggttttgtattgtgacgtaacaaatatcacaaatgtcaagacttaaaagaacgtgcactaattctctcacagttctgtagtgcagaccttcagcattgcatgcctgggttctcttagggtcttataaggctgaaatgaaagtattagatgaattgcattcttatctggaggttctagataagaatttactttcaaggttactcaggttgttgacagattcaggctatcaggcygacgtcttcatttcctcgctggcttttgactggtggtcactttcagatcctagagaccttgttctagttctttgtatacgcatcccctccatcttcaagaaggcactgtatgccaaatctccctcgtgctttgaacctctaacctcttttacaacccacagaggaaaattctctgctcttaaagtgctcctgtgattcagccagctaaccaggatatattccatatttgagggatgttaattacatctacaaatccattcacaac

SEQ ID NO: 861464 - DNA, 684 bp, Homo sapiens
catatgagattaaacatattttctggatttatccatttcaaacatttttattaaagcttaggtggtcctgtctttagccaggacaaattgtcattcaaatagaatcttgagtcttttcaatatgactctagtattctgatggcttccttactatctagtataacaaaaatatttcaagactgtattggttttgtattgtgacgtaacaaatatcacaaatgtcaagacttaaaagaacgtgcactaattctctcacagttctgtagtgcagaccttcagcattgcatgcctgggttctcttagggtcttataaggctgaaatgaaagtattagatgaattgcattcttatctggaggttctagataagaatttactttcaaggttactcaggttgttgacagattcaggctatcaggctgacgtcttcatttcctcgctggcttttgactggtggtcactttcagatcctagagaccttgttctagttctttgtatacgcatcccctccatcttcaagmaggcactgtatgccaaatctccctcgtgctttgaacctctaacctcttttacaacccacagaggaaaattctctgctcttaaagtgctcctgtgattcagccagctaaccaggatatattccatatttgagggatgttaattacatctacaaatccattcacaac

SEQ ID NO: 861465 - DNA, 625 bp, Homo sapiens
ctttcccccagcagaatatgatagagatgtttcctcagttgggtctttgcctttggttgggatttgtctgtcttgtggtcaggtggttaggcaggatgtttctcactgcctgaacccctgtgaaatgtttcagtttgaccaaggtctgcaaaatagcaggaagcttataaaatggtggtttggactaacaggtacagtaaaaatatggcataaaaaataaaaaatgggacacttgcataaagtatttatgaatactgtctgcaggactagctgttgctatgggtgagtgagtgagtgactggtgagtaaacgtaaaggcctagaacattactgtatactactctagactttataaacattgtacacttaggctatagtaaatttataaaacattyttcttcaataataaattaacctgcactcatgtagcttttttcttttataaacttctaaatttttaaactttcttattcttttacaacatgtagattaaaataaaaatacattttatagctctacaaaaatattttttgtttatatacttattctataaggtttttctatttttaagtgtatttactttcttttactttttaattgcttttgttaaagaagaataagacac

SEQ ID NO: 861466 - DNA, 596 bp, Homo sapiens
gccagaggccaactgacatagtccattacagaatctccaggtagaataacactgtgcccagaaaggagaaatcttgtgcatgaccccatctatcaccatggtctgcaccactctggctaaccaggtgggtcttgagtctattcatgtgaccagttcgttactactacaaccagtatttgagaaagccaacaaactaaggctatctataaccaagaaatctcacacagtcaatgtcactcttctaccaccccatcagagctggtactggtatctgctgctgggagagttgaggacagggaacatcactggattccttgyagtcactccccagcatgactctggagtatgtcagccccactgagtgactagacccagaggagcaacaacattcacagtattctgggtctcagggactcctactcctaggagaaggaggagtgcactaaatcaagggaacaccccatgggacaaagagcctagacagcaggcattgagtcccagatctttccactggtaggaagtttctttcaacagcggcacagttgaagtcctggcccacgaggaaaagtctacaggtacaggcaacagtcaggcag

SEQ ID NO: 861467 - DNA, 602 bp, Homo sapiens
aaaaaagctcatcaacaaggagtatagttatcaggctatctaaagccaacatgaatgaaagaattctaagagtagtgagacaaaagcatcaggtaagctataaagcaaaacctatcagagtaacagcagactactcaaaagaaaccttacaagccagaakggattagagtcctatctttaaccttcataaacataatagctgtcagccaagcgttctgtatccagcaaaactaagtttcgtaaatgtaggagaaataaagtcattttcagataagcaaatgctgagagaatttggtactactagaccaaccttacaagatacgctaaacagtgttctgaatcttgaaacaggtactcaatatgcagcaaaatagcatgaaactcacagggcctataaaacaataacataacaaaaaatcaaagtgtctagataacaactaacatgatgaatggaatagtaccttacatcttaatattaatgtttaatgtaaatgtagatagattggaagatacagattggtagaatggattaaaaaaatcacaaaccaaatatctgctgtctttaagggatgtacctaacatgtaaggatttaggtaaattc

SEQ ID NO: 861468 - DNA, 602 bp, Homo sapiens
aaaaaagctcatcaacaaggagtatagttatcaggctatctaaagccaacatgaatgaaagaattctaagagtagtgagacaaaagcatcaggtaagctataaagcaaaacctatcagagtaacagcagactactcaaaagaaaccttacaagccagaagggattagagtcctatctttaaccttcataaacataatagctgtcagccaagcgttytgtatccagcaaaactaagtttcgtaaatgtaggagaaataaagtcattttcagataagcaaatgctgagagaatttggtactactagaccaaccttacaagatacgctaaacagtgttctgaatcttgaaacaggtactcaatatgcagcaaaatagcatgaaactcacagggcctataaaacaataacataacaaaaaatcaaagtgtctagataacaactaacatgatgaatggaatagtaccttacatcttaatattaatgtttaatgtaaatgtagatagattggaagatacagattggtagaatggattaaaaaaatcacaaaccaaatatctgctgtctttaagggatgtacctaacatgtaaggatttaggtaaattc

SEQ ID NO: 861469 - DNA, 629 bp, Homo sapiens
tatattatacatatataaacatatatatatatatacatacatagatgtatcttgatagtgagaaaaacatgggtatctacataagcttttgaatttagtgctctttcaccagccaccaatttatattctctagatagcttctgtaggtactttcttagyttggtgtagattttgtttcaattaacaaataattcttaatggtctgttttacaccaacactattctcaggggacaaagacttaagcaaaggagtgtactcaagtgaatcaaaaacctatatctacaaacaaacttgcacacagatatttataaaagctttattcataattgccaaaacttgcaaccaagatgtccttctgtatgtgattatattagtaaactgtggcacatccagacaatggagtattatccagcactaaaatgaactattaagccatgaaaaaacatggaggaaacttaaatgtatatttctaagtgacagaagccagtctgagaaggctacatactgtacaattccccaactctatgacactctggaaaagacaaaactgtagagataataaatcaaggattgccaggggttagggggaaggggaataaataggtggaataccgagaatttttaaggt

SEQ ID NO: 861470 - DNA, 629 bp, Homo sapiens
tatattatacatatataaacatatatatatatatacatacatagatgtatcttgatagtgagaaaaacatgggtatctacataagcttttgaatttagtgctctttcaccagccaccaatttatattctctagatagcttctgtaggtactttcttagcttggtgtagattttgtttcaattaacaaataattcttaatggtctgttttacaccaacactattctcaggggacaaagacttaagcaaaggagtgtactcaagtgaatcaaaaacctatatctacaaacaaacttgcacacagatatttataaaagctttattcataattgccaaaacttgcaaccaagatgtccttctgtatgtgattatattagtaaactgtggcacatccagacaatggagtattatccagcactaaaatgaactattaagccatgaaaaaayatggaggaaacttaaatgtatatttctaagtgacagaagccagtctgagaaggctacatactgtacaattccccaactctatgacactctggaaaagacaaaactgtagagataataaatcaaggattgccaggggttagggggaaggggaataaataggtggaataccgagaatttttaaggt

SEQ ID NO: 861471 - DNA, 631 bp, Homo sapiens
gagatggggcaagtgatgggtgtaagcttgttagggcagccacaacaaaataatgcacatggcattaacagcaaaattgacgggtttttttacatttttggaggctagaagtccaagatcaaagtgttggcaggtgtgatttcttctgaggtctctcctgacttgcagatggctgccgtcttgctrtgtcatcatgtggctgcattttaacttaatcactttttaaagaccttttctctaaatacagttacacagtgaagtactggaggttgggactttgacgtatgcattttgggagaacacaattcaattcattacagggagattagggtattccaaacataaggggcaaatgagtaaaacagaaggaaaggagagcaaatcaatggagaatagatatttcccccgttcacatataaacaaatatatcttctagaaagctgtacattctaatacatattttttgatattgataataaccatgaatctgaatgatgtggaagggttatcaatatcaataaaatttgaagttatttttaaattattaaaataaatatattttagaatggtctgatatttatattcatatgattaacttagaataaagctttaaaatgcttaaatatattta

SEQ ID NO: 861472 - DNA, 631 bp, Homo sapiens
gagatggggcaagtgatgggtgtaagcttgttagggcagccacaacaaaataatgcacatggcattaacagcaaaattgacgggtttttttacatttttggaggctagaagtccaagatcaaagtgttggcaggtgtgatttcttctgaggtctctcctgacttgcagatggctgccgtcttgctawgtcatcatgtggctgcattttaacttaatcactttttaaagaccttttctctaaatacagttacacagtgaagtactggaggttgggactttgacgtatgcattttgggagaacacaattcaattcattacagggagattagggtattccaaacataaggggcaaatgagtaaaacagaaggaaaggagagcaaatcaatggagaatagatatttcccccgttcacatataaacaaatatatcttctagaaagctgtacattctaatacatattttttgatattgataataaccatgaatctgaatgatgtggaagggttatcaatatcaataaaatttgaagttatttttaaattattaaaataaatatattttagaatggtctgatatttatattcatatgattaacttagaataaagctttaaaatgcttaaatatattta

SEQ ID NO: 861473 - DNA, 631 bp, Homo sapiens
gagatggggcaagtgatgggtgtaagcttgttagggcagccacaacaaaataatgcacatggcattaacagcaaaattgacgggtttttttacatttttggaggctagaagtccaagatcaaagtgttggcaggtgtgatttcttctgaggtctctcctgacttgcagatggctgccgtcttgctatgtcatcatgtggctgcattttaacttaatcactttttaaagaccttttctctaaatacagttacacagtgaagtactggaggttgggactttgacgtatgcattttgggagaacacaattcaattcattacagggagattagggtattccaaacataaggggcaaatgagtaaaacagaaggaaaggagagcaaatcaatggagaatagatatttcccccgttcacatataaacawatatatcttctagaaagctgtacattctaatacatattttttgatattgataataaccatgaatctgaatgatgtggaagggttatcaatatcaataaaatttgaagttatttttaaattattaaaataaatatattttagaatggtctgatatttatattcatatgattaacttagaataaagctttaaaatgcttaaatatattta

SEQ ID NO: 861474 - DNA, 621 bp, Homo sapiens
ttggctttttctctacttctttgaaggatgtaaatgaatattggcaaggtttcttaataatatactctgaatttggtttggcatgagcagtgactgagatcaatgttgataatactatccaataagttgaacaagaatattgtaaatagtctggccattctacttagatttcatcagatcaatatgttaatttcattgcccacatgaagcacttatgcatgaagaagtatcatgttcaatamacttatatttttggtgccactcaaagtaatgggttaatagaaaattggaatggacaaatataaccccttcttaaaaatatgggggttgccaaacaattgaagagctagtctccaaacagaattctgtttaccacttattataaattgatgaaactaaacatgagtttccattaggtaaattattacatatttgtggtagaaataggaaagaagggctggacaatgacacagcaactgacataaaaatactttgtacttcaacttagttttctttttcaatgaaaaaggcccaatagtccttgcgctgacactatcactaaagatccgaatagctggtaatactgcaaaacaaaattcatgtctattaagttgaacacaa

SEQ ID NO: 861475 - DNA, 621 bp, Homo sapiens
ttggctttttctctacttctttgaaggatgtaaatgaatattggcaaggtttcttaataatatactctgaatttggtttggcatgagcagtgactgagatcaatgttgataatactatccaataagttgaacaagaatattgtaaatagtctggccattctacttagatttcatcagatcaatatgttaatttcattgcccacatgaagcacttatgcatgaagaagtatcatgttcaataaacttatatttttggtgccactcaaagtaatgggttaatagaaaattggaatggacaaatataaccccttcttaaaaatatgggggttgccaaacaattgaagagctagtctccaaacagaattctgtttaccacttattataaattgatgaaactaaacatgagtttccattaggtaaattattayatatttgtggtagaaataggaaagaagggctggacaatgacacagcaactgacataaaaatactttgtacttcaacttagttttctttttcaatgaaaaaggcccaatagtccttgcgctgacactatcactaaagatccgaatagctggtaatactgcaaaacaaaattcatgtctattaagttgaacacaa

SEQ ID NO: 861476 - DNA, 537 bp, Homo sapiens
aattggataaaattactgcttaaataatatttatttggttagattgttcaaaattttaaatttgcttttgtgtttgtttaattagttaatttgtcctaataggaaacatgaaatctatggatcagaaaacagaccatttacttacagagcatcttagcagggcttcagtcaatttccccaagttttgcacaatgaggacmtgatgacatttgtgcatacggcatggtttgcatcacaaggaagaaaccccaaaattctgagacttggagcttctataataaggctgacatgtcatactttcttcccttcagagagcaagagagagaaagagagattggcttttactccataatgtaaacaagtaaatcctttccaggaaggaagagggcactgccctggaagaaagtaactgtctttggcaggggtcgggggaaagtatgtctgggttatattacctttacaatgtaaacaaatggctttgggagatatcttagtttgttcagactactgtaacaaaatactttagactgggtaatt

SEQ ID NO: 861477 - DNA, 560 bp, Homo sapiens
aaaatattagcatagtcttccttcaggtctcagataaaatattaccaatacagaagactgccttgaccatcccaagcaaacgaatactaggattccttctatcctattatttcataacactgtgtatgtcagaaagaagcccacacgtggtatatgttctacagaccaatgctgattagggtcaagggagaaaggctgacccattgctagcccagaagggtccatcagtagaagtcaagaggactttacacaccctttgctgggtcagagaggtccatcatcaagagttaagtggacacctgaacaatctgaacactcctgacatgacttyacaaccatctctctgctcccactgaccttcatagcctcatcactattgtctgcttaggaaaaattaggacttaactcatcatgttcattttctcattttatgtcagtcaccagaaggaactcagaacttccaagtcattcctgatccctaagactctaatcctcatcctttaattttctctgtctctggatactctttcactatcctctccggaactcaacaacaaagc

SEQ ID NO: 861478 - DNA, 632 bp, Homo sapiens
tttagtttatgttttcataaccatgttataattactcaaatgtaaattatgatataatttaaatgttataatttaacttaagataaaatatttaaatattagttaaactcatgttatttattgtagatgagttatctattcacaatctcttagaataattatcttgtgatattcatgcagttctcaatatcagattgtgtctagatttggttgtaaatagaaatatgttaaacataaaaattcacttaagactaacatcagagtgattttraagttgttgcagcaaaaaaaagtaagaatataaaagtgttaatatgatgaataataaataactagaagtcagcatattaaaaatgtggttaccagtttaaacaagcagatcagtggaaaaaataataataatacagtatgagatacagtcatatttactttgagaaagaagtcttcgcaaaagtgaagaactcatttagagaattaattttggagacaaagagagatgagggtttgaatcctgcattcaatacctatgagctctgtgacactgaacaagtaatacactttcagcctctatttcaagtatagagtgggcattataaaataaatgcagagagagagctcaaacaaagcactta

SEQ ID NO: 861479 - DNA, 608 bp, Homo sapiens
ttcagagtaagcattaatgtgtagagataacatctgttctcaataggtaactgacatataaaagaagaaaaaatgtgatttaatgatgcaatttcagtatttgtaatgtaacatacagtttaaaaagaagataaaattgacaaaaaatgtaaacctaaaagctcatggacaaaattactttttatgttagattccatgttttacyatattttaacattgtgattatccaatgcttccttatcctccccccaaaatatactatggaataaaaggaaaatttgagaatttgatttcagattctgtaaatagcatggcatgtctgtgcctattttaatatgacaaagaaaatgaaacactttttcttcatattttgtattaatttactcatagacattgaagtatgctttacccatctgaacctttatatctgctatataaaatatggtatttatgatcacaaaaatagattatgcatctggaaagtataccccaaaatactttatttcatagagcagagtcccttatgttaaaatttgttatttctggatcacattctttttttatttcaggatattctgagaaacattaaaattaataacccaatttca

SEQ ID NO: 861480 - DNA, 589 bp, Homo sapiens
atgttcagtcttggccctcactatactgactatatgggcaaatagtttattgcttcattctagaaatagttctactttaaaaatttggccaaattttcatttttattttatttttatttttatttttatgggtacatagtaggtgcatatacttatggggtacatgagatattttgataccaacatacaatgtgtaataatcacatcaaggtaaatggggtatctatgacctcaagcatttatcctttctttgtgatatgaacattccaattatactctttttgttatttttaaaagtatcataaactatatttgaccataatcactctgttgtgctattaaatacaagatctcattcatatcgtctaactatatttgtgtaccaattaaccatccccacttctcccactttccactaacctttccagcctctggtaactgtcawtcaactctttaactctttatctcaattgttttaatttttagctcctacaagtgagtaaaaacatgcaaagtttgtctttctgtgcctggcttatttcacttaacaaaaggtcctccagttccatccatgttgttgcaaatgaca

SEQ ID NO: 861481 - DNA, 551 bp, Homo sapiens
tcatgactactttattttacatgaagtgccccctgattattccaatgaaaactgactacctgctttctgactgtcattgaacatacctaatggcctagaattaagttattttatgtaaattatttcaaaagatcttttggaattctctcataggcaaatgttcacctctctgaaaatattgtgaatctattaagagtagcaataaactcatcaacagattttgcatatttcagataacctattattttcttctataaatttaagttccttrtagatgctggatattagacttttgttaggtgcctagtttgcaagtattttgtaggttgtctgtttattctgttagtttcttttgctatgcagaagctcttaagtttaattagatcccattttcaattcttgcttttgttgtgattgcttttggtttctttgccatgaaatctttgctcatgcctatgttcatgatgatattgcctaggttgtcttccaggatttttatagtcttgcattttacatttaagtctttaatcaatctcgagttaatttttgta

SEQ ID NO: 861482 - DNA, 620 bp, Homo sapiens
gttcttttctttttgctttatgacaatcttgtttttgttcattcactggagctggcagataactatgagatggaattccaaagccaattcagcattaactttatatccatgaccagtgtcaaatctggactctatctaatagaaatgttgagtaatctcatgttaatcttctctgtgtaacagttctgacttgcactaatgaacaagatttgaatggaagctccaataggttactctggtcctatagagtttgcttttgaaggaaaccatcctatggatttatcccacccacytaagtcaggctgctgtagctcaacaatatttgaaaggtcttcacacacactgtaattttttaaaatccttgactttgtgccaaaaatttaaattggctctgccatcacactgataaacactagttcttcagataattttatttatttacacgttttgacattgtgttgatttaccatttattttaacagctaggaaaggtaatacataattacaaactttcaaacactttattgtaaaccacatttaaaaactaaaatatgctactctctagaagagaataaacagatttatatatgattttaaagtcacaaagaaagatgtttgat

SEQ ID NO: 861483 - DNA, 595 bp, Homo sapiens
aggaagtttgaaaaatgtggtttgggtctagagcatagaagagggcatgtggctgtaggtggagattttggagtcatctacatagaggagctgtttaaaatgtcgaggatgaacaaaatttctaagaggaagtgagcagacagaaaagaagatgaccaaacatagractttatattaagagcttatttgtaaattaatgtagcttatgaattgtatgtatgtttttgtatatgtacattctatttaaaatattctgatgtaagaaataatatagttcaaacaaaacttccagacctaactgtatattaattttattatttattagaaaattttcatgtccaaatatctcttttattaagaagtcaataaatatacactgaacacttactatatatcagatattgttttaggtgttgtgggtacatctttgaacaaaaagaaaaacctttttacattcatgaacagtgattacattcactgaagattttctagtcctttgacttattcaattttagcaattcctaattagtaatttaggcaacaatattttatcgagtatacgtttgttatcattttatgaaatgtatgtatatta

SEQ ID NO: 861484 - DNA, 678 bp, Homo sapiens
ttccaactttatctttttctaagttattttgtatattccaaatcattggcatttctataccaatttcagaatcagcttcttaatatctaccaagaaaaacctgaacaagacaaaaaacaaatcctgctggatctttgattgtgattgcattcttactgtgggagatgagcccgtgattttgaagtttttcttcttttctcactaaatatctcactagatatttaatgttgtgcattttcttttaatttctactttagtgacatcccataaattgttatatattttattttcattttcattaagatcaaaatacttyttaatttttcatttaatttcttctttgacccatgcgttacttagaattgtgttttttgttttcagatgtttggagattttcatgatatattcttcttatttatttctaatttaattccactgtgttcagaaattatacattgtatgacttaaatccttttcaattattgtgacttgttttatggacaagaatatgtttctgcatatacttgtgaagaatgtgtagtctgcttctgttggatagagtattttataaacataaattagataaaattgatcgttagaattgttcgtattatttatattcttactgagttaccattgttctatcagttattgacatgggttattgaaatctctgac

SEQ ID NO: 861485 - DNA, 660 bp, Homo sapiens
taatatagccatttagccagtccagatttgtagttattggtagcagagtacatattttttatactcttatttttagccatttttatatttaaattgggtttcttataagcaacatatagttggtattttttttgcttttttttttgtccaacatgacaatctctgccttttaattggggtatttaggccaattacatttaatgtgattatagatagggtcagttccattaaaggatatatcatgtttaacgtacatatccacaaaatagatctttggactttcttcctttaatctttttttaagctggatgtggttggcatattacttagttgcataattatccctgcacctcagctcataaattggatgaccatatgacctatcatccaacccagcactcttttgagaaagaaaggtgttttcttaattatatttttggggtaattggtaaaaacgttagaaaattctggtcaaacaaggtaatacattcacctttttataactttatacatakttccttgtgtgcctgcttatacagaccttttgagtgaacatgaagtttgagagggcaggcctagtcatcatagacttatcatctcatatttactgctactagtgtcaatattgaggttatatggaacaacataaagagcaagatt

SEQ ID NO: 861486 - DNA, 670 bp, Homo sapiens
ttctgaccctctagagaaccctgactaatacaggttctttctcagctcagttttagaaaagtgtaaatatggctttgactatattgcctgggtgtcctttgaaagtctttgtctactccagccgataaaatatccaatgtcaaaaccaatagttcagactataggagtaagtttaggctccttaacctggcatagattctttctggttgtggcaattatctaccttcccagctctatcctccagcacagcccactccagatgccaagggatgagatctcactgacctagttgctaattcctaaacatgaaaagctattttcactctctgtgctcttgaaaatattgtttccctcttcagttaaagaaaccacttgtccttctagattctggcagttctacctccacaataaagccctctctgattttaggaagcagaatttctcacatctgtgttggtcattctgatctaatgacaccattcacattgcattgatattgtttgttaamattttaattagacttatagagatcttggaatgtctattttttaatacttatttgtatttttaatacttatttgtattatctagattggaggtattcaataaacattggattaatacatatatttgactaaggtaaacattttaagaatatgcgttagcaatg

SEQ ID NO: 861487 - DNA, 397 bp, Homo sapiens
tattttgacgtttgaaagctctcctatttattattttaatttgtttctgaagttgagaaattttaagagtattaaacatttgtattttgtattctaaagatttaccattttttctgtaactgagagcactcagagatcagctrccactcttacccttccttcacatctttttcctataatgaggctctttcttgtaccttagaattttatttactttttaaaagcagcatattatgtaaaatgttctgtaaaaaaatctgtgctttgtcctcatttttctgctttttatgtctcttacatatccttttaatgtctcaattctctaagttatcattttatactcacccctctgtagtttttaaaaattttgctgatagttattctcgaattcaaaatc

SEQ ID NO: 861488 - DNA, 604 bp, Homo sapiens
tcttatagttgtgaagtttacttaattgtttgaaataattatggaaagagattgaagctgaattccatgattggactgatacaaatcagagaaggacatcattagttagaaatattggccgggtgcggtggcttacgcctgtaatcccagcaatttgggaggccaaggcgggcagatcacgaggtcaggagatcaagaccaacctggccaacatggtgaaaccccatctctactaaaatacaagaaaatagcctggtgtggtgacgcatgcctgtagtcccagctacccagaggctgaggcaggggaattgcttgaacctgggaggaggaggttgcagtgagccaagattgcgccactgcactccagcctggtgacagaatgagacttcatctcaaaaaaaaaaaaaaaaaaaaaaaaaaaaaaaaaaaatatatatatatatatatatatatatawaaaataaaaataaaatagaattatcaacagaattaaggcaccagagatgaatgtgaaaataagttgaagccactctgatggcctgccctccatgtgttgaaccttgagtgattaacggaaatcttgggaggttttttgaattgttca

SEQ ID NO: 861489 - DNA, 656 bp, Homo sapiens
gaatgcgtatgtatgtaaatatcctttataggtgttatttccgaccttcatcaccaatgttgtgttcataggccatgtaaacaaaacagtatctgcttgttcttctttcttagctatgtttctattggagagggatgaataaggacaataactcttttttctttgcattrttcttataattatttcattatttttgcagtgttgttaccatatgttgaagtaagtaattaattctaaaatcttagtggcttaacttaacaagttcttttttttggcccatgaaacatatacagtgcaaattagtagctggaattttgtggggatttggatcctcagtcagggaccctcgctgacagaggctccatcaccttctatgtgaactgtctggaagatgtggcctttcccattcatgcaataggtgaagagacacaagacagtcttgcactggtaattaagtactttgctctggaagtatttaataaccagtcttctggagaagacatgtgtgatttcattggccagaactagtcacatgacctcacctaaatgcaaaaagatttggaagtataagagagcaaatgaaataatcagtgggctgactcattgccatactatattccagaattatatatttgttgagcaagagaaaattttaa

SEQ ID NO: 861490 - DNA, 656 bp, Homo sapiens
gaatgcgtatgtatgtaaatatcctttataggtgttatttccgaccttcatcaccaatgttgtgttcataggccatgtaaacaaaacagtatctgcttgttcttctttcttagctatgtttctattggagagggatgaataaggacaataactcttttttctttgcattattcttataattatttcattatttttgcagtgttgttaccatatgttgaagtaagtaattaattctaaaatcttagtggcttaacttaacaagttcttttttttggcccatgaaacatatacagtgcaaattagtagctggaattttgtggggatttggatcctcagtcagggaccctcgctgacagaggctccatcaccttctatgtgaactgtctggaagatgtggcctttcccattcatgcaataggtgaagagacacaagacagtcttgcactggtaattaagtactttgctctggamgtatttaataaccagtcttctggagaagacatgtgtgatttcattggccagaactagtcacatgacctcacctaaatgcaaaaagatttggaagtataagagagcaaatgaaataatcagtgggctgactcattgccatactatattccagaattatatatttgttgagcaagagaaaattttaa

SEQ ID NO: 861491 - DNA, 556 bp, Homo sapiens
atggggaaggaaggaagacagaggagcacagcacattctctctctctctctgtgtgtgtgtgtgtgagagagagagagagagagagacagagagagagagacaaagagagagaaagatacagaaaggaaggaaggaaggaaggaaggaaggaaggaaggaaggaaggaaggaaggaagggggctgcatctcctgggggttgtgccagtacagggaggatgcagtttcttcagatggcagcagagtgtggtattgaaaccaatgagatggcagagggctctatagtctggaacctaatttccctgtgaaacattcatacttcagtgaaattaccaaattaactgattcttttttttttctttctgagacagggttttgctctgtcactcaggctagagtgctgtggtacaaacatgtctcrttgcagcctcgacctcctgggctcaagcaattcttcagcctcagccccctgagtagatggaaccacaggtgcaccatcatgcctggctatttttaaaattttttgtagagatggggggtctcaccatgttgcccag

SEQ ID NO: 861492 - DNA, 563 bp, Homo sapiens
atttctacgtatatttaattcatcaaatattgtgtttcatgcttaaatgtttggttaatcacatgtattcatttaacaaactttgtagatgtcaagaacattttgattatgaaatgtacacaaaaataattttaataagcttaaaaattccagctacacattaaccaaaattttccaataatcctatggatatttaacacatagatttttaaaaatcctcatattaaggatttctggcatatcaataaacactttagagtgagtagacaatttataatactttgttgtaaataacataaaatktggttactagaagtctcaatagctccagtagtaaataacaatctcttctttcagatttataatatatttaaaagttaatattctacaagactgaaattcatttatatttttttaaaacaaagaccccttaaagagattttaagatattttacagttctcaatcaggatttgttttcacttgaatgaaatatttgtgtgttgtatacagagctaaaatatatgcagttctttatcttttaaaattgtcttaatatggatga

SEQ ID NO: 861493 - DNA, 591 bp, Homo sapiens
tttccttacatcctccgaaatctaggtgaagttcccaaatcttatttcttgacttctgtgtacctgcaggctcaacaccatgtggaaatgtcaagggttagggtttgcaccttctgaaacctgacctgtatcttggccccttttagccacagctgggatgcatgacgccaagtctcaaaactgcacaaagcagcaaggccctggccacagcccatgaaactattttttcctcctgaacctctggtcctgtgatgggaggacctgctatgaagttttctgacatgscttggagccattttccccattgtcttggaaattaacatttgactcctcattacttatgcaaatttctgcagctagcttgaatttctcctcagaaaattggtttttcttttctattgcattgtctggctgcaaattttctaaacttttatgttctgcttcccccttaaacataagttccaattcaaaatcatatttttgttaatacataaaactgaatgcttttaagagcacctaagtcacatcttgaatgctttgttgcttagaaatttcttctgccatataccctaaatcatctccctccagttc

SEQ ID NO: 861494 - DNA, 583 bp, Homo sapiens
tcactcagctcaccagctacctcatagttcacgctgtattaatgagacagatacctctaggactacttcatacctccacactcttgctccctgttcctacttcccagaataccctcttcccagaaaacctttcccataccccagttgattctaagtacccttgtgacgaaaaccagaatattttaccccaaaatatacttctttggcctgttttaatatggctattcagaggggctgcaaaacataaacatagccctgaaaagctgcctggtttgtgggacatttgcatctgtagaggaaatctaygttagtgaaatgaagtaaacaacagatgaaaacaggctttctctgaggtcccccttggatctaggaaaggttaactcacagaaaaaagagactcaaagtctcatacttctaaaggtctgacagagaagccttacaaaagctaccatctattctttttgagggcagctctgagattacctgaaatattttcgtgtgtgtaacaagacagcctttgcttgacatactttcttctctttactctctcataacctgtgataccacatttccctgtccccag

SEQ ID NO: 861495 - DNA, 586 bp, Homo sapiens
ttaagcaaaagtttgctaactgcagaagggttaacactggtaacatactgtggcagacaagtttcttttttaaaaaaacttttgaggttccccccctttaaattaaccctttccggtccatatgccactaagcaggtaccaacctagagraaaaaaaaaaactcatccactcagcaatagtggccctttcaaattaacagaggggtggggtaaggttgagggggaaggaaacagacagggggagaggaagggcctggtagaggaggggatctttcttgtcattcaagttagggcagccacgaatgtcccaaatctgttggagatgtcagaatgcagggaccgccaggtgggcacggaggctcgagccttggcgtcacccacgtcgtctgtgcagtggacagacaggcactgcaagtggctgccaggctgggatgctgaggccttgtttgcagggaggtcgtgggctgtggagagagaaggaagagaggacattagtggcacactcgtctctgagggacaccataatgggggccaaagtggcagaggcatacaagacaggcaccgtccacgccctctttccatggct

SEQ ID NO: 861496 - DNA, 684 bp, Homo sapiens
acagatcacagggatgtctgtgttagacacgcttgaggagaaaggagcctgacaaccattcacatcttagtataaattagaccaaagcagggaatttgcaggacttctcatttacggctaccacatgaccactggctctgtcctgagacctgccatatgtcaatgaagagtctcattattctcatttcctagactctgactttagagtatgtccaaggtcacacagcctggaagggacagaaagctgggtttgaatatgggctgatgttgaatttctgcctcagtagtagtgagaaaagctgaaattgggggtggggggctctrctccagctgagggagcacacccagatactgaactccatgaccggcctgccctcaatcctctgtgcaagcccagccaagggccctgtgccaggcaggagtcaccggcccgccctgccctctgggattaagcaggaggcctcccccaggagctgagccacagcctgcagagaaaatcctcccagagggatgggcccaggcagctgaggacaggccatgactaactgggcttggggcccccaccctggagccccagagacactcagctttgggacctgcatgctgggaggagccggagctgggcagaaaggagacttccttggccccttccctcattcatgcaactaacatgcctttattgag

SEQ ID NO: 861497 - DNA, 554 bp, Homo sapiens
ccatcaacacctaatttattgagagtttttagcatgaaggactgttgaattttgccacaggccttttctgcatctattgagataatcatgtggtttttgtctttggttctgtttatatgctggattacgtttattgattttcgtatgttgaaccagccttgcmtcccagggatgaagcccacttgatcatggtggataagctttttgatgtgctgctgcattcagtttgccagtattttattgaagatttttgctctgatgttcatcagggatattggtctaaaattctcttcttttgtgtgtctctgccaggctttggtattatgatgatgctggcctcataaaatgagttagggaggattccctctttttctattgattggaatagtttcagaaggaatggtaccagctcctccttgtacctctggtagaattctgctgtgaatccgtctggtcttggactttttttggttggtaggctattaattattgcttcaatttcagagcctgttattggtctattcagagattcaacttcttcctggtttagtctt

SEQ ID NO: 861498 - DNA, 554 bp, Homo sapiens
ccatcaacacctaatttattgagagtttttagcatgaaggactgttgaattttgccacaggccttttctgcatctattgagataatcatgtggtttttgtctttggttctgtttatatgctggattacgtttattgattttcgtatgttgaaccagccttgcctcccagggatgaagcccacttgatcatggtggataagctttttgatgtgctgctgcattcagtttgccagtattttattgaagatttttgctctgatgttcatcagggatattggtctaaaattctcttyttttgtgtgtctctgccaggctttggtattatgatgatgctggcctcataaaatgagttagggaggattccctctttttctattgattggaatagtttcagaaggaatggtaccagctcctccttgtacctctggtagaattctgctgtgaatccgtctggtcttggactttttttggttggtaggctattaattattgcttcaatttcagagcctgttattggtctattcagagattcaacttcttcctggtttagtctt

SEQ ID NO: 861499 - DNA, 608 bp, Homo sapiens
tttggacgagtttagctgttcaggcctgctcctgtggcagacactggagggagacctggtagggagatggtgagctgggtggactccacagccatttgctgggctaaaagatcccagggcaagggcatcacaccaactgcacacctgtggcaccacagccctaccaagggatcctccacccttgacccactgcatcacgagaccaccaccagayatatcccacaacctggtgtgactctcccaaactcagaggactagcaggttcacagagagttgcaactgtccttgtgacctaatctttggcattggccacccctaatggagggccgagtgcagcctacaagggccccttttgggctaaggagatgtagatatggtgccagtgattgaagggggtttctccaaggtctgggaacagccttggtgagagggtcatctcttgccccatctccccctccccagagcactgctgcataatcgctgaaatacaaaagtggtccacagctcagtaagagcctatttgctggcccatattcttaagtgctatctactgtatcaaagcttgaattataccaccaaacaaaaataaatttcttcagcatagaaag

SEQ ID NO: 861500 - DNA, 599 bp, Homo sapiens
caagaaacacagagaaactgcattagatattttacaagatgaccatctccaaggatcataatcatgattctttccaaagtcaacacaaaagaataagcttaaaggcagctagaaattatggacaaatcacttacaaaagaaacccatctagctaagagaagccttctcggcagaaaacttacaaaccaggagagggtgggggcctatttttagtgttcttaatrtaaaagaaattccaacctagaattttgtaaatcactaaacaaagcttcataagcaaagaagaaatcaaatattttccagacaatcaattgctaaaggaatttgttaccactagaccagccttacaagatatctgtaagggagttctaaacatggaaacaaaagaacagtatctgctaccaaaaaaacacacctaagtacatagctcatagaacctgtcaagcaactacataattgagagtacaaagaaaacagctaccaacaccatgacaaaatcaaaacctcacatatcaatattaagcttgaatgtaaaacaactcagccatctgctgtcttcaagagactcttctcacatataatgacaccaaaaggctcaa

SEQ ID NO: 861501 - DNA, 631 bp, Homo sapiens
ggggcctatttttagtgttcttaatgtaaaagaaattccaacctagaattttgtaaatcactaaacaaagcttcataagcaaagaagaaatcaaatattttccagacaatcaattgctaaaggaatttgttaccactagaccagccttacaagatatctgtaagggagttctaaacatggaaacaaaagaacagtatctgctaccaaaaaaacacacctaagtacatagctcatagaacctgtcaagcaactacataattgagagtacaaagaaaayagctaccaacaccatgacaaaatcaaaacctcacatatcaatattaagcttgaatgtaaaacaactcagccatctgctgtcttcaagagactcttctcacatataatgacaccaaaaggctcaaaggaaaggaatggaggaagatctatcatgcaaatggaagacatagaagagcaggcatagctgctgtcatatcagataaaacagactttaaacgaacaatggtagaaaggacaaagaagagcattgcataatgttaaagggttcaattaaacaggaagacttaactatgctaaatataggtgcacccaacatgggagaaccaagattcattaaaaagtacttctagtctta

SEQ ID NO: 861502 - DNA, 599 bp, Homo sapiens
caagaaacacagagaaactgcattagatattttacaagatgaccatctccaaggatcataatcatgattctttccaaagtcaacacaaaagaataagcttaaaggcagctagaaattatggacaaatcacttacaaaagaaacccatctagctaagagaagccttctcggcagaaaacttacaaaccaggagagggtgggggcctatttttagtgttcttaatgtaaaagaaattccaacctagaattttgtaaatcactaaacaaagcttcataagcaaagaagaaatcaaatattttccagacaatcaattgctaaaggaatttgttaccactagaccagccttacaagatatctgtaagggagttctaaacatggaaacaaaagaacagtatctgctaccaaaaaaacacacctaagtacatagctcatagaacctgtcaagcaactacataattgagagtacaaagaaaacagctaccaacaccatgacaaaatcaaaacctcacatatcaatattaagcttgaatgtaaaacaactcagccatctgctgtcttcaagagactcttctcacatrtaatgacaccaaaaggctcaa

SEQ ID NO: 861503 - DNA, 631 bp, Homo sapiens
ggggcctatttttagtgttcttaatgtaaaagaaattccaacctagaattttgtaaatcactaaacaaagcttcataagcaaagaagaaatcaaatattttccagacaatcaattgctaaaggaatttgttaccactagaccagccttacaagatatctgtaagggagttctaaacatggaaacaaaagaacagtatctgctaccaaaaaaacacacctaagtacatagctcatagaacctgtcaagcaactacataattgagagtacaaagaaaacagctaccaacaccatgacaaaatcaaaacctcacatatcaatattaagcttgaatgtaaaacaactcagccatctgctgtcttcaagagactcttctcacatataatgacaccaaaaggctcaaaggaaaggaatggaggaagatctatcatgcaaatggaagacatagargagcaggcatagctgctgtcatatcagataaaacagactttaaacgaacaatggtagaaaggacaaagaagagcattgcataatgttaaagggttcaattaaacaggaagacttaactatgctaaatataggtgcacccaacatgggagaaccaagattcattaaaaagtacttctagtctta

SEQ ID NO: 861504 - DNA, 652 bp, Homo sapiens
agtttatagattcaatgcgatccccatcaagctaccaatgactttcttcacgaattggaaaaaaactactttaaagttcatatggaacctaaaaagagcccgcattgccaactcaatcctaagccaaaagaacaaagctggaggcatcayactacctgacttcaaactatactacaaggctacagtatccaaaacagcatggtactggtaccaaaacagagatatagaccaatggaacagaacagaaccctcagaaataatgccgtacatctacaatcatctgatctttgacaaacctgagaaaaacaagcaatggggaaaggattccctatttaataaatggtgctgggaaaactggctagccatacgtagaaagctgaaactggatcccttccttacaccttacacaaaaattaattcaagatggattaaagacttacatgttagacctaaaaccataaaaaccgtagaagaaaacctaggcattaccattcaggacataggcatgggcaagcacttcttgtctaaaacaccaaaagcaatggcaacaaaagccaaaattgcaaatgggatctaattaaagtaaagagcttctgcacagcaaaagaaaccaccatcagagtgaacagacaacctacagaatgggagaaaa

SEQ ID NO: 861505 - DNA, 652 bp, Homo sapiens
agtttatagattcaatgcgatccccatcaagctaccaatgactttcttcacgaattggaaaaaaactactttaaagttcatatggaacctaaaaagagcccgcattgccaactcaatcctaagccaaaagaacaaagctggaggcatcacactacmtgacttcaaactatactacaaggctacagtatccaaaacagcatggtactggtaccaaaacagagatatagaccaatggaacagaacagaaccctcagaaataatgccgtacatctacaatcatctgatctttgacaaacctgagaaaaacaagcaatggggaaaggattccctatttaataaatggtgctgggaaaactggctagccatacgtagaaagctgaaactggatcccttccttacaccttacacaaaaattaattcaagatggattaaagacttacatgttagacctaaaaccataaaaaccgtagaagaaaacctaggcattaccattcaggacataggcatgggcaagcacttcttgtctaaaacaccaaaagcaatggcaacaaaagccaaaattgcaaatgggatctaattaaagtaaagagcttctgcacagcaaaagaaaccaccatcagagtgaacagacaacctacagaatgggagaaaa

SEQ ID NO: 861506 - DNA, 606 bp, Homo sapiens
aattattaaatagggaattctttccccattgcttatttttgtcaggggttgtcaagatcagatggttgtaggtgtgtggtcttatttctgagwtctctattctgatccattggtctatttgtctattcttgtaccagtaccatgctgttttggttactgtagctttgtagtatagcttgaagttgggtattgatgggtattgaagctgggtatgatgcctccagctttgttcttttgcttaggattgtcttggctattcgggctcttttttggttctgtatgaattttaaaatagttttcttctaattctgtgaagaatgccaatggtagtttcatggaaatagcattgaatgtataaattactttgggcagtatggctgttttcacaatatttgttctttctatccatgagcatggaatgtgttttccattcatttgtgtcctctctgatttctttaagcagtggcatgtagttctccttgaagaggtcctttgcttccctggttagctgtattcctaggtaaacacaatttgaattgataagagggatatcacactgactccacagaaatacaaactaccatcagagaatactataagtacctc

SEQ ID NO: 861507 - DNA, 606 bp, Homo sapiens
aattattaaatagggaattctttccccattgcttatttttgtcaggggttgtcaagatcagatggttgtaggtgtgtggtcttatttctgagttctctrttctgatccattggtctatttgtctattcttgtaccagtaccatgctgttttggttactgtagctttgtagtatagcttgaagttgggtattgatgggtattgaagctgggtatgatgcctccagctttgttcttttgcttaggattgtcttggctattcgggctcttttttggttctgtatgaattttaaaatagttttcttctaattctgtgaagaatgccaatggtagtttcatggaaatagcattgaatgtataaattactttgggcagtatggctgttttcacaatatttgttctttctatccatgagcatggaatgtgttttccattcatttgtgtcctctctgatttctttaagcagtggcatgtagttctccttgaagaggtcctttgcttccctggttagctgtattcctaggtaaacacaatttgaattgataagagggatatcacactgactccacagaaatacaaactaccatcagagaatactataagtacctc

SEQ ID NO: 861508 - DNA, 580 bp, Homo sapiens
agccaatatccttgatgaacattgatgcaaatatcctcaattaaaaattggcaaaccaaatccagcagcatatcaaaaagttgttcatcacagtcaagttggcttcacccctgggatgcaaggttggttcaacatatgcaaatcaataaatgttattcatcacacaaacagaactaaaggcaaaamccacatgtttttctcaatagatgcagaaaaggcctttgataaaacttaacatccctttatgttaaaaactctcaataaactaggtgttgaggaaacatacttcaaaatagtaacagccatatatgacaaacccacagccaatatcataccgaataagcaaaagctggaagcattttccttggaaactggcacaagacaaggatgccctctctcaccatttctattcaacatggtattggaagttctggccaggacaagcaggcaagagaaagaaataaagggtattcaaataggaactgtctctgtttgcagatgacataatcctatatctagaaaatcccattgtttcagccccaaagcttctaaagctgattagcaacttcagcaaagtcac

SEQ ID NO: 861509 - DNA, 607 bp, Homo sapiens
agttttgtagttggtgtctattgaggaactgggccatgtcatcaatgttgtcaaatttcttggcataaagttgtgtccttccttattcttttttcatatatgtagcatctctgttaatagcacatctgtcattactgatattggtgatttgtatcttctcttttcttgatgaatttgactagagttttattaatgttattgattttctcatagaatcatttttggtttcatgatttttaaaatttaattgatttctgctcttatttcctacttactttttacttaattttctcttcttttcttagtttcctaaagtggaaactttcagatttgaaccctttcttattttctaatatggatgtttagtgytacagtttctccactagttattgtgttagtggcatctacaaatattgatgtattatgtctgtatttatatttcattaaaacggtttctaatttttaaatttcttctttaatctatgggttatttagaagttgttatttagtctctaaatatttcaggattttccaaaggtttttcccttatttatttctaatttaattctattgtggtcagaaaacatttgtataacttaaattcttt

SEQ ID NO: 861510 - DNA, 662 bp, Homo sapiens
tctgccactttgttagaaggaccagcagaaaaatattcttaagaatagaaattgcctttattagctgagttgatgaaagaattatatgaggcaattatttcccacatctctgagatcttggccatgaattttaacaataattgcttgcaagtgtattttcttttctattgtatttaacttgagaggaaagatacttctttacctctttgtttccccaataactggtataggtcctgacacatggtaaactctcaataaatgtttttaaatgaattaataattggtaacatrttataattgttcattcaaatatctacgtctttactagactgaatttaaagaatggaataaaatcttattaacctttgtactactactagttcctgcattaactgtttatgtagtaggtactcaatacattgcaatgaatgaaggaatgaaaaaagaaatgagatggactaggaggaactctgcatctttactttagggttgtggatgtaaaattatttttcttccattcctgtcattgatgtgggcaattccacagtattcttatgtactgcctgctgctaaaagagcctcttgatgaaataaatctagaatttagtaagaactcaaggtaatttttagaaatgcaattacttcttcacagggtgagagca

SEQ ID NO: 861511 - DNA, 662 bp, Homo sapiens
tctgccactttgttagaaggaccagcagaaaaatattcttaagaatagaaattgcctttattagctgagttgatgaaagaattatatgaggcaattatttcccacatctctgagatcttggccatgaattttaacaataattgcttgcaagtgtattttcttttctattgtatttaacttgagaggaaagatacttctttacctctttgtttccccaataactggtataggtcctgacacatggtaaactctcaataaatgtttttaaatgaattaataattggtaacatgttataattgttcattcaaatatctacgtctttactagactgaatttaaagaatggaakaaaatcttattaacctttgtactactactagttcctgcattaactgtttatgtagtaggtactcaatacattgcaatgaatgaaggaatgaaaaaagaaatgagatggactaggaggaactctgcatctttactttagggttgtggatgtaaaattatttttcttccattcctgtcattgatgtgggcaattccacagtattcttatgtactgcctgctgctaaaagagcctcttgatgaaataaatctagaatttagtaagaactcaaggtaatttttagaaatgcaattacttcttcacagggtgagagca

SEQ ID NO: 861512 - DNA, 578 bp, Homo sapiens
cttacctgtagtttgtctttattacttttaaatttttcttccagagaaaagtagtaacaggtcaggaaaatcccaggcgaaggagtaagccttctatagttgaacagtttggatattaaggaaaactcaataaaatatttatacctgctttagtgagaacttctgatctggaagaaactagttcttgtattcctgtgagtccctaagccagacctaagtgaggagtcaggccatgtgtccctactgtctggagaggagaagagactcctgcctggctgkcctgaaggcctggggccacccctccacttcctgcagggtagctggggccctgacacacagcacaagttcatgtgtctgacaaggtttgcggtgacttttcaaatcaaagaaggggttatgctctttactaataatatgttctgaatatattgttgcaggataataaaaagtcgctcacagcagcgtaacttccagcttctggtaatcactcatgatgaagattttgtggagcttttaggacgttctgaatatgtggagaaattctacaggattaaaaagaacatcgatcagtgctcaga

SEQ ID NO: 861513 - DNA, 621 bp, Homo sapiens
tctcttcttgtaggtgtggtcatgtaactaagttatcactggtggtttaagagtggaaggaatgtgtataaacttgtactttaattgctttgaatttctgattttccttccccgcaacctggagcatagatatttccttaagctttgaatgtacagaagagtgcaacagtctggatgaacaacaagacagaagggacttgggtccctcaatgatcaggtgaagcacagatgtcccaccaaccaggattgctcaatttggtggtgttacrtgagggagaaataaatttctccctgctttaagccactgtatttgggaagccagtttgttgcaaagctatcctgtaccttaactaatgcatctccttgcctggttctcagcaaacagacacttgggattcctttgtcttctgctgttgtcctatgtgaacttctttcttcatctgtttcactttggtggagcacaaaacagtgtatgggagaaaatatcattgtttttgtttgttcatgtttgaaaatatcttgattcaaccctcctattgggtggatagtttgattaagcatggaattctacttgggaaataatttttcttctaagttttgaagctgttgctcaattttctt

SEQ ID NO: 861514 - DNA, 683 bp, Homo sapiens
gattgcaacaattttctcctattctgtaggttgtttgtttactcttttgattgcttctttttccatgcagaagcttgttagtttaatttgatcccatttgtcaattttgcttttgctacaattgattttggtgtctttgtcatgaaatctttgcccttgcttatgttctgaatagtattgcctagattttcttctagggtttttatagttttggttttacatttcagtctttaatgcawcttgagttgatttttgtacatggtgtaaggaaggggtccagttttaattttcttcatggggctagccatttctcccagcaccatttattaaatagggaatccttttcccattgcttgtttttgtcaggtttgtcaaagatcagatggttgtaggtgtgtggtctgatttctcggttctctattctgttctattggtctatgtgtctgtttttgtgccatctgaaaaaggtctaattatccagcatctattaggaacttaaacagatgtacaagaaaaaagccaaccccattaaaaagtgggcaaagaacatgaacagacacttcttataagaagatatacatgtggccaacaatcatatgaagaaaagcttaccatcactgatcattagagagatgcaaatgaaaaccacagtgagatgccatcttacaccagtcagaatggcc

SEQ ID NO: 861515 - DNA, 655 bp, Homo sapiens
cttggtgatttaggaaagaacagagatttatttcttatagttctggactgggaagtccaatgttgaggagcccatgtctggcaagggccttcttgctgtgtcaacccatggtgaaaggcagaagggcaaaagagagtcaaggaaagggagattaactcatatttttatcaggaatccactcctgctataactaatccattcctattataatggctttaatccattcatggggacagagcctttatgaccaaatcacctgttaaaggtctcacttgtcaacattattgcattaaatttccaacacgtgaactttgagggacacattcaaaccacakgaagcttcatggtatgttattatatggtttatcatttttaaatgtaagaattctcacaattttgcacctagtttgtttttcatattttcctgttataaaaaatagtggtgcaattaacaccttaacatttaatttttatatccctgatttaaagtgtaaaacaattttaaggttcttgatttatatttccaaattttgtcccaggaaatatgtaccaattaacatttttactaggtgtttattctattgcacttccactaaccctggatcttttcacttttaaacattataccaatttgacaaatttagaaatgttatct

SEQ ID NO: 861516 - DNA, 637 bp, Homo sapiens
tgcctgtgccaatgtcctgaatggtattgcctagtttttcttccggagtttttatagttttggattttacatttaattctttaatccattttgagttgatttttgtatatggtgtaaggaaggggtctgattttaattttctgcatatggctcatcacttctccttgcaccatttactaaatgaggaatcctttctccattgcttgtgtgtcaggtttgttgatgatcaggtggttgtaggtgtgtggccttatttctgggttctctgttctgttccattggtctatgtgtctgtttttgggccatgccagtaccgtgctgttttgattactgtagtccagtagtacagtttgaagttgggtagcatgatgcatcatgttaacgtaattcatcacatagacagaactaaagacaaaaaccacrtgattatctcagtagacgcggaaaaggccttcaataaaattcaatgtccttcatggtaaaagctcttaataaactaagtattgaaggaacataccctaaaataataagagccatatatgacaaacccatagccaaaatcatactgaatggggaaaagctggaagcattccccttgcaaactggcacaaggcgaggttgccttctctcaccactc

SEQ ID NO: 861517 - DNA, 669 bp, Homo sapiens
cttcctgagatgatgaaaatgttctatactgtgctgtccaattcctgtggccactaaccacatacgcagctcttgaaacgtggttactgcaactaacaaatagaattttttactttcttaatgttcattaaatttcagttgccacaagtggatcgtgaaccggacaacacagatctagacctcactatcattcgtcttattgctgttattggtagaagtttaagyttcccttttcatcaggcaatttttttagtatcatcttcccagggtagaaagatcaattctctgttaaacctggggatgggggaaataaaagaccaatgcctgcccctgaccacacccaggccaatcctctgaaggacaagtacattggcctcttgtttggctgtctgttccacttctctgttcttatttcatttttgtatcatctgagtattcagctaaatccagaatgtgctgctggccttctacgaaaaacatccacatataaggagacaagctgtttgggaaagatagaattggtaaaagggaaaattatttcattcatttatttggtttaattaactgtctcccaggtagaatgtaatatccatgaaacaggacacttttctgtctttttaccactgcatcctcaggacctggaacaaaggcacatacaaagtttaagtg

SEQ ID NO: 861518 - DNA, 669 bp, Homo sapiens
cttcctgagatgatgaaaatgttctatactgtgctgtccaattcctgtggccactaaccacatacgcagctcttgaaacgtggttactgcaactaacaaatagaattttttactttcttaatgttcattaaatttcagttgccacaagtggatcgtgaaccggacaacacagatctagacctcactatcattcgtcttattgctgttattggtagaagtttaagcttcccttttcatcaggcaatttttttagtatcatcttcccagggtagaaagatcaattctctgttaaacctggggatgggggaaataaaagaccaatgcctgcccctgaccacacccaggccaatcctctgaaggacaagtacattggcctcttgtttggctgtctgttccacttctctgttcttatttcatttttgtatcatctgagtattcagctaaatccagaatgtgctgctggccttctacgaaaaacatccacatataaggagacaagctgtttgggaaagatagaattggtaaaagggaraattatttcattcatttatttggtttaattaactgtctcccaggtagaatgtaatatccatgaaacaggacacttttctgtctttttaccactgcatcctcaggacctggaacaaaggcacatacaaagtttaagtg

SEQ ID NO: 861519 - DNA, 628 bp, Homo sapiens
caccctgcgccgcgcccctctgcctcgcaaccacccacggccccagccgggaggcgccgcagccccggaacccacctccgcgctcctggaaggatggatgcggaggaggcgggagagaggcggcggctccggaacgagctgctcccacagcccctccgctcctcgccgtctcgccttcgtccccagcttacccagttctgcgcgttattgctcagtttgactttcttgcacaggctcccggggatctccatgaccgcggagcgcgctgagcagccggggttctctgcgccgggagggtagcaagaggagggcaggccagcgagcggggcggggctggagggcggggcctcctcgcgtcggagcgggcgcgcgctgacttamgcacgcgcccgtgctcgtggcctgggttgcgcggcgcatgcggcgcgcctcggaaatgggtccggggcagaggtctgtggggaagggcgaaacgccgggatagaaccggaggtagaagctgggggcggagcttcagcgctcgcgccggcgcgggcgcgcacggcgctcctccttccagatcccgatgaaggggcggggcctggaatgcagtcgtggaacctcaggtgcctctgcggcaccgagccta

SEQ ID NO: 861520 - DNA, 655 bp, Homo sapiens
gcaagctgaggaacaaggagagccagtctgagtcccaaaactgaacaacttggagtctgatattcaagaccaggaagcatccagcatgggagaaagatgtaggctgggaggctaggcccatcttgcctcttcacgtttttctgcctgctttatattcactggcagctgactagatggtgcccactcgattaagggtagatctgccttccccccagcctactgactcaaatgttaatctccttgggcaacaaccttatagacacacccatgatcaatattgcatccttcaatgcaatcacattgactctcagtattaaccgtcacatcctcaatggctgcaaatatcatgaaaataaagaacaccataactttttgcctcctgatgaaaatcatgaaaaagtcaaatcaaatctggttctaatcaagtcttcaggacaatttataggtttgcagttaatgcagaggaaagaggaagaggtgaaaacaccacaaatgcaattagtcaaacmcaaactctggaaaactacaacattaatgacctgagttttcagtaattcaaagataggaaaaaataaatgaggaaaaactaaagaataaaataagatataaaataaaaatggagcaattaaaatatttgaaacatatttgaacactg

SEQ ID NO: 861521 - DNA, 597 bp, Homo sapiens
aacaaagagtcaggaataaaaatgaattagaagttgtcaagaaaaagactgcaagttagaagacaaatggaccaataccttcagagctctgaaagtattttcagttagaaattggaattgctatatacgctttctcaaggaaatactggaggatatgttctgtggcaggccaattctccctgacaatcacacagacaagcctgcatagcacttcagttacacagactaatttccacagagctgccttaacattgagcaaatagttaagcctagggaaatcagtgcccagacatcagagatagaagtgaaacatatggtcagtaggagccttccatggtcttctccctaacctggagcaaaccaaaataatagagacagtcttacattcccagtgccaggacccatatctgagacaagtcaaggtaacagaggcagctgtttgaayagattcattggagagtctaaggcagctctccagacaagctgtaaaggacataagatagaaataatcactctggtaccacagtaggcaggccttgaaggtactggggcccttttaatcagacttttgcctctgaccttctagttgaaacaaaa

SEQ ID NO: 861522 - DNA, 702 bp, Homo sapiens
tcagtgtcagggaagacaggcagaagagccttatgtacaagcgtttatgttactgcataatcaagaggtcaaaggaaataagctaatggtgcagcactcagacaaggtttgtctcaagtcccagggagagggagaaaaggaattagagactcaacaagtgttaaatgtacttaacccagtaggtggcgacccagagggagccaatgccccgccactggctcagaagggggaagggccttcacccctggaataggaggaggctgcaaaaatagtctctccctcccataatagacaaggcactaattttgactggggagacactgagcctggagcagggcaattttccctccaacaatatcctgtgggagttcattagcaaggagctccggcaggatattattgggcatatagtccttttcyatgtctgatttactgaattggaaaaattccaattcttcctacagggtggatccccagaaaatgaccgaattgtttactgctatctttgctacccatcgccttacatgggctgatgtgcaagccctcctaaacatcatgctcacggcagatgagagaaggctagtgttagaaggctagtgttagaggaggcatagtgccttcatgatgaaagccccaatgatagcccagaccttaaagaggcaactccctgaactgacctaaattgggatcctaatgaggcag

SEQ ID NO: 861523 - DNA, 702 bp, Homo sapiens
tcagtgtcagggaagacaggcagaagagccttatgtacaagcgtttatgttactgcataatcaagaggtcaaaggaaataagctaatggtgcagcactcagacaaggtttgtctcaagtcccagggagagggagaaaaggaattagagactcaacaagtgttaaatgtacttaacccagtaggtggcgacccagagggagccaatgccccgccactggctcagaagggggaagggccttcacccctggaataggaggaggctgcaaaaatagtctctccctcccataatagacaaggcactaattttgactggggagacactgagcctggagcagggcaattttccctccaacaatatcctgtgggagttcattagcaaggagctccggcaggatattattgggcatatagtccttttctatgtctgatttactgaattggaaaaattccaattcttcctacagggtggatccccagaaaatgaccgaattgtttactgctatctttgctacccatcgccttacatgggctgatgtgcaagcyctcctaaacatcatgctcacggcagatgagagaaggctagtgttagaaggctagtgttagaggaggcatagtgccttcatgatgaaagccccaatgatagcccagaccttaaagaggcaactccctgaactgacctaaattgggatcctaatgaggcag

SEQ ID NO: 861524 - DNA, 649 bp, Homo sapiens
gaatccactagctcaagaagagagagtgaggacaggcacagtggctcacatctgtaattccagcactttgggaggccaaggtgggagggttgcttgaggccaggagttcaagaccaatatagcaagacctcgagctctacaaaaaataaaattagctggatgtggtggcatatgcctatggtcccagctactcaggaggctgargcaggaagatcactacaggttgaagctgtggtgagccatgatcatgccactgccttccaacctgagagagagagggagacctgaccttctctggggggaaaagaagaagtagagagagagggagtgaattaatccttcctccatctttttgttttactgagctctgtaaggattagacaatgcccacccacatgggtgaaggtgtgtcttctttttcccagtccaccaattcaaatgctaatctcttccagaaacttcctcacagacacactgagaaataatgtcttaccagctatgtgggcatctcttagcctggtcaagttgacagtaaaattaaccatgacaggagtaaacctagataaagcaaaaactacagaaaaacatatgcaaatatgttttacctctcatcaaatcctaaaaaaatgatattttatctaaagagaaa

SEQ ID NO: 861525 - DNA, 648 bp, Homo sapiens
gctacacgtctacaaccaatggatctttgatgaagttgataataacaactggtctggtgtctatgagaaactcaataaacattttttccttcctgtagagaatagaaaatttaatgaatacctattaaaagtgaataagtatatattaacaataaaagttggagaaagaaggcaatattttttcttatgggctgaatttaacttaataaggttaaatcagatttcagaatttctgtcaaatgaatcgataatttcacaggaaattatacttttccggatatcttacaattcaagtttgtgataacattaaatattgtgcaggagaatttaaggaaagaaccaatgccaaaaatgatctaaaattttccttgaagaggcagacatgtatgttttgtgaatcttcttatattgtaaataacacttaaaaaaatgaaacrtgtatctaatgtgtgacactgactctttttcctccattgaagcaagtacacagaggaataaatgtaattaaaatgttttcttctgtatttgtatgggttattctttctacaattcagaggcagcatttcatcacttggagaaggaagccttcatcagaataatcacaaacaatacatggtatagagtttgagagctgctattcccatgcac

SEQ ID NO: 861526 - DNA, 600 bp, Homo sapiens
ttgcaatccaataatgtgattaacataagatggcttttcatttacttaagtcttctttatttcaattatttcacaccaaagtgtgcgtgtgtgtgtatgtgtattagttttcagtgtcttatacttcttttgttaatttctaaatttatttttaattcaagttttattatttttcattgcaytgctaatgagatttttttaaaatatcacttttagattgtttattgctattgtgtgggatataatttatttttagatattgattttgtatcctgcaaccttgctgaactcatttattaatcgtatagtttttaaagtagactctgttttttatgcctaagattatgtcatctggaatattgatagctttctttccttctttccaatctaggtgttttaaatttatttttctgccctaattgatctgcctagcgcttctcacgacaatattaaacagaactgtgaagaacatagatctatatatttttcctgatcctaatgagaaagtattttgcatttcatggttaggtagaatgttagctgtagggttttcatacatgtcctttataaggttgaggaaatctctttatagttcaagtt

SEQ ID NO: 861527 - DNA, 659 bp, Homo sapiens
tcatttattaatcgtatagtttttaaagtagactctgttttttatgcctaagattatgtcatctggaatattgatagctttctttccttctttccaatctaggtgttttaaatttatttttctgccctaattgatctgcctagcgcttctcacgacaatattaaacagaactgtgaagaacatagatctatatatttttcctgatcctaatgagaaagtattttgcatttcatggttaggtagaatgttagctgtagggttttcatacatgtcctttataaggttgaggaaatctctttatagttcaagttcatttagtgttttggatttttttttttttttgacactacgtcgcacactgtcacccaggstggaatgcagtggcacaatcatagctcactgtaacctgaaattcctgggtgctgaagttatcctattgcctcagcatcccagatagctaggactagaagagcataccaccatatctagctagtttttaaaattttttgcagagaagaggtctcaccatgttgccaggctggtctcaaattcctggactcaagtgatcctcccactttggcctcccaaagcactgggattaatgacatgcataagccactacaccaagctagatttttttttcaaattctttttctaca

SEQ ID NO: 861528 - DNA, 563 bp, Homo sapiens
acctatcttaactccttagctatctcacaagctacattattgtgctaaagtagaagtttctatttaaaaagtcagggccaggcgcggtggccacgcctgtaatcccagcactttgggaggccgaggtgggcggatcacgaggtcaggagatcgagaccatcccggctaaaacggtgaaaccccgtctctactaaaaatacaaaaaattagccgggcgtagtggcgggcgcctgtagtcccagctacttgggaggctgaggcaggagaatggcgtgaacccgggaggcggagcttgcagtgagccgagatcccgccactgcactccagcctgggcgacagagcgagactccatctcaaaaaaaaaaaaaaaaaaaaaaaaagtcagactgggcctgrcgcggtggctcacacctgtaatcccagcacttgggtggccaaggcaggtggatcacttgaggccaggagttcaaaaccagcctggccaacatggtgaaactctctccctactaaaaacagaaaaattagctgagtgtggtggcacacgcctgtaatcccagcgactc

SEQ ID NO: 861529 - DNA, 698 bp, Homo sapiens
cacttcatctggaaagtctttcctgcactctaccatacatattctggaaatatttatttaatattttctcccagagggctgtggatagtgaatttctaagcatttataacagtgttatatttacctgtttacttggctctttatagtacatgacgctcaatcaaactgtataattaacaatgtattacctcttgtatatctagcacattctatagtggctggagtatagttgatactaaaaaaaaattcttagtgaaataatgtgtaaatgagtaactgatgggttccaggaagtgttttttatataagaataatttttcttccgcctcacaggaggagattgtggcagtattcccttctcttccrttttctgaaagattttgaatagatttgatactaattcttccttatatttttggtataattcaacagtggagcaagctgggcatgtggttttcttacttggaagcttttaaaccttgtattcaattttattttattttattgatatagggctatgcctatttcttcttgagtgatatttgtgtcttttaaggaatttgtctatttcatttgtcttaaaatttattggcatgaacttattaataagattatcaaatattttacagcattgtcaaattaaaatttatgtatcacacaatttggtcatttttattttatttataaatgtatacaac

SEQ ID NO: 861530 - DNA, 601 bp, Homo sapiens
tatttagctatttattacaatgattgttcttattattctttttaggtatacttccctgggtcatgtgggggtcaagaagcatttttcagggctctctgtcactcaaggttgtgaaaagtagtacacgtttgttgtttagaaggctaaaatccacatcttaatattttggcagtaatattttaattttgttgtggtgaaagtatcctgagagcttccagtgaaacctgtttgatccctaaatctacacacacacatgcacacacacgcaaacatcttgttggttctatttctctggagaatcgttactaatatattagatttcttttgttttttgaattcatgggttttcaatgctaaacttggttgattcatgaagtagaattraaggatgagataagtcttttcttgtttttccaatttgctctgttaagtcatccagactacactagtgagattttgcatgcaaatctctaaacttttaattcaaaggtctaacatctcccctctataaataaattattgattggctattagaaatcatcaatcaaaaatataagtgtcttgtattatgtcttaatcaaatatattaaatttgatacta

SEQ ID NO: 861531 - DNA, 562 bp, Homo sapiens
ttgtcatagtgctttttagagtgcttacactgtgcattttaacttaccagaatctactttagatttatactaaattccactgaaatatagaaatattactcctatatagctctatttatatttttcattttgtgctattattgttatacatatatctatatcttacatgccacagaatgtacttatataaattttcgataataataataagtttatcaaaagtwaaaaagccttttaaagaagtgtagcaaagaaaagattgtatttatagtgtttactatatttccattcttgtttactatttctgttacttttcatatggtgctagagattgaagttgtcatttcttgtccagtataacttaatatagctttgtttgcacctgcctccattatgcttttattgccaaatatgttatatcacattagtgtatataatagaacagagcgttctttctctttccctgtatatgtatatagaggtgattttgagtcaattaagagaagaaaaacaaacatgcaattacattgtttataattacctacataattatctttaccac

SEQ ID NO: 861532 - DNA, 562 bp, Homo sapiens
ttgtcatagtgctttttagagtgcttacactgtgcattttaacttaccagaatctactttagatttatactaaattccactgaaatatagaaatattactcctatatagctctatttatatttttcattttgtgctattattgttatacatatatctatatcttacatgccacagaatgtacttatataaattttcgataataataataagtttatcaaaagttaaaaagccttttaaagaagtgtagcaaagaaaagattgtatttatagtgtttactatatttccattcttgtttacyatttctgttacttttcatatggtgctagagattgaagttgtcatttcttgtccagtataacttaatatagctttgtttgcacctgcctccattatgcttttattgccaaatatgttatatcacattagtgtatataatagaacagagcgttctttctctttccctgtatatgtatatagaggtgattttgagtcaattaagagaagaaaaacaaacatgcaattacattgtttataattacctacataattatctttaccac

SEQ ID NO: 861533 - DNA, 534 bp, Homo sapiens
gtgcaccacatcccttgggcactgggactggcctgcattttgagttgggctccagcttcactggggatctgaactgctccccagatgctgggaaagtactcaggtggagcaaagcactgagactgggcagcagaagctgtgctgtgcacatgctactgcaggkcagcaaggaaggggccctcagaggtttgagtgggccctccagaacagacatgccctagtcctgcagggaagctggccctgccttctcctggcccaaaagtcagctggggctaatccttctcaaagggagatggagaaccctgggggatgggcacctataaccacacttacgcaagcttctctgagcacaaaagcccatgggctccacgccagctgaaaccctgtctctccctactctctgggaagatccctctgcctgctcaaaagtccgtgggagatgtgaggtgccctatagatagtatcccagagatccatggcaagagcaggctgtgcctcagtagtttacccacctttttttcctggagccaattt

SEQ ID NO: 861534 - DNA, 534 bp, Homo sapiens
gtgcaccacatcccttgggcactgggactggcctgcattttgagttgggctccagcttcactggggatctgaactgctccccagatgctgggaaagtactcaggtggagcaaagcactgagactgggcagcagaagctgtgctgtgcacatgctactgcagggyagcaaggaaggggccctcagaggtttgagtgggccctccagaacagacatgccctagtcctgcagggaagctggccctgccttctcctggcccaaaagtcagctggggctaatccttctcaaagggagatggagaaccctgggggatgggcacctataaccacacttacgcaagcttctctgagcacaaaagcccatgggctccacgccagctgaaaccctgtctctccctactctctgggaagatccctctgcctgctcaaaagtccgtgggagatgtgaggtgccctatagatagtatcccagagatccatggcaagagcaggctgtgcctcagtagtttacccacctttttttcctggagccaattt

SEQ ID NO: 861535 - DNA, 631 bp, Homo sapiens
gtgagactctgacacttgctggcttcaaattagactcagtaccttcctagctaaggaggctatagggagactccttctgcttgagaaaggcagagggaaaagcaaagggaactctgtctttcaccttaggtaccagctcagccataggagggcagagcaccaaccaggcacttggggtatgcaatcctaggacttggctcttgaataacatttttcaacctgcaccccactgccctgaagggtgagtcccaagccatgcagcattcactacaagctgactgaagagcccttaggccttagggaacatgggcagtagtccagcaatacttcccacggacctgtggtagatggccacagggtgaatctgctctgcctgtggaaaggggaggaaagagtgagaaggactgcgtcttgtgatttgagtgccagatcagctgcrgtacaatcaaatgccatgtagatttctaaggtttttgactctagtccttggctcccagacggcatgtcttgtcccacctggggcctgggggaacttgctgccctgaaaagaagggcacaagcctggctagcttcaccacctgttgattgtagagacccagggccttgagcaaacataggcagtagccagaca

SEQ ID NO: 861536 - DNA, 515 bp, Homo sapiens
atggggaaaaactgaaagcctttcttctaatatctggaacatgacaaggatgcccacttttaccactgttattcaacatagtactggaaatcctagctagataaatctgacaagagaaagaaataaacggcatccaaattggaaagcagtaagtcaaattatctttgtttgcagattatatgatgttatatttggaaaacactaaaaactccatcaaaaaactgttagaactgataaattcagtaaacktgcaagatcaccaacatttctatatggctaacaacaaacacactgaaaaagaattcaagaaagtaattccatttacaagagtacaaataaaataaagcatctaggaatccaccaaaaaagaaagatatctacaataaaaagctataaaatattgatgcaagaaatcaaagagaacactaataatggaaagatattctagataataggttggaagaatgcatattattaaaatatccatactaaccaaagcaagctacagatttatt

SEQ ID NO: 861537 - DNA, 554 bp, Homo sapiens
tatgttttaccgcctagattctcctcttaggaccttgccctaggacctgggagtattggctattaaaggctcacaactgaatcctttttcaggaactaccttcagaggccaaatgaagctgcaccaaccaatgttacatcctttctcagaggaggcacccatctaataaagtaatctatcccagctccacagctcccaaggcactagatgaggcccctgttgtaactacactgacgtttaacttctccctatgcccaaccgtgtttgtttttcttttttgaacttcctcgctggcgttgattatactggcattattgaataaaatttctgcatgtatrtctgtctcaaaaagggaccattctaaataaactatatacttgaatatattcaaagataaagctaaaagtttgtgaccacacatagtctgataccagctctgtcttttcccttaactaagtctgtgagaagaaaattttaacataaataaataaaatttatcattggtttactatgtgctagacgctattttgaaatttaacataaaaaattcttta

SEQ ID NO: 861538 - DNA, 681 bp, Homo sapiens
tgcaagaatggtttaacatacacaaatcaataaacgtaattcaccacataaacagatctaaagacaaaaaccatgtgattatctcaatagacacagaaaaagccttcaataaaattcaacatcctttcatgttaaaaactctcaataaactaggtattgaaggaacctaccctaaaataataggagctatttatgaaaaatccactgccaatatcatactgaatgggcaaaagctgaaaatattcccattgaaaaccagcacaagacaaggatgccctctctcaccactcctattcaacaaattactggaagttctggacaggacaatcaggcaagagaaagaaataaagagtattaagtaggaagagaggaagtcaaacggtctctgtttgcaggtgacatgatcctttayctagaaaaccccatcatttcagcccaaaaactttttaagctgacaggaaacttcagcaaaatctgaggatacaaaaccaatgcacaaaagtcacaagcattcctatacaccaacaacaggaaagcagagagccaaagcatgaatgaactcccattcacaatcgctacaaagagaataaaatacctaggcatacagctaacaagtgaagtgaaggacctcttcaaggagaactagaaaccactgctcaaggaaatcagacaggacacaaa

SEQ ID NO: 861539 - DNA, 609 bp, Homo sapiens
gtgcttaacatttggacagacaaatttactaaaatatttgtgtttctccttcatacattttctttttccatttccctggattagttttttgccttgggtacatttgcaggccataaagcagaagctggctgaatcaatgttttactaccttttggggaaaaattaattgaagagaatgtaccatgtattccagagggaaggggagtgactctctggacgggagagataagattcccaaaaagtggagagagataagaatatctgagttttaactaaaacctgatcaagtggcaagatctcagagagaaatgcctgtgttgtatactgatatggtttgtcagtgtccccacccaaatctcatcttgaattgtagytcccacaattcccacatgtcacgggggggacccagtgggaggtaactgaatcatgggagcaggtctttctcatgctattctcgtgatagtgaacaagtctcatgagagctgatggttttaaaaagaggagttcccctgcacaagatctctctctttgcctgctgccatccacatagatgttacttgctcctccatgccttctgccatgattgtgaggcctcctcagctatgtgga

SEQ ID NO: 861540 - DNA, 630 bp, Homo sapiens
ccccagacaagaactcactgacaatgggaaggtagcagttaatgagttcaatcatcttctctaagtgactgtaagtgaagctgttctactttatacctatcttggatgtgcttttgggcaacaaaaggaaattgctcagaatgtaaaaacagaagttagttttatgaaaatagccgcaagttgatagaattgaagattttaagaaaaactagaggaaagtagaatgtagtataaaaaacagagaacattaatgacaatcatggtttcaataggtttgaaagataacagaaaakatgtgctaatatagtggtgacctgtgagtggataatcagactatcagcaaattgataaagctgtacacaaaaaccagaaggtctaagagcatgaagacaaccctctccacagagcctggttgtttctgttgtggcgctgttggtgttgtttgtatccagtacagtgcacaagcataactcctgacataatcaaagcacagttttgttattgtgtcctgtgtctctttaaaatatattcagtggtggtaccaagaaattgtcagaactaataaacaagttcagtaaagtggttggttacaaaatcaacacaccaaaatcagttgcatttctatgtatt

SEQ ID NO: 861541 - DNA, 589 bp, Homo sapiens
gtggtggctcaggcctgtaattccagcactttggtaggccgaggcagatggatcacctgaggccaagagttcaagaccagcttggccaacatggtgaaaccccatctctaccaaaaatacaaaaaaaaaaaaaaaaaaagctggtcatggctaatttttcaggaggcagaggttgcagtgagctgagatggcaccactacactccagcctgggcgacagagcaagactccatctcaaaaaacaaaagcaaacaaacaaaaaaactcttttctttgctctctccttttataggcatcaggcccrcagcatggtcccctgcctactcttgttccctccaactgatcctttacaatcatttctcccaatagaggtctttcatgtctaatcctttcctggtatctgcttcttggaaaaccaaagctaatacatgcttattaaggaaatgaaaaaaaaatgtaatctatcctattaacaaagtaaagggaggaaatcatgtaatttcacaagatgtagaaaattatttcataaaattccaaatcaactcatggtaaaagaaaaaaaacaagctctttgaaaactaagaataaag

SEQ ID NO: 861542 - DNA, 507 bp, Homo sapiens
cctctgacatagtctaaccaaatgagaaggaaccagacaaacaattctggtaatatgacaaaacaaggttttttatcacccccaaaagatcacactagctcaccagcaatggatccaaaccaagacaaaatctctgaattgccagaaaaagaattcagaaggtcgattattaagccaatcaaggagccaccagagaaaggtgaagtccagcttaaggaaatcaaaaaaatgatacaagatattaatggaaaaatctccagtgaaatagcataaataaaaaacaaccacaacttctggaaatcaaggacacacttagagaaatgtaaaatgcactgcaaagtctcarcaacagaattgaactagtagaagaaacagcttcagagctcaaacacaaggctttcaaattaaaccaatctgacagacaaagaaaaaagaattaaaaaaaaatgaacagagactccaagaagtctgggatcatgttaaaggactaaacctacaaataattgg

SEQ ID NO: 861543 - DNA, 690 bp, Homo sapiens
aacttccctatgttctaatttcctcatcggcaaaaaaaaaaaaaaaaaaaaaaaaaaaaagaaaaggaaaaaagactaataataccttccttagggtaatagtttacctaaatagtctggtatattagtggctatccattagacaatagtaattactattctttttagtatattatatgctacttagctctgctgtgatctacagagacacatgaaataggtgggaaaactgagacctggagatgttgtataatttgctaaaaacccagtggctaattaatggcaggtttggactaraacactgtacttaattaaacaaatgtatctgtagattattcatgagataatcatactagtcagtatttcttggtgctatataaataaagattggttcttttttgatatttatataagtctcctaaattattcttacaaaaattgcagggaaaacttttgaccttttaggtaaaccatgattgaagtggataggacctgggcttaaaagaccatggggatattaaaaaatatctttacagttttaataccagatgtttacaaaaagaagtagcttaattatgtgactccttttcaattttaaatagcctattgcagtaaaatttttaatatttacctattttaagatttttaaaacagattaatagagttgggcagccatcaccacaatccagt

SEQ ID NO: 861544 - DNA, 630 bp, Homo sapiens
ctaggaattaacaggattttagccaatagtgagcaagatatacaatacatttcacatagaaagtataaatctggctgcaatcgtactgtaataagtactgcaaaagaaaatttgaaagacaatactctacctcgcattgaaatgaatgcccactgtcatcagcagcactgtttactgtatgagtagctagctgtggacagttgtttggctaagtgaagcaccttcgtcacttgtctggtaggacacagaatgacacagcagttctacaagttatcaagtgttgatgagcaatttattttctctttaatacacagtctcaaastatggacttcaaggaagactggaagagaaaatgacttcttttttaactggttactttgtcttctgcaaaaagactatcagtaaagcaacaaagataggaaagttgaacaagtaagaaaggctggaaagaccatataggccaagcttgtccaacccatgtccctgcaggctgcatgtggcccaggatggctttgaatgtagtccaacacaaattcgtaaactttcttaaaacattatgagtctttttgcaatttttttttctcattggctatcattaatgttaatgtgtggtccaagacaattcttcca

SEQ ID NO: 861545 - DNA, 670 bp, Homo sapiens
aagaaaaacaatactaagagggaattttatacctataagtgcttacatcaaaaaaggtagaaaaacattaaataaacaacttaatgatgcaccttgaaatctaggcggggcatgatttctcatgcctgtaatcccagcacaatgaaagggatatatatatatatatatatgtttattaagcattaatttacatgatcacaaggtcccacaacaggaggtctgcaggttgaggagcaaggagagccagtccaagttccaaaactgaagaacttggagccttgtgtttgagggcaggcaacatgcagcatgggagaaagatgtcggctaggaggctaggccagtctctcttttcacatttttatgcctgcttatattctagctgtgcttgcagctgattagatggcacccactcagattaagggtggatatgcctttcccagcccactgacttaaatgttaatmtcctttggcaacaccttcacagacacacttagaatcaacacttgatacccttcaatccaatcaagttgacactcagtattaaccatcacaagttctgagcttttctttgctgtgagactttttattatggctttgacttcattacttgttattgatttgttcagattttgaatttcttaatggttcaatcttggtaggttgtatatgt

SEQ ID NO: 861546 - DNA, 667 bp, Homo sapiens
ttctttccagacttctaaaccagaataccatcacaagctctctctgcttttattttttcctcaatttatttgagatttctatcatcttactctttctctgatacttaggtttataggaactaaagcactaggtcctttctcattgacttcagcagtgtttttactgtagcctacacactacatagttattttgctacttccttaacaacccttaaagtgtttatctccttcctgtatttttgactattttcgaccctcttttctatgccatctctatcttcttcctaacaaaataaatgtgattgaactaatgggtagagagccttaggataagtaaggcaatagaaatattgtcaagaaataaaaggcctagacaacaaaattcttgtattaggtatscaaatagctacttgcttggaagtggaagtactcctatgagagtacgtattctttgcaagaatgcagagatttataatggtgaggggtgagaatgcaaaggatcaaatttgggtaagtggatagttggatgtcaagaagttattagtgtagtatgtaaagttgtctgaaacttctgggaacagaggcaatgcatgacattaatgtaaggagacaagagaactttcattactccagccaaccaaaaggctgagattaaccagagcaagaa

SEQ ID NO: 861547 - DNA, 654 bp, Homo sapiens
tttctaggtcatgtgacctgtgagaatttgaaacccacactcctaatactcaggcgatatgtatgtgtatattaaagccttccactaaaatgcaggctgagctagtcagttttctttgctatttacttttgtggggcagacaattttctggtccaccctttcatgtaaaaatcgttggcttttgtggaaatctttattccaactcctctcattacatgggttcaatgtcatgtgttcatgtccatgtgtgtctttatgacctaaagctctgaattgtagggactggcaaactccctttccgtagttagcagctttagcaccttctgttagatgtagatttargctttcatttcatatttctttcatgtgaatattctttattttcttgacagcttagacagattagaagaattacatatatgtatatatatatacacacacacatacacacatatttgtcttttacatatgatacataattatatattattttaaatatataatatttgtgtgtgtgtatctttttttcagccaattttgttttgtatcagatttttcatacacagggagatttcaggatatctggtcaactatatttccagaaatgcaagtactcctttcatctcaccatcaatttctgttgagctctaacag

SEQ ID NO: 861548 - DNA, 579 bp, Homo sapiens
agttgttagttatgttgagcattttttcatatgtttgttggccattgggtatatcttcttttgagaattgtctattcatatccttagccctctttttgatgggattgttttcttcttgctaattcgtttgtccacttcttattagggttgtttgttttcttattgttgaattgtttgagttccttgcaaataagtatgtttacgttgctgtaaaacagatctgaacttttttatcttgcaaatttaaaactctaaatccattaaacaactccctttctctccctcctcccaaacccgataactaccattctgcttttgtctccacagacttgacttagacacatcctataaagtgcagccatactttatatgtattttaytgtttgacttatttcatttagcataatactctcaagattcattcatgtaatagtatgtgaaaaaaatccttcattttaaaaaatgaattttttatgtacagtccccaacttacattttttgacattataatataatggtgcaaaagtgatatacattttatagacactatactttgactatccatatgaccattctgtt

SEQ ID NO: 861549 - DNA, 589 bp, Homo sapiens
aaacttacattaattgcaagactgtcattctctgaattatgaatggtagatacaaatataataatctaatcactaccttaaattgcatataatctaacaaagagacaaaaataaataattataatacagtggaggttatgacagagataaacacacagtataatggaagcatataagattggtttcaagtccaaatttggggtttagggatcagaaaaagctttctggagaagataayatgtaagttgagcttcaaagaagaggagatagccaggtaataaaaaggtcaggaaggcattctaggcaagagaatagctgtgaaaaagaatcaattattgagagaaagcagagctttacatcagtggtgatcaagcattttacaatttacaggccaattgggtggagtccaagacctacagcccttctttttcttttttctttttctttttaactgttttggtattttattctttttttttttttaactggtattttaggttcagggttagatgtgcaggtttgttatacaggtatacttgtgacttgggagtttggtgtacagattattttgtcacctgggtactaagca

SEQ ID NO: 861550 - DNA, 628 bp, Homo sapiens
gctcattcctctaatgccagctctttgtgaggccaaggcgggcagatcacctgaggtcaggagtttgagaccagcctggcccacatggtgaaaccccgtctctactaaaagtacaaaattagctgcttttggtggcaacccagctactcaggagaggcaggagaattacttgcacccaggcacccaggcagcggagtttgcagtgagccagtgttgagactctgtcaaaaaaaaaaaaagaaaaaagaaaaaagaaaaaaaaatattcygcatggatgaatcttaaatgtattttactaagtgaaagaaaccagaccccaaaggctacacatagcttgagtacatttatatggtgcccatataattaagcaaaaaatagatacatagaaaatagattaattgggaagatcagtactgcattttgactacaaagcgacagcacaagaaaatttttgcggtgatggaactcttctgtaagaaaatgtggtgatagatgtctgagtctatatctttgccaaaaactcataaaagtgtacaccaaaaagagtgagatttaccatacataaatttaagaaatgaaccaaaatgttggagaaactcaagaaggaatgcaaactataaggatgaa

SEQ ID NO: 861551 - DNA, 628 bp, Homo sapiens
gctcattcctctaatgccagctctttgtgaggccaaggcgggcagatcacctgaggtcaggagtttgagaccagcctggcccacatggtgaaaccccgtctctactaaaagtacaaaattagctgcttttggtggcaacccagctactcaggagaggcaggagaattacttgcacccaggcacccaggcagcggagtttgcagtgagccagtgttgagactctgtcaaaaaaaaaaaaagaaaaaagaaaaaagaaaaaaaaatattccgcatggatgaatcttaaatgtattttactaagtgaaagaaaccagaccccaaaggctacacatagcttgagtacatttatatggtgcccatataattaagcaaaaaatagatacatagaaaatagattaattgggaagatcagtactgcattttgactacaaagcgacagcacaagaaaatttttgcggtgatggarctcttctgtaagaaaatgtggtgatagatgtctgagtctatatctttgccaaaaactcataaaagtgtacaccaaaaagagtgagatttaccatacataaatttaagaaatgaaccaaaatgttggagaaactcaagaaggaatgcaaactataaggatgaa

SEQ ID NO: 861552 - DNA, 483 bp, Homo sapiens
agagtaaagaagagattattcctgtgcctaacattgctttctaatgttccattgcacattcaagtatagaaaaccctctttaatgatctggattagaatctaacactgttttacttattaaaacaaagcactttccactgttttaatatatactgaattgtacataaatgcaggtaccctataatttaagataaaatttttattttgttttcctttgaactttgtcaagaattgtaccccattcagaaaaaaagaaatgcatcaaggaaacactgtttattaccaatacagcacacctgtatcagtcagctcttatagctgttgtattcacagtgcttccrtaggcacaagcttccagaattggtttagacatcttttcttccccaacagcctttcctatgacccagccccagttccagccacaagaccagctaatggaatctcagcaggcctcaatcctgctctctgtgaggaggggtatta

SEQ ID NO: 861553 - DNA, 634 bp, Homo sapiens
tgggcgacagagtgagactccgtctcaaaaaaaaaaaaaaaaaaaaaaaaaagtgataagagtctctcagaggcattcagagattttgctacattccaggaaaagactggagtatgcatgtcactactctctccaggaagcctggaattagccattttaatgctctacttcctgagtgtatgagaggctacctctactttaactttttattttgtttcttcactaaaaaaggatgaaaacagaagaacaaatgggagaaaataacccaatagacctatgttatattcactattctccaacagacctttaatgaattagagccaatwagcaaaacaaggatagctaaatgtacattggattttgtcaattttccaatagtcttaaaaattgtagtttttatatatatatttgaacaaactttacataagtacacatatctattgaagataaattagaagaataaacaagacaaaactacctttaatgacaaatatatttcccattaactgaagggatcttgaagcttaagaatttgaaaagagtaagtactattgagaattctgaacaacattaacatcccatcactttgaaaaactgtttaaagagttaaatcaactgacagcttaaataacac

SEQ ID NO: 861554 - DNA, 549 bp, Homo sapiens
acactaaagattttacatgaaagggccgtgattgattgaacaatctaggcggtatgtgacaggggctgcaagcaccagcaatcagagtgaaacagaacagaatgagaagcttcagagtgtccttccatacaatgtctggaatctgtggataatatcggttgctaggtcatgggttgaattttaactatcaggctaaggtcaggcaggcccaggcctggttttgggtctggtgcctggctctgggctgcctgcctttggtttcacttccttgtttcttcttaaagcaggtactgaatataaaacaatataaaacaatatggggggatctctttctctcttctttcatttcccacctttgagactctcactcattttattagtgggaattctyactttcattttcactacttatgtcttcccgtgcaatagattgatagtgattcatataatatacttgtgctgaagcattctggtgaactaaggtaatgatgaagctttttatcatttgaagaagtacaggtagcaaacaagggagtagtaagcaggttc

SEQ ID NO: 861555 - DNA, 619 bp, Homo sapiens
taaaggttgcagcttccactcatgcaggaggggcttcctttccctttttggagccaaacaggatcttcttcatccttttcccaagtagcccaaatgacacatgaccagtacccacatttttttccacacaatcctacagatgtacttattttcggtcatgtatcttttttcccaattaaaagagccacatcctgctcctagcttatttctattaatgacagcacaagcgtcaaattataagattatgcgtttgggcacccctttttcttctgttctggctaatactttacttgtatcatttatgagtcctcactagtcttcagtccttaatctgatttcaaaaactatggaaatgggaggttcagaggggtcatagcacacgtcrggctggtcacttcctggattacagactttgtactgagtgttattatacaaacatgttccttttggaattactaggcattcataataactatagaacaaaaaaaattgtcttaacgtgttgtcctacctcagtgacctgatatatgcactgaaagcagtcctctgtgtgggaagaagcagtggaagcttttaccacaccagtccatgttataaggaaaataagtcccacgactat

SEQ ID NO: 861556 - DNA, 671 bp, Homo sapiens
catttagcagtcatcacaacaataattgatgcagacaacaatcttcaatgaatgttaaaattagacactgaaaatttgttgagaaaggaatattttcagtcttaaaatactcctcctggccaggcgcggtggctcacgcctgtaatcccagcactttgggaggccggggcagacagaccacaaggtcaagagattgagaccatcctggccaacatggtgaaaccccrtctctactaaaaatacaaaaattagctggatgtggtggcgcatgcttgtagtcccagctactcgggaggctgaggcaggagaatcgcgtgaacccaggaggcagagcttgcactgagctgagattgcaccactccactccagcctggcgacagagagagactctgtctcaaagaaaaaaaaaaaaactattcttacttaattttccccccacttactgactacaaaagaaaaaacagtaactttgcagtgatggttgaagccataatcttaatgaaatatcactagtaattggacaagtcaacatatttttaatatctgtgatgaagtacagaatctaaaactaattgtaaagaaatattagataaatctaaactgaagggcattctgtaaactaactggccatgctcttaaagaagtattacagtcacaaaggaaaggtaaga

SEQ ID NO: 861557 - DNA, 467 bp, Homo sapiens
cacacagctctcaaattcttgtcatcagatatactgcttcaggttttcaacctgaatcttggtctgtcaataatctagtgcctaaattataccaagctttttacattgtttatacagtacctcttatctactctggcaagcttgcctttcattccatattccaaccatgcagttttttttttttccactaaatgcttattcccagctccttttaatcactgtgttgctttgaagaatcatgrtgattcatacatgagtttcatgttacaataaatttgtattgaaaagtatgtaatacattaaacattttgactgatggaagtttaaagcaatttgactaaggatgaaaggatgaacttggtattgaggctcttaaaatattggtttaagttttattttatgcttactagatctggaacttagtcacataatttaaattttgtaaactttaatttcctcctttgaaa

SEQ ID NO: 861558 - DNA, 564 bp, Homo sapiens
aggcggtcatgcaattgatgaggagtggctgtaaatacagatgaagcttcactcactggcctgctgttcatctcctgctgtgtggtctggttcctaacagaccatggaacagtactggtttgaggcccagcagttggggacccctgatctattgggtactgtgttcaaaatttgggtgatggggtcaatagaagcccaaacctcagcaccacacaatgtacccaggtagcaaacttgcatatgtacckctgaatctaaaaatttttaagtaaaataaaaaaaataagcttttctgtaataaaggtgatgttttgattgcctgcatctgtctctcagatggttctgaattcagtaggaggaggagtgttacatattgtagatgagttgtagcatccaatgaccttaattaaaattaacctaattaataaaataaatataatccaaattgcttcagtgatttctcccctgtatttgagatgcttaaatgcaacttcctagtaggcatctctacttaaatgcctaccaaacagctcaaatctaatattctcaaaactaaacatttaa

SEQ ID NO: 861559 - DNA, 564 bp, Homo sapiens
aggcggtcatgcaattgatgaggagtggctgtaaatacagatgaagcttcactcactggcctgctgttcatctcctgctgtgtggtctggttcctaacagaccatggaacagtactggtttgaggcccagcagttggggacccctgatctattgggtactgtgttcaaaatttgggtgatggggtcaatagaagcccaaacctcagcaccacacaatgtacccaggtagcaaacttgcatatgtacctctgaatctaaaaatttttaagtaaaataaaaaaawtaagcttttctgtaataaaggtgatgttttgattgcctgcatctgtctctcagatggttctgaattcagtaggaggaggagtgttacatattgtagatgagttgtagcatccaatgaccttaattaaaattaacctaattaataaaataaatataatccaaattgcttcagtgatttctcccctgtatttgagatgcttaaatgcaacttcctagtaggcatctctacttaaatgcctaccaaacagctcaaatctaatattctcaaaactaaacatttaa

SEQ ID NO: 861560 - DNA, 564 bp, Homo sapiens
aggcggtcatgcaattgatgaggagtggctgtaaatacagatgaagcttcactcactggcctgctgttcatctcctgctgtgtggtctggttcctaacagaccatggaacagtactggtttgaggcccagcagttggggacccctgatctattgggtactgtgttcaaaatttgggtgatggggtcaatagaagcccaaacctcagcaccacacaatgtacccaggtagcaaacttgcatatgtacctctgaatctaaaaatttttaagtaaaataaaaaaaataagcttttctgtaataaaggtgatgttttgattgcctgcatctgtctctcagatggttctgaattcagtaggaggaggagtgttacatattgtagatgagttgtagcatccaawgaccttaattaaaattaacctaattaataaaataaatataatccaaattgcttcagtgatttctcccctgtatttgagatgcttaaatgcaacttcctagtaggcatctctacttaaatgcctaccaaacagctcaaatctaatattctcaaaactaaacatttaa

SEQ ID NO: 861561 - DNA, 595 bp, Homo sapiens
cactgcatctccaaaagcatttacgaaaatctaatttctaaatttttcaattcacagtaatttgctgctgggtcatctacagcagcaaatgctccccgatgtaatgaacctatttgtgtgtctctctgctccattggattggaagatcatcaaagacaggaaatgtgtacgtttcattttcacattgccaagctaccactcacctggcaaatagtaatattctataaatgtggacctgatttgaaacatttaaaatacagttaygggagaaaacaagtaatattgagaagaatctagccactgtatcagtttgttttacatactttccttttattactttttaaaattaatttgtgaatcaggagaaagtgctttattaacttttcatgataaaccatgttggatgagcaccagcattctccctgagcagtttggaaatgactggtcaaagacagaaatagaatctgggtttgatgtcctccctcaagatctagtcctcctctggagaaataacagtgaaagtatgcttgttattcttgttgttgttactgctgtttgtttgtttggtttgcttcagtttattttgcacaccatg

SEQ ID NO: 861562 - DNA, 566 bp, Homo sapiens
tttaaaaaaaaaaatcaaaattgctaggtcttcaggacttagtctggcatttcttttccttaaagcactttaaaaaaaagaaacaataccatatttcattgaagacagtaacacctactattcccatttcttatccctctccataaaccagaagggccatattcccactgggcagggtgaccagtttcctatagtctttgttcttgtttttcctaatgaaagctaacagctagacttttctttatgctatccaacagacaaaaagagcatttttgctctagagaaatctaattttacagacaaaaaaactgaggtgtatcaaggccaaatgaatgatattactgatcattcttgtgattattatattaataattataattaawtctgtttagagctaaccacacacgaagtaatatgttaagatgtcacatgtgttaactcattttgttccttaaacaggtctgcaattttggtattatttttcctattttaccagtgaaggaaaaactttaagaaactaatgatcttatgggaaagctagtaagtaataaagcaaggacattaaa

SEQ ID NO: 861563 - DNA, 706 bp, Homo sapiens
ggagtaaagtgaaatcaagctttaatgaactaaggctcagtttcaaaatccaagaaaagaaacagaagtttgcataataataataacaataaattggctatgtaaaccctcataaaaggaaagtcatcccgcctctcatctaccacttacatgtacaattgactaaacttttagttcaaactcatgagctgtttccctatcactttggcrctaaatatttcacctgataaaagatgctgtatcctatatgatgtatttttagtcatatggaagagtttcttccatgtgttactcacaggtaacaatgagtgatgaatattcctggcatgaacaccatgtatcccattgcaagctttttattatgcaagctgtccatactgtgatgtgaaagtttctattagattccccatgaagacgatagaagatgttagcagccccaaacacaaggcaggccacagaaatatggattcaactacaggaattaatagtcaccattgtaaactattcatgcctggagccaacccacaaaactaatgcaataatagagattctaagtcagagctggaaattgctgcccaggtcaggctattccctagagcccagctaggattactttgggtgcattctggaacgccacagctggtctgagttttcattgtctcatataatgaactttcaccatttcctttaataatccccagccccc

SEQ ID NO: 861564 - DNA, 706 bp, Homo sapiens
ggagtaaagtgaaatcaagctttaatgaactaaggctcagtttcaaaatccaagaaaagaaacagaagtttgcataataataataacaataaattggctatgtaaaccctcataaaaggaaagtcatcccgcctctcatctaccacttacatgtacaattgactaaacttttagttcaaactcatgagctgtttccctatcactttggcactaaatatttcacctgataaaagatgctgtatcctatatgatgtatttttagtcatatggaagagtttcttccatgtgttactcacaggtaacaatgagtgatgaatattcctggcatgaacaccatgtatcccattgcaagctttttattmtgcaagctgtccatactgtgatgtgaaagtttctattagattccccatgaagacgatagaagatgttagcagccccaaacacaaggcaggccacagaaatatggattcaactacaggaattaatagtcaccattgtaaactattcatgcctggagccaacccacaaaactaatgcaataatagagattctaagtcagagctggaaattgctgcccaggtcaggctattccctagagcccagctaggattactttgggtgcattctggaacgccacagctggtctgagttttcattgtctcatataatgaactttcaccatttcctttaataatccccagccccc

SEQ ID NO: 861565 - DNA, 706 bp, Homo sapiens
ggagtaaagtgaaatcaagctttaatgaactaaggctcagtttcaaaatccaagaaaagaaacagaagtttgcataataataataacaataaattggctatgtaaaccctcataaaaggaaagtcatcccgcctctcatctaccacttacatgtacaattgactaaacttttagttcaaactcatgagctgtttccctatcactttggcactaaatatttcacctgataaaagatgctgtatcctatatgatgtatttttagtcatatggaagagtttcttccatgtgttactcacaggtaacaatgagtgatgaatattcctggcatgaacaccatgtatcccattgcaagctttttattatgcaagctgtccatactgtgatgtgaaagtttctattarattccccatgaagacgatagaagatgttagcagccccaaacacaaggcaggccacagaaatatggattcaactacaggaattaatagtcaccattgtaaactattcatgcctggagccaacccacaaaactaatgcaataatagagattctaagtcagagctggaaattgctgcccaggtcaggctattccctagagcccagctaggattactttgggtgcattctggaacgccacagctggtctgagttttcattgtctcatataatgaactttcaccatttcctttaataatccccagccccc

SEQ ID NO: 861566 - DNA, 689 bp, Homo sapiens
taacacataggcaaggttttcgagaaaagggaacaagctctctcaccagatgggccaacctatagtactgtttctctgaacataatatgtttcacaatgcagcttatccttgctgcttgaaggaaaagcaaattaatggggaaagaaattagcaatctgagaacaaaatgttttctgagcctacctgtttttttctttttttaaggtaaatgtaaaataaaagtcttacataccttcacatagattccgtttatgtatttaccatttatatccattaaaaaggaatttatattctgcctagttatttttwtctgcgtcgaatcaccaaccatggctccagcagggttttctctttaataattgtcttgccatgacaaaggtttaagttaagagaaagcaagtttttgccaccggctgatggaggaggaaaatgaaataggtatactccatcctccagcctgtttttccatagaaagttaattcttaccaccttctttcctaattcaaactttcttcagtttctttcaaccactttctgcagttcagcagtacagatttatctgttctcttattcacttttaaccacttgaggaagtgagcactgagttaaaatacaacttcttggtctttcttccttaagaacattaaggtttgtaaatccataagctgaaataaaaacaacaaaaatc

SEQ ID NO: 861567 - DNA, 529 bp, Homo sapiens
ctgcccttccaaaaacagaggaggtggggaagataaatcatcatagacctttggagaatgaaagacaaggatgtctgcggaagaggcatgtgaacatacctatggaagtggagacaaactgtgcagatctttgcctcacattcttgcccaccaggaaacatctactggagaggagattttgaaggtcttgatgcacaagctaactcattcagtggaggtaaaccagcttatgttcttagccaccgcagtgctaacacaatgggtgcataaacagaatgaccaggatatgaaggatggaggcaattcatggctctatcatcttgggaccagctgcagcagtggggactgyggcttattccactaatattcccattgaaagggtgtttcggggtgagggggtcttttggttttccatttcttttatttttaagaaattgtggctagccaccaccctgaagcatcaataacagagaggaaaataacatatgaggcataagtgtatctgggtaatgtaatgggtgctctgtag

SEQ ID NO: 861568 - DNA, 648 bp, Homo sapiens
gagttcccccacctgttatcccccttccccatcagggttggtgcttgtgctcatcattgggtattcaagggtgaacctgatggtccagctctgcctacctttgtcccccatttttgccctcagcatggaactcagggccaagcattccacagaccagcccatcacctgaggcaacagagagctcctcccagtaaacaaagaccaaagaccaaagacatacccatctgcttctgcctcttacctgtaagccacacctattgtcctgaaggttgaactgcacaatgcaatacaaaatcaactgacagaagtgctaagcactggtgaataagataagtttactgaaaccttcacaatcgcagtcctgctcccagtcccgcagcaggtagtaagattactcatatgccaagtacattgccactrtaaccggcatttaagaaagtcactacacaaaggctatctgtaatcaaggaacccatacagacctttgtccccttaaaagcacccagagtcaaagccaattgaccatacacaacatacattacagttatatcctcaagcgggggaaatgtcccatccaaacaggagtaaattaaaaaataagtgacagcttctctagccaggaaggcaaactaactagaattgtttcat

SEQ ID NO: 861569 - DNA, 662 bp, Homo sapiens
aaaaataagtgacagcttctctagccaggaaggcaaactaactagaattgtttcatactaacaattctagcagtatgaaaaaaaaaaaaaacaggatattatgacaactcaaaggttcacactaggtctctatcaatagatcttaatcaaaatgaaaattytgaaatgccagataaaaaattcaaaatatagacataaggaagctccatgggatccaagagaaagttagaaaccaatgcaaataaataagaaaaattatttagggtatgagtgaaaaacttaccaaagatatatatatgaaaaaaaaagaacttctggaaataaaaaattcactgagggaaatataaaatatagttgaaatctaaaaatagaccacagaatacagaaaaagcagttcagagctagaagacaggtctttctaattaacctggtcagaaaaaaataaataaaaaagaattttaagaaatgaaaaaagccttcaaaaaataaaggtttatataaaatgtcaaaacctattctctttgtagcaattgtgaatgaaagttcactcatgatttggctctgtttgtctgttattggtgtatgggaatgcttgtgatttttaaacattgattttgtctttgtttgcagatgacatgattgtatatttagaacgtccctta

SEQ ID NO: 861570 - DNA, 602 bp, Homo sapiens
gtatttcagcagagatctagaaaagaaaaagttgagaagaaaaaggaacaattactctcctcaaccagtccttattgagtgtgttctatgggcccagaactgtgtttcaaactctgaggtttggctttatattttttttttcaaagacctgacaatctcattgatgagacaatcacaccaatctaaattatttaataaatatttactaaatgctatatctctggtactattgctagttrtaacaatggggataagaccacaaagtctgtattgatatggaacttaagttttataagggagccataccaaataaacaagtaagcaaaaaataaaataatagcaagatcattgtcctagtttgttcaggctactataaccaagtaccataaactaggtggcttataagcaacaaaaatttatttcttacagttctggaggctgagatgtccaagatcgaggtgccaggagatttgctgtccaatgagggcccctttccttgttcatggatatgccctctcacagtgtcctcacatggtggaagagtctagggtcactctgggacctcttttataagagcagtaatcgattcatgaaggctctgc

SEQ ID NO: 861571 - DNA, 602 bp, Homo sapiens
gtatttcagcagagatctagaaaagaaaaagttgagaagaaaaaggaacaattactctcctcaaccagtccttattgagtgtgttctatgggcccagaactgtgtttcaaactctgaggtttggctttatattttttttttcaaagacctgacaatctcattgatgagacaatcacaccaatctaaattatttaataaatatttactaaatgctatatctctggtactattgctagttgtaacaatggggataagaycacaaagtctgtattgatatggaacttaagttttataagggagccataccaaataaacaagtaagcaaaaaataaaataatagcaagatcattgtcctagtttgttcaggctactataaccaagtaccataaactaggtggcttataagcaacaaaaatttatttcttacagttctggaggctgagatgtccaagatcgaggtgccaggagatttgctgtccaatgagggcccctttccttgttcatggatatgccctctcacagtgtcctcacatggtggaagagtctagggtcactctgggacctcttttataagagcagtaatcgattcatgaaggctctgc

SEQ ID NO: 861572 - DNA, 638 bp, Homo sapiens
cttgtactcagagctttcctgaaagtgtcctttgagtgctctcatcggcttcgttctagtatcctcaaacagcctcagcacactccacaatgctgtacaagcaatagatatgtaataaatgtttgtccgattgaatcaaacgacagttacttgaaaacaagatctagtatgagtttcagtggtgtgaaaacatcaataacaacattaatgggttaaagaatatagragaggttagcacaggtttgtttgctagtggaaatgctctagtagaaagagaaagattgatgataggagagtgatgaaagataagcaaagaagtgggcaaacaattccaggaaatatataactgtccaatgtttcaatttagcagcttcacccaactacttctagtttaaccttatccatggttctggaatgcaatattcctatgatccagagtattagggttccccaaaaagacagaaccaataggacatatacatatgtatgtatgtgtgtgtatatatctatgtatgtatataaagatatatgaaaggacatttattatgggaatcagatcacacaatatagaggctgagatgtccctcaaaaggccattcattcatatgatagctccatttttcatgataatcctttat

SEQ ID NO: 861573 - DNA, 638 bp, Homo sapiens
cttgtactcagagctttcctgaaagtgtcctttgagtgctctcatcggcttcgttctagtatcctcaaacagcctcagcacactccacaatgctgtacaagcaatagatatgtaataaatgtttgtccgattgaatcaaacgacagttacttgaaaacaagatctagtatgagtttcagtggtgtgaaaacatcaataacaacattaatgggttaaagaatataggagaggttagmacaggtttgtttgctagtggaaatgctctagtagaaagagaaagattgatgataggagagtgatgaaagataagcaaagaagtgggcaaacaattccaggaaatatataactgtccaatgtttcaatttagcagcttcacccaactacttctagtttaaccttatccatggttctggaatgcaatattcctatgatccagagtattagggttccccaaaaagacagaaccaataggacatatacatatgtatgtatgtgtgtgtatatatctatgtatgtatataaagatatatgaaaggacatttattatgggaatcagatcacacaatatagaggctgagatgtccctcaaaaggccattcattcatatgatagctccatttttcatgataatcctttat

SEQ ID NO: 861574 - DNA, 638 bp, Homo sapiens
cttgtactcagagctttcctgaaagtgtcctttgagtgctctcatcggcttcgttctagtatcctcaaacagcctcagcacactccacaatgctgtacaagcaatagatatgtaataaatgtttgtccgattgaatcaaacgacagttacttgaaaacaagatctagtatgagtttcagtggtgtgaaaacatcaataacaacattaatgggttaaagaatataggagaggttagcacaggtttgtttgctagtggaaatgctctagtagaaagagaaagattgatgataggagagtgatgaaagataagcaaagaagtgggcaaacaattccaggaaatatataactgtccaatgtttcaatttagcagcttcacccaactacttctagtttaaccttatccatggttctggaatgcaatattcctatgatccagagtattagggttccccaaaaagacagaaccaataggacatatacatatgtatgtrtgtgtgtgtatatatctatgtatgtatataaagatatatgaaaggacatttattatgggaatcagatcacacaatatagaggctgagatgtccctcaaaaggccattcattcatatgatagctccatttttcatgataatcctttat

SEQ ID NO: 861575 - DNA, 652 bp, Homo sapiens
gaggaacatgtcttaactgtttttatcctcccaatgcaatatttagcatcttcatttattaagtaatcaataagagtggagggagtgaataaataaatgaacaaatgcagctcttcccccagaagaaaacaagctgcaacctggtatctgagtttgctatggtcctttcctctgtgatgctaagtctcaaggagagtaatgggacagaaacacacatctgcaagtaactattcatatgaaacctattatctctaagggccattgagaaatttcacaaagccacatagttccttgacttccttcccagataaacatggatgggcatataaccctggtactcagcatctcttctgcctgcttaattggcttgagcatccacatatgcatgaaaatatgggcacactcttgccctctcctcatttcttcagtaatttaaawtcaatcatttggcttgattctccaagacttagcagctgaggaatctttgaatcagttatttcatgcagcttagcattctgcccaaatcatcatactcttttagcaactgtataatgcattcttattatctgtattcactatgctatccaattgatcacaaagaaagaaggtacttattccttctgatactttgtatccttcgattataatatcc

SEQ ID NO: 861576 - DNA, 632 bp, Homo sapiens
tattaaacacgcccatcattgggagagaatgtgctttcctgagcatctatgaacataggactgctgcctctccataaatgcaagggaccctccatgaaagtcttattctatcagagacttggatgatccaaatgtcgccaaatatagaattcagaagctgccctgacttaagggaatctatttcamaagtaaaaatgtatttaattgaacctgctctctgttcttattttccattttatgtgccccttgcttcttctaaaacaatatctgcacggaactttattccaaaagaaattaaatcatctatgccccctgcttacatttcaacaagcctagtttctcttaatggcatttaatgaccataatatgtacttttgaaaaaaaaaaaaagtcaagcacttttattgagcaagaatattgtttattgagtttttaatacgactttgctcaaaactctgtactctgtagtgctaatttaacaaatctccagcactttgttttccaagcttagaataatgcttagaatgtccaatgcacctctgaaaacagttctaacttctggaaaacaatagcggtttctgtggtcattgatgaaaggtaataggatagttagggtgattctagcctagcca

SEQ ID NO: 861577 - DNA, 573 bp, Homo sapiens
gaaagaaggagcaacagatttatacttaactgcagcctacaaagatctatacagccttacattgcttccatttttaataattctaacagttcagtaagacaaatgtgcttgattttaataatcaattgttcattgaatcaaaaaacatttgttgctttttatgtgcaagtgttaggcaactaatttactgaaacttggtttaatagtttggttcaataaattgttttttaaagaagattattaggtttataggcatatatggctttatttaatttaatgaatgcctgcaaaattacaaactctttattcacacttagtagtagctttgtcactattcaacartacaacaagataatctttagctgtggacttaaaaataaaatgcattctggccgggcacagtggctcacacctgtaatcccagctcttttgggaggccaaggcaggtagatacactcaggagttcgaggccaggctagccaacatggtgaaaccctgtctctactaaaaatacaaaagttagctgggcctggtggtgggtgcctgtaatctcagctgctcaggaggctgagg

SEQ ID NO: 861578 - DNA, 619 bp, Homo sapiens
taaagtgatttttttccctagacttcactcgttgtccttccccagcctcatgtgtgtgcacggacacaaacatacatacatacacacatatacatgtgtgtatatatgcacacacatatttgtatacacatgtattttgtatacacagggtaattcacagatgttatctgatttcataaaattgtgtgtgctactttatacatctttatcctttttaaccttttgaatcagaaaggcatatggtcagaggaaaactcagtttctctgataatgactgaattaaatatgcaatcttacagtgtagattagtatacagtatagtatagattagtatatagtatagattagtatatatatagtataggttagtgtatatatagattagtatatcrtatagtatagatagtatatagtacagtatatagtatagtatagattagtatatagaactttgtgccaaaaaataaaagcactttttaaaaatgcagttccagttttgtaaagataacttaagtattgcatccagtattaaactggaagtaattgtgtttaagaaaagagctttaattggcatgtatatgccttgttgctattcacctagactacccacttttggcca

SEQ ID NO: 861579 - DNA, 619 bp, Homo sapiens
taaagtgatttttttccctagacttcactcgttgtccttccccagcctcatgtgtgtgcacggacacaaacatacatacatacacacatatacatgtgtgtatatatgcacacacatatttgtatacacatgtattttgtatacacagggtaattcacagatgttatctgatttcataaaattgtgtgtgctactttatacatctttatcctttttaaccttttgaatcagaaaggcatatggtcagaggaaaactcagtttctctgataatgactgaattaaatatgcaatcttacagtgtagattagtatacagtatagtatagattagtatatagtatagattagtatatatatagtataggttagtgtatatatagattagtatatcatatagtatagatagtatatagtacagtatatagtatagtatagattagtatatagaactttgtgcyaaaaaataaaagcactttttaaaaatgcagttccagttttgtaaagataacttaagtattgcatccagtattaaactggaagtaattgtgtttaagaaaagagctttaattggcatgtatatgccttgttgctattcacctagactacccacttttggcca

SEQ ID NO: 861580 - DNA, 529 bp, Homo sapiens
ttttcactattatgaattttgcttcagtatatatctttgttcacaaatttttgttcatgttttacataaaaaatttatacttgttaaattcttataagtagaattatagtattacagtaaagtgagactttataaaagctttcaggtatataataacagattatacaacaaaatatattactaatccccccatatctgccaccaccaccaccctgaaagtttgcacccaattgtgttttattccatggtggaggaaagtcaccattgtcctgcagtatstgcaccttgctggctatcagcagaatttacatctctgctgactttatagggagaagaggctcttgcattcaagtttgtgtatacttaattagtaaacatgaatatgcctttactagtttacttgtcatttatatttcctcctctgataatagtcagttcatgttctttacctatttttctacttttcaatcatattcacgcaatataaaaaattaaattttgatatatgttttgcaaatgtttttctaag

SEQ ID NO: 861581 - DNA, 627 bp, Homo sapiens
tacttatatatttatttttccatctcagagtactatgagaaagatatatttttattttcttgggtacttatcattatgcaagggctgataactcagtcttggaataaggctgtgtctataccactgtttcccaaccaatgcatcaagacacatcagtactttgaaaataagcaccagggaacagtcttcaatttccatgaatcgcctttgtggattttaagaaatgaagatgrtcaggaaaaggagactgattaatatatacagttaaggatatacaaccccaaactcgataaatatattgggttagaatgtatatgggagagtggtttggggacaaaacccagcaaatttagaggtgtgtctcagactgaaaaaagttgggaaacaatggactctacaaatgccaaaacgattgtctgaaaatctaaaaattcagtcaatcaaattcattttgtttatatgttaataaacaagtaatgtcatgctttaaaaatcaaattggctaaatttttcccactgaatttgtcaattctgttggtagttttgaccttgtgtaaacacagcctaaaccagtatctaatttattaattaagccagccatgcaaattagcaaagacccataaccag

SEQ ID NO: 861582 - DNA, 558 bp, Homo sapiens
catttagatcataggctgctttttctcaattataacataagcatttccaatcataaatatttttgagagcatgattttttaaaaaaatatttcagtggatgaatatgtctgacttgtacccttctttggagttgtttgaattccaggaacagaaacagagtcaagctaggttagggaaagtaggatttatggtagtgatgcagagaaatctcacagagcatcattcaggatgctgaattatgaattattaatattatgtcattaactgtaccttttcttatgtttagyatccctagtttcacttctagctacaattcacttctcattaattttaaattaagttaaaaaatttactctgctatcacaagtacttcaaacaaacaagaacaaaacaaaacaaaaaaaattttgcaaatttctcaaagtccacctcagtaataagtatttgaagccttaagagcagatgcaggtaaaagggtaaaaagatataaggccagggagaaaagagaattgcggtaaagaaaataaaggcaaactgagaaagaagcatgataacat

SEQ ID NO: 861583 - DNA, 717 bp, Homo sapiens
acttatttatgtacatactaacttgaagttcacataaaggaacaaagtatcagtcttcacagtctcacagagacttgaaaacttaaaggaattcccaacaacattcagcaaatttgccgtgcttggcctggtttggaatgttactaagtgctttaccctttccaagtgctttgcaataatttataaatcacttttcaaaaaatcctgagggggagggaaaaagtattatggctattttttttaaaaaaaaatagcaaaatataaaagaaaaaaggaagaaagagaaggaaacttccattctgagkgctcactaccttctttcattttcatttctctggctttagattcccacatggttcatgactttccagaataccagggcatattgacatacaaaccatgaacaaggaaggaaaaatcacaaacttgtctcccattgctcagagtggcacaggttttaaagtggcacacccatcataggtttctctattctgtttcttctccctaaatcgcaggagcttagaggcttgggttcccaggactatggagtctactaatctggcctctttctactctccaaattgagacctctcacctctttttattttctggaaaaatagtactgttctattttgtttgtcctgctataacaaaatacctgagactgagaatttactaggagcaaaaatttatttcttaccattctagaggcttagt

SEQ ID NO: 861584 - DNA, 679 bp, Homo sapiens
tgataccatagaaaaacaaagaatcatgaaattattatgaatgactatatgtcaacaaatttaataacatataaaagtggataaattcctgtacacatacaagctactgggattaaattataaagtagaatatctgaacagatcgataatgagtgaggaaattgaatgagtaataaaaaatctccatcagagaaaactctagaacatgatggcttcactgccaaattccatcaaacttttaaagaactaataccaattctccccaaactattccaaaaaataggagtgaatacttcaaaaytcaatttatgagctcagcattaccctgattccaaaactgaaataggacacaacagaaaaaaaaataccacagactcatatccctgatgaacagagatgcaaaaattctcattaaaaagatcatttactatgatggagtgggattcatcccagggatgcaagttaataagtataatccaccacattaacagaaaaaagacaaagaacatataataattacaatagaaacaaacatttgacaaaattcaatatcccttcatgttaaaaactctcaacaaatatctatctatatctacatatagaaagtatgtattaaatacctcaacaaaattaaggccatatatgccaaacttacagctaatatcataccaaatgagga

SEQ ID NO: 861585 - DNA, 702 bp, Homo sapiens
actttttatatgcagagggacattaattcattttctaataacagaagcaaaaacttagagtgacataaaaaacaacagaaggaagtagaattaaagtaccatgaagatagagactatgactattttgcaaattcccaggactcaggagggagactgaaacacagcaggtactctacaataaatatttttygaaggagtggatgggtggatggacggatgggtggatggagatgggaattaattgaatgaagcccttcaaattgcaattgttaagtctaggacaaaaatctgcatttgagatatggaaatgggaactttaatttattatgacaaaattctgaatcttgctctctggttcacaatttcctcccgtcttaaagaaaatgattggatatttaagatcatttctaggtctaaaataagatactttgataatatgatgacttaacattttgagtcttatgtttagctatgattcatctctgaaccagtaatttggaatgcatttttaataataacaatattaattactaactgacttcatgcattagttagctaaataatcaaaataacatttctacaaagtaagaatcattaggtgcctctttatccaaatgaagaaactgaggtttattcaggtaagtaacttgtccaagagcacagaggtgggcatgatagagttgaggctatggatcaggtctg

SEQ ID NO: 861586 - DNA, 718 bp, Homo sapiens
cttttgctatgcagaagctctttagtttgattagatcccatttgtcacttttggcttttgttaccattgcttttggtgttttagacatgaagtccttgcccatgcctatgtcctgaatggtattgcctaggttttcttccagggtttttatggttttaggtcttatgtttaagtctttaatccaccttgagtaaatttttgtataaggtgtaaggaaggtgtccagtttcagttttctgcatatggctagccagttttcccaaaaccatttattaaatagggagtcctttccccattgcttgtttttgtcaggtttgtcaaagatcagatggtcgtagatgtgtggtgttatttctgaggcctctgatctgttccattggtctatatgtctgtwttgatatcagtaccatgctgctttcattacggtaactttgtagtatagtttgaagtcaggtagtgtgatgcctccagctttgttctttttgcttaagattgtcttggctatatgggcacttctttggtttcatatgaaatttaaagtagttttttctaattctgtgaagaaagtcaatggtagcttgatgaggatagcactgaatctataaactactttggacagtatggccattttcatgaaattgactcttcctatccatgagcatggaatgttctgccatttgtttctgtcctctcttatttccttgagctgtggtttgta

SEQ ID NO: 861587 - DNA, 718 bp, Homo sapiens
cttttgctatgcagaagctctttagtttgattagatcccatttgtcacttttggcttttgttaccattgcttttggtgttttagacatgaagtccttgcccatgcctatgtcctgaatggtattgcctaggttttcttccagggtttttatggttttaggtcttatgtttaagtctttaatccaccttgagtaaatttttgtataaggtgtaaggaaggtgtccagtttcagttttctgcatatggctagccagttttcccaaaaccatttattaaatagggagtcctttccccattgcttgtttttgtcaggtttgtcaaagatcagatggtcgtagatgtgtggtgttatttctgaggcctctgatctgttccattggtctatatgtctgtattgatatcagtaccatgctgctttcattacggtaactttgtagtatagtttgaagtcaggtagtgtgatgyctccagctttgttctttttgcttaagattgtcttggctatatgggcacttctttggtttcatatgaaatttaaagtagttttttctaattctgtgaagaaagtcaatggtagcttgatgaggatagcactgaatctataaactactttggacagtatggccattttcatgaaattgactcttcctatccatgagcatggaatgttctgccatttgtttctgtcctctcttatttccttgagctgtggtttgta

SEQ ID NO: 861588 - DNA, 718 bp, Homo sapiens
cttttgctatgcagaagctctttagtttgattagatcccatttgtcacttttggcttttgttaccattgcttttggtgttttagacatgaagtccttgcccatgcctatgtcctgaatggtattgcctaggttttcttccagggtttttatggttttaggtcttatgtttaagtctttaatccaccttgagtaaatttttgtataaggtgtaaggaaggtgtccagtttcagttttctgcatatggctagccagttttcccaaaaccatttattaaatagggagtcctttccccattgcttgtttttgtcaggtttgtcaaagatcagatggtcgtagatgtgtggtgttatttctgaggcctctgatctgttccattggtctatatgtctgtattgatatcagtaccatgctgctttcattacggtaactttgtagtatagtttgaagtcaggtagtgtgatgcctccagctttgttctttttgcttaagattktcttggctatatgggcacttctttggtttcatatgaaatttaaagtagttttttctaattctgtgaagaaagtcaatggtagcttgatgaggatagcactgaatctataaactactttggacagtatggccattttcatgaaattgactcttcctatccatgagcatggaatgttctgccatttgtttctgtcctctcttatttccttgagctgtggtttgta

SEQ ID NO: 861589 - DNA, 621 bp, Homo sapiens
gtattggtttagtaatcatgcagattcttgtttagattggatatcaaaattaaacttttcaaacttaatgtatattctgtatcataatgtcttttaaaagaagattttgaaaacagccaaaggttacagagctagtcagttgaagggtcagaatttatccctaggcagtctggccgcagagcctgtgcttttaaccagcaaatgagagaggacactgcagggattttgacaagcatgctcaagatggagcagaaccaaaaactagtagtgtctaaaaaaaaagagagagagagagaaagacagacagagagacggtgaggacagagtgtcataaagaaaacagagtgatcagaaatgtgcaacgcaacagaaaaatcaaaatatgaaaagatcttaaattaagccttcatatgaattgaattttactgctggactttgaaaaaccaggtactctagtacctgctaggctgytaatctgggggtagtaatttaaataataaataaaaagaggagaaaagtaaatgtatcaggtatttaatttttgaggttactaaaactggtattactattattattattattttatctgtatcacaaacccccatggagtcttttcatccc

SEQ ID NO: 861590 - DNA, 692 bp, Homo sapiens
atcccatttgtccacttttctttagttgtctgtgcttgtcgggtattactcaagaaatctttgcctagttcaatatcctggagagtttcaccaatgtatttttgtaatagtttcatagtttaaggtcttaaatttaagtctttcattcattttagtttgatttttgtgtatggcaagagatagggttctagtttcattcttctgcatatgaatatccagttttcccagcaccatttattgaagatactgtcctttctccaatgtatggtttggcacctttgtcaaaatgagttcattgtagacatttggattttttttttctggaatctctrttctattctgttgacctgtgtgtctgtttttaggtcagtactatgccgttttggttactatagctctatagtataatttgaagtcaggtaatgtgattatttcaactttgttctttttgcttagcatagctttagctattctgggtgctttgtggttccttatacattttgagattgatttttttttctatttctgtgaacaatagcatctgtatttttatagggattgtactgaatttgtagattgctttggatagtatggacattttaacaatattgattcttccaatccatgaacatggaatatctttttcattttttggtgtccccttcaatttcatacttcaatgttttatagtt

SEQ ID NO: 861591 - DNA, 692 bp, Homo sapiens
atcccatttgtccacttttctttagttgtctgtgcttgtcgggtattactcaagaaatctttgcctagttcaatatcctggagagtttcaccaatgtatttttgtaatagtttcatagtttaaggtcttaaatttaagtctttcattcattttagtttgatttttgtgtatggcaagagatagggttctagtttcattcttctgcatatgaatatccagttttcccagcaccatttattgaagatactgtcctttctccaatgtatggtttggcacctttgtcaaaatgagttcattgtagacatttggattttttttttctggaatctctattctattctgttgacctgtgtgtctgtttttaggtcagtactatgccgttttggttactatagctctatagtataatttgaagtcaggtaaygtgattatttcaactttgttctttttgcttagcatagctttagctattctgggtgctttgtggttccttatacattttgagattgatttttttttctatttctgtgaacaatagcatctgtatttttatagggattgtactgaatttgtagattgctttggatagtatggacattttaacaatattgattcttccaatccatgaacatggaatatctttttcattttttggtgtccccttcaatttcatacttcaatgttttatagtt

SEQ ID NO: 861592 - DNA, 640 bp, Homo sapiens
gttatcaaagaggtagatgtagaaacatagctatcaaaataatgttcaatttcctaatagccctattaccctattaagtgagaacatagatgaaatggcttattatagagagtttaaaagatcctcatggtgagaaaacaaaaccagaaaatctatagttgtcaacagtaatttcaggtgatagatgacttaggtaaatgatgatgagacctgaaaaagtagccttctgtacagatttctattcttagctatctgttagggtacaaatgagaaaatattctgtatatagttcttattgcattttcacttgacaataatgagaaatatatatattaagtgatatatatatgtgtatatatatgtatatatatgtgtatatatatatgtgtgtgtgygtgtgtgtatgtatgtatatatatatatatatatcacttaatctggaaactttctaatggattgttaccagagcaaatttccatactggtttctattataatacatgttgtttgatttttactaggtctgctcagattttttttctccaaacaagcttaaacattcctccttatctcaatagaataaaaatttctacagactaagcaccattttctttctgttctgtaggtgtgactgctgcttc

SEQ ID NO: 861593 - DNA, 657 bp, Homo sapiens
gtgcatgggaatagcagctctcaaactctataccatgtattgtttgtgattattctgatgaaggcttccttctccaagtgatgaaatgctgcctctgaattgtagaaagaataacccatacaaatacagaagaaaacattttaattacatttattcctctgtgtacttgcttcaatggaggaaaaagagtcagtgtcacacattagatacaygtttcatttttttaagtgttatttacaatataagaagattcacaaaacatacatgtctgcctcttcaaggaaaattttagatcatttttggcattggttctttccttaaattctcctgcacaatatttaatgttatcacaaacttgaattgtaagatatccggaaaagtataatttcctgtgaaattatcgattcatttgacagaaattctgaaatctgatttaaccttattaagttaaattcagcccataagaaaaaatattgccttctttctccaacttttattgttaatatatacttattcacttttaataggtattcattaaattttctattctctacaggaaggaaaaaatgtttattgagtttctcatagacaccagaccagttgttattatcaacttcatcaaagatccattggttgtagacgtgtagcattctttct

SEQ ID NO: 861594 - DNA, 670 bp, Homo sapiens
tcttcttttgagaaatgtctgttctcgtcctttgtccactttttaatggggttgcttatttttttcttgtaaatttgttaagttctttatagatgctggatactagacatttgtcagatgcatagattgcaaaaatwttctcccattctgtaggttggctgtttactcttgatagtttcttttgctgtgaagaatctctttagtttaatatgatcccttttgtctatttttgctttcgctgcaattgcttttggaaactttgtcataaaatctttgcccgtgcctatgtcttgaatggtattgcctagattgtcttccagggtttttatggggttttgcatttaagtctttaatccatcttgattaatttttgtatatggtgtaaggaaggggtccagtttcaattttctgcatatggctaaccagttatcccagcaccatttatgaaatagagaatcctttccccactgcttgtttttatcaggtttgtctaagatcagatagtcttagatgtgtagtcttatttctggattctttattctgaagaaccacttttaacacactatatttgtttgtctttgtctgcatcttgtctctatagctgtttttcttcctgtgttaatttcactattatatttaatataggttaggataacttaggttgactgtc

SEQ ID NO: 861595 - DNA, 670 bp, Homo sapiens
tcttcttttgagaaatgtctgttctcgtcctttgtccactttttaatggggttgcttatttttttcttgtaaatttgttaagttctttatagatgctggatactagacatttgtcagatgcatagattgcaaaaatattctcccattctgtaggttggctgtttactcttgatagtttcttttgctgtgaagaatctctttagtttaatatgatcccttttgtctatttttgctttcgctgcaattgcttttggaaactttgtcataaaatctttgcccgtgcctatgtcttgaatggtattgcctagattgtcttccagggtttttatggggttttgcatttaagtctttaatccatcttgattaatttttgtatatggtgtaaggaaggggtccagtttcaattttctgcatatggctaaccagttatcccagcaccatttatgaaatagagaatcctttycccactgcttgtttttatcaggtttgtctaagatcagatagtcttagatgtgtagtcttatttctggattctttattctgaagaaccacttttaacacactatatttgtttgtctttgtctgcatcttgtctctatagctgtttttcttcctgtgttaatttcactattatatttaatataggttaggataacttaggttgactgtc

SEQ ID NO: 861596 - DNA, 559 bp, Homo sapiens
agtggtaaagataattatgtaggtaattataaacaatgtaattgcatgtttgtttttcttctcttaattgactcaaaatcacctctatatacatatacagggaaagagaaagaacgctctgttctattatatacactaatgtgatataacatatttggcaataaaagcataatggaggcaggtgcaaacaaagctatattaagttatactggacaagaaatgacaacttcaatctctagcaccatatgaaaagtaacagaaatrgtaaacaagaatggaaatatagtaaacactataaatacaatcttttctttgctacacttctttaaaaggctttttaacttttgataaacttattattattatcgaaaatttatataagtacattctgtggcatgtaagatatagatatatgtataacaataatagcacaaaatgaaaaatataaatagagctatataggagtaatatttctatatttcagtggaatttagtataaatctaaagtagattctggtaagttaaaatgcacagtgtaagcactctaaaaagcactatg

SEQ ID NO: 861597 - DNA, 559 bp, Homo sapiens
agtggtaaagataattatgtaggtaattataaacaatgtaattgcatgtttgtttttcttctcttaattgactcaaaatcacctctatatacatatacagggaaagagaaagaacgctctgttctattatatacactaatgtgatataacatatttggcaataaaagcataatggaggcaggtgcaaacaaagctatattaagttatactggacaagaaatgacaacttcaatctctagcaccatatgaaaagtaacagaaatagtaaacaagaatggaaatatagtaaacactataaatacaatcttttctttgctacacttctttaaaaggctttttwacttttgataaacttattattattatcgaaaatttatataagtacattctgtggcatgtaagatatagatatatgtataacaataatagcacaaaatgaaaaatataaatagagctatataggagtaatatttctatatttcagtggaatttagtataaatctaaagtagattctggtaagttaaaatgcacagtgtaagcactctaaaaagcactatg

SEQ ID NO: 861598 - DNA, 662 bp, Homo sapiens
ttcgatgtagaaaaagaatttgaaaaaaaaatctagcttggtgtagtggcttatgcatgtcattaatcccagtgctttgggaggccaaagtgggaggatcacttgagtccaggaatttgagaccagcctggcaacatggtgagacctcttctctgcaaaaaattttaaaaactagctagatatggtggtatgctcttctagtcctagctatctgggatgctgaggcaataggataacttcagcacccaggaatttcaggttacagtgagctatgattgtgccactgcattccascctgggtgacagtgtgcgacgtagtgtcaaaaaaaaaaaaaaatccaaaacactaaatgaacttgaactataaagagatttcctcaaccttataaaggacatgtatgaaaaccctacagctaacattctacctaaccatgaaatgcaaaatactttctcattaggatcaggaaaaatatatagatctatgttcttcacagttctgtttaatattgtcgtgagaagcgctaggcagatcaattagggcagaaaaataaatttaaaacacctagattggaaagaaggaaagaaagctatcaatattccagatgacataatcttaggcataaaaaacagagtctactttaaaaactatacgattaataaat

SEQ ID NO: 861599 - DNA, 603 bp, Homo sapiens
atgaacttgaactataaagagatttcctcaaccttataaaggacatgtatgaaaaccctacagctaacattctacctaaccatgaaatgcaaaatactttctcattaggatcaggaaaaatatatagatctatgttcttcacagttctgtttaatattgtcgtgagaagcgctaggcagatcaattagggcagaaaaataaatttaaaacacctagattggaaagaaggaaagaaagctatcaatattccagatgacataatcttaggcataaaaaacagagtctactttaaaaactatacgattaataaatgagttcagcaaggttgcaggatacaaaatcaatatctaaaaataaattatatcccacacaatagcaataaacaatctaaaagtgatattttaaaaaaatctcattagcartgcaatgaaaaataataaaacttgaattaaaaataaatttagaaattaacaaaagaagtataagacactgaaaactaatacacatacacacacacgcacactttggtgtgaaataattgaaataaagaagacttaagtaaatgaaaagccatcttatgttaatcacattattggattgcaa

SEQ ID NO: 861600 - DNA, 701 bp, Homo sapiens
aacagttgtatacatttataaataaaataaaaatgaccaaattgtgtgatacataaattttaatttgacaatgctgtaaaatatttgataatcttattaataagttcatgccaataaattttaagacaaatgaaatagacaaattccttaaaagacacaaatatcactcaagaagaaataggcatagccctatatcaataaaataaaataaaattgaatacaaggtttaaaagcttccaagtaagaaaaccacatgcccagcttgctccactgttgaattataccaaaaatataaggaagaattagtatcaaatctattcaaaatctttcagaaaayggaagagaagggaatactgccacaatctcctcctgtgaggcggaagaaaaattattcttatataaaaaacacttcctggaacccatcagttactcatttacacattatttcactaagaatttttttttagtatcaactatactccagccactatagaatgtgctagatatacaagaggtaatacattgttaattatacagtttgattgagcgtcatgtactataaagagccaagtaaacaggtaaatataacactgttataaatgcttagaaattcactatccacagccctctgggagaaaatattaaataaatatttccagaatatgtatggtagagtgcaggaaagactttccagatgaagt

SEQ ID NO: 861601 - DNA, 635 bp, Homo sapiens
tatcaaaatatcaatgatattcttcacataaatagaaaaaataatcctaaaatctacatgaaacaacaaagaccccaatagtcaaagtaattctgagcaaaaagaacaaagctggagtcatcacattacttgatttcaaattatactacaaagctacagtgatcaaaacagcatggtactagcataaacacaagkgcatagatcaatggaacagaatagagaacccagaaaaatttagtaatttacaatcaactcatttttgacaaaaataccaagagcatacatcagggaaaggatagtcttttcaacaaataatattgaaaaaactggatatccatatgcagaagaataaaatcagacttctctctcttatatataaaaatgaaatcaaaatggattaaactcctacatgcaagacttgaaagtatgaaattattagaaggaagcatttagtgaatgcttcaggacattggtctgggcaaagatttctcaatagcacaggcaaccaaaacaaaaattaacaaatgggatcctcaatccaaaaacctacagaacagcacaagaaacaatcaaaaaatgaatatacaacctacagaatgggagaatttatgtatactattcaactgacacttgat

SEQ ID NO: 861602 - DNA, 596 bp, Homo sapiens
tgaactccataaaggtataagcccttcctatgaagacacatggctattttcattcattggactccagttactgagtgagtttatacatgcccattaattgttcagcacagagccttcactgattacaaggtggaagcacaaggctgcagacatagaagcaaggataagagagcttctccttggaagcatagggccttcataaagggccaggaataaacttgccagactctatggagaaggcattagtgtggataaaaatctcctgagatgtggaagtctggatgcaaacctggagaacaagaggtgacccaaaatgtcagcagctggtatgtaagcagagggaaatctcttttcatttgcaaatctagaaactggaatttaaagccttaagagatctgcaaagactgcctgtgatcaggatccaaaccctgttaacggraagtcccaaccctgccttcaaaccctgaaaagcgagtcatgaactgtttataattaaactgcaacaaaactcactcatttcaactatggattatgttgactcagcccactatgctgtcatcagatagatgaaggagtaggagggggtgccctttact

SEQ ID NO: 861603 - DNA, 618 bp, Homo sapiens
atattaagcactatggacttgggaccagttctttaaagcttctcacgtgagtcattgcactagcctgctaagcaggaacttccttcaagctcattcttttccagttatcctccactcagccactaaacatttgtatttaccttctttttctttagagtcttcagtgattctctactgctctgaactcyttagttcagcacacaatacatatgatgatctgattcattcctacattttctggcttttacctttcacatgcagccttctaagaagttcatgacttcatatgtagtgtttcctttccctggaatagcttttccactaactcatcccttaattaatactattcatccttccaatgtcacattctttaggaagaatttcctcttccaagcctaatttaaattatcttatttaatgtttctctattcatattcctaatataagcacctactacacccaggaaccacagattttacgttttttcccatcagcacacgaaatattctccaagatagatcatatgttaggccacaaaccaagtctcaacaaattttaaaaaatcaaatccagtagaataaaactagaaatcaattccaaggggacttcaaaaactat

SEQ ID NO: 861604 - DNA, 618 bp, Homo sapiens
atattaagcactatggacttgggaccagttctttaaagcttctcacgtgagtcattgcactagcctgctaagcaggaacttccttcaagctcattcttttccagttatcctccactcagccactaaacatttgtatttaccttctttttctttagagtcttcagtgattctctactgctctgaactccttagttcagcacacaatacatatgatgatctgattcattcctacattttctggcttttacctttcacatgcagccttctaagaagttcatgacttcatatgtagtgtttcctttccctggaatagcttttccactaactcatccyttaattaatactattcatccttccaatgtcacattctttaggaagaatttcctcttccaagcctaatttaaattatcttatttaatgtttctctattcatattcctaatataagcacctactacacccaggaaccacagattttacgttttttcccatcagcacacgaaatattctccaagatagatcatatgttaggccacaaaccaagtctcaacaaattttaaaaaatcaaatccagtagaataaaactagaaatcaattccaaggggacttcaaaaactat

SEQ ID NO: 861605 - DNA, 618 bp, Homo sapiens
atattaagcactatggacttgggaccagttctttaaagcttctcacgtgagtcattgcactagcctgctaagcaggaacttccttcaagctcattcttttccagttatcctccactcagccactaaacatttgtatttaccttctttttctttagagtcttcagtgattctctactgctctgaactccttagttcagcacacaatacatatgatgatctgattcattcctacattttctggcttttacctttcacatgcagccttctaagaagttcatgacttcatatgtagtgtttcctttccctggaatagcttttccactaactcatcccttaattaatactattcatccttccaatgtcacattctttaggaagaatttcctcttccaagcytaatttaaattatcttatttaatgtttctctattcatattcctaatataagcacctactacacccaggaaccacagattttacgttttttcccatcagcacacgaaatattctccaagatagatcatatgttaggccacaaaccaagtctcaacaaattttaaaaaatcaaatccagtagaataaaactagaaatcaattccaaggggacttcaaaaactat

SEQ ID NO: 861606 - DNA, 631 bp, Homo sapiens
tttgacaatcaaaaaaatctataatttgaataactaccactgtcagagcattgtagttatttaaattgttttcactatctgtaaaaggggagtaattttgccaataacttcatattagttggaaataatgataaaagtttctaatttagtggtttataatgaagaattaaccagacsatcattaaaattttaaggtctttagcttatgagtcattataacaatatattatttttcttattcactataaagcaatatttttataccagagggccagaaacatattactcagtctacaattcagaatcatttcactgccctgaaatctttttttccccaccagttatctataatgattgaaatttattttttgtgttcagtctattggtccacattcaatactaaaaataattattttctcccctttttatagtagcatatataaaaaatacttgaaatacattattacaatgcactactttcaaaagtaagtaagtaaagttgtgcattctgaagacaagtggaatgagtaggcagagaagaaaggcatgaaataatgcaagtggaaaagaaaagataggccagagaaaatttttaaaatagttgcattggcgtcggatgaaaatggaaaag

SEQ ID NO: 861607 - DNA, 637 bp, Homo sapiens
ccatcatacactttgtgaaattaagataatcacttcaggcacataaccagtaagcaccttagtgttaatactrtatgcagaatagcaaatatcatgtgaaacaaagaaatgcaagcatttgtgaaatttggctccacgctaaatctggcttcatgctcaactattttaaagaattaccaaactgccaatgtatttcttcacaatatctacttcaccttcatttttaactatgagcaatattaattagccaaatatctccagttttctattaatattttgttaactttttaaatgttttattttccctgtatgtgcatgaaggcagacatacagaaaaacaaacaaacaaaaaaaactacttatgacttacacagaccatctataacatgtttgggccttcagttttgtcctgaattttctcttcattttactttaggataagaatttaccaagatcctttctcctacaaaattatcctcctttctttataaccttccttaccaaaaatacattatcatgtatcgataactttcttcatctctctcccctacttactggttcctagcttgtttcacaaataacctttcaaagtccattgtttaaattaacctttagtaacttctcaacgagacaaagt

SEQ ID NO: 861608 - DNA, 613 bp, Homo sapiens
ttaaaagtatttattaaatgtacttgggaggatttattcaaaaaagactatcaattatattaaataaaagccattcaatacgccaagctatatatagatgtctccatagtgggtgaagatgtgtcatttatcttttaagataattatgcaaactatattgagcmcacacatcctgagctgggaaatgacttttacatctttctcctcatttataaatcttttccaacagaagttatgcaagattcagactggtcagcacagagctggattttggtggtccctttacaataggagagaatccattttcctccttagggtctttcttttctttaacgaaggcatacagagcactcagcacattcccagagcttcttagaatttttcccttgagagatctcaggaaatatgaggaaaaacaacttcaaaaaaattaatgaaaggcctatcactgtctgcctttctctcttttaatccctgccctatcctttctactttctagaagtgtagtgccccttcagtttcaaacatttttcctctccttaaattcccaaggtgggatgcccttttctggcactccgtctatgaaagggacagggaaaagatcttatagaaa

SEQ ID NO: 861609 - DNA, 622 bp, Homo sapiens
ttgtttcatagtctcattaggttcattttccccctaatttttcatttgtggtaaaatgcacataacaacatttaccatcttagccactttaaagtgtacagttccgtggcattaaatacattcataatgttctgtaaacatcaccaccacctccagctctcttttcatcttgtaaaaatgaaactctgtaactattaaacaataactctctcttccccccaatcctcagcccttggcaaccatctccactttccgtttctatgatttcgactattctaagtacctcatacaagtgggatcatatgtatttgccctttgtgcctggcttattttacttgccataatgtcctcaaggttcatccaggttataacatatgtcataattccctttctttttaaagcttgaataatattccattttctgaatattacacattttgttcatctatttatccattaatggatacttgggttgcttccrtgctttagctattgagaataatgcaatcctaccaacaatactcaagaattccaattccaatttctccacatccttgccaacacctctggcttatattttaaaatatattagccatccttatgggtgcaaagtggtatctca

SEQ ID NO: 861610 - DNA, 634 bp, Homo sapiens
gttgtgtcattcttatgcctttgaatcctcatagcttagctcctacttatgagtgagaacatatgatgtttggctttccattcctgaattacttcacttagaataatagtctccaatcccatccaggttgatgccgatgctattaattcattccttttatggctgaatagtattccattgtgtgtgtgtgtrtatatatatatatatatatatatatatatatatatatatatatatatatatcacagtttctttatccacttgttgatttatgggcatttaggttggttctacatttttgcaattgtgaattgtgctgctataaacatgcatgtgcaagtatctttatcatataatgacttcttttcctctgggtagatacccagtagtgggattgctggatcaaatggtagttctacttttagttctttaaggaatctccatattgttttccatagtgtagaagtgttcccttttcactgcatccacgccaacatctattaatttttgagttttttaatatggccatttttgcaggagtaaggtggtattgcattgtggttttgatttgcatttccctgatcattagcaatgttgagcattttttcatatgtttgttggccatttgtatatc

SEQ ID NO: 861611 - DNA, 600 bp, Homo sapiens
cagaagaaacttctaagcagcaaagcattcaagacgtgacagagtataaaagtttagaaaatttgcagccagtctatgcagtgggaaagaaagctcattttctctggagaaactaaaatctgctgcagaaattcacataattaattaggacccaaatgctaatcaccaagacaatagggaaaatatctctagggcatgtcagaaaccttgcaggcagctccttccatcacaggcccggaggtctaagaggtaaaaatagtttccttcctggaccatgccaagggctcccagctctgtgcagtctcaagacttggttccctgtgtcccagctacttcagctccagccatggctaaaagaggcaaaagtacagctcagggcattactttagaggatgcaagccccaaaacatggcagcttccatgtgatgttgagcctgtggrtgcattgaagtcaagaattgaggtttgaaaacaccacctacatttcagaggatgtatggaaatgcctggatgtccaggcagaaggttgctgcaggggtggagccctcatggagactctctgctagggcagtgcagaagggaaatgtggggttggaaccc

SEQ ID NO: 861612 - DNA, 518 bp, Homo sapiens
taatctaattaaaaatggacaaaagatcagaatagaaatttcttcaaaaaaatgttaaatagccaataatcacattaaaaattgctcaacataattagtcaaatgggaaaatgcaacacgaaactgcagtgagatgatgcttcatgcctcctaagatggctatgatgaaagacatctaacaaacattgtcaaggatgtgaaaaaatgttatcctcataaattcctggtggtaaagaagygcagctgttttagaaaacattctggcagttcctcaaagggttaaacataaacttaccatatgacctagtaattccacttctaggtaaatctaagagatataaaaacatttgtccattcaaaaacttctacattaatcttcatagtaacactattcttaatagccaaaaggttgagacaacctcagttttcattaacaatggataaataaaatgtagtatattcatacaataggataacattaatataagaaataaagtattgaagtatgctccaacatg

SEQ ID NO: 861613 - DNA, 602 bp, Homo sapiens
tcatgactgcccggtagtattccattgtgaatatgtaacacatcttctttatccatttatctgttattggacaccttggctaatttcatatcttggccatgtgaatagtgtaataaacatatggatgcagatgtctctttgatgtactgaggtttttttaatttggataaatctatagtagtgtgattactggatcatatggtagtcctatttgtagttttgtggagaacctctatactgttctccrtagtgactgtactactgtacattcccaccaaccatgtagaaaagttgctttttctccacatattcaccagcattttttattttttgtctttgtgataatagccatcctaactggactgagatgatacctcattgtggggttcatctgcatttcccagatgattagtgaggttgttgagcattttaaaatatacttgatggacatttttgtgtcttcttttgaaaaacgtctgttcaaatcacttgtcaatttttatttggaatgcttttttttgctactgagatgtttgagttccatatatattctggatattaatcttctgttggatgaatagtttgctaatattttctttcat

SEQ ID NO: 861614 - DNA, 637 bp, Homo sapiens
tattttatttcagttttaatcttcaggtcctgagcaaattatccatcataaccagctgatatggtttggctgtgccctcactgaaatctcaaattgagttatatctgtcagaattcccaagtgttgtgggagcgacctgggggaggtaattgagtcaggggggctggtctttaccgtgctatcatcatgatagtaaataagtctcaagagatctgatgggtttaacagaggtttctgcttttgcttctttcatatttttctcttgccaccaccatgtaagaagtgcctttcacctsccaccatgattttgaggcctccccaggcaagcaaaactgtaaggacaattaaaactcttttggtttccagtttcaggtatgtctttatcagcagcatgaaaatgaactaatacagttaattggtaccaggagtggtgtgatgctgaaaagacacctgaaaatgtgcaagaggctttggaactgggtaacaggcaaaggttctaacagtttggagggctcagaagaagacaggaaaatgtgggaaagtttggaacctcctagagacttgttgaatgcctttgaccaaaatactgatggtgatatgaacaataaggtccaggctaaggtggtctcatatggag

SEQ ID NO: 861615 - DNA, 631 bp, Homo sapiens
caaaacacaatgccaacttttgagtgattaagtatccttctcatctataagaggatgttgcccagactaatctcaaacttctggtctcccgccttggcctcccaaagtgccaggattacaggcataataaaactccttgatgccatcttcctagaaagatatgcttagcctcattcaatccaaatagttcctgcatttcttttgcatgagatgtaagacattttctgacataamataaaccaaataactcaactacattcatttttataacaacagctttttgaaatataattcacatacaataaattcatccttttaaagcatataattcagtgggtttcagcatattcaaagagttgggcaatcattactatctaattatagaacattttcatcatcaccaaaagaaatctcatacttattaggagtcacctccctcccatccctagcccctagtaataactagccaactttctgtctccttagatttgcctattctggacgttacttaaaattgaaagcatatcatatgtggcctttcttgtgcctctcagattcacctatgtgacagcatttatcaataatccattcctttatactacttaataatatttcactgtatggatatacc

SEQ ID NO: 861616 - DNA, 593 bp, Homo sapiens
tggatctctctacagaggtgtatttcttctaaaagcagactcccctctacttattttccatacaaacaaaaatatctctatatactgtctaccacacccacatactccacacgcacatacacacatacacacacacggtattaaaaataacctcaaagtgactgacaagttaaagaattaaaaaaaaaaaagatcattatgctatggtccaaggagtaaattgatatggcactgtccttttcatttttcttaaaaaggtataaaaatatacttcttaattatttctaaattgaggatgggaatacaaactagtagaaagatatagtctccaactctaaaacccataaatcaatcttatatatttacctccaatatattatttggaccttttgtaacactacttttgttgcctttcataacatttgggaattagataagggawtgaaaatttggataaaattgatagctagctacagcaaccagtagctatcaagtggttttcaaaacatcagctacgtagaaatcacctagttaatttgttaatcatgcatatgtcacaagatcttcggggtgttgcttcaccagacagaaac

SEQ ID NO: 861617 - DNA, 555 bp, Homo sapiens
gaggccagtgcccccccaggggctggagttgagttgaagtcatggctgtcagcagatagaaatgtcaactagtggtggcctccagtggaaacatcttgcagggagagactgtaccccagccagtccctggagttttggaagacaaaacactcactgaaggacagagtttgagttccccctccccactggggctctgccacttagaactgtgtgactgtgggcaagtggcttagatacattctgttttctcagtcatcaagcaggtatacttaayacctatcagtgcagttgtgtgtagtaatgcaggttaagtatataaaggggaggtgctcaagaaatgttagtttcccaacctttccctctcctatcctagtcccaatagtcacacccactgttggaagaaaacaattgcatctgacactctctccaactcctacctcacctccttggccattctccagactcgggtgattaagaagatagaaaagataaggaatgtctggagcacataagggtccatacattcagggtaactgcaagggcttctggagtata

SEQ ID NO: 861618 - DNA, 609 bp, Homo sapiens
tttgttgccattgcttttggtgttttagtcatgaagtccttgcccatggctatgtcctgaatggtattgcctaggttttcttctagggtttttatggttttaggtttaacatttaagtctttaatccatcttgatttaatttttgtataaggtgtaaggaagggatccagtttcagctttcaacatatggctagccagttttctcagcaccatttattaaatagggaatcctttcctcatttcttgtttttgtcaggcttgtcaaagatcagatggctgtagatstgtgatgttatttatgaggcctctgttctattcgattggtctatatatctgttttggtaccagtaccatgctggtttggttactgtagccttgcagtatagtttgaagtcaggtagcatgatgtctccagctttgttctttttgcttaggattgtcttggcaatgcaggccattctttggttccatatgaactttaaagtagttttttccaactctgtgaagaaagtcattggtagcttgatggggatggcattgaatttataaattaccttgggcagtatgaccattttcacaatattgattcttcctatccatgagcatgga

SEQ ID NO: 861619 - DNA, 576 bp, Homo sapiens
tttaacaagctgtttggggcaaagggatatccacatgcagaaagctaagccaaggctcgtaactcttacaatacacaaaaaattaactcaaaatacattacagaccacaaataagtatttttttgagaagggtcttgytgtgttgcccaggttggagtgcagtggcacaatcatagctcactgaagcctcaatctcctgggctcaagtgatcctcctgcctcagccttccaagtagctgggactacaggtacacaccacctcatctgctttttttttttttattacttttagtagagatgaggccttgctatgtagcccaggttcctaaatataggatttaaactctaacacatttatatataggagaaaatatttaatgtcttggttaggcagatatttcttagttatgacataaaaacacagtccattgaaaaaatgataaaatggatcccatcaaaattcaaaacttcagcacttcaaaaacaacttcttattaggcataaaaagacattccacctcatagtgaaaaatattgcaaaatgtgtatctgaaagggacttatatgcagtatatgc

SEQ ID NO: 861620 - DNA, 667 bp, Homo sapiens
aggatttggaagcacaaataaacaaggcaaagccgcttattgggtaaatcaaattgctgataaacaccctacttgtgaaataactattcagggaaagaaatttaaaggtttggtagatacaggagtggacattttaatcatttctctacagcactggccatccacatggccaattcaacccactcaatttaacatagttggagttggtaaagcccctgaagcatatcaaagtaattatattttgcattgtgaaggcctgacagacaacctgggactattcaaccaattataacttctgtacctataaatttatggggaagagatttattacaacaaaggggagcacaagtcctaattccagaacaattatataaccctcaaagtcaacatacaatgcatgaaatggggtatgtccttggtatgggactagaaaaaaatttgcaaggtttgaaagaaccgcttcaagcagaaagacaaaattcccaccaaagattargatatcatttttgatggcagcaattgttaagcctccagaacctatacctttaaaatggttagcagataagccaatttggatagaacaatggccactaagtaaagagaaactggaattctcgttttcgtaattaaaaaaaagtcaggtaaatggagaatgttaactgactta

SEQ ID NO: 861621 - DNA, 574 bp, Homo sapiens
aaaaactacttctatacgctataatgagtaacccaaaaaggaaattttaaaaaaattcaactggtaaaatcacaacatcacagtggctattatcaaaaaggcaaaaataacaagtgctgttggggatgtagaaaaaagggaatgcttgcactctgtggaaaggaatgtaaattagtacagccmttatggaaaacagtatggaagtccctcaaaaagtaaaaaatagaattaccctatgatccaggaattccacttctgggtatatatccaaaggcattaaaatcagtatgtcaaagaaatgtctgtgctactgtgtttattgtgacattattcacaatagccaagatataaaatcaacctaaatcattaatagataaacggagaaggaaaatgttttatacacacacacacacacacacacacacacacacacacacacacacacacaatggaatactattcagtgttaagaacaaggaaatcctgttatttgtgacagcatggatgaacctggagaaaattatgctaaatgaagtaagccaggcacagaaagacaaatactccatgatttcac

SEQ ID NO: 861622 - DNA, 602 bp, Homo sapiens
gagttttctctccctttctcccttcacagcaaatattccaagatcattatttcagtaccttctcgtttcccctctaaatctatacataaaatgttttgcagaacgtacaacaacggtaggaatttcactaagatttacctgagcagacgcttaacatgcaaagggaatggcgacctaagaaggacaagcagatgtttacaatggcctcttgcgtttgtaaccaacttycagattattaccatctaacgcagtgtcctaaaatgtaacgatcacttaaatacttacaagatttcagtaactgcgtaacttatctgaaattgcgtattttgggggttgacgtttgacatttaacgggctgggctgatggggttggcggaagaactggcagtctttacctttcttaaagttttaaaacagttgtagattccattaaagagaaagagatctccttcgggagaggaaaatgccagtctctgtctctttctctttcccattcttcaattattattaagcattattatcattatctgggcaaagcaacgagttctgaagcgtttcttcaagttgccttcttgctctatttttaatccattaactagtgg

SEQ ID NO: 861623 - DNA, 626 bp, Homo sapiens
cttttatctgtcctgatcctggatttgtcctgaccaatgtaagtgtcgcccaataaaaccttctatgacccccacaccagccacccccccaccaagtgtgccctttccttcttgactttttagcagttctgggtaaatattgatttgcccccagtttaccttctccctgactggccatttgcagactcaggaactagcctctgtagggacttgatttttctgttactttctggccgtttcaccaccccccttcctccctccaagtggcattgtaaaactcacagtgacaaasagacagagtagggttctaggcccctgttcctggggacttgaaggcggttttacatactggtcagacacggctggaggccaaggtcaagttgaaagttgcagtccagccagcatgagaactgccatgcgagcgtagagacacaggcagcagcaaaaggcccattgcccacatcccctcactcttaattttctctctctttttaaaattctcgcctctgactctgttcggctgcccagaattttttggtgccttcgtggggtttttggggcggtgtttaccgactcttctctgcctccgccctgctcagccagggctttgagcctcttcggttttc

SEQ ID NO: 861624 - DNA, 660 bp, Homo sapiens
ttagaatactgatccagatttttacattacctatacctcttgtttcttctgagccacagcaagagatcactggttggttcacagaaataagcagggtctgtctaaattgcagaaagaaaatgcaaaaacaactgacactagagtctaataacagatgtaccatagttcttgaaatgtgattttttctctcttcagtttcctatttttactaaagacaaattatggtaagaccaatttgctttattatacttggcctgattatttgtataaactacagcaagaataattatttaaaattttttttattactttttattattattmcatgaaaatcatgttcaagacagaaagccaaatttcaccctttgcattagcataacattgatgttaaacccaattcttaataaaaccttatagaaaaatctattcaattttaatgtatgaccataaggcaagattctcataaatctttttaaataaccctttaccattttctgttacagagcagatcagtactctaagaaagctctgttgtgcttttattccaatgttcaatttacagaaaaactgaataattcttctttaactttagccaataggttcacacacagaatttcttttataagattaatttttcacaaaccttccacaatttgttca

SEQ ID NO: 861625 - DNA, 629 bp, Homo sapiens
tagacaaatgagcaaaggatatgaactggcaaattgtgcacacaaaatttaaatggccaccaattacattttcaatttaaacttggtagtagccaatgaactctaaataaaaatgagatgctgtcttttttgcctgccaaattagcaaacactaattttttttaattaatgaaaaccatgtgaattagggtccactaactgtgttaattagagtatactcttattcactacaggtaggattktaagttggcacaaccttctgagaaacaatttttcgatatagcaagccatcaaaccatgtttttaaatattcaatgccattgaaaatgctcattatataatattaatttaaaaatcataatgtaaaactatacatacagcgtgatcccaactacttcctcatcagagataatatgtattgtaagactctgatttattaatagctttggtagaaagaaaaaaacagcatatttaatataccaaaattttattctgctgatggtaacatacctatatatccatataattatataccactttcttcttaagtaacatcaccaaaaacagagtctaagctttcttcacattccagactctaaagattcttctgaattccttttgaccattgg

SEQ ID NO: 861626 - DNA, 596 bp, Homo sapiens
gttggcacccactccaatctccgagcaatgtgggggccaagccttggtgttctcgcagcctggccaggggtgcatgtactggggccagcgctgacatgccagcgccctgctgcctcagacttctccagaatttgggtgcagacgcgcacaggaggggacgccaaggtgggggctgagagcagctccgcgctggcctgcaggagccccttggcataagcaggctgggcaccatggacagcggcaggaggccgaccggcttctgggctgaagggggcgggtcctcagtgaggccccatcttcaggacagggtgtgcctgaaggctgggggccgggctgccaggccggcagaccasagtagggacttgtggtgccttctccgggcccgcctatggtcacccatggaccaatcggtgtgcacttcctcccctctgaggcccatgaaagccctgggatcagccagagcagagcagaggaaggagagacgatgggacaaccagctgccgagaagagctaccctctctgctgggagctgaacacttgtggggacgacctgcttgcagagaggagctaccctctctgctaggagctaaatactt

SEQ ID NO: 861627 - DNA, 607 bp, Homo sapiens
cctgactcacccttggcaggcatggggcccaggctggtagcatgagctgagcgcccctgccaggccaagtaggtgaaacaagcccatcaggcccaagcaaaattcaggcaaaggcgccactggccacagaagtttccagccagaacgacgacaccccaaagatcccttaacaatgttagaaacacaaattctcaggccccaccccagacctactacaggtgattctgatacaggctcaagtttgaaaactactggcctagattttgcaaacaaatttaacttaatttgccttttaggccagatgctgtggcccatgcctgtaattccagcactgtgggaggccaaggaaaaagaatcatttgaggccaggagtttgacagtagcctgggcaacatagtgagacactcctgtctgtactaataactaactaamtaaataaataaataaataaattagctgagtgtggtggcatgtacctgtagtcccagctactcaggaggctgaggcaggaggattgcttgagcccaggaggtcgaggctgcagtgaaccatgattacaactgcactccagccggggcaacagagcgagactctgtctcaaaaaaaa

SEQ ID NO: 861628 - DNA, 674 bp, Homo sapiens
catcttgacaaatctgggcagcctgcctcctggttcttacctgacaaagatctcagagcatctcagggggatggaaggggaagtcccagctaccataagggatgaagtgacaggcaggggagatctatgatagggagaagggagctgcagactaagcaggcattctgttagctcactacaagctgctgtccctgggtgtttttccttttggkgccagctggccacaggtgccagccttctgcagtgagtgcgcactgggtgtgcagtgttcagagggaagaaggcacttgtcttgcctatgcacaaaggactagatgagtagcttgttagctcatccaggtggggtccctgaagtgtttgtgtgtgttagggatgggaggatgggggcagttacatgatattataccaaggtgcttcaaagttgcttcaaaatgctacaattcccaccattggatctatcctttggattaaagcattatgaacttaaagggataacaatcatttcctaaacttcttagaaagaattagtaaatgatgtcagtggataggttctcccccctcaactccgaactccatggggaaagaaccttcaaaagagctcctctgcatgaacaagttcttgagataagagaaaggctaggtgtgaagaatgggctgtggcctagaaaaggtag

SEQ ID NO: 861629 - DNA, 508 bp, Homo sapiens
gttctgaggtacatgtgcagagcatgcaggtttgttataggtatacacgtgccatggtggtttgctgcactcatcaacctgtcatctacattaggtatttctcctaatgctatccctcccctagctccccaccccccaacaggccctggtgtgtgatgttctcyaccctgtgtacatgtgttctcattgttcatctcccacttatgagtgagaacatacggtgtttggttttctgtccttgtgttagtttgctgagaatcatggtttccagcttcatccatgtccctgcaaaggacatgaactcatccttttttatggctgtatagtattccatggtgtatatgtgccacgttttctttatccagtctatcactgataggcgtttgggttggttccaagtcttttctattgtgaacacacaataaacatacgtgtgcatgtgtctttataggagaatgatttataattctttgggtatatacccagtaatgggattgctgggtcaaat

SEQ ID NO: 861630 - DNA, 630 bp, Homo sapiens
gtaagcttagaatgttaataatttaacagctaaaggacagtagaccacttcttatttcttcggctagagaaaaagctacatggcacatgaagaagtttggaatttgcctttatatrtgcttagataaggcgttctaaaaagatggaataaaaaattgttacagaaagatgcttgaacaaaagagcatcttgatactgcactttgtagacaacacttctagcatagtgggatttactaacaattaattataactttcataggaagtatttggtttgctagacctgctgaaaatgtaaccatatttatttcttaataatccaattatatcttacttgaaaactgctctaaaggtcctcttattctacttcagagaaggtgctgaaatgtttccgcacataataaaagaacacatgtaaattcagaaattattttatctcaaaagccattacattgttccattataataattctaggttaaaggtttaagtacaaatttttattaagtgtgtatgtgagggaccaagttcatgcaaattaagcaatttccaacatttccattttaccatatatatgttaaaccatggtctgcatggtcaacatctgcatacatatttaagtaacacacaaaat

SEQ ID NO: 861631 - DNA, 614 bp, Homo sapiens
gtagctgctggaaaactccactgtacactcgagaaaaaaatgagagcaaaaaagcaaataacatgttaatcttctcaagaatattttgaccttgcagatccctgaaagggtttctgggacatcccccgcccctaccaggaatcagtgagaattactggtcaagacccacagtcatggaaatgaagtactgtgaaaaatgagaagaaactgattagcatcagtttctttgacagtcaccttaacaattacatatgtcaagatcattttatcatgctatttatttttaattttgtgttttgtactgaaaaaaatatcaagttttcagctttcttgaaragattcattattgatattagcattcattttaattgtctctaagcttcttgtttcactcagaacttcacaactctagaaatatatggcatgaattaaaaatatattttatcataaaatcttgtctatttttggttaaaaacgaacaaaacaagaaaataactatgttattgtgcacagaaacccggagtaaataatgataattggcaggcataaaataatgcagattcttccataaagaggttttgtgttcataaagtatcttttgtacattaataata

SEQ ID NO: 861632 - DNA, 631 bp, Homo sapiens
ccaacctgtcccagtggctcttgttttattgaccagggtagagggatatttctcctcatcctgtattgcctatttctaaatttaaaactcatacctaaaatcttagtatcaaacaaaaatagctcaggtttttcamacttaaatttagtatattggatttcaactaaataaatcttcaaggttttaggaatgcttcaacttgttttggtcttgatatagttttcaaacaaaccaacaaataaaaaatcttttgaaatggcaaggtttgtgttcaaccaaaccaactagcatggggaaaacaacaacaacaaccgaaaacatttccagaggtttttaactacggagagttgtttaggcctcaggatgtttttgcacaatctgtctaatctttcccgtcaggtgttttagcatacaactaaaccccagagggaaagaaaaaattccttttgactcactccataattcttgtttgacccatattttatgctagttcaagcagaaatctgctgagaagcttacaaaaaatctttgaaaagctctttagggacaattttgtcactcttgatagaaatgcctacagatggacccgcagccttttctaatggagctacaaacattgcctaatgcctca

SEQ ID NO: 861633 - DNA, 692 bp, Homo sapiens
gtatatatacattatatatacactgtagacatacaattgtatacactgtatagtatatattatacattgtatatagacatatatacattgtatatacacatgatatatacaatatataaaatatatgtatatacaatgtataatatacgtatatataacatataatgtaaatgtgtatatatatacacaatgtgtacatatctacattatacatataatattcctatatataaacaatatgtgtatatattatgttcatatatataaacaatgtatatatataatagattaaaaatcacaagatctgttcaygctaccaatttcatgattatttgtttatttttaaatttttacaagtacatagtaagtgtatatatttatggggtatatgagatattctgatacaggcatacaattaggttattttgattccttgatgttaatgtaaaaattgtttttattgttttctcctacttgtagttttgcttcttaaaatgttttcagtgatttttctcagaatacttaattataaataacaatgcaatcaatatgtcacatcaaatcaattaaagaacctgtaaatgcatttttaaaagtccaggccattttataatataataaatttgttacttcaaatctcatttggactcacagtatgattacatatcttcctattgaaagaaaatttcatc

SEQ ID NO: 861634 - DNA, 627 bp, Homo sapiens
actagaaataccatttgacccggccatcccattactgggtatacacccaaaggattataaatcatgctgctataaatacacaggcacacgtaggtttattgtggcactattcacaatagcaaagacttgaaaccaacccaaatgtccaacaatgatggactggatwaagaaaatgtggcacatatacaccatggaatactatgcagccataaaaaatgatgagttcatgtcctttgtagggacatggatgaagctggaaaccatcattctcagcaaactatcgaaaggacagaaaaccaaacaccacatgttctcactcataggtgggaattgaacaatgagaacacatggacacaggaaggggaacatcacacaccggggcctgttgtgggtggggggagtggggagggacagcattagtatatatacctaatgttaaatgtcgagttaatgggtgcagcacaccaacatggcacgtgtatacatatgtaacaaagctgcatgttgtgcacatgtaccctaaaacttaaagtataataaaaaaaataaataaataaacagaattcatgagacatcttgtttctaatgaaattttgaatttcttttgaatttcattttatttttgaa

SEQ ID NO: 861635 - DNA, 627 bp, Homo sapiens
actagaaataccatttgacccggccatcccattactgggtatacacccaaaggattataaatcatgctgctataaatacacaggcacacgtaggtttattgtggcactattcacaatagcaaagacttgaaaccaacccaaatgtccaacaatgatggactggattaagaaaatgtggcacatatacaccatggaatactatgcagccataaaaaatgatgagttcatgtcctttgtagggacatggatgaagctggaaaccatcattctcagcaaactatcgaaaggacagaaaaccaaacaccacatgttctcactcataggtgggaattgaacaatgagaacacatggacacaggaaggggaacatcacacaccggggcctgttgtgggtggggggagtggggagggacagcattagtatatatacctaatgttaaatgtcragttaatgggtgcagcacaccaacatggcacgtgtatacatatgtaacaaagctgcatgttgtgcacatgtaccctaaaacttaaagtataataaaaaaaataaataaataaacagaattcatgagacatcttgtttctaatgaaattttgaatttcttttgaatttcattttatttttgaa

SEQ ID NO: 861636 - DNA, 676 bp, Homo sapiens
atctacgaactggtaaacttaaacatcttagggttattaatcaacactaggactgtcacatacacttccatccataaaaaatgatgatgaatttaaataacatgaaagttggatttgtctggcacaaatacattgattgacagagagaaaaaaagacaaagaagaaagcctgagcaactagtgttaggagaaccagttttatatttaatattcataattaaaactatttgcttcaaaattactttaagactcttgattgctttttaaaaaactaaaattttagtacttagattaaaaaaaacagaaatggccaggtttaaaatgatacataaggagtatctgtaataaaatacaaaaatttccaggtaaagctattttgtagtaatagtggttatagttttctagtgtgttttttttkttgttgttgttgttgagtggatttgaaacactgagttatctggccactaaagtttttggccatattattaacaaaaaaatatatatttcaaagaaagaaagggatggacagtttctgctgtgagtttgctgaatctggggggctatagacagcatctttcatggagatgcacccatgaaggcagaagtagcagaaggaaaggtggagaaaagtcctgcaatctgcagtgtggtctgaatattccttagttaactccct

SEQ ID NO: 861637 - DNA, 680 bp, Homo sapiens
ctctttcatgagatggcatccatcttccccattacatttggctagaatggcagaacagctcaggtgagcttaatttatagcagaaaaaaaattcacactggtttaatagttttcaacaccagccaatttctatgtgtgcacagagctgtacataagaaacagtggctatggtgctgaaatgcactaagctatgtcatagtaaaattgattctgaaggaataaacaaagattcccattcctagaagaatctctataatattatcaagtttacttactgcttaagagaaagaaacccagtatcttaaaacattgtcaagattctgggcagtctgattctgaaatctcccatcaattttgcctttcaattagcaggttttgaacaatatcatgccctcgcctattgctttactgatctaataactcctatgcatatttcgctgttctttatatattaaacrgtgatgtgaaacaatcatttttagaatatatgttttcaggttttgttgtttatctatggctggtctccttagagcctttaatttgttactatgcaccagaagcttccaacaaaggactacagtgtcaaatactattttaaaaacatggctgactacatagtcattttcttttttgacaagaattagagggaggaaaactaggtcccataaggaagtatcaaa

SEQ ID NO: 861638 - DNA, 534 bp, Homo sapiens
ctttgccaggaatgtctgaataaggattaaacctatgggaattgagccccagagtaagcacatgaatgaaaaggtatcaggacatgaagagaaagagtattaataaatataaacttccttattttgtgtcattcttctttgtcttctaccttctcctgtttttccttcttcttcttctggtggggattttctgatgtgttttagaaaagcaaaattttctcaattatcagtttatttttgccaatgtatcctgaaccttttccctaaacytttccagtaatagtagagtcctccatccttcatgtgtcagaagctatcatgggggtgaactctggttattaaattgagctgccattggtgtataagtcatagtttctcttaagttactcaccttccttcttaactctatttgtgtttttgtgagagacacttcccttctctctatacccctctcctccctttcctctaagtctaaatgtaactgttccatagaaaataaaaaaaattgaaagattagaagcataataatacaaa

SEQ ID NO: 861639 - DNA, 632 bp, Homo sapiens
cggagggtcctacacccacggagcctcggtcattgctagcacagcagtctgagatcaaactgcaaggtggcagccaggatgggggaggggcgcctgccattgcccaggcttgagcaggtaaacaaagcagccgggaaggtcgaactgggtggagcccaccacagctcaaggaggcctgcctgcctctgcaggccccacctctaggggcagggcacagacaaacaaaagatagcaataatctctgcagacttaaatrtccctgtctgacagctttgaagagagtagtggttctcccagcacgcagcttgagatctgagaatgggcagactgcctcctcaagttggtccctaacccatgagtagcctaactgggaggcaccccccagtaggggcggactgacacctcacatggcccggtactactctgagacaaaacttccagaggaacaatcaggcaacagcatttgcggttcaccaatatctgctgttctgcagccactgctgctgatacccaggcaaacagggtctgaagtggacctccagtaaactccaacagaccggcagctgagggtcctgactcttagaaggaaaactaacaaacagaaaggacatccacaccaaaaacccatctgt

SEQ ID NO: 861640 - DNA, 594 bp, Homo sapiens
agttggttggggggcagggtgtttagactgataaccacttcagctctaattctggggaggggggcaattaattagtttacaggtaacgccagtgatatgctggcattggctggtactggcttgcatctttgcatttagtaacatcttgttagatgtgtggtcatagtgggagyatttacaccaaggaatttggcaaacgctattaatcagggctttttttttttctcccagagaataatgtcacccacataccacttgataaatatcagatgtctagtaatattcacagtggagactggctttcatcttactttgactatgtgagaaatcttccttaatggataaagtgaggacatttatttatgtacatttagtattttgcccctgagaacagcagcaaatccaatatttactctaagtgaaagcatccctgtcactataaaccttcaggggagatttgcacaaaattctggcatcatgagtgtaacttgggtaggacaattgctggtggcagctattgttttggtttcctggtaaaccaaagacttcctttagattgttcaagtgcatggttagtggaaactttttcaggca

SEQ ID NO: 861641 - DNA, 594 bp, Homo sapiens
agttggttggggggcagggtgtttagactgataaccacttcagctctaattctggggaggggggcaattaattagtttacaggtaacgccagtgatatgctggcattggctggtactggcttgcatctttgcatttagtaacatcttgttagatgtgtggtcatagtgggagtatttacaccaaggaatttggcaaaygctattaatcagggctttttttttttctcccagagaataatgtcacccacataccacttgataaatatcagatgtctagtaatattcacagtggagactggctttcatcttactttgactatgtgagaaatcttccttaatggataaagtgaggacatttatttatgtacatttagtattttgcccctgagaacagcagcaaatccaatatttactctaagtgaaagcatccctgtcactataaaccttcaggggagatttgcacaaaattctggcatcatgagtgtaacttgggtaggacaattgctggtggcagctattgttttggtttcctggtaaaccaaagacttcctttagattgttcaagtgcatggttagtggaaactttttcaggca

SEQ ID NO: 861642 - DNA, 608 bp, Homo sapiens
tttcatgggaacgaatctattcttgagagatggaatccaatctcaggagagcaagagcttgctcactactgtgagaagagcaccaagccatttatcaggaatctgctcttgtgacctgaacaactcccactaggctccacctcccaacgctgccatactggggatcagacttccacatgagttttggtggagacaaaccaaccagatccaaacatagcaacatgytttttatttttatttttttcagagggtttgtataggataaatctcctaaaatttttatagaaggactatgcagctattacctttcctcattttaagagtttaaatatacttctgattgatacagggatattgattcatccttcagcattcctcttcctctgggttaccttcttcccataagctcagatcagcgcctacatttctgacatgcatttgcagattcttctcctgtaagcacttgcatctatttttcttaatttctcaggtagctattttacctgtatttggaaaggttcccttttccctgacacctctactatctgaatccataaaagcctgaattctgacatgggtggaagtcagtgtgtaggaaaatggtatac

SEQ ID NO: 861643 - DNA, 689 bp, Homo sapiens
cagatccatctatggggtctaaatttggccacatcttatccaggtcagtccagtgcttactggccatgacaaactgattttttaaaaggaatgctatttgggatttgtggagccaccctaaagatcaaaaccctacttaatctgtgaatgacacagggtaggtatcaacaatgtgacatgtcaaatttatgtctccttaatccttttctgtaagaatggtgtsaattattttccttctgtgttcgtgtgtgtcagatagccagtcagtcaacagcatttaatgagcgtccactgtgtactctggggagctataaaggaaacagctcctgtccttgaggagtttatgatgaaatgggagagataaggcaaacaaatgaaaaaatacgcaatggttgtcatagagtctagggctagccttctgataaaacaacaacaacaaaagacatttaggttctgtaatttcttttgtttgaaagttcagaggaaaatgtcacttattttcagaggttatttagaggactacctaaacaaatatgaagatttattttaagcatttgagaaaaactcctcagatttttaagtcaatatgcctttagtactattaagctctttagcaaggtatctttaaatacccactcatagatagaaaatcctggcttagctttctgaggttgaaactggaagaaggg

SEQ ID NO: 861644 - DNA, 581 bp, Homo sapiens
ctctttcatgctctggagactccagaaattctcaaggccgagactttctaggcattcaggtcatcgtgtctaaatgaattccttcttacctcctccattatattttctttaaagcacttctatcttctggaataaatgaaattattgttactctgcttattttacattttcgaccactgaaatctcttgaaggctgagactttatttcatgattgctgtattttcagggtccagactatactaggcaaatagtagataataaatatttgattaaaaatgttgcctaaataatcatagctagtatacaaatcatagctgaatttaagttcaggctaagaaaagataaaatacttaaaatgattgcttccttattgacaacctgattttatattattgaaaaaaatactttatcacacttcaaktcttctcaaaatgttcgatatggtggaatatgaacacttctgctctttgaatatctttagttcttcatggaagaaacagtggaagactgactacaaattaggaaatgctaatagcatctgttgggaagaagagtgtgtggtggatcatagtgtaactgg

SEQ ID NO: 861645 - DNA, 581 bp, Homo sapiens
ctctttcatgctctggagactccagaaattctcaaggccgagactttctaggcattcaggtcatcgtgtctaaatgaattccttcttacctcctccattatattttctttaaagcacttctatcttctggaataaatgaaattattgttactctgcttattttacattttcgaccactgaaatctcttgaaggctgagactttatttcatgattgctgtattttcagggtccagactatactaggcaaatagtagataataaatatttgattaaaaatgttgcctaaataatcatagctagtatacaaatcatagctgaatttaagttcaggctaagaaaagataaaatacttaaaatgattgcttccttattgacaacctgattttatattattgaaaaaaatactttatcacacttcaatycttctcaaaatgttcgatatggtggaatatgaacacttctgctctttgaatatctttagttcttcatggaagaaacagtggaagactgactacaaattaggaaatgctaatagcatctgttgggaagaagagtgtgtggtggatcatagtgtaactgg

SEQ ID NO: 861646 - DNA, 665 bp, Homo sapiens
aagctaagataaaagtcggtgttattgaacttgggggcatgaaaaatttagtgcatgtgggaagacaaggaagggatcaacactgagaatgtactgtaggggaggcgttctgcaaacatttgtaaaagcaatgtgtgttaattgtcgtagagagacaactactccttaaccagttgtttttgctgatgatgaatggagatgtttaaagaactatttcaaaagcaataacagatttatccaggagacaaaggcatgtgcattagtgctagggtttcagtccaaaatgggggaatttcctaatagatatcacagcccaaggaataaacagtataaaatgactgtrgacgtggagagtttcctgtggctatggaaacctctgctgacttcttacaactttggaagattcaaagaaagtcttaaccattattttacctaatacagtgagaaaaactgagatatttcacagaatggaacaaatgatgttaagtttatatttaaaagagaacagtagatttaaagctgagagcctctacaattaccaatactgcttaccaggtatgtatacatagaaattcagatgcaaaactgaagagagagaccatgcttttagatacagaacatagcccactgaatatagaaggggtggtgagaaagcaaaaataatg

SEQ ID NO: 861647 - DNA, 645 bp, Homo sapiens
catagggtatacatctggagatccatcttagcatttttttggtaactaagcatgtactctttgtaggtaatagaggtttttaaaaattgtgtgtatgtatgtatcaaaatgaatcaaaacaattaggataaaaatagcttatgtaaaggtccttggtaagatgatagcaaaataaacattctgaataaggcatgtcagagtaaactgtagttatttttgtccctcaaaagcaaattttctaatagtggtrtacatgtggcagatctatttctaggaaagcaataaattgtgttgaaaagagacaagacatatgcctcactcatgactactagtaagaaataataatttctgcatgaccagtcaatggtcaaaagatataaaaggttagaaagaaggtatttggataaacaatccaaggatgatatgttaatgcagattctttaatctatcatgtaggttaaatacatttaatgtatactattttggctatctcttgctatatgataagccactccaaaatttagcagcttaaagaacaataatgacattattgtgcagaagtctatggatggattgggatcagctgtgcagttcctctcattcgtgaagagttgttaggggctgaagacaactgagtactcaagt

SEQ ID NO: 861648 - DNA, 608 bp, Homo sapiens
tcaaaaaatagcaaagtcacttttctgaagaaatataatcatctgcactctgcagaggcaaggcagctttaagagctttgacttgcatgttggtggttcagagactctccagcatggtggccagttgcctgctctcatgccataaagcaaaatctgccaatctggcttccaaagaacacaaatggttatccctagactagtcaaatcaagtataaaatgtgaaagagtgaggcaaatacagaaagagagaaaaaaaataaccacagaggaaatagaaaacacaactaataggaaatttctaaaaattaaaagaaaatacaggaaggggaacgtcacactctggggactgttgtggggtkggggggagaggggagggatagcattaggagatatacctaatgctaaatgacgagttaatgggtgcagcacaccagcatggcacatgtatacatatgtaactaacctgcacattgtgcacatgtaccctaaaacttaaagtataataataataataaaaaaaagaaaatatttcataatagaacactaattagtattctagggttatttgagaaggttgcattgataatgcaaaaataggacactaaaca

SEQ ID NO: 861649 - DNA, 657 bp, Homo sapiens
ctgcattatctcctccatctgtccaggtcctacctgttatttctacacctttggcctgatatagctccatgcttcagcaaacatacagctggcaaattatcctttaaaacttagttcaggccaggcgtgggggctcacgcctgtaatcttggcactttgggaggctaaggctggtggatcacgaggtcaggagttagagaccagcctggccaacatggtgaaaccccatctctactaaaaatacaaaaattagctgggtgtggtggtgggcacctgtagtcccagatactcggggkgctgaggcaggagaattgcttgaaaccggaaggcggaggttgcagtgagccgagatcgcaccactgcactccagcctaggtgacagagtgagactctatctcaaaacaaaacaaaacaaaaaaacagaaaacaaaaacaaaaaatttagttctggcattatctgatttagaaagctttctctgatccctgtacttcaacaatgctcccctatctgtataattgccctaatattgtattgacatcacgttttatatatttatgtttcccagaataactgtgtgtaccattaagtcagggcataaataaactttatgtcctttgaaattaacagagtgcttggtagagagtagttcttagtga

SEQ ID NO: 861650 - DNA, 620 bp, Homo sapiens
gacggggagcttaccacctctcatagtggctcatcttgactgagacagttccaaggaggaagctgtcctcacacagctgccagctgccttcctgccacttctactcatgggtttttattcctctaaagggcacagagcgcagctgcattccccatcactgctagctttcagagcctgcctgttcctgccctgcctcttcccactgtctctcgtccccacgtacctaggcatgagccaagtctcacgatgaccagtgacccactgcctcccacaccaagtggccttggggactggcccaaggctattttggggttttccctgrtcctcctccttccacagcctagaaactgccaaggccctaaatatagaggccccgaaagtagccagacaggccagtggcaactggctcgggaaaggagaaatgagagaggtgggcagcctaggggcctcaacactagcgaagaaggaactgggcagggcttgggtcccagcagcccactggggaccatggttgggcccaggtccttaaatctggcctcggcctgctctcaataccgtcctcttgccccacctctgatccagccacccggctcttcatagtccttgcacaccaggactcg

SEQ ID NO: 861651 - DNA, 399 bp, Homo sapiens
ggcctagaattccatttctaacgtggtttaacccagcacttcccaaactcttttgacagggaacccttctcttccccaaggagcttcttacagaacaggtgttctcaggaacacattcgaggagccccctgctaatgagagccagagagcccctgggttcgcacactccaatgctggccatctgaatccggagctgtgggtgggaggggaccctgagccttgggcactagagggatggcatagaggagcttctagaaggackccatactgtgtagtactctaggttctagcacctgtggttcttgagcacttgaaatgtggcttgaggagctgaggggttttttttgtttaattttttaaaacagggtcttgctctgttgcccaggctggagtgcagtg

SEQ ID NO: 861652 - DNA, 681 bp, Homo sapiens
actcccctgccaaagaattaatgtaagactagctgcaaccaatgccacaaggcaaggaaaataaataagaggcacaacgtttataaaggaagaaataaaactgtcattacttgtaggttccatgaatgtgtatctatcaaatctaaaataattctcaaactattagaattaatgagtgaatttaaatgaggtcactgtatgtttacgtgcaagaacaaataaactaaataagactaaaatctttgcctcatgcctcaaagccactgcccactccataacttggcagataatgttgtcttatactacagaaaaatgaggccctgaggtttgaactcccacaacttcctgayctcatgacctcaaacttacctaagttggcccccaccgtcactgcctttcctgtattcatacgggcacatccttttcccttctcttacaaaccagcccttttctctgtgcttttaagtctcttctctcccatctctgctagaataaagagagcttcctctgatatttctctttcttatgtgttcaacctggcatcttctctgtagcctttaaagatactcaagctgctattacctcaaaaaacagaacaaaacaaaagaaaaaactataacaagtcttgacaaaccccgaaatcacctctagctatcgtattttcaaaagaacagactaaac

SEQ ID NO: 861653 - DNA, 625 bp, Homo sapiens
gttctccttttaagattaactcaaaggagtgacaaactttgaatcaccaaattctttcctgctgccagtgagagttaaggataattacacagacatttgacatttgcttcagagaaggaaatgttcaacgttaatagttaaatgaaccttttattttcttccttgaatcttgctgtgtttcatgaaaggaacccacatggtgatggcttatacatttatgaattatattctaagaacaaatacatacttcatttctctgtaaggggaagatcatctagaggatatgaagatgatgcagatgcaggctggggaagggtttaggtcgtctcacctggaaaaaggggtaaataacaggatgcctcagagggtgttaaggggatgaaattacttaatacacaaaaagcacttatcagtgtgccttgcacatagcaagtgctcagtaaatggtggtggttatttayacaggtgcgttcctccatctgagtcctcatgctattggccacttataccctgaattgcactttatttttatggccagtagccaagcaaagagactgttgacacttagctggaaaatacaattatctgtaaaagatgtgtggccattctggggtttataaggagg

SEQ ID NO: 861654 - DNA, 630 bp, Homo sapiens
gggagtggcttcacttagctgaatttttatgaatgattacttctttaagctggatttggtgctttatattatagcctaccatgatgctgcccaaaaatgtatcataaggttaaaaatttcctagatagctagttgtctgtatatctttactacagtcagttgaggaaccagagaaattatatgagaaagaataaaccatggttaacattttttatagctaaatttagttaccagcaagcctggtaataattttgtttgggasacaaactgacatattcatgtagtgtagttataagtaaggttgcttctatcaagcagaatctaactgtatttttactgactgattgtataaagtatgcttactgtctgaattccaagtgttaacctggtatttggctatggaagtaaaaattgcatagacaagacaaaggactactaataagagtgataatttgagacactttgaagtaattaagcacgggagcattatactgaaaacaaataaaccagtgaaagaataatagaaaaataaagtttatttatgttacattttaatttttgttagacttagatttcacttttcttgttactttactttcaactcgcaaatcattttgtaaaacaaataaa

SEQ ID NO: 861655 - DNA, 560 bp, Homo sapiens
tgcataggaaaacgttttcaccagaggggttgacctgattaaatatctggagaaattgtcagtatttatgccaggaaagaggtaaggaaggaactgaatcaagatggtcacagtgagactctattatggtaacttaattgttaggaatactttaaaaaccaagtatacacaggttgtttttaaacctaacatgaaaaatggttaatatcatgagtttgactttatttctgtacctaattataagtcttcaatggttaaaagatacccaggaaggaatatatgccattccaagcaagatgttggtgcgggtggggatcgggtttactatcttggtgtrctgaggttggttaccaaccagagagagtgggctgggatgcagaaactaattcttactcatgacactgatgagatttcctgagccccacctgtagtctctggaatagtaccttcatttccaaaaaggctagtctcaaggccttgagtacttctattcaacttgcagataagctaattcttctatctgatttgaaattactacatccttgccaggctaaaaccgt

SEQ ID NO: 861656 - DNA, 567 bp, Homo sapiens
catcatcagttcctgcagatctgaattctgcaaagctttctcctgaaagaaaaaataccaccaaacaaatgggaatgctgaactgaaaaccatataatacacagtatattaaactgcaagcataattttactgacttttctccactgacttgacattacttaataatgtttacatactttaaaccctatcgaactacacatttatttccacactgaagtctagtgatactgaaataaatagaaatcgaactgaaagtacctgacggtaccattttcatttgctcatgcttttagtgtgggatctctcttagctctagatcctacaactggytaaaagtactcctctcaagactttttgttcccacagctagccagccaagcagacaatacaataagaaatagggctagaggttcttgaagagaggcatattaaaacagtggccctttaaagataaacatgttacccattaaaaaaatcagaggtaccaataaagtattatgaaaaatcctacatctaatattcaggatgtacaacacttggtttagccaggcactttaagaataaca

SEQ ID NO: 861657 - DNA, 567 bp, Homo sapiens
catcatcagttcctgcagatctgaattctgcaaagctttctcctgaaagaaaaaataccaccaaacaaatgggaatgctgaactgaaaaccatataatacacagtatattaaactgcaagcataattttactgacttttctccactgacttgacattacttaataatgtttacatactttaaaccctatcgaactacacatttatttccacactgaagtctagtgatactgaaataaatagaaatcgaactgaaagtacctgacggtaccattttcatttgctcatgcttttagtgtgggatctctcttagctctagatcctacaactggctaaaagtactcctctcaagactttttgttcccacagctagccagccaagcagacaatacaataagaaatagggctagaggttyttgaagagaggcatattaaaacagtggccctttaaagataaacatgttacccattaaaaaaatcagaggtaccaataaagtattatgaaaaatcctacatctaatattcaggatgtacaacacttggtttagccaggcactttaagaataaca

SEQ ID NO: 861658 - DNA, 608 bp, Homo sapiens
ttttacagacagtgtttaaggggaaagggttaaacattctcccctaccccaccctactccggaggaagatgctgagtagacatctcttctcccaaagctgaaagaaagatgcttctgcctgcacccatatttcttcccaaggagacacaattwtctcccccacttcccttcccagcgagcaacaagacaacactggccctgatatacgggcggccggcgggctccctgtgctggatgaggacacatctgagagctgccgtccctaagtcatctcccctccccctcgcctctggggaggaatctcaatgaggaaggcaaagccaaggaggctgggaaatcctggacaggtgcccagcttctccatccatccaaacctaggacccagggcttgacagtccctcccccaaaaagtaggattaggacccagaaggacctaatagctcctgcctgttcctacatgcttgttccctgattcccagctgttcctacctcattcctgaccttccattccagccatagtgagcagctcagcatcccatccatcctccatgcctttgcccagtctgtgttctctgcctggaatgctgcttagtatcttggacatctgt

SEQ ID NO: 861659 - DNA, 617 bp, Homo sapiens
agccattaataatagcagtaccatcgagtgtttcgttacttagcaatttgcaatcattaattagtggaaattgcagattggggccatgaaaggaggatggtgagattaagctcgttttgaaatcaagttaattgagtgatggagagggatggctctctgctccggagcaagagccccttctgtacctgctgagccagcctctggccttggaccagggctcagtttccccatgagtgaaacaggaaggtgatgaatggagatgccttgggctgggtgaaacaggagcatctagaaagatagacattggccaggcacagtgctcatgcctggaatcccagcactctgggaggacaaggcaggcagaytgctcgagctcaggagttcaagaccagcctgggcaacatggtgaaaccccatctctaccaaaaatacaaaaaaaatagccaggcctggtggtgcccacctgtagtcccagctactcaagaggctgaggtgggaggatcgcttgagcctgggttggcagaggttgcagtgagctgagactgtgtcactgcactccagcctgggatacagagtgaaactctgtctcaaaaaaaaaaaaaaggaaaaagaacaaa

SEQ ID NO: 861660 - DNA, 623 bp, Homo sapiens
cacagtctctccatgaaattctttcagagactaggctgtcctttwcataaaagttaattcctcaagaacaatgacacagttatgcactgggtgctgtaggaaaagagaacatacagagcggtggtcctttagccatattaaccaactatagtaatccttatgaatcattattcccattttaccattgagaaagcttaggttcaagaagtccccacagttactcagttgtggtgcaggatgatctgacagcaaacccaatgttcattctcctatactactcttcctttcattaagaaatgttccttctctaatgaagatcaaacaatgattgtagcagaactgctggtgccctacccggatccttttacctagccagagggcccatcacccaactgctgtgagtgttgcctaatgtccatagctgcccctttctccagagaattgccagccctaacaggaagctcaaagcttgggagattatgtctttgcccttcccaagggcagccaatgacaggcaacgtagggtacaaaatatcagtcccctttcctcaaggtgggacaaatctgtaatgccgttaatgctccagagtcttctgtggatcaggacaagcataggttttatc

SEQ ID NO: 861661 - DNA, 625 bp, Homo sapiens
agtgagacttaggccttccaaaagatcttccacattggagtagaaaacagacacaatgttttccctgccttagttttcatttcctcataacatggaaataattccatctgtagctgtacctagaatagacgaaattatggtgccccgttgcttgtggcctaattaaagtagacgaagaaaagagaagtaagcatcaatgcaagctgaaacctgaaattcaacagtccaaaggtcacacaatggcacagactaacaataagcaacaaagtgcgtrtataatctgtgtcacagtagtgattataactaagtggtgagagagaatgaaaaaatctgcttaggacaagtctcagaattggcattctgtcttcggaagctctttaataactgacctctctcttgggtagcagagcggaccttcctttttccttttgccttgggctctgcctcccctccagtcctttcatcctcttgactgtcacctccctaatagccacactggctggtttcctatgagccaaagcttccaaatgtccttcggtgctggagaataaagcatttgacacagacacacgttgtttgtgtttcctgggctgctaataataaaagttgccatcttgttgtcctc

SEQ ID NO: 861662 - DNA, 552 bp, Homo sapiens
gtacccagaacttttgccaatcatttaatgtaaaaatagtaagttgtagaactttctattgcttggaggaagtttagcctcctccatttaaggctcagggatctttaggttcacattgaccttcccagactaatttcctatttctttttacagaaacctacccttcaggcacatcaaactatttgtggttccctgaatacaccaccctctttcctgcttctccttgcaaacyccattttctctgccttcccccaatcttatcattcaagtctttttaaaattagaaatgacataaatcaaacataaagtggctgaagcagaaaaaaatgtctatttgttcaaataactgaagaatctagtgttactggcctcagatatggctggatccagggactcatattataccatcaggactttttgtttttgttagatcaatttccctttgtgttggcttcattcttaagtatagtcattcttgctaggggcaaggtgatcaactgttctgatatacctccatccattgtagcaacaccaggagaaagagaactcctt

SEQ ID NO: 861663 - DNA, 641 bp, Homo sapiens
cccaagtcattacagtggcctattgcactctacaccacctggctcttggcttcctctctcatcttctgggattctccccttgtcctctctgctccagccatgttggcctcttgctgctcctcacacctatgccaggcacgtctctgcctcagggcctttgcacttrcattccctccaccttaaacacacttcccttagagctatgctggccttgttcttttgcctccttcaggtgtttgctcaaacatcatctcattgagactttccctgaccactcactatatttaaaatagagggctggatacagtggctaatgcctataatctcagccatctgggaggctgaagtgggaggactgcttgaagccaggagttggagtccagcctgggaaacttagcaaggccccatctctacaaaaatacaaaagttagctgggcatggtgacacacttctgtaattctagctactcaagaggctaaggagggaaggtcatttgagcccagggatttgcggctgcagtgagccatgattgctccactgcactccagcctgggtaacaaagcaagaccccgtctcaaaaaaatgaaatagcatatatgaaaaacaaaaaaaccttcctactctagtacaccctattcacc

SEQ ID NO: 861664 - DNA, 596 bp, Homo sapiens
agcaaactgaattaaaaagcagtggttgaagtggcaaagatgcatgaatcagagagcttggtggggaagagatgtctgcacttgtgaagtaggttcttagaggtaaaatggggaaagggaagggtctctcagtgctactcccagcacatctactttgctccaaagcaaaagtcctgagaaactgggtaaaccacatttctggarcccaactcttaatgtcattgttaccatatgttcaaatgggttttattttcatcatgactgatttccagtcagcaaggacttagctttaattcattctccatcaccatttagaatcactgatctgatcctgtgtacctacaacatctcaatggcttccaaggctcttaaaataaagacctgaatcctcaccatggggaccttacttcacctctgcagcctcatctcaagccactctctggttctctgctccagccacaaaggctttttccaagttcctcaaaagcagagtgcctcacctcttctgctgcaggacctgtgtgcatgttatttttctctgctttatctctcttcctttctaggtaatctcattcagtcttaaggttttaaatgct

SEQ ID NO: 861665 - DNA, 588 bp, Homo sapiens
attatgatttgaaataatttgagctatgagttctttaactgcaaaatgtactgtatgctattaatcagaagtaagctttccttccccatcacctccatttttgcgattaagagcagagcagaaggagttaggggattccacttgggataagtactaggtggttttagcaagcacagccacctcctgaataccaactaagctgcctgtatgtctggaaaagtttggaggacaaaagttgccatcagatgcagataagctggctcagtttcagtgttattttgtatttgtttccctttccactttatagacataaactacatgaagactctcttaggttttaaaatattccaggaaactaacatyatcgcctcttcccactccccacttctttgcccatacttccccttctggtcctatgtcaaggctgaagaaaatagccagatgttgagacttgcaacaaattctctttgagttaattatggtcagagcccagtattaggagctgggatgagagatttgcccaggagatcaggagttattcacaaagcacttttgcctggatggtctggtttgattatcactagggaa

SEQ ID NO: 861666 - DNA, 646 bp, Homo sapiens
gcaacatgcctagatgctgggttgcagcagagaaagtcttagttgtaaggctgccaagtgaggagataggaggaaagctccaatccacctccatgaagaatttggatctagaattttaaggagtttggatgggtagtgggccaaggtgttgattggtcaaagagtacgggctgaagtcgtgggacgggaagctgaagaaaccgcattctcatgctgacttagctccttggtggaatcttcagactagttggcttcaactgttctgaaaacatctcaaacagaaagtcttgggctcctaacatctataggaacaatgaggaagttcatggtttatgtcacagcctatgtggtccataagtagctacarggaagtaggtcaaatggcaacctgatcaatgccctctctgtacctttatctaaagtctggcatgtaattctcgttaaccctgtggagatggtgttaacagtgcagtcttccaggaccaggaggggaaaaggggcacataacctctttgggctgtccaggcggatggcggcatttgcaaggctgctgggaagagagatggggccagcgctggaattggcttcagaggtagtggctggtcattaatgagatgccaaaatgggggcgtacaagggatcaagc

SEQ ID NO: 861667 - DNA, 632 bp, Homo sapiens
ttgggtttatggcccaccctgatccagtatgtcctcatcttaactaatgacatctgcagataccttatttccaaataaggtcacattctgaaattcctggtggacatgcattttgcagggggtactacttaacccactaagggagtaagcactttctagaccacattttgagcagaatttagatggttctattctctgccatcaccactgcatgggtgtagaagggggcgggaagggtcccctggaaggtgagtggtggtgttttttgtttggggagctgcactacctccagctcaatcaaaaagagcagatgactcaccggatggttttgtgctgaacaaattaaacccgtcccatcacagcagagcagttcagccaactccatgctgaacttgtgcccatatcatacatttcataatcytaattgtggcttgcatttcccttttgccttccaaaccaaaggctcatcataacagatctgcaagccctgggagttgggtttgtttgcctaggtatttggttttctctcttttttcccctaatgaataattttctaatgaaagcaaagtagggtcgcagtatgaggtagatgcatgcacgaaggagaagaggccagaataaacagactttgc

SEQ ID NO: 861668 - DNA, 641 bp, Homo sapiens
tttagcgaaaaaaggtatttttttaaaaagagtctaacctatgaagtattcttgccccctcaaattgaacctcaatctagtcaggttacagatctaaatagaaatgagggatataagaacagctaaacattgccatatgagtatgatggccaaatccataaggtaggacatcctgcagcataaatgacctcgttttaaaaaaaaaaaatggcaaggcgggaaaaagcagacgatttgttaaagattaaaagagacttaaaacgcacatcaatcagatacaatgtgagagtcttggttggaatctgattctaacaaaccaaatataaaaaggcatttttcagacaattaggaaaaaytgagccaggcataagatagtaattattaattcctgttaattttgtggggcatggtactttatctgttagggacacatactgaagtattaaagacaaactgacaagatgtctagggcttgctctaagatactgaggcaaaaatgcggggagtggttggggaaacagtattaagttgatggttcttgaagctcagtgatgtgtacacgagggttctttatactatttcctatactcgtgagtcttgaagttttcatgataaagttttttaagaaagtccactggaaa

SEQ ID NO: 861669 - DNA, 786 bp, Homo sapiens
tctccctatgttgctcatgctagtcttgaactcctgggctcaagtgattctccagcctcagcctcccaagtagctggaactgcaggcatgcaacaccatgcctggccctctttcttctattttaaagaacccttgtgatgacatcaggctcacccagtaattggggacaatctccctgtcttcaagtcagctgattagcagctttaactcctctttgctgtgtaaggtaactgtattagtcaattttcatgctgttaataaagacataaccacgactgggtaatttacaaaggaaagaggtttaattgactcacagttcagcatggctggtgaggcctcaggaaacttacartcatggcagaagaggaagcaaacacatccttctttacatggtgatatggtttggctgtgtccccaaccaaatctcatcttgaattgtagctcccataattcccatgtgttgtgggagggacccagtgggagataaatgaatcatgaggcagttttccccatactgttcttgtggtagtgaatgagtctcatgacatctgatgattttataaggggaaacccctttcacttggttctcattctctctcttgtctgctgtcatctaagatgtgcctttcgccttccaccatgattgtgaggcctccccagccacatggaactgtgcgtcctttaaacctcttttcttaataaattacccaatctcaggtatgtctttatcagcagcatgaaaatggactaatagacgtggtggcagcaaggagaagtgcagagcaa

SEQ ID NO: 861670 - DNA, 528 bp, Homo sapiens
ctagtaaattacatgtttcccagaagtggtaaatgaactccagaaagatgacagtcctgccacatcaataaggacttgcttcctaaaacaaaggataggttattgttcttcacaaatcctaccactaaggtagagtcatagacatagaacttagtatttttttttttttttttaacaatcagaactatggttctagtgcagtgcaaacttccctggacattagccacctggctgttaaatatagtggtgtcagaagtatccaagatggataaagatgttgcatgtatttcagggtcaggccatctgcagaagagaactaarcactctcggaaaaccacattcttatgtgctacagagcccagcagaaaaagaaacactgcatgtggaacatctgttgactatacagaaagagcaggtatccaggagtgaggtcaaacatatgcaatatacttttattgcataattgaaatggtgcatttggatttggaaattcgcaggtctagaacaaaaaataatttacgtgaagag

SEQ ID NO: 861671 - DNA, 593 bp, Homo sapiens
agcaggtgagctaaacaagcagactctgatgatttgtttacgtttggtgaagaagggaaaggatgattcatgtgagtaagtttctgccatcaaggattttagcacaggcttaaatagaataagaacagcagtctttccagattgaggaacytgaatagtgaaggcacaaaactctagtcagtcaagagagttgaaataatggccaaaaagctcccaaatgtgatggacagaaatttacaaatagaagaatctcaataaatgtcagagaaaataaacacaagtgtgcacacattgaggcttagtataatgttgaaagtcaaagaaaaatgaaaatattaaaattggcaaaaaataaacccatgttacacagaacgggacaataattagattaacttctcattagaagccatagataccaaaataaggtgaatatatatatatgtattgtgtttatgtttagtgatgaagagggatgatgagtcctgtgagtcagtcagtcctgtgtgaaatatatatatatatatatatatataaataaggtgaatatatacacacactatgtatacatattaggtgaatagtgtatacgtatg

SEQ ID NO: 861672 - DNA, 630 bp, Homo sapiens
ttattcttgtttttaagattaataaaattttaaacacaaattttcttatcaaaaacttcattggggaagaaaccaagttagcttgaatgtttaagcttccatggctcataaaggtacagaacattcatcttttcctttttcacgataaacattatgtaagttttaccaaaccatgatgagtataagaacagggaatataatgctgaagtatccagagcctacagctgctttcaaattcatccaaggctcttatttgaactatgttttgatgttgagccaaggaagggttcagtcaagcaatttkgttatgagggccagtaatttgaaccataaattactgaatatgaaatagactacatgtgtaaaatgtcacaagtcctccattaagtaagactttgaaatcaataacaacctaaaggaagagttttaatgaaactgggccctgaaataccagaatataccatacccaaaacagtaaaataaatgttacactctgtgcttccttctgtgaccctgtaatatcgcaatatgacttttgtgatgattgttcactaccaaaatgtggtgattgttaatattttctcttttattttggaaatgtctatttatttgagtatgtaaaagtgctgc

SEQ ID NO: 861673 - DNA, 685 bp, Homo sapiens
aatctcaagttctagtttgattgtgctgtagtctgagagactgctatgatttcagttcttttgcatttgctaaggagtgtttcacttccaactacatggtcaattttagagtaagtgccatgtggtgataagaataatgtatattctgttgttccaaggtggagcgttctgtagatatctatcaagtccacttgagttcgggtcctgaatatctttgctaattttctgtctcaatgatctaattttgtcagtggggtgttaaagtatctcactaatattgtgtgggagtctaagcctctttgaaggtctctaaaacctgttgtattaatctgggtgctcctgtattgggtgcatatatatttaggatagttagctcttcttgttgaattgaaccctttactattatgtaatgcccttctttgtctttttttatctttttttggtttagagtcttttttttcagaaacgaggattgcaatccctgyttttttctgttttcaatttgcttggtaaattttcctccatccctttattttaaacctatgtgtgtctttgcacatggtataggtctcttaaagacaacataacaatagggtttgattttttttaatccagcttgccattctgtgtcttataattgcagtatttagcccatttacatttaaggttaatactattatgtgtt

SEQ ID NO: 861674 - DNA, 566 bp, Homo sapiens
ataaacttcaggtctttttaaagtcaaaatgtcatatttatcgtagtatttgtgtatttcataaccattgaacatgtgtacaaccatgctaccacttttattagcttcataccttttctttctttctttttcttttttgagacggagtttcactcactcttgttgcctaggctggggtgcagtgatgtggtctcagctcactgcagcctccacctccagggttcaagcgattctcctacctcagcctcccaagtagctgggattaaacgtgccagccaccacgcctggctaatttttgtatttttagtagagacagggtttcaccatgttggccaggctggtctygaactcctgacctcaggtgatccacctgccttggcctcccaaagtgctgggactacaggcgtgagccactgtgcccagccaccttttctttttgtaaaatgtattgctgataaagtttttggatgttgcgtctgtttgcctcataagtactgtggttttgttgtgttattgtatggcatggtgattttttaggagagcagcattcgtgttatggcagaact

SEQ ID NO: 861675 - DNA, 639 bp, Homo sapiens
tcatccttctcagtctaaaagaactacatatttagaacttagcggccaattatgagatataatttcatgaacaatctataaaaatgtttgcatttcttagaagtaatgaaaagaaaaatatcacattggggttacattataatttggtaaaaactgtatggaattgaagaattataaattgtattcatgtttaaatatttggttaatcagtgagccagaaagctaaagtctgctgttctcttatcttaccaagcatgacattctataatagagacaaacccacataaaattgtttaaatgctactttctatgatgtagtattcacaaatagcagatttggagactctctacattcctgtgtaaggaggcgctacccagcattgttctagtgctcaataaatatttgattaatgtcaaatagatgaagttcagaagaaattactgacatacttaattatatacttggctataaagactawtaaaaaaccacacacacacaaattattcactatatattcaaggtagttttatttacaaagaaagaaaatggacaaccaccttaacctttcatattagaatatataagtaaagacaaattaattcaataaaatatcatgtagctattaaaatatgtattga

SEQ ID NO: 861676 - DNA, 606 bp, Homo sapiens
gagtatgtatgacttttatattgggaggtgagactcaaatttttttttaattattcactatggttgagccctagtcatctttctttcccgtcatttgagagcagctcacagtattgtgggaggacaacagctcaaaccacaaaacctcatatgtgttttggcctccaacagcctggcaaccaagcaatgagagtaattacagagtgcttatccaatacccaccttgtagcggccatgggagacgtcattttccccttcctgccctggacrtggtacactgccggccagattctacaccagctgttggcttactctccagaggtatgaacattttaagggttaaaagaaagcaccactctatagcaactacatacctgtgtaatccatttgaaagatcttcatttagcatcaaggatttttaaaataggaaatctgtggtcaaataatttttataataattatttggagataatgtaaggaaaactctcacagttcagggattagagcaccctaactctgccctggtatgctgatgagcctgaatagaagtttaccaggcaaagcagaaacagagggatatttcagacggagagagctgtcaatgca

SEQ ID NO: 861677 - DNA, 606 bp, Homo sapiens
gagtatgtatgacttttatattgggaggtgagactcaaatttttttttaattattcactatggttgagccctagtcatctttctttcccgtcatttgagagcagctcacagtattgtgggaggacaacagctcaaaccacaaaacctcatatgtgttttggcctccaacagcctggcaaccaagcaatgagagtaattacagagtgcttatccaatacccaccttgtagcggccatgggagacgtcattttccccttcctgccctggacatggtacactgcyggccagattctacaccagctgttggcttactctccagaggtatgaacattttaagggttaaaagaaagcaccactctatagcaactacatacctgtgtaatccatttgaaagatcttcatttagcatcaaggatttttaaaataggaaatctgtggtcaaataatttttataataattatttggagataatgtaaggaaaactctcacagttcagggattagagcaccctaactctgccctggtatgctgatgagcctgaatagaagtttaccaggcaaagcagaaacagagggatatttcagacggagagagctgtcaatgca

SEQ ID NO: 861678 - DNA, 606 bp, Homo sapiens
gagtatgtatgacttttatattgggaggtgagactcaaatttttttttaattattcactatggttgagccctagtcatctttctttcccgtcatttgagagcagctcacagtattgtgggaggacaacagctcaaaccacaaaacctcatatgtgttttggcctccaacagcctggcaaccaagcaatgagagtaattacagagtgcttatccaatacccaccttgtagcggccatgggagacgtcattttccccttcctgccctggacatggtacactgccggccagattctacaccagctgttggcttactctccagaggtatgaacattttaagsgttaaaagaaagcaccactctatagcaactacatacctgtgtaatccatttgaaagatcttcatttagcatcaaggatttttaaaataggaaatctgtggtcaaataatttttataataattatttggagataatgtaaggaaaactctcacagttcagggattagagcaccctaactctgccctggtatgctgatgagcctgaatagaagtttaccaggcaaagcagaaacagagggatatttcagacggagagagctgtcaatgca

SEQ ID NO: 861679 - DNA, 606 bp, Homo sapiens
gagtatgtatgacttttatattgggaggtgagactcaaatttttttttaattattcactatggttgagccctagtcatctttctttcccgtcatttgagagcagctcacagtattgtgggaggacaacagctcaaaccacaaaacctcatatgtgttttggcctccaacagcctggcaaccaagcaatgagagtaattacagagtgcttatccaatacccaccttgtagcggccatgggagacgtcattttccccttcctgccctggacatggtacactgccggccagattctacaccagctgttggcttactctccagaggtatgaacattttaagggttaaaagaaagcaccactctatagcaactacatacctgtgtaatccatttgaaagatcttcatttagyatcaaggatttttaaaataggaaatctgtggtcaaataatttttataataattatttggagataatgtaaggaaaactctcacagttcagggattagagcaccctaactctgccctggtatgctgatgagcctgaatagaagtttaccaggcaaagcagaaacagagggatatttcagacggagagagctgtcaatgca

SEQ ID NO: 861680 - DNA, 639 bp, Homo sapiens
tctgcaagagtgctgggctaggccagggggcaacttcactgggacatcctcgggggatctccattggaagcagaccgagcagaggtttcaagatcacaggctgcccaaactttagccctggctctgcaccaacaaccaccttgcacccctgcatcccagtggggttgcttggtttcagggmacctgtgcttcaatatttactatgaattttgtcagttgcttagctttatggtaacagacaccccttattcccataccaccaccccaaacaaaacaaagagtaatgaagacatgactgggaagacactacaacatactgactaagaaaccaggcttcagaatctgaaaccaaatcagagttccacaactcaatttccttgtgatcctggacaggttctagaacatttctgttcctaaatttctcactagtaaaaaggtggataagaatagtactcacatcatgtagttgtcatgagcacggaatgaaatgatgcatgtatgaccttggcatagggcctgacacctagtaagagttcagtaaaggtttactattattataaaacaaggtactgcttatagtagtctgtatcatcacaaaatatggtagcattaacaatttgaaatcaaattaacattagt

SEQ ID NO: 861681 - DNA, 600 bp, Homo sapiens
agacatcatgatagtagccatggtagccataataataacggctactattcatagtgtaatggtgaaactacacagcctttgaaacctggatccaaaaatcaattccgtcactcaccagctgtgacaccatctcctctgtgattttccattgtctcattatcaaatgttaatactaatagcctctacctcctggggtggtaaacaagggtaaatgagataaggggtgtaaggtttcagctatgtgcctggccaattggaagcacttaataagtgtcagccattattatgacatgcctagagctttgcaaaaattatctcatgttcatgtatagctttatttcattcttacaataacagttctgaaataccaacgcagctctgtctgattcygaaccttgtccgtttcccacgacatcacaatgcccgcccccctgattccactccagctacacagacagggaaagggacaagaatgcataatttctggaaaattttttgtcctttaaaagaactggcagagctattaactgcccccagagactggttaactgtctagttaactaacacccaaaatgatgattaaacatccacacctcagcc

SEQ ID NO: 861682 - DNA, 609 bp, Homo sapiens
gccaggatggtcttcaactcatgggctgaagcaattctcccaccgtggcctcccaaagttctgtgattacaggtttaaaccaccgtgccccacctagaaaaaaataattaatagctaatacttaacaaacaccttctatgtgcctagcaatgattattgtggtagattgtgcattcatttgtttgtttgtttttgaggcagagtctcgctctgttgcccaggctggagtgcaatgatgtgatcttggctcactgcaacctccgcctcccgagatcaagtgattctcctgcctcagccacccaagtagctgggactacagatgtgggccaccatgtcaagctaattttttgtatttttagtagagacagggtttctccatgttgaccaggctggtctcgaactcctggcctcaaataatctgcccaccttggcctcccagagtgctgggattacagccgtgagcyaccgtgcccggcctcatatctgggccagcccctgagcatttattcatttatttaacagacacacgctagatgccaggcactgttctaaggatgcactttacaattattatttaaccctcctgatttatttgagagatagatacta

SEQ ID NO: 861683 - DNA, 675 bp, Homo sapiens
ataatattttaaactctgaacctctacacattatattgtcattgtgctatttacatgctgcttacaggattagaaaacaactggtagtggctgggccacagtggctcacgcctgtaatcccaacactttgggaggccaaggcaggtggattacttgaggtcaggagtttgagaccagcctggccaacatggtgaaatctgtctctactaaaaaaatacaaaaattagctgggcatgatggcatgcacctgtaattccagctacttgggaggctgaggcacgagaatctcttgaaccacagaggatggaggttgcagtgagctgagattgagctactgcactccagcctgggcaacagagtgagactgtgtctcaaaaaaaaagaaaaaataaaagaaaagaaacaactggtagtgtctggtaatgagrcataagttaaatgccacgcaatgagcatccctcacatctgctggagcatcccagtgaccatgtgcgtagctgcattagggaaccatgtcaaactctgttggcccatgaaagtgaagcccaagtccaaggtacagaccagctctgcactcgcagctgcagtcaaggactcaggactcaccatggctgtgatgcttgcttgtagggagacctcagatcagtctcagaaggcctcaatcccaaatcttct

SEQ ID NO: 861684 - DNA, 662 bp, Homo sapiens
atctatttattggtcactggttcagagcgtgtcccacactctttaggacaacacttagccataattgaatattcagtaagccatcctaatgttcggtaagtatggcaaaacctaacattctatcaatacggtgaatcatttgaattcaaccaactgttgcccaatgtcttttgcagtacattgagttccttagtcaaaaataatattgtttaatacgkcatggcaatgaatgagacatttagtaagtttactgatgatgttacttgcagaggcacggtgagaagggaagggaaatccctattttgaagaagtgtctaatcttatgaggataagttatctctttgatgatggaaggggttcaatgtaattatcctaccaccagatggctgactagtacatccagggataggtcaccctatcaagtgcttatgattggtcacttctgatggcaaactcaaatttgccaatagccaggtgagtcttagtgagggaagttcatgtcactgagtccatatgtgataatttctgtgctgccgccatgatcacttcgttatgaagccactgagcaagcaccagggtgactggagaaaacctgacacacacacagctggtcgttttatctacctaattattgagaacatactcaatggcgtgtttctcta

SEQ ID NO: 861685 - DNA, 635 bp, Homo sapiens
tagatgcatctgtctcatcgtgtttgaattatactgggctgatctgaccaggcatgaggaatagtgctccatttaggcatggagtcacccctagagcccggtctactataaaagacagctattggatcctgggagtgcccatgatgaagccaaaacaggtatcaggtcacacacataaggaatccatgggtrttgaaaaatattgataagatggacattgtgtcctatgatggaagtcccacatgagagcaaaggcagaacctaaggccgtggtcagaagtcaaggtacaggttcaaagtggatcccagggagcaggaaaggcaacagcagtttccttaagaaacaaaacctacactacaaaacaatggcaatatggtattgatcctggtatttttatatatatagataaggactgtgtacggaacatttttttggttttgggtgcccagaaccatttcctcttatggtaggtaatagaacctatctttccatctttcctgtggaaagcgcattcctgtggcttgagtgaagctaacctcaccctgccttgaccccacggcgggcacatggcccagacctgacctcacattcctccccaggatgctggatctccaaggtggttgattgtaagtcc

SEQ ID NO: 861686 - DNA, 607 bp, Homo sapiens
ctcgaaggatgaataggagttcatcacaaagtttccaatgaaaatcaaaccctgaaaacaaaaaagaagaggccaagtttatgaatacctccagtaggccaagatttcccaattgtttacagatcttacctataaaaagggattccacgactggmgcagtggctcacgcctgtgatctcagcactttgggaggccaaggtaggcaaatcacctgaggtcaggagttcaagaccagcctggccaacatggcaaaaccctgtctctactaaaaatacaaaaattagccaggtgtggtagtgggcacctctaatcccagctactcgggaggctgaggctggagaatcacttgaacccgggaggcagagtttgtagtgagccaagattgcaccaccgcactccaacctggccaacaaggtgagattttgtctcaaaaaaagaaagggattccaccatcaaaataaaatttagaaaatgctggattctgcaacattaaacagttttcttcacagcaggacttctcagaaccttcacatctcacagaatacatgccataggttaacactggttactccatgggcataaaactgcagtggaggatagtccgtgc

SEQ ID NO: 861687 - DNA, 630 bp, Homo sapiens
agaaataaaattcacccttcctctgcctgcctttttgttccatctgagccctcagctgtttggatggtgcctgcccacgttgaggacatatcttccccactcagtccaccaactcacacaccaatctcctctaaaatacctgcacaggcacacttggggcagcccaatcattctaatctaatgcaaaaccaccctggtttccctttcagcagaagtatgggctcagtgcctactgagtattgggaataattattgctttacctgctatccaagtattccttaacccagccaagtaggcaygcaaaatcaaccaccacagctggaatggtggttatgtagccattttcttccaggttgccattttgcaaccgcataaaaacatcactactaccattgatacaatctgtatgagtctatgtaaatattggctgtgcagttggaatctgccttcaccccttaaaaagtagatgttctcttcagtccaaattggatttcttcacacatataatctgcacaccttacatgctatgatgtatctttatactcaaagacttctacatttttcattttgaatacaaaataatgacatccagactctcatttgaagattcctggcagactagagcacca

SEQ ID NO: 861688 - DNA, 585 bp, Homo sapiens
cacacaactctccctcccaaataaacacaacaaaaaaacacaaaagtgtccaagcctccaacaaactctcttaccctaaatccttaaacactcttagtctgtaaaaaaatgtgcctctaccctaactcagccaaaagcccctctcaggttcgttttctctaaaataaacctgtccttaactgccaagccaccttttgtgtttctttcctctttctttaattcttacagggttgagtctactgatagkcctgtcaaatgcatacttcatctctgctaccatcacttttttttcttctggcattcccattagactcttccttacagcttccatctctctgttgacattccccatctagtcatgcatgtggtccacctgagtctgtttctgttgattgatttttcccctgacagtgggttgttttcagttgctcttgtgtgtcctgtgatctttgattgaatgtttgacatgtgtaagacagtagagactgaagcaagaagtatttatgcccggaaatgggcatgcctttccttctactacctgctggtatgaggggttgagttgatctagtgatgagttcaactggg

SEQ ID NO: 861689 - DNA, 585 bp, Homo sapiens
cacacaactctccctcccaaataaacacaacaaaaaaacacaaaagtgtccaagcctccaacaaactctcttaccctaaatccttaaacactcttagtctgtaaaaaaatgtgcctctaccctaactcagccaaaagcccctctcaggttcgttttctctaaaataaacctgtccttaactgccaagccaccttttgtgtttctttcctctttctttaattcttacagggttgagtctactgatagtcctgtcaaatgcatacttcatctctgctaccatcacttttttttcttctggcattcccattagactcttccttacagcttccatctctctgttgacattccccatctagtcatgcatgtggtccacctgagtctgtttctgttgattgatttttcycctgacagtgggttgttttcagttgctcttgtgtgtcctgtgatctttgattgaatgtttgacatgtgtaagacagtagagactgaagcaagaagtatttatgcccggaaatgggcatgcctttccttctactacctgctggtatgaggggttgagttgatctagtgatgagttcaactggg

SEQ ID NO: 861690 - DNA, 606 bp, Homo sapiens
ttttataaggggattttccccgttttgctcggcacttctccttcctgccatcatgtgaagaaggatgtgtttgcttccccttcttccatgactataagtttcctgaggcctccccagccatgcagaactgcgagtcaatyaaacctctttcctttatatattacccagtcttgggcagtcctttacagcagcatgagaatggactagtacaccatcctagtaggtgcgtactactgaatctttgtggttttaatttgtgcttccctaatgactaaaggtgctgagcttcttttacgtgcttttttgttatctgcagcagccagcctccaaaatgaaccctcaaatgatccctagatactgatattcacagtcctatgtagttttttcctaaatttagtaggctgtgtaacaaacagaatatgcaggaatgatggtgtgtcacttctgaggtcagtcataaaagccattggtgcttcctccttgatctctcttggctcacccaccttgttggaagccagctgccatgttttgaggatgttcaaaaactctatagagagatccatgtgacaaagcacacaggccacctgacaatagccagcacccagc

SEQ ID NO: 861691 - DNA, 576 bp, Homo sapiens
tctgccctggagcgacagcaaggactaattatcagaggagacactctgtgttactcctaggtgttgaggaagccctaatagaaaggaattttggaaaagagggtgtcctgtttacagaagtcatttaggggccctggtccattcttaagggcatcgtctgtacacaatgttctccctatctttctaacatttgggtccactaasgactaacttgcctttaactcgaggctgtagataagttggttataatgggagtagtcttcaatttttgagtccagaaaaagacagcatacaagtttctgctatcattagtgctcaatctgaatgaattacccacactggagggatattaatgctttaagtcatcatcctttcggcttaaaaaaaaaaaatactatctaattgatccctcactgagatcaatctctgagacagagaagcagaaagaactctgaaccaggattaacagctttctgtccaggcaaaccatttgtgtaagagctaccttaatgtggagaggttaactctttacgaaatgcattgtcctcatctgtaaaacgaggtttattaataata

SEQ ID NO: 861692 - DNA, 576 bp, Homo sapiens
tctgccctggagcgacagcaaggactaattatcagaggagacactctgtgttactcctaggtgttgaggaagccctaatagaaaggaattttggaaaagagggtgtcctgtttacagaagtcatttaggggccctggtccattcttaagggcatcgtctgtacacaatgttctccctatctttctaacatttgggtccactaaggactaacttgcctttaactcgaggctgtagataagttggttataatgggagtagtcttcaatttttgagtccagaaaargacagcatacaagtttctgctatcattagtgctcaatctgaatgaattacccacactggagggatattaatgctttaagtcatcatcctttcggcttaaaaaaaaaaaatactatctaattgatccctcactgagatcaatctctgagacagagaagcagaaagaactctgaaccaggattaacagctttctgtccaggcaaaccatttgtgtaagagctaccttaatgtggagaggttaactctttacgaaatgcattgtcctcatctgtaaaacgaggtttattaataata

SEQ ID NO: 861693 - DNA, 636 bp, Homo sapiens
cttgcctctgcttgttctctttattcactagcattatgcaaactgtcatcaatctattttaagattatgcctttcattaggaacaagtaataagaatttagctggcagaatttgtgtttttggagtttttttttttccattgctttacaattatattcttaagaattgctctgagaaaaacttttcctatgcagacctacgtgttaatactttttaagcttcttcattagttggtttcatatcatgtgtaaaggcaactcatgaaaatttgatttgtttctatcacaacaattatagatgacagagaaataaagtgttatttgttacttagaacttacgttataagtgaaactagttagtctagcccttttaccaagttcacatagttgtcacaatacrgaaatgtttaccaagttggtttaacaggatttttccttaaagaaaatacagttaacattggagagtgcagtgggaagcaaaaactatggagtaatttgaacttaaatgttatgatactaattgggctcagttacatactaatctttggcttatgccattaggcaccagtgaatgaggagagactactgccagtgaactttaacatcatctctctgataagtatctagctatgaactt

SEQ ID NO: 861694 - DNA, 667 bp, Homo sapiens
gagagcagacaccagccattctcttgggaaccagcatcctcatcttccctttcactcacgggaaaggagacatgaaatgtacaaaaccattctagaacattcttactggccttgccccagctgctaccaacacggctccaccctgtgtcccctcgaccccagccatgtcccctccgagtgtctagcagggcagtggcatcttaacctaccttctctaaagatggcggtaggcactggaacacagaagggaaagacaaaatgagcaggtggggtgggagtggatttccgagccctgtgcatatttaatagttcagtgcccagtacccacatgaatacgggtacacagttcactctcccatcaggctgaaaggcctcagtgggaggcaggccagaagaggggagtcagacagagctatatgacactgggcattacttaacctctctgaacctmggtctcttcatctgtaaaatggggataatgatagcgctgccttacaaggctggtgtgagaagtacgtgaaaaatagtctgggccaggcgtgatggctcatgcctgtaatcccagcactatgggaggcaggagattgcttgaggaagggagttcaagaccagcctgggcaacgtagcaagactgtctctattataaataaataaaacaagaaaagaa

SEQ ID NO: 861695 - DNA, 590 bp, Homo sapiens
acttggattctcacttctgaagagaatgacttacacatcctttgaggtcagaacagggctaagcccattggaggcacacaaatttattgaatatgtgtggctctcactctatccttagctgcttggaaattgacacacagtgcattgattttggcagaaggaaaatgggaatggggaagcatttagagaactcayaatataaatgatcattttaaatgtattgccttttgactgggccctctggtatatggaatatggtaattatactaataccagagtttggaatgagataagatacctaaaaccagcttgtttgccatttagaagatttgattaaaaggcccgtggggaagatattccacttatttctgcaaccaaaataataaacaaactgtcccacttaacttctttctttccattctaagctttcactgccatacagttatatatatatatatactatctgaattaaaattttccctggggctagtctgcatctttccattttgttctttctaatttcctctactcatatttctctatcatttcacgatgctccttaatctcctattcagatgggctgcaccaga

SEQ ID NO: 861696 - DNA, 624 bp, Homo sapiens
tctttacacttgcctcccatggaatctcctatgtaacaggctcagcccggtgactgggacattgagcgggggctcaaatgatggcatccatccacctctccttatcccaggagctgtctgtgatcttttcctcttgctcccacaggcctcaacacctcccaagcacagagtgtccctgtcatcaacagtgtggccggcagcctggcagccctgcagcccgtccagttctcccagcagctgcacagccctcaccagcagcccctcatgcagcagagcccaggcagccacatggcccagcagcccttcatggcagctgtgactcagctgcagaactcacacagtaaggacacgggcatgtggagggagggagcactcaggaccctcagtggccaaccactttccctctctgggtctgaactttctcggaagtttattggcttggtcrcttttccctgcctatgatcaaccgactaagacaatttctcaagcataactcttgagtgttgctgtaccttttctagtcctcttctctacccctgagattcccagggaagggtttgaagaggacagtgtaggcctacagatgaaggggaattggagccagacagcatgtggaacacacac

SEQ ID NO: 861697 - DNA, 646 bp, Homo sapiens
ttcgaccacttatttcccatccaatcccatcctctgtttctctgcctttcatcctgagtcccaggcttccaatcctctggccaggtctggctatagcccctgacacaggagtttggggaggaatcatggcttctctgcttcagaaaccccaaggaagtgttcagtataaagcactagtcttagatcagacagacctggatttaaatcctggctgtgatacttaccagctgtgtagcytaatgcaagttacttagccactctaagtccaatctctacatccataaaatggaaatagtatgcatttagagtcattatgaatatgaaataaacataggggtaaactgcgtttggtaagcataaaaaattataaagattatttataaagggactcttagaaggcaatgatggtgaaagaggtttgtgtttcttccctagctgcatcggataagctgtgggtttgggggagaacagccaagtccagccttctatcttcagggctcaatccccactcgggcctgtggagctggtttctgagcaccatctcacattccaatcacattttagtggcttctgaaaatctgccacagcctgtagcagagtctgagaccacatgtgccccacttcccttcctcccagagcctggtga

SEQ ID NO: 861698 - DNA, 514 bp, Homo sapiens
attttttttaacgattagagagaaaaacagtatataaaagataaacaaagagtcaataaatgaataattgaaaaccccaaagaagaaaaacaaaaacaaaacaatggaacagaacaaaagaggttgcagtgagccgccgagattgtgctactgcactccagcctgggcaacagagcaagactccatccccccmcaaaaaaaaaaaaaggaaaaaaaaaaaggctagagatgaatgcagactctgcatctgcagatttcctttattacaacagaattccaccaatagccttggcctatttatttattttcccaacagccctggcctttaacagggccagctcctcaaaaatggctggaaacattggtagtcttgacagaaagaaacacagactttctagatagttaaatgatttttaacatgccaagctctcaaatccagagtacaaaagtgtttccaaatgatgagaaataaatcagacagtcacttatgcaaattgtcattgacaaattttat

SEQ ID NO: 861699 - DNA, 642 bp, Homo sapiens
ctgctccaagaggagaaaaacattctgttgctttccttttttataggacaagtgtgcaagtggctttacatggctgaataaacatttggggttcaggccccaagcattcttagcttaggtgctgggtgttaggggaatgttggggaatgccagctgcccacacctagggatattagggggctctggttctatgaggtgttgagttggaacgcagcttttctttgggggatggagaagggaagtcccagtatcagttagttcattatcagggaaccctgaaacagctttaagggtagttgaaattacaagacattcttgcttgtcctcacaaaagcacttccgctcctcaaagtgcargcctgactcctggctcatggatccactccggagaatggggaaaggctgttctcacacttctgtgatgccactttattcaggccttcgatcctcggatatgttgaagcttgggggctggagataaagaaaggggtttaaagattttctcttaacggattaagctataagaccttcattggctggtgatgactgttgcatagctggtgtttaatgctgcctccttgtggaggcataagatgtcttctaacatgactcttttcaacttcagcctcagtccccatctct

SEQ ID NO: 861700 - DNA, 478 bp, Homo sapiens
ccacttttccctgaaggctgcctcacaaagattggaagagaaaagctgggagaccatttctctaactgtgaacactctcttgcctgaggtgactagcagctcaaatttcaattcatttctgatatggtttggttctgtgtccccacccaaatctcatctcgaattgtaattaccaaaatcaccatgttatcagggacctagtgggaggtgattggatcatgggggtggtctcctccatgctgttctcatgatagtgagtgagttctcacaagaactgattatkttataaatgtttggaagttcctccttcctgcttctttctcctgctgccttgtgaagaaggtgcctgcttccccttcctccataattgtaaatttcctctggtctccccagccatgcagaactgtgagtcaattaaacttctttcctttgtaagttatccagtctcaggcctttccttcctttccttccttccctt

SEQ ID NO: 861701 - DNA, 664 bp, Homo sapiens
gtgcctgcagagcatagccttgttaatcagtcaaaatgatttcatgtgttttcttagcagcatcagaaagggcaaaggatttatgggtaatatcattttatgtgtcactgtggtgtacaatattgtcatcatgtgttaaaaccagcaatggtcttcattgattttaatcatagtcatactcacctcaatctcccctgtgtgctacccctcccaaaaaagataaaagaaatctgaagacattttgtataatcacttaaaacacttttagtcattataagttttttaatgcttttatagttaaccaggataaagtgccacttctcacagatcatatgtctttctcactaaaatttcaaccaaaaacacttaaggctattgaaatatgtgcattttaaaggtggaggaggttcttataaatagccaccagtgaagagacttatttgcctcatttttctgggagtattttktgtgtgtaattttattcaatagagagcttacatttttatggtgattcattcacatatcagaaattcaataaaaatcccatagccaagaagatagacttacaggaaaggagtgagggaaagataagcttaaattgaaacatgtcagagcagatcagttgcccctccatcaccctttgcatgagccagccacacttctc

SEQ ID NO: 861702 - DNA, 662 bp, Homo sapiens
gcctggggaattacacccctcttggagtggaaatctctattcagagcgagagaccctggggtactccaggaaggagtgagcagacagggcgggctgcccaagacacctagggacggtcgcctatctcaccagcatcccgtttgcccattaatccaaagaactgctgaggcttgggtctccgggcgattctctgcagaagatgctcaaagggctccggcagttcctcctgggagacaaaagcacggacaaagggcgtgtaaggcaaccagagcgaggcacccagcaacccgagcccttccccccgctgtactccggccccgaggmgtggggaggcggccttccccacgctcgggctgagcggggtccctcccgaggcgctgcctctctgcgcccctccccgccgaactcgcgtcccgccccccgcaagcctgccagggcgagttagcagctggctcggcgtcttcaagcttcgagcgctttccgctctttcctcccagcccggggaccttccctcatctgctgcgccgccacctgactttgtcttgtctcggtgccggctttgtagagtcctcaccgccctaaatgcacacaggtgtgtgggatctggggctggggctccggtggggaagggtgacaacgctttacagacgactttcaccgtt

SEQ ID NO: 861703 - DNA, 582 bp, Homo sapiens
taaagaaaagaataaacaaagcatccaaaattgacattatggtcatatatttctaatgcaaatttaatggcaattctatccatagttattatggctaggtttcaattacatagccactgaccaataattcagccttctaaataccatctgaactgtrtaaatatgaacagagagaaaagacagtggaggttacagttctattcaaagtttatacactagtgacttgaatagtatgaagaaaatataagctgtctattcacttcaaagttaaaatgaaatatggccatacttcatgttatttgcatttctcttttattgacaattttatagggaagatgcctatttcaaagatcctctaaaatttccatatgagatttaagaatgattcaaattttaaagttgccaaatcgtgtcaatgtcttctttaaaaatttctctttttcctctctctttttacttcttatgccattatacaaaatttcctggaatataacattctcaatacccaaagccttgtaaaaatccttcactacttctcatttttttaatgagaaaaagaaaaacaaaactatccttgcccct

SEQ ID NO: 861704 - DNA, 618 bp, Homo sapiens
tgccgtatcagtggttatctcttttttttttttcaattcttcagtgattattgtgtatatacactactactgtattattatgacttgtaacccaagtcatgtatacctatagtatattttctaccatactaagttaactgaatctatttgttatacatttttaatatctcaagaggctgggcctagtaccatgaaggcaatgtgaaatatgtagcatgcattcaataaatatttatgagagaatgtattatattgaattatattcagaaagtttggattggtttttaraaatttgagttacctgttttcacagctttctgaaagagcataatattaacaaacatatagctctgtacactaagatgataggaattttatttaaaagttcggatcctgcactattgctatatactgagttgtatctccctcagatccacatgttgaaatcaccaatgtgatggtggtatttgaaggtgaggtcatgagtgtgaggttcctatgacgggattaatgcccttctcagatgagacctgagtgcactttctctctctgtctctctctctctcactccccttgctttctctctctgccttgttttttctctgccatgtaacagca

SEQ ID NO: 861705 - DNA, 467 bp, Homo sapiens
taccttaacaggagtttgaatgaagttggttctcatggatgactttgagggggttcaagacttcagtggagaaagtaattgcagatgtggtagaaacagcaagagaactagaattagaagaggagtctgaagatgtgactggattgctgcaatctcatgataamacttgaagagatgaggaattgcttctcatgggtgagcaaagaaagtgtttcttaagatggaatctgctccgggtgaagatgcagtgacaattgttgaaatgacaacaaagaatttagaatattacataaatgtagttgacaaagcagtagtagggtttgagaggatatactccagttttgaaagaagttccacagtgggtaaaatgctatcaaacaacattgcatgcaacagagaactctttagtgaatgaaaaagtcaatggatgcagcaaaattcattactgtcttattttaagaaattgc

SEQ ID NO: 861706 - DNA, 667 bp, Homo sapiens
tacatatgtacatccattactcaggaaaaatattttgtagcttatgtaagtgaggaaaatgtcaaaacagcaacatttgaaaggtgattaaccgtgggacaggaacagaatgagctcactggtagaagctcagcacaataaccctcatcctgcgccacaacaggttggtcctgtgcctgcgtagtgaatatttctacctttgttcttgatccagcaagagtcagaatcctccaggacttgggacatctgctcttgctgttaccacttttgaattttaatacactgtacattaatttcctgagttagattcatcacagctttagcaaaatttctattaaaatattggtttgaggttacctattaaacatgtgaaatagtctttcaatttattcaaatctcactggcatgtcttctgtgtttcctaatttcaagcaatataaaaaaataaattgtggggcaaaatatccctaatgtctggaaccctggccagayacaaacatctcataatgggattcatatttgtttccctggagtttttcatgcatcagagacattattttcattttcttggaacactaaggagtagctgaaattcttaagaaaaagaccaatttctaacatttattgagtgcttagattactattatatgtttcattaaatcctttc

SEQ ID NO: 861707 - DNA, 694 bp, Homo sapiens
atcagcctatgactaaagttccaggtaaaataatctaacattcttttacaatgttgctttactgtttaaaaatctattagttatacactgattattacatccagggatgaaaggaaagaaaataatacttatgaatagctactgtgttcaagcatgataatatggcaattcaagtgggaagtaaaatcacattttatggcatttgaaatacagaatcaaaaagaattcttttctccttgcccgaagttaccrgctatttagtgacaaaggcaggatttctagtccatattcccagactccaaagtctatgttctctacatcatatgataacttccaggcacgagcattcttatgggcacttcataaaagctggtaaaataaataagcttatgttttacctaaacctttataatacagcattttctaaaatatagttttctttttctttcagagataatctatgcttaaaatatattaattctatgtagcatattaaaatttggaaataatcaaatgtatgagtttgggagatgaaactgcagtatgaagaagacttttcataaatggatgtttaatatctttgggggtttattcttctgtgcagtgtaattgtttttgacatttcagtaatgcttttatgggcaacttgacctttgatgcatttcttttttcaaacttgtagcttgctaaattg

SEQ ID NO: 861708 - DNA, 694 bp, Homo sapiens
atcagcctatgactaaagttccaggtaaaataatctaacattcttttacaatgttgctttactgtttaaaaatctattagttatacactgattattacatccagggatgaaaggaaagaaaataatacttatgaatagctactgtgttcaagcatgataatatggcaattcaagtgggaagtaaaatcacattttatggcatttgaaatacagaatcaaaaagaattcttttctccttgcccgaagttaccagctatttagtgacaaaggcaggatttctagtccatattcccagactccaaagtctatgttctctacatcatatgataacttccaggcacgagcattcttatgggcacttcataaaagctggtaaaataaataagcttatgttttacctaaayctttataatacagcattttctaaaatatagttttctttttctttcagagataatctatgcttaaaatatattaattctatgtagcatattaaaatttggaaataatcaaatgtatgagtttgggagatgaaactgcagtatgaagaagacttttcataaatggatgtttaatatctttgggggtttattcttctgtgcagtgtaattgtttttgacatttcagtaatgcttttatgggcaacttgacctttgatgcatttcttttttcaaacttgtagcttgctaaattg

SEQ ID NO: 861709 - DNA, 569 bp, Homo sapiens
ggccaaggcgggtggatcacgaggtaggttcaagatcagcctggccaagatggtgaaaacccatctctactaaaaatacaacaaattagccaggcgtggtggtgggtgcctgtaatcccagctacttgggaggctgaggcagagaattgcttgaatctgggaggcaaagttgcactgagctgagatcgcaccactgcactccagcctgggtgacagagtgaaactctgtctcaaaaaaagaaagaaaaaaaaaaagaaaaaaaggagttgcaatcctaatttcagacaaaacagatttcaaaccaacaaagataaaaaaaaaagacaaggaagggcattatataatggtaaaggyttcaattcaatgagaagacttagctatcctaaatatatatgcactcaacacaggaacacccagattcataaagcaagttcctagagacctacaaagagacatagactccccacacaataatagtgggagacttcaacactccactgacagtattagacagatcattgaggcagaatatcaataaagatattcaggacctaaactcagcattgga

SEQ ID NO: 861710 - DNA, 610 bp, Homo sapiens
aaactctcaataatctaggtacaaaaccaatgtacaaaaatcaccagcattcctatacaccatcaacaaccaaactgagaaccaaatcagaaagggaatcccattcacaattgccacacacacacaaaatacctaggaatacagccaactagaatggtggaagatctctaaaataattacaaaacactgctcaatgaaatcagrgaagacacaaacaaatggaaaaacatgccatgctgatggatagaaagaatcagtatcattaaaatggctatactgcccaaagcaatttacagattcaatgttattcctatcaatccatcaataacattcttgacattcttcattcttctagaaaaaattattttaaaatttatatgaaaccaaaagagagtccaaatagccaaggagatcataagcaaaaagaagaaagctgagggcatcacattcccctcttcaaactatactacaaggcttcagtgaccaaaacagcatggtactgattccaaaacaggcacatagaccaatggaacagaatagagagcccagaaataaggttgcacatctacgaccatctgatctttgacaaggctgacaaaaacaagcaatg

SEQ ID NO: 861711 - DNA, 634 bp, Homo sapiens
tgagaaccaaatcagaaagggaatcccattcacaattgccacacacacacaaaatacctaggaatacagccaactagaatggtggaagatctctaaaataattacaaaacactgctcaatgaaatcagggaagacacaaacaaatggaaaaacatgccatgctgatggatagaaagaatcagtatcattaaaatggctatactgcccaaagcaatttacagattcaatgttattcctatcaatccatcaataacattcttgacattcttcattcttctagaaaaaattattttaaaatttatatgaaaccaaaagagagtccaaatagccaaggagatcataagcaaaaagaagaaagctgagggcatcacattyccctcttcaaactatactacaaggcttcagtgaccaaaacagcatggtactgattccaaaacaggcacatagaccaatggaacagaatagagagcccagaaataaggttgcacatctacgaccatctgatctttgacaaggctgacaaaaacaagcaatggggaaaagacttcctgttcaataaatggtgctgcaataactggctagccatatgcagaagattgaagctggacccctttcttatgccatatacaaaaat

SEQ ID NO: 861712 - DNA, 584 bp, Homo sapiens
agaagaatctggacttgcgggatggggaatctaagagtgctttgcaaagagcacctgtttttgaaagcacttctgaagcaaattaaatacaattttatgagaacaagatagacaaaaagaggtaaagagattgtccagaggtggcacagtccctgaagcaggaatgaagcagcatcctcagtacrtgcagataatttaacttcaaaagggggccctccccagtagctgggaccacaggcatgtgacaccacgcctggctaattttttgtatttttagcagagatggggtttcgctgtgttagccatgatggtttcgatctcctgaccttgtaatccacctgcctcaacctcctaaaatgctgggatttcaggagtgagccgcgctgggcctgatgttttgatttttaaagtttttctgttaattacatattttcttcaccaaagagaatgcatttcaccactaattataagaacttaacttgctttctgtggccattattagtactacattcatttacatcctgatggttccatgactgatgtggtcactttccagattctgccttctatgtttgctctctcac

SEQ ID NO: 861713 - DNA, 584 bp, Homo sapiens
agaagaatctggacttgcgggatggggaatctaagagtgctttgcaaagagcacctgtttttgaaagcacttctgaagcaaattaaatacaattttatgagaacaagatagacaaaaagaggtaaagagattgtccagaggtggcacagtccctgaagcaggaatgaagcagcatcctcagtacatgcagataatttaacttcaaaagggggccctccccagtagctgggaccacaggcatgtgacaccacgccyggctaattttttgtatttttagcagagatggggtttcgctgtgttagccatgatggtttcgatctcctgaccttgtaatccacctgcctcaacctcctaaaatgctgggatttcaggagtgagccgcgctgggcctgatgttttgatttttaaagtttttctgttaattacatattttcttcaccaaagagaatgcatttcaccactaattataagaacttaacttgctttctgtggccattattagtactacattcatttacatcctgatggttccatgactgatgtggtcactttccagattctgccttctatgtttgctctctcac

SEQ ID NO: 861714 - DNA, 584 bp, Homo sapiens
agaagaatctggacttgcgggatggggaatctaagagtgctttgcaaagagcacctgtttttgaaagcacttctgaagcaaattaaatacaattttatgagaacaagatagacaaaaagaggtaaagagattgtccagaggtggcacagtccctgaagcaggaatgaagcagcatcctcagtacatgcagataatttaacttcaaaagggggccctccccagtagctgggaccacaggcatgtgacaccacgcctggctaattttttgtatttttagcagagatggggtttcgctgtgttagccatgatggtytcgatctcctgaccttgtaatccacctgcctcaacctcctaaaatgctgggatttcaggagtgagccgcgctgggcctgatgttttgatttttaaagtttttctgttaattacatattttcttcaccaaagagaatgcatttcaccactaattataagaacttaacttgctttctgtggccattattagtactacattcatttacatcctgatggttccatgactgatgtggtcactttccagattctgccttctatgtttgctctctcac

SEQ ID NO: 861715 - DNA, 584 bp, Homo sapiens
agaagaatctggacttgcgggatggggaatctaagagtgctttgcaaagagcacctgtttttgaaagcacttctgaagcaaattaaatacaattttatgagaacaagatagacaaaaagaggtaaagagattgtccagaggtggcacagtccctgaagcaggaatgaagcagcatcctcagtacatgcagataatttaacttcaaaagggggccctccccagtagctgggaccacaggcatgtgacaccacgcctggctaattttttgtatttttagcagagatggggtttcgctgtgttagccatgatggtttcgatctcctgaccttgtaatccacctgcctcaacctccyaaaatgctgggatttcaggagtgagccgcgctgggcctgatgttttgatttttaaagtttttctgttaattacatattttcttcaccaaagagaatgcatttcaccactaattataagaacttaacttgctttctgtggccattattagtactacattcatttacatcctgatggttccatgactgatgtggtcactttccagattctgccttctatgtttgctctctcac

SEQ ID NO: 861716 - DNA, 598 bp, Homo sapiens
agagcactgccagcagccctgaactgccccgcgccatcacaacccttctatttccccttctcttcttcctacaggcaaccactattttgacttttaactcagttgtttagctttgtctagttttgaaattcatgtgaataaatttttagcttcctttacatgtatttaatgcacttacacacacatttctcttygtatatgttcagcggcaggattcctaagccattggtcagaactatgttcacttcgctaggtactggcacactgtcactttcactccagcaggtctggaaagttctcttgctccacatcctcgctaactcttggaattgtttagctttttacacttttagccattttggtgtgtagaggtgtatcattttggttttaactggcatttctcagttaaaataaggatgagaatgcttaatgtatttattgacttaggatgtctctttggaaaaatatcgttcaaacattcgattatcctgcacttctgacagactaataccgattttaatagtgttcttgatatagttgttgataatattgtacttttccccaaaaagctttcaagtaaatctagtctattcaagag

SEQ ID NO: 861717 - DNA, 598 bp, Homo sapiens
agagcactgccagcagccctgaactgccccgcgccatcacaacccttctatttccccttctcttcttcctacaggcaaccactattttgacttttaactcagttgtttagctttgtctagttttgaaattcatgtgaataaatttttagcttcctttacatgtatttaatgcacttacacacacatttctcttcgtatatgttcagcggcaggattcctaagccattggtcagaactatgttcacttcgctaggtactggcacactgtcactttcactccagcaggtctggaaagttctcttgctccacatcctcgctaactcttggaattgtttagctttttacacttttagccattttggtgtgtagagrtgtatcattttggttttaactggcatttctcagttaaaataaggatgagaatgcttaatgtatttattgacttaggatgtctctttggaaaaatatcgttcaaacattcgattatcctgcacttctgacagactaataccgattttaatagtgttcttgatatagttgttgataatattgtacttttccccaaaaagctttcaagtaaatctagtctattcaagag

SEQ ID NO: 861718 - DNA, 597 bp, Homo sapiens
atgcaacgaggactctgaaaacagcagttttttctgattttccacttaatttctgatatatttcaaaagaaatcattttcagtttaatagagttcagtatgtgctttcataaaatgtaaaggtttttaatggtactaagaaattattaagtgcatattgtaagcctagtattccaycagggacttatttatgtttgatttattggctttatattctttattggaaaatctagcccacttaaaggaattcttttaatgctgagtgttatatgtatatctcttctgccttgcatgtttttcttcgaccatttactgcacaagtattgatttcagaatatctttcagattctttctcagcaatttgagtttgtgcatctgtgccaagaagggattatatttgtttccatgcacatgctttatgggactctgttccttttttcaataattgttttactagagtcaatagaaggctggtgaatagtttttcatacggtaatagaattttttgaagcagggagaatgtaatcatgaaatttaagaataagcaaacaagggccagaagatttaggctgtatatttcccgtaaccactctgaacc

SEQ ID NO: 861719 - DNA, 756 bp, Homo sapiens
attaactatgttaaaggactgaaacttttagagttgttcagttgtgaaatagtaaaagtctctgtggttatagccagttcactgatgattgtagtattattctagtgaaactgagaccagggtcccacggttttaaaaaatattcttatatgagtatgtgtatgtgtataatttttctttatgatatggggcaggtagtgaaaattgaagtatgctattccatacaaatagatgcccatgaggaggctcacatttatgagaagggttgatgttgacaatcctttgaaagagaaactcagtaagcattgttaatatatttaacttcactgtagatacttttagaacaacagtttgaaattttagaacagaacagtgaacgacagatatttgcttgtgattttcttaaatgttacaatgatggtaagcttctttcctcatattttayctacattttctggatatgtcctgtgactgattagttttcatttacaggactgttattagccctagtgtgtttttctgataatataagaaacaccccaggaggaagattatatctgctgttttactagggattggaaatgacactgttactccagaaatgcattcactgttgttctttgagtctggacatacaaattatagttaactgtttaccaaacttgagaaaaagaacgagtgtatagcctccaaaccactgtggttgtaaccagtagattcaggcaatgtataaaattcatacactctcataacagt

SEQ ID NO: 861720 - DNA, 756 bp, Homo sapiens
attaactatgttaaaggactgaaacttttagagttgttcagttgtgaaatagtaaaagtctctgtggttatagccagttcactgatgattgtagtattattctagtgaaactgagaccagggtcccacggttttaaaaaatattcttatatgagtatgtgtatgtgtataatttttctttatgatatggggcaggtagtgaaaattgaagtatgctattccatacaaatagatgcccatgaggaggctcacatttatgagaagggttgatgttgacaatcctttgaaagagaaactcagtaagcattgttaatatatttaacttcactgtagatacttttagaacaacagtttgaaattttagaacagaacagtgaacgacagatatttgcttgtgattttcttaaatgttacaatgatggtaagcttctttcctcatattttatctacattttctrgatatgtcctgtgactgattagttttcatttacaggactgttattagccctagtgtgtttttctgataatataagaaacaccccaggaggaagattatatctgctgttttactagggattggaaatgacactgttactccagaaatgcattcactgttgttctttgagtctggacatacaaattatagttaactgtttaccaaacttgagaaaaagaacgagtgtatagcctccaaaccactgtggttgtaaccagtagattcaggcaatgtataaaattcatacactctcataacagt

SEQ ID NO: 861721 - DNA, 756 bp, Homo sapiens
attaactatgttaaaggactgaaacttttagagttgttcagttgtgaaatagtaaaagtctctgtggttatagccagttcactgatgattgtagtattattctagtgaaactgagaccagggtcccacggttttaaaaaatattcttatatgagtatgtgtatgtgtataatttttctttatgatatggggcaggtagtgaaaattgaagtatgctattccatacaaatagatgcccatgaggaggctcacatttatgagaagggttgatgttgacaatcctttgaaagagaaactcagtaagcattgttaatatatttaacttcactgtagatacttttagaacaacagtttgaaattttagaacagaacagtgaacgacagatatttgcttgtgattttcttaaatgttacaatgatggtaagcttctttcctcatattttatctacattttctggatatgtcctgtgactgattagttttcatttacaggactgttatkagccctagtgtgtttttctgataatataagaaacaccccaggaggaagattatatctgctgttttactagggattggaaatgacactgttactccagaaatgcattcactgttgttctttgagtctggacatacaaattatagttaactgtttaccaaacttgagaaaaagaacgagtgtatagcctccaaaccactgtggttgtaaccagtagattcaggcaatgtataaaattcatacactctcataacagt

SEQ ID NO: 861722 - DNA, 604 bp, Homo sapiens
cccgatttgggctagagttcactcagaacactgtaacctcttttactaatgcctccacttcttggtctgccttttgaaacagaaatagatttattggattgtaaaagcaagcaaccaatgtagattgttaaagaaattaaataatagagatgtatgtgtggtagtaaatggatgtcttcagataaacccagcagctggactaacaggataatgtttatccttgaagataatttcatttatccatctgtctatcatctgtgtatctatatattgctataccatattgtatattacagattcccattctggtaaaaatttgaccatattaatcatgttactttgtaatctgggattttcatttaaaaacatatcatggatgtctttccacgttagycatttaaagatttcctcatccttcacaacagtagcatattctattgtgtgggtataccccaatttatttactcaatcctatttttaaagacagttaagttatttccatttgaaaaatcataaacagcattttgtacaggtatccagtaatcttcttgggatagtttttttagaaataaattattgggccaaagtattcatacttataatt

SEQ ID NO: 861723 - DNA, 600 bp, Homo sapiens
ttgtgatgaatttcccaggtgttctttgttattcttgtatttgggtgtctaggtctttcgcaaggccagggaagttgtcctcaattattccccaaaatatatttccagtcttttagatttctcttcttcctcaggaacactgattattcttaggtttggtcatttaacataatcccagaatttttggaagctttgttcatattttcttattcttttctctttgtctttgttgaaatgggttaatttgaagaccttgtctttgagctctgaatttctttcttctacttgttaaattctattgttgaggctttccagagcattttgcatttctaaaagtgtgtccaaagtttcctgaatttttgcttgttttttctttrtgctatctattcccttgaatatttctcccttcacttcttgtatcattttttttatttccttggattgggcttcacctttctctggtcccttcctgattagcttaataactaacctcctgaattctttttcacgtaaatcaaggatttcttattggtttggatccattgctggtgaactagtgtgattttttgggaggtgttgaagagccttgttttgtcatat

SEQ ID NO: 861724 - DNA, 600 bp, Homo sapiens
ttgtgatgaatttcccaggtgttctttgttattcttgtatttgggtgtctaggtctttcgcaaggccagggaagttgtcctcaattattccccaaaatatatttccagtcttttagatttctcttcttcctcaggaacactgattattcttaggtttggtcatttaacataatcccagaatttttggaagctttgttcatattttcttattcttttctctttgtctttgttgaaatgggttaatttgaagaccttgtctttgagctctgaatttctttcttctacttgttaaattctattgttgaggctttccagagcattttgcatttctaaaagtgtgtccaaagtttcctgaatttttgcttgttttttctttatgctatctattcccttgaatatttctcccttcacttcttgtatcatttttttwatttccttggattgggcttcacctttctctggtcccttcctgattagcttaataactaacctcctgaattctttttcacgtaaatcaaggatttcttattggtttggatccattgctggtgaactagtgtgattttttgggaggtgttgaagagccttgttttgtcatat

SEQ ID NO: 861725 - DNA, 612 bp, Homo sapiens
tcctagaagtgagagaactcagaacacacaggcagttagacatgctgtgtgtggccctgagaaatatccataaatcaaagtgtggacactcccaatggatgggcttccgttcactagaagaaaaatctctccaagagtgttccatcaaaaactggaactgttgtgttagctcataatgagctccctgtttttgaaagggtccaaagccctattgaggatatggtgtggagtttaagcattatttgaggttgtataatgkttccttctgacctggcaaatccaggattctcatttatgatttattgatttactagggtgtaaactttgtccgagtggggaccatgcttgtttcttttacaagtttatcttcagttcctagaatattgactgacttatgagggctgcagtctcacagtggaggcagaggtaccagagagtgagcccatgcattcaaagctcttgagacacaggctcagaactggcacattgtcacttctgcagcattccattggtcacagcaagtcagcagaacagcccagattcagggaatggaaagattccaacactttgtggaaagaaccacaaagtcatgccgcaaagggcatggatata

SEQ ID NO: 861726 - DNA, 547 bp, Homo sapiens
ctcctgctttcacctcccaaagttctaggattacaggcatgactcattttattcttgacacatacttgacacttagtaatctcaataatattctctctccaccccactcctccagcttccttcgcccctctcttcgggcaatgtctggaagcaaagagctcctctccttggggttgcagtctactcactccagccaaagggtcatcattcactggtcacttggggtttgttgcacagagcccagatgaagattccacagtsaagatactgtgatcaaaatactgttggttacttgaaacccatcagtgcttgcttagcccctgatgaatgtgtttcatgtctgatgccttccactctttctcactccccaatctacttgaccctactcttgatttgggaaatagggacatgattgacgcaacccaagcctagagagtacagctgctcagccataagaccatgaagtaacattaataggtctcatcctattgagtgtgtcctgtactcttagcaatattgaagctagagaaatcatcccacaacatcc

SEQ ID NO: 861727 - DNA, 612 bp, Homo sapiens
tctgtattttcaatttatttgattttgatcttgggaaagttatctactttttctgagctttagtttgctcatctgtaaaatgagtatagtaatacaaattggtttcagggttgattgaaataatataggcaaggaacctagtacagtgccacatagtaggtgtttataaaatatcagtttcctttctctcctccaacccttcactttctgtctatgaaccctccccatctctaactgccttcccctacattatctgtgctgcttttaaaactatatatatatatataaaattatatatatatctctctatatataaaattatatatctctatataaaattatatatatctctctctmtatatatatataaaattatatatatatatatatatataaaattatatatatatatatatatataaaatttgcctgcttctccccaactcttcccttggctggttcctaccaatctcattttttcatgattaaaataaagcatcatggaaaattaattaatatttggagatgaaagatgcagcattgccagtcctggctctccactgagtgcaaaccacttacaataaaacccaccagcttgtctattaaggagaa

SEQ ID NO: 861728 - DNA, 581 bp, Homo sapiens
taaacaggggcttgtcgttctgaaaatggggttaagtacagaagagactaaacatttattgagctacaattatctctaatacttactactactctgaaactattatctccaatttatatataaaaatactgaggcttatagagataaaacaaattgtcagagttcatataaccagtaagtgggagagccaagaatgtagcaggagtgttaagacagaagaagttttgagaagagagggtaaaatttaggtgggaaaagatasagcaaattataatttgtgaaattctgtgcagagccttaagggctgagagtacgaacttgagtgaaagttcaaggatgcattccctccctttgagaaggattttgaggtggtgggttctagatgctgttctcagcgctatccaatgacccaagggcccaataatattgtcttaatttcctgtgctggggaaagctctttccagcaccatctggtggcatctacctgaattgctggtgtagaaccaaggaggagatgcgtaccctctggtgcaaagcttccctaagtgtggcaaagaaataatgtcttgtttctgcctttt

SEQ ID NO: 861729 - DNA, 625 bp, Homo sapiens
aacttcatcttggtctaagagccagtgtcttagaccaggatgaggtttstggggagagaaggaactgaaggccgtatattggctgcatgtgcagacagtccagttggagagagacatttagagccttacgcagaaggaggcctgttcttcagcccagggagctggctgacttcacacacctgggtggccagctgctctcactttactccatcacaggcactgagattcacagtccgatgagaggcagccagcaaacagctccttcccctcccactgttgccccaaccccgtttcttctgactggataagttttgacctctagatagacaagctgagtgaattataagatgctaatgaagaaaagcaagaaaataaagtaggtaagtcaaaatcagtctttctaggtttctaggattccttcccataatttctcagagatgctaatcattctgggaacattatgggtccccgatacttgaaaatgtttccatagaaattaatggatcctgtgtctgctacagaaagttcatagacttttggcatcccacaacctggctctcagaccccatatggtttggccacaacctataccagccaaccataaaatatctaactttccctacag

SEQ ID NO: 861730 - DNA, 625 bp, Homo sapiens
aacttcatcttggtctaagagccagtgtcttagaccaggatgaggtttctggggagagaaggaactgaaggccgtatattggctgcatgtgcagacagtccagttggagagagacatttagagccttacgcagaaggaggcctgttcttcagcccagggagctggctgacttcacacacctgggtggccagctgctctcactttactccatcacaggcactgagattcacagtccgatgagaggcagccagcaaacagctccttcccctcccactgttgccccaaccccgtttcttctractggataagttttgacctctagatagacaagctgagtgaattataagatgctaatgaagaaaagcaagaaaataaagtaggtaagtcaaaatcagtctttctaggtttctaggattccttcccataatttctcagagatgctaatcattctgggaacattatgggtccccgatacttgaaaatgtttccatagaaattaatggatcctgtgtctgctacagaaagttcatagacttttggcatcccacaacctggctctcagaccccatatggtttggccacaacctataccagccaaccataaaatatctaactttccctacag

SEQ ID NO: 861731 - DNA, 641 bp, Homo sapiens
ggatcatttgttgatggcttgtcagcatgacagcattaccccactgtcagcatattctgcaggaggactggactgattttgtccaataaatctgggttcttcaagccagcctccaagtatgaatcactgtggggcttggttggtgattaatacttcaaacttctgatgccgctcctttctcttccagctggaggagctgatagacatggctgtgctggaggaaattcaacaggagctgatcaascaaggtaacccctagtggtagtccttccttacctgtatttagctactggaatactgtgacctttcctccaatcaggattagtttataagtcccctttgtctacctccatcagtcaagtgtccaaaagactccttttgtactctgacatcttggctgtctagcttctcaataataagggtctccagggtgctagaccttgtgctaagaacttctcatttaatgatgctgttttctccatgtgactgccctgtaagatagtagtattagaacagaaggtggttggtgttctcgtgcaggtcatacagctagtaagtggaggagatgggaagcaaaatcagttgtatgaatccagttcccatgtttcttctaccatcctgcctctctattaatgggttaa

SEQ ID NO: 861732 - DNA, 641 bp, Homo sapiens
ggatcatttgttgatggcttgtcagcatgacagcattaccccactgtcagcatattctgcaggaggactggactgattttgtccaataaatctgggttcttcaagccagcctccaagtatgaatcactgtggggcttggttggtgattaatacttcaaacttctgatgccgctcctttctcttccagctggaggagctgatagacatggctgtgctggaggaaattcaacaggagctgatcaaccaaggtaacccctagtrgtagtccttccttacctgtatttagctactggaatactgtgacctttcctccaatcaggattagtttataagtcccctttgtctacctccatcagtcaagtgtccaaaagactccttttgtactctgacatcttggctgtctagcttctcaataataagggtctccagggtgctagaccttgtgctaagaacttctcatttaatgatgctgttttctccatgtgactgccctgtaagatagtagtattagaacagaaggtggttggtgttctcgtgcaggtcatacagctagtaagtggaggagatgggaagcaaaatcagttgtatgaatccagttcccatgtttcttctaccatcctgcctctctattaatgggttaa

SEQ ID NO: 861733 - DNA, 641 bp, Homo sapiens
ggatcatttgttgatggcttgtcagcatgacagcattaccccactgtcagcatattctgcaggaggactggactgattttgtccaataaatctgggttcttcaagccagcctccaagtatgaatcactgtggggcttggttggtgattaatacttcaaacttctgatgccgctcctttctcttccagctggaggagctgatagacatggctgtgctggaggaaattcaacaggagctgatcaaccaaggtaacccctagtggtagtccttccttacytgtatttagctactggaatactgtgacctttcctccaatcaggattagtttataagtcccctttgtctacctccatcagtcaagtgtccaaaagactccttttgtactctgacatcttggctgtctagcttctcaataataagggtctccagggtgctagaccttgtgctaagaacttctcatttaatgatgctgttttctccatgtgactgccctgtaagatagtagtattagaacagaaggtggttggtgttctcgtgcaggtcatacagctagtaagtggaggagatgggaagcaaaatcagttgtatgaatccagttcccatgtttcttctaccatcctgcctctctattaatgggttaa

SEQ ID NO: 861734 - DNA, 641 bp, Homo sapiens
ggatcatttgttgatggcttgtcagcatgacagcattaccccactgtcagcatattctgcaggaggactggactgattttgtccaataaatctgggttcttcaagccagcctccaagtatgaatcactgtggggcttggttggtgattaatacttcaaacttctgatgccgctcctttctcttccagctggaggagctgatagacatggctgtgctggaggaaattcaacaggagctgatcaaccaaggtaacccctagtggtagtccttccttacctgtatttagctactggaatactgtgacctttcctccaatcaggattagtttataagtcccctttgtctacctccatcagtcaagtgtccaaaagactccttttgtactctgacatcttggctgtctagcttctcaataataagggtctccagggtgctagacyttgtgctaagaacttctcatttaatgatgctgttttctccatgtgactgccctgtaagatagtagtattagaacagaaggtggttggtgttctcgtgcaggtcatacagctagtaagtggaggagatgggaagcaaaatcagttgtatgaatccagttcccatgtttcttctaccatcctgcctctctattaatgggttaa

SEQ ID NO: 861735 - DNA, 534 bp, Homo sapiens
tggaaatggattccctactcgcttgcttcatctctctcttttttcatatctcctcacctctctcagcaggtcagccacacactcgctcgtccctgatgctctctcaaggatggagaaaaccattactgaaaagttactgtctgggaattctcagttgtttggattcctaccaagccaccatctctggtcacactcactggttcccatcaaggagttgccagtgggtggccttgcttccttcatgcagctttgccctcgggagaaagtggaggatttttaccaacttgaggaacagctggtcccagctactgctcacccagtgcaggtcaatcaaacaccarcgctgaagagggagaggagtgcatggaatgttcaaaagaaaccagaaacctcttgattgctgtgtgcatgtacttttaatttcatgatcaaactctcctcagtgggcttattaactgggtttattggggaaaggaaaattctcacactgaggtttttttctgatggttttagaaattggtgaatgttgctgcc

SEQ ID NO: 861736 - DNA, 562 bp, Homo sapiens
aactgggaaaatcctgacaatgcatcagttttaacatatcccctttcttcatttcttcagttccagcttttatctacttaaatctaatgaagttagcttagatacagactttctaatagaagtaagcttttagaaataaatttaaagagcagaagacttgttttgtttcaggagtaaggtacagaacataacacagtagacaaggaacagaagagtgaatgtgagctaaatagttttacaawccacagtcttcagggttgaagagaagggagatgttgatagggcaaattgaaaaggacttttgatatgaaaacaaagtaaagctgcttcttgaatatatttaaaattaactctttagattacctatataaagccgatatttactgagcacctattatgtacccagagtttcatataattttcacatgtaatgaaatatctttcttttgatttttatatatttttttaaaatataaaaatctttggctcacaggccatacaaaaacaggcagtgggccagatctgatcttagtttgtcagtccctgctctacagcaatgaga

SEQ ID NO: 861737 - DNA, 707 bp, Homo sapiens
tgtttctgaaaaaagaagtctattttaattttttttaatttgaaaaagctgaaattaaaaccaaagtaacattttttgtcctctaataaacctttttttctttcttttgctccactataaatgagacctcctttttcttttgggtttgctttaaagaagcttctttgcatatactaatctcatcctcatgcttattattttatcctggttcacaaaagggatatgatctctaaatcatgcattttctcttgcaatcttttgttttttccttctttcttttctttttcttacattcattttccctttcttagtccaccatgctataaggctgcaaaaatgagagtactctaargcttattaaccagtttttctgacaagaaaaatgctaaatttacataagcaattagcatgtacatgcctgcctatagtagagatacaatcaacagatcaccaatattgaatgataatatttagaaggcagcaaagcatagcagttagagattagggttttgagttagatcagcttgagttcctactcgctatgcgacagtgagcaattttttatttgacatctataagccttaatttccctacctgtataaatgggaataataatgataattatactttaactcagagttgaggactgaaggagattttatatgtgtgcgtgtatgtgtgtgtctgtgtgtttatatataaatata

SEQ ID NO: 861738 - DNA, 601 bp, Homo sapiens
ttaacataatgtatattataaagatttccatgaagaacatttaaaacacttaaatgctaaatcatttataattttcttaaaaaacacattctatgactatttcacctccctgagaacatcttacaatttttgatgaaatactgttattttaaaaaatagaatacaagcccttggatataagggaccaaaatctctggtctgtttctgccatttttgcctgtctctgcagagatgccttgagtacaacctcagaagacaaaaagccaaaagacaggtaccccagcagcccccctgggaaagtgtgtcctctctgtgctaatgtcacccatctaagctctagtgaagggtttrcaaacagaaatggaattgttctcagtccagttcagagaggtccttactttctgagagccaacctgttagacctactccaagtggccagaatctataacaatattgtctccagagaatcataatacactccacattagaggaaataaacaaagtaggactgtcttcattttccaagcgttttgagtacttgacctgaatattgaccatttgctcaatatttcagtattatatgaattacatattcccagtg

SEQ ID NO: 861739 - DNA, 689 bp, Homo sapiens
tggggcctctgagatggggctgaagcgtctttcctgttaacttcctatggcgactccttaagtggtcaaggagcgctgattacattccccctgcgctgagaaaaggctgcgctggatgcttgatttttcttgctgtgggggcatggaagccacccaagtggggttgggaagctttgctttagtagtaggcaaggcagatactcgagtggtgaaaactgctgtgaaagagcgagagggtcacgccagacaacagggttctgtctccgctgccaccgtttctgatgaatgagatttgccaggtacacgcaaggcttttatttgttcttagcactgttctgttcgtgaaacgctacgtggaggtcttttccaaatgtttgacggggaagaaaataaagagtaaaccagggttttcactgagggaagcattaggaaaatctttacaggttaagattcgtgagttagggttttcttttgtttgcatgttttcttctcacactctaggtatttagatagatgaaaaatttctcagaatmttcatttgcatttccaaggactgcttgtatttttataccagttataataaaaaagaaatgttgcacaaacctgttttcagtaagcttctgtttcattggtttaatgactgcagaaaaaatggtgggttttttttctccattactagtaggcttggg

SEQ ID NO: 861740 - DNA, 698 bp, Homo sapiens
tggatttcttctgtttggtggatatttttctattgctgccaccaggcagccctttgggatgctgcatcattaatcttcactccttttgaacttgccctgtgacttcccctagttgagaaatgttggctatgcagggcttttgatttttcattgctttgactttcttagaattggtttaggatcttagatgtcaaaaagcccatttccttgaataaacggatccggtatttcagtatgggttgtgtgcttctttctcatggcataccttgtattagttactttagtaagaagccacaggttttggaattgctgatttttttctgtaccttctgtttttcattttcatattcatagttcaagtccttctctgcctctggcagcctaattccaataggctctcttgcwtcttgtctttccctctagcctgttctttctactgcagatatcatgctgcttccttgctcagaaacctttgttgacttttccgtttcctgcagaataaaatcttttagacttggcttccctctagccttatactttttccttagggcacccttctccaaacagaaactgttggcacatgttaaagcatatttgcacttgatttctggtattgtttatccttctgcccagcctattttcctactgctgtgggcactttaaaggcagaatttttgtaggttttctttgaataccta

SEQ ID NO: 861741 - DNA, 558 bp, Homo sapiens
caagtcgtaatgtgaaagaataaagcttttctttgcctcttctttattgacatttttcctgatcatccagtctaaattagtcttccttcgtctcccttcctactaataccatattgaaatcatcttgtacttttattttttattgtctgttgcctttctctatggcattggccccatcagagcatgaatcttgtcagacttatcatctgatgggatggcacatagtagctgtttcataattgttggttaaattaatggataaattgttgaacattaattttgactagttttcttttaaagggaaaaattggtacatattctttrtgccttgggtattttgagtgaattttagcccaatatatatcttgctggtttagagtaatgaaaacctactacattattcctaacacatttctaaaaagtaaactaattttggggaccatattcttgttgcatgatcaaaatcatgattcttggtaaataagtggtagagtgaaatgtgattttcatatttgaatattctgggaactttgtttttaacagtattgctgccttgct

SEQ ID NO: 861742 - DNA, 445 bp, Homo sapiens
aagattggcattagtagtttgagcccttgctcaaaatatctgaaaatccaatatctgtttggttgtaatcttatttttctgcaagtatgccatgggaaattattctttctcaagaaaaatacagagatgcagagttgatatcttctcattttgaagagacatgttgaggccatgtgattcctgaaggccattgcttaggaagttttccctggtctttaccaacttccttggtgctgcrtcacactttgagatttgcaaatcaatggctttggtctagtgtcctatagagcttggtgttcctgttctccatcttctcctctaagatgctgattcctactcttgaaatctgtttcctttttattgttttgtctttaaagggttatccctctagtagcagtagaattaaacattttctatacatttagttttataagaatctaccgag

SEQ ID NO: 861743 - DNA, 445 bp, Homo sapiens
aagattggcattagtagtttgagcccttgctcaaaatatctgaaaatccaatatctgtttggttgtaatcttatttttctgcaagtatgccatgggaaattattctttctcaagaaaaatacagagatgcagagttgatatcttctcattttgaagagacatgttgaggccatgtgattcctgaaggccattgcttaggaagttttccctggtctttaccaacttccttggtgctgcgtcacactttgagatttgcaaatcaatggctttggtctagygtcctatagagcttggtgttcctgttctccatcttctcctctaagatgctgattcctactcttgaaatctgtttcctttttattgttttgtctttaaagggttatccctctagtagcagtagaattaaacattttctatacatttagttttataagaatctaccgag

SEQ ID NO: 861744 - DNA, 630 bp, Homo sapiens
ccaacatggggttcaatggctggtcctggaaacctcgtctctgtttgatataagttaaaccttgagtacactctgcctggtactgaaattaacatctgggtcctgaccaaattctaacttgtgaaattgcagattactttacgactggataagaaatgtactccatcatatcttagctttgttatttaattttgcctgggkttgttaaatcactgtagcattttgccactgtgtgcaaccagtgggcttttagaaattttagcatgaaaggctctcaagaaaacatgaaactcttttaacataaggttatctccaggaggctactttttggtttagttatgtgattgtatttgaacaaatagattttctttagttctacttagtgttcttttttaaactgatggactttcacaataggttttcaggtcttggcttttcagtttcatttttgggggtgtggaagtttcagagtgagatacaaactgatttgtgagatgaaaaatattaaagatatgatcatttgacagtaatttggtgatctgatttttttctggaaataacaaagctaatattcttaagtgagcgaaaaaatttttgaggacagctactggatagttgaatattttatcc

SEQ ID NO: 861745 - DNA, 653 bp, Homo sapiens
attaaaaccttttcagttacaggatttaagcaatataaaaggcatcagcataaaagtgaaaatctcccttgattcagttactcatagataaatattgttaacattttgaatttcttcagactttatcggttgtctataaaggcgatcagcatctcagttttgtttggaaggaagacaccaactgtaaaaatgtggatggratgagaggaaacaaggataattaagtcattccattgtaaggtcagcacaacgtctggatatatctcctgttattcaaagatgatactcagacaagattaaaaagaaaagtaaatggaagaaacatagaaaacaaaaaacaaatgtctacaacccacccactcacccttaaacataactaaagaataaaagaacaccatgcttttcaaaaattcccaatggttaagtacttgtaacaacttaagtgtctatgatgaggtagtagaaaaatgtattattgtgaattcatttagcagaattctatgttgttagtagaatgtatagaatattatatgctgctataaaattatcttcgagatatttttaaaaaatcaaggctgctatgatatgatttatattaaaaacagcacagatgaatatacatttacatgcttaagtataaataaaatgtttct

SEQ ID NO: 861746 - DNA, 653 bp, Homo sapiens
attaaaaccttttcagttacaggatttaagcaatataaaaggcatcagcataaaagtgaaaatctcccttgattcagttactcatagataaatattgttaacattttgaatttcttcagactttatcggttgtctataaaggcgatcagcatctcagttttgtttggaaggaagacaccaactgtaaaaatgtggatgggatgagaggaaacaaggataattaagtcattccattgtaaggtcagcacaacgtctggatatatctcctgttattcaaagatgatactcagacaagattaaaaagaaaagyaaatggaagaaacatagaaaacaaaaaacaaatgtctacaacccacccactcacccttaaacataactaaagaataaaagaacaccatgcttttcaaaaattcccaatggttaagtacttgtaacaacttaagtgtctatgatgaggtagtagaaaaatgtattattgtgaattcatttagcagaattctatgttgttagtagaatgtatagaatattatatgctgctataaaattatcttcgagatatttttaaaaaatcaaggctgctatgatatgatttatattaaaaacagcacagatgaatatacatttacatgcttaagtataaataaaatgtttct

SEQ ID NO: 861747 - DNA, 625 bp, Homo sapiens
taaaaccaagaaaatggaaacacaaagattaatttccccaagtttacacagcttgtaagtggcagaactcaacatttaatccagggagtgaggtcacagactccttgttcttaacaagtacacttttatgagaaaatttcacaaagagaagccttttacaattgactactatggtttaattttaagtctgccaatcaaagcctcaagggaactggatcttaatatgtaaatataggaaacactcccactggtcagtgaagactggcttttatttcagtgtgttgatgtaacaaattctaacagatttataaattttaaacttcaacaaattttaaawcctcattatttttattttgcttacagctcatctcacttctgagaaaaattaactttttatactatctgatttcaaatataatctgatctaataattttaattgttccttaagcattgttcactttttctgggataaaaaaattcagtatttaagatcatctattttcttcctagttgtttctgtaccatgatgacatctgagtatatgggcatgctaaatctattctcttggaggtctccccaagactatacatgagcctttttgacattttgagcacccagggagag

SEQ ID NO: 861748 - DNA, 672 bp, Homo sapiens
caattaccaatacagaattttatacacagcaaaaatatctttcaaaaatgaagaagctagatgcagtgcattatctcagattggatcctgggagagaaaaaaaatctgtagaaaatacagtaaaatatgagcaaactctagttcagtcaatcaatagyggtgttcgtgttttggttttgaagtttaccatgggtatataaagtgttaacattaggggactctgggtgaagctatacagaaactctcagtactgtctttgtaagtttgatataaatataaaatttttcaaaaaaaggtttgtttaaaaaaggtgaagtaaagaagttatatttgttaccagtagaagcagattatagagtatgctgaaggaaattcttcatatgcaagaaaaatgatccagacaaaagcttagaattacagaaagaaataaaaggcaatggaaagtgtaaatatatgagtaaatatgaaaggatattggtgttttaaacaacaatagaaatatctttggggtttatacacaggtagatgtaaaatatgtgactaaaatggcacaaatgtcaagagatctgtaaatggaattaaatcgttgtaagatttttgtgctgtttgaaagtgataaaataattttaggaggattgtatgatggcataaatgcatatgataatcttcagg

SEQ ID NO: 861749 - DNA, 672 bp, Homo sapiens
caattaccaatacagaattttatacacagcaaaaatatctttcaaaaatgaagaagctagatgcagtgcattatctcagattggatcctgggagagaaaaaaaatctgtagaaaatacagtaaaatatgagcaaactctagttcagtcaatcaatagcggtgttcgtgttttggttttgaagtttaccatgggtatataaagtgttaacattaggggactctgggtgaagctatacagaaactctcagtactgtctttgtaagtttgatataaatataaaatttttcaaaaaaaggtttgtttaaaaaaggtgaagtaaagaagttatatttgttaccagtagaagcagattatagagtatgctraaggaaattcttcatatgcaagaaaaatgatccagacaaaagcttagaattacagaaagaaataaaaggcaatggaaagtgtaaatatatgagtaaatatgaaaggatattggtgttttaaacaacaatagaaatatctttggggtttatacacaggtagatgtaaaatatgtgactaaaatggcacaaatgtcaagagatctgtaaatggaattaaatcgttgtaagatttttgtgctgtttgaaagtgataaaataattttaggaggattgtatgatggcataaatgcatatgataatcttcagg

SEQ ID NO: 861750 - DNA, 594 bp, Homo sapiens
tgtttctgtgttacgattaagtatctctttggatttttaattatttaaacactcaccaagctagataaatcatggagacaataaagatgagtaacacaaatgccccagctgctacaccgtaaacccaggtctttagtctcccatctaagaagaatggatattagttattaatttacattagtctggtatacatgaggcagtctttaactatgaccaatgatcagtcatatatgaccartttctttcaaaacccgaaaagaattattgcttcagcacagttaatgattaatgcaaagctgctattatgagttagattctgcttcattaaagataagctatcaaggaaaactgaactgaaaaattataaatgtttgacttcagatttcaagtttctttggctaaacttcagctgcctttcatctcaattttacttcaaactcaatacatgtgtaatgctatataaacattctcttctgattttcagtgtattttgagaattgcaatgagaagaaaagatgaaaaatgcaattttaagaaagtttctacaaactcgagttaatgcatataggtatttaaacaaaaactttgtcattt

SEQ ID NO: 861751 - DNA, 694 bp, Homo sapiens
aaaacaaatttggatcatcctatccagaagggaaggctccattgtctccctgtttatctggcactagtacagattccaagtatttgagtatgctgacttttagggctaatagaaactggtctagctaccacgtgtgccctggcacagaactgcattagtgatgtttttatttaagggtcaaactattactgttcctatgatcaaatgaaaaattctggaatgtctttatagtctcctttatcctagttctgaatgacaacacattttttaaaattcatgtttctaactttgttcaatttgaaattaattatacttgtaatttttggactggaattgaattgaattatattgatccaaaattttttctcagaagaatgtaatttcatttctctgaacttcaaacatgagttattttccataatgatagtaaaaaattgaagaatagatggcactatcagaataaatgcatgtagataaaataatcaatagctcatataaaaatgctttgctcacttttttaatcctttggcattgcctaaaagaactaaaggtttctmtttcaacactagtctagtcagttcacctggcccaaatggctgtagaaaccaggtccttccccgtcctgctgggttactggagggttgggttggatgtacagcccgactggttttcacatctcctcttttgtcctcca

SEQ ID NO: 861752 - DNA, 618 bp, Homo sapiens
tcaaatacaaattaaaaataaggggtttcatactcccttttgcaaacaaggaaagagacttccctcccctcctttagagtatttacttagaaaacttgtaattatatattctgtctctatctatttgaaatgtatgtatatctttttaagacctagataagagttttgctagcttttacctcaaaaatgtcttacttaaatatgtggggactatctctttgaaatgtagtcaaagaagatagtgctattatcttcagattttagtggaagggtaactaagtaggcacctcactgtaagttgcaaaactatctcctgtcattaagaaatgtgaggtttagttttccctcrtatataatcaattaactaacactgatggccaccctaatagccaggcaaatttatgatgaagtgtttatgacaaatgttgctgtcaagtcctcttacttgaggacaagttattatcttgtgaatatatatgtattatattgaataaaagactgagtttttttactgtctttgaaatctcttagcaaattgcctatgatgcaagtcatgttctagtttaatgcttattcaataataattttttttccttttacctttgtaaagaacttttc

SEQ ID NO: 861753 - DNA, 622 bp, Homo sapiens
ctcagaagcaaatgaataaaaggagtgagcgctcaatggtgtctcatcctttaataattgttgagtaacctgaagaccaactaaatttaccaacatggaaataattggtagccttgacatgaacattttttgtggagtgataaggacaaaaactcactggagaatacgtgkagataaaagtataagcagttgcttttaaggaccattttgcgtatgtttttcacagagaaattgagcaagaggagatgagatctagtgtacctatggggaactaaaaaaaggagcataggcagtttatccaaactaagagtacagaaggtagagtgtatggtctcaaatgactttaggatatgtgttagtagaagcaaagtaaaaaatgttttctggttgccttcatttcctgaataaaataggaattaaaatctccttggagacaggatgatggaagaagaattggagatgcaataggagaagagaaagtatatgatggctttctagaaaattggaaaaaatgagtgaactacaaaaatatagtataattgtacaattctactaagagataacttgggtctagtgatcttaagttcaatgtaatacttttcagcatggttgtatgctcttc

SEQ ID NO: 861754 - DNA, 495 bp, Homo sapiens
aaggaaacttattctcagcttggcagtcacacacaattaacctgaatataacttatacaggtttaactcctgttttatttctgattgataggattcacaattgttatgctaacaaaatgcacaagaaattaaacatttgaartgatacctgaaaatgtttgccaaccatatatatgtataatgtctgtaataaggaaaatggcagacatttgtttaataagtacaatttcaactagccatcggtattcattttctactaaaacacccaccctcacctcaatgtttgttcactcacagtaatatctgtaactatatctattctctctcaccagtttaatacttttacatttcatttattattacctcccattatatcctagtatttcactttgcttatttaattataattggataaatagaaaataaatagcatggcatcttcagtcatataaaaacataaaacaataaaacacacaaactgtctcttgaatattc

SEQ ID NO: 861755 - DNA, 525 bp, Homo sapiens
tcctagtatttcactttgcttatttaattataattggataaatagaaaataaatagcatggcatcttcagtcatataaaaacataaaacaataaaacacacaaactgtctcttgaatattccaaattccatgtgtgcttgttatttgctcactatataagtttgcacatttttatcttggttcaaatttttccctctatatggaagtgtcctttggtgttccttggttttctagaggggaacattaatcattacaaattaataagctagaattataattttaataagtcacaagttactgttgttgccttcagtcaaagctgtagtttgggatcattttgtgtgakcagaggattagatcctgggctctgaggtaataccgccaactaagtaacatcttgtcaaaagcaatggcttcctttgtgttgtcatctctatgtatcaatactcaaactgctacaacaaatcagaagcatgtgttttgggaatatatagccaatctttggaaataattttttacttagac

SEQ ID NO: 861756 - DNA, 552 bp, Homo sapiens
tcttttactctataaaacacaagctgttcattttaacatataatttaatttaatttccattctgagtaaatgaaattcttaaccaggaaatattacaatcattaatcttagcatatttaaaaaatgatttcctttaaaagctacagtgtgggtagataacatataatttgaaattaatttttaaagaagtataacagatagatcaaatcacagtgggtttaatatggatggaataytgatagtaagatgttagatgtacagtcatttgcaatcccaaatgcatatcacaggttatctgtaagcaaaacttagctttatttagtcattgaaaatggtgaagaaataggaaaactgggctatttctttataccttactcttttgatcatttccaagaggacagcaaccaaagatgccattcttttatttataggcaggcttttgacatctttgacaaaaaggaaataacaaattttacattaataggaagaacataatagtctcatgtatggataaatggagaaaagcaatcaatggtaaataggaatttttgg

SEQ ID NO: 861757 - DNA, 620 bp, Homo sapiens
gcctcaaaaaacaccttattttttcaaattcacatgagggaatttagaaactattcctcctgctgaaattagtccatgtaaaagaaaaaaaaaaccctaaactttctggtacagaattattttccataagattaggatttatattgatagaaatccaaggaaatttcttccttctgtgttattcttgcatcttagaggcccattcagtaaaccatacttcttttaaatttatcaaccctactgtctgatagcctaaagttttcactttttatgyattttaatgtatttattagcaggcatatatttagcatcaactatgggcaaggctgtgttctaatgaaaataatagctatatagacatttgatacatagcactttcctaaaggcacttaaaacttgtttattatgttaaattatataaaacaaagtaataatatatgcaatgtatatatcatcaatgtattaatgcatacacatatatgatactacaaccacaaaaatctgtgttttaagcaccaaataaatagaataatcatgaatgcaacatagtatgtcagatttttttcaccatgaagttacgtggttaggaaaagctttattatcaatgtgggaattcaatt

SEQ ID NO: 861758 - DNA, 615 bp, Homo sapiens
tggcttttttttttttttttttaaattagcctaaggaaacttttgttcaaccacatgatttagcccaaattaagaaatgttatattttgagtattttggaaattcaggctttccaaaattgctgtgatcatccaagatactttattctagcaaactaaatgtttttaaactataattaaaagagttttttctgagttatcaaagtattctcaaaattttgtcaatgmtagtcactttgaaaactatactctggttttactaagtgtagaaactgctacagtcactttatactctttatcttcttgatataatcttaaattctacctaaagacataaaaccttgttttattattgattttctgaattctgtttggaaggaatatttttttccagacagtcaaataataggtatcattgggaaatctctttttagaaataatattcatcaacactgcagaaatgacaattttaaagacagtgattattctttttactaaagtaaacaattattttttgacatcccacatatgataaaaactttactaataaccggaaaaaatagattatataggagtacggtgtttaaaaaagaatacttacttttaggcagtttac

SEQ ID NO: 861759 - DNA, 615 bp, Homo sapiens
tggcttttttttttttttttttaaattagcctaaggaaacttttgttcaaccacatgatttagcccaaattaagaaatgttatattttgagtattttggaaattcaggctttccaaaattgctgtgatcatccaagatactttattctagcaaactaaatgtttttaaactataattaaaagagttttttctgagttatcaaagtattctcaaaattttgtcaatgatagtcactttgaaaactatactctggttttactaagtgtagaaactgctacagtcaytttatactctttatcttcttgatataatcttaaattctacctaaagacataaaaccttgttttattattgattttctgaattctgtttggaaggaatatttttttccagacagtcaaataataggtatcattgggaaatctctttttagaaataatattcatcaacactgcagaaatgacaattttaaagacagtgattattctttttactaaagtaaacaattattttttgacatcccacatatgataaaaactttactaataaccggaaaaaatagattatataggagtacggtgtttaaaaaagaatacttacttttaggcagtttac

SEQ ID NO: 861760 - DNA, 615 bp, Homo sapiens
tggcttttttttttttttttttaaattagcctaaggaaacttttgttcaaccacatgatttagcccaaattaagaaatgttatattttgagtattttggaaattcaggctttccaaaattgctgtgatcatccaagatactttattctagcaaactaaatgtttttaaactataattaaaagagttttttctgagttatcaaagtattctcaaaattttgtcaatgatagtcactttgaaaactatactctggttttactaagtgtagaaactgctacagtcactttatactctttatcttcttgatataatcttaaattctacctaaagacataaaaccttgttttattattgattttctgaattctgtttggaaggaatatttttttccagacagtcaaataataggtatcattgggaaatctctttttagaaataatattcatcaacactgyagaaatgacaattttaaagacagtgattattctttttactaaagtaaacaattattttttgacatcccacatatgataaaaactttactaataaccggaaaaaatagattatataggagtacggtgtttaaaaaagaatacttacttttaggcagtttac

SEQ ID NO: 861761 - DNA, 556 bp, Homo sapiens
cctgaagtcatccaggagtctctcccattacaatgacatgggtcggccaaatgtttccatcattagaatgcctgccattggccttgagtctctcccattagaatgcctgggatcacccagatgtctctatcattagactgccttggatcagccaggagtctctcccattataatgcctgggtttacttaaatgtctctataattaggctgccaggctcttccatgagtctctcccattaaaatgtctggagtcgcccaggtgtctccatctctaggctgcctggaattggccaggagtctctcccagtagaatrcctggggttgtccaggtttctctatcactagtctgcctgggttcgactgggagtctcttccattagaatgcctggggttgctcaggtagctctttcattagactgcttgaggtcatccagaagtctctcccattaaaattcctaaaatcgcccaggtgtctccataattagactgccagggattggttaggagtctctcccattagaatgcctgtggtcgcccaggtgtctgtatactttga

SEQ ID NO: 861762 - DNA, 654 bp, Homo sapiens
ttgaatcattcatagccctgtccactgctaggttctgacatatttattcaggcttgtctgggaaactggaaaaggtatcgactttatggagagagagacctcttaggcaagaattctttcaaagcaaagacagaattgggcaattaatactgacccaccaataaaatgaagagcatggtattttatctatttctttggtagggagagaaaagtaggtaagaaaaatccagaatttaatgaggagagggaaaaagcaytattgagcataaaaggacacagagtccaatgctggcagtcacaggtccaaggaatgacatttgtaaatcaattacaagctgctttcacagaaataagatactcattcagtgtctgcttccctcaaaattgcatatgacattgaggtagaattagcactagagcgtttttgtttctacatattaatttgacatctatttcttgggcattgattctgtgccaggagactttataggtattggagaatcaaaagtaaataaacagtcatgaaacaaaacctcatggaacttacattactatctatctgtgaatgcagccaaggcattcccccaagatctgtctagaatacagaggtaccaaggacttgaacttataggatctttggaagcctagaaggcc

SEQ ID NO: 861763 - DNA, 631 bp, Homo sapiens
aataaacagtcatgaaacaaaacctcatggaacttacattactatctatctgtgaatgcagccaaggcattcccccaagatctgtctagaatacagaggtaccaaggacttgaacttataggatctttggaagcctagaaggccagactctctttacctamaatatgcattacctagccttgtaattatcttcacaaaatagtacaccagctcaaccctgaaatatcagagcaaggcggcaatgtaatttttgtcctatgagaggttatcaacaaaaatgaggggttagcaagtcacttggtgtcataggcaaatatttatataaagatataattgattgctaatgctgtatgcgaaagcactttttgctgggtttttacaatctgacctatgagaaagaaataatcaaaatcattctttcctttgataagaacttatacttcctcctggtaaacagggtgtccaagtgtgcacatatttatgcccaagcatttctgaatgtagcttacagcctaaatccaacatatattgtgtgatatattataataatttgaccagttattattaagaacacaagccaagttaaggtcttttcaagctctaaaatcctacaatttgtgtgggaaattgt

SEQ ID NO: 861764 - DNA, 631 bp, Homo sapiens
aataaacagtcatgaaacaaaacctcatggaacttacattactatctatctgtgaatgcagccaaggcattcccccaagatctgtctagaatacagaggtaccaaggacttgaacttataggatctttggaagcctagaaggccagactctctttacctaaaatatgcattacctagccttgtaattatcytcacaaaatagtacaccagctcaaccctgaaatatcagagcaaggcggcaatgtaatttttgtcctatgagaggttatcaacaaaaatgaggggttagcaagtcacttggtgtcataggcaaatatttatataaagatataattgattgctaatgctgtatgcgaaagcactttttgctgggtttttacaatctgacctatgagaaagaaataatcaaaatcattctttcctttgataagaacttatacttcctcctggtaaacagggtgtccaagtgtgcacatatttatgcccaagcatttctgaatgtagcttacagcctaaatccaacatatattgtgtgatatattataataatttgaccagttattattaagaacacaagccaagttaaggtcttttcaagctctaaaatcctacaatttgtgtgggaaattgt

SEQ ID NO: 861765 - DNA, 631 bp, Homo sapiens
aataaacagtcatgaaacaaaacctcatggaacttacattactatctatctgtgaatgcagccaaggcattcccccaagatctgtctagaatacagaggtaccaaggacttgaacttataggatctttggaagcctagaaggccagactctctttacctaaaatatgcattacctagccttgtaattatcttcacaaaatagtacaccagctcaaccctgaaatatcagagcaaggcggcaatgtaatttttgtcctatgagaggttatcaacaaaaatgaggggttagcaagtcacttggtgtcataggcaaatatttatataaagatataattgattgctaatgctgtatgcgaaagcactttttgctgggtttttacaatctgacctatgagaaagaamtaatcaaaatcattctttcctttgataagaacttatacttcctcctggtaaacagggtgtccaagtgtgcacatatttatgcccaagcatttctgaatgtagcttacagcctaaatccaacatatattgtgtgatatattataataatttgaccagttattattaagaacacaagccaagttaaggtcttttcaagctctaaaatcctacaatttgtgtgggaaattgt

SEQ ID NO: 861766 - DNA, 560 bp, Homo sapiens
taataggtattctaaaattaatgtgccggtaacaaatcctttcatcttcccatcacaacattctacctcactcccagctgtgtccacctccactgagacaactctatcctcacagtttctctggatttatccttgacctctctctgtccataataactcatatccaatccaccagtacattcagctctactttcaaagcacatcctgcatctgaccactgtgttctatttscattgctgctacctcaattcaagccaccgattactccaactgtctcctagcaggtcttccagcctctgctttggcccttgcagtcctcttgcagcatagcagccagagtgatcctcttcaaccagaagtcagatcagctcactcctctcttcagaacttgctgaagccctcctatccttaataatctactcggactgccataacaaaacaccattagactggtggcttacacaacatatttatttctcacagttccggaggctgggaagtccaagatcaaggtacaggcaaatttggtttcagatgaagacctgcttcctggcttgcag

SEQ ID NO: 861767 - DNA, 610 bp, Homo sapiens
agagtgggaaccacagagcacaagaagaaaaatgagatagaggtttggagaatatgagcctgcgaacaatgagagaggtaggagaaagtatattattttcttttctgaggtgtgattcccatagagaatatctcccttgggggtaggttagatacctacgagatgcaaaacacaatgtgctctcagttctgccaggtacatatttaagagaacagtttggagttaaaggtagaatgcagttggaccactttataaccttagcaaagcggggtttaagaaaataatagaggaatttcactctcagcaaacagggacctgtttcggtaatgygaactcattagggctatgctcctactcagcttttgtgcaagcaactctagataaagtgctactcaaatatcccccaaatctgtcaccaacttaattcagacaccagaaaaaaacaaaaacttagagaaacagaggtagtccaaagacatgttagggagacaattgtggtaaggtggaatttctcatgtgaatttaaaagtttatttaaaagtgaatgtaaaaatctacttcctcctcttcccaggcagctaataacctagctttattgttaatcagaaaa

SEQ ID NO: 861768 - DNA, 618 bp, Homo sapiens
aaacaatgtcgcgagcaccgacaccagacaagctaagtctgtgaccttgtgcagaacgagaccaccctgcgatcgggtctgaacacagaccagacgtggacgtcgttcaaacccccaagatgcccagacacccaccctggctgagatgagcaagggctgctgctttactgcccggctcctgcctccccctgagtctcctgcctcccctgaatcgcccctccctttagagaagattgattgagatgcccaatcctagcaggacctcacctcctcacatccctcaatccagagtcacacccggtttcctcgcaagccccccaaatcacctcctgcagcccacacctgacaatcaggccctcctaacmtctctgagatgcccaggttccccagggcatgtgttccctcttgctgcactgagtgataacccagcctgctcggccataggtgagctccgggggtcttaggctgcagggctttgacaggcgagcctgtctaacgtttagaaaccactcaacatgggagatggttgcccagagagctgacactgtctttgctctggtacttagtggacatctgcagaaatgcaatgctaggagctgggaaagcaggtggggggtt

SEQ ID NO: 861769 - DNA, 652 bp, Homo sapiens
gggacaaacctacggtgtccaaggcccgctgcgggccttggggacagagataaaggagacactgtagctgccctgtgggctcctgggtcaggacactcaggcgggggctgtggttctcccactccaccctcaatccacccacacctcatccctgtctgactcccctccccgtttcattgccctgctgggcgaagtctttaactgggcaggaggagagggaggaagcttctgtcttgagaggcaaaagccaggtcctgagtctgtgctgcacacagcatgtcacttgaactcatttaatacctccatttggtggcaggtgctcaggtacagggaacgtcctaggtgctctagttgccttatcrtacttatcttgaatgatcccgaatggtttgattatacccattttacagacgaggaaaccaaggcccagacaggtgaaaacagatcaaagctcataaagctagtagagcaagatccactacccaggttctgtcatttccaaagcaacatcttttcatcacacaggttgtttcctagctatgcacagcattgcgtaccaaataatacagtgaagggacagtggtgggggggagaagtacagctgccccaccctcagtccagggtctcagctggagtctacatgtgccctggc

SEQ ID NO: 861770 - DNA, 652 bp, Homo sapiens
gggacaaacctacggtgtccaaggcccgctgcgggccttggggacagagataaaggagacactgtagctgccctgtgggctcctgggtcaggacactcaggcgggggctgtggttctcccactccaccctcaatccacccacacctcatccctgtctgactcccctccccgtttcattgccctgctgggcgaagtctttaactgggcaggaggagagggaggaagcttctgtcttgagaggcaaaagccaggtcctgagtctgtgctgcacacagcatgtcacttgaactcatttaatacctccatttggtggcaggtgctcaggtacagggaacgtcctaggtgctctagttgccttatcatacttatcttgaatgatcccgaatggtttgattatacccattttacagacgaggaaaccaaggcccagacaggtgaaaacagatcaaagctcataaagctagtagagcaagatccactacccaggttctgycatttccaaagcaacatcttttcatcacacaggttgtttcctagctatgcacagcattgcgtaccaaataatacagtgaagggacagtggtgggggggagaagtacagctgccccaccctcagtccagggtctcagctggagtctacatgtgccctggc

SEQ ID NO: 861771 - DNA, 621 bp, Homo sapiens
ttcagctttctacatctggctagccagttttcccaacaccatttattaaatagggaatcatttccccattgcctgtttttgtcaggtttgtcaaagatcagttggttgtagatgtgtggtgttatttctgaggcctctgttctgttccgttggtctatatatctgttttggtaycagtatcatgctgttttggttactgtagccttgtagtatagtttgaagtcaggtagtgtgatgcttccagctttgttctttctgcttaggattgtcttggctatgcaggctcttttttggttccatttgaaatttaaagttgttttttctgattctgtgaagaaagtcaatggtagcttgatggggatagcattgaatctataaattactttgggcagtgtggccattttcacgatattgattattcctatgcatgagcatggaatgtttttctgtttgtttgtgtcctctcttatttccttgagcattggtttgcagttctccttgaagaagtccttcatatcacttgtaagttgtattcctaggtattttattctctttgtagcaattgtgaatgagcgttcactcatgatgtggctctctgtttgtctgttgttggtgtatagg

SEQ ID NO: 861772 - DNA, 656 bp, Homo sapiens
ttccatgcttgtggataggaagaatcaatatcgtgaaaaaagccatactgcccaaagtaattgatagatttaatgctatccccatcaagctaccattgactctcttcacagaattagcaaaaactactttaaatttcatatggagccaagaaagagcctgtgtagccaagacaattctaagcaaaaggaacaaagctggaggcatcacgatacctgacttcaaaatatactacaaggctacagtaaccaaaacagcatggtactggtaccaaaacagatatatagaccaatgaaacagaacagagacctcagaaatagcaccacacatctacaagcatctgatctttgaaaaacctgacagaaaaaagcaatggggaaaggattccctatttaataaatagtgttggcgaaaatggttagccatatgcagaaaacagaaactggaccccttttatacagcttatacaaaaattaactcaagatggattaaagatttaaacatragacctaaaaccataaaaaccctagaactaggcaatatcattcagaacataggcatgggcaaagatttcatcactaaaacacaaaaagcaatggaaacaaaagccaaaattgacaaattaaactaattaaaattgacaaattttagttcagtt

SEQ ID NO: 861773 - DNA, 567 bp, Homo sapiens
tggctcttccagagccaggttctacccccactggggtccagaatcctcagcagattttgtatctaaggcaggaaggctgcagaggtcaggagttgagtgcaggacagcacaaggcagggctgagatcacagtccagagtcacatctgggtccctgggtcagttgcctccsctctgacctcaggcatctcatcttcaaatgggtacattagcacccattccacgaagtcagtgtgagggtgaatgagacggctgcaatacatggtcagtgaagagaaagcacctggtgggagctcagcgacattaccctccacagcgccccggaggccagtgatgccatctggtagcatctgcccccatgtcagcaggaaggggagacagcaggtcacacttacccgagaatgatcagtcagctgtgctgagatgtgcctctcacttagaaaagggtcctgcacacagagacactcacagacaccactgtgtgtctccagctgctccacaactcagaggcaggcagatgttcagcaacagtgacgtctggggttacagcacccatcagagtggggccc

SEQ ID NO: 861774 - DNA, 567 bp, Homo sapiens
tggctcttccagagccaggttctacccccactggggtccagaatcctcagcagattttgtatctaaggcaggaaggctgcagaggtcaggagttgagtgcaggacagcacaaggcagggctgagatcacagtccagagtcacatctgggtccctgggtcagttgcctccgctctgacctcaggcatctcatcttcaaatgggtacattagcacccattccacgaagtcagtgtgagggtgaatgagacggctgcaatacatggtcagtgaagagaaagcacctggtgggagctcagcgacattaccctccacagcgcccyggaggccagtgatgccatctggtagcatctgcccccatgtcagcaggaaggggagacagcaggtcacacttacccgagaatgatcagtcagctgtgctgagatgtgcctctcacttagaaaagggtcctgcacacagagacactcacagacaccactgtgtgtctccagctgctccacaactcagaggcaggcagatgttcagcaacagtgacgtctggggttacagcacccatcagagtggggccc

SEQ ID NO: 861775 - DNA, 455 bp, Homo sapiens
tatcaggggtttctgcttttgcatcttcctcattttctcttgttaccgccatgtaagaagtgcctttcacctcccgccatgattctgaggcctccccaaccatgtggaattctaagtccagttaaacctctttttcatctcagtcytgggtatttctttatgagcagcatgaaaacgcactaatacagtaaattagtaccagtagagtgggtgctactgaaaagacacccaaaaatgtggaattgactttggaactgggtattaggcagaggttggaacagtttggagggctcagaacaagacagaaaaatgtgggaaagtttggaacctcctaaagacttgttgaatgcctttgacaaaaatgctgatggtgatatgaacaataaggtccaggctgaggtggtctcagatggagatgaggaacttgttgggaactggagcaaaggtgactcttg

SEQ ID NO: 861776 - DNA, 455 bp, Homo sapiens
tatcaggggtttctgcttttgcatcttcctcattttctcttgttaccgccatgtaagaagtgcctttcacctcccgccatgattctgaggcctccccaaccatgtggaattctaagtccagttaaacctctttttcatctcagtcttgggtatttctttatgagcagcatgaaaacgcactaatacagtaaattagtaccagtagagtgggtgctactgaaaagacacccraaaatgtggaattgactttggaactgggtattaggcagaggttggaacagtttggagggctcagaacaagacagaaaaatgtgggaaagtttggaacctcctaaagacttgttgaatgcctttgacaaaaatgctgatggtgatatgaacaataaggtccaggctgaggtggtctcagatggagatgaggaacttgttgggaactggagcaaaggtgactcttg

SEQ ID NO: 861777 - DNA, 471 bp, Homo sapiens
gctaactacagtagctttttcaaatggagattttcatactctctcttcacacctccccccaagtgtttattaataactctgccttttccttggttttaaattatctctaaatattaaaccttgtgtgcagagcagatgctaacttttgttgtacatgagttgcttatcttattataacccaaaacaaagactcatttcccattttctcaaaaaatgctgggagatggtctattttggagctctggacttccagccagagggagacaaagacccactstctgtccctcagacatgtcagtacctgagtgcccaggcatctcaagaaatgcatgttaaaaccacaatcagataccattttacagccataagttagagaaaatggaaacatgaccatagcaagtgttggcaaggatgtggaattcttatagacaagaagtcggtgtaggaaggtggcagtttgtgtggtggaca

SEQ ID NO: 861778 - DNA, 703 bp, Homo sapiens
ctgtacctcaaagaactatctttcaagctcatttctcagagaactattaatagatttgttattcccaagcagagagaaaatcaggaaacagaaaacatggtgcaaacaggaacataaagggcaaccaatagatatttcagcaggtcagaaggcaaaaagaagggattgttcagaaaaataaattgacagaaaacccagtgaatctggagaagcagttagtgaagaatacaaaacatatatatatatayacacacacacacacatatatatacacacactcatatatatatatattcatatatatatgtatgaaaaattattatatgccccatatgaagtatagggagtcaaggacaggatacacatgtgtgattgtgtaggaaaggaaagttaactaagtcaatagaaaatgactaaaactgaaagatgaagaaaaaacacaaggaagttattagagatgtggtaatcaaaataacaagtatttaaattcaatctgttttttatactttaagttctgggatacatgtgcagatacatgttacataggtatacacgtgccatggtggtttgctgcactcatcaacccatcacctacattaggtatttatcctaatgctatccctcccctagtatcccactcctcaacaggccctggtgtgtgatgttcccctccctgtgtccatgtgttctcattgttcaactc

SEQ ID NO: 861779 - DNA, 642 bp, Homo sapiens
ccatcctttaagactagctcaatgtccatcttctatgaagtatgtatctgtctttctctgaaccttcataagcatacatctgaacctctcctgtagcacgtatctcatcttatcttgtatatttatttacatcctgattttttgccccctggtaaatagtcaattcctttatacatatgtcatttcctttggctcagggccatttgggattctccccaagactttggacagacaagctaccccaccagtttgaaatttaagttctgttagaytctgagactggtggacactcaataaaatctttcatcttggattttaagtttttttctttttcctttaatgtcctgatacccccaaaaagttgtttcatattacactgagagggagccagttttctccagaatgaaagggccatccttgtgggcctctggcatagctgagaaagcagtgatgagtgcccaccagctgctggattctgtgggaaacatagtgagggcctttcaagaaattgctgggctgggcctggagctggaatggcctcattacaaatttattaccaagtgagattgagccatacaggaaaacaacagcattcccactgatggtgcctccagtagactccctgctggaggctttgaccag

SEQ ID NO: 861780 - DNA, 610 bp, Homo sapiens
ttattcattgctatccccaatggatgtaattacttggatgaggataagaggcattctcccctccaaatccgggtgaaaggtgatctggagagctttgcaagccagagtctgcctatcagaactcaaggatccagtcaattacatcaatggatgtaattacttagatgaggataagaggcaccccccaccccctccaaatcctgrtgagagacaatctacagagcttcacaagccagagtctgcctatcagaactcaaggatccaggcaaggaggactggagaaggcactccttgaggcacaccctgagtctagtgagcaatgctggtgaaagcaaggactttcattcaaagcccagtgcatgggcttggcagcctgacacagctggatacaaatcccagtttttctacttctagttttgggcaagttctcaacctctctgagccttttgttctcaagcccaaaaagggggaaatacagtattaacagtattagtgaaatactattagcctcaccaaggctttggtgagaattaactaaagtatttcaggtaaagtgctcagcaccatacctgatcaggggtgagtgctccctatttcatctggagtggag

SEQ ID NO: 861781 - DNA, 618 bp, Homo sapiens
tagccaggtgtagtggcaggggcctgtagtcccagctacttgggaggctgaggcaggagaattgcttgaacccgggaggtggaggttgcagtgagctgagatcgcaccactgcactccagcctgggtgacagaggaatactccgtcttaaaaatataaaatactataaataagccatcgtatttttattcaactttaatgagtttattttttaacaagtttttttcttacactgatactgttatccaatttaatgaaatatttaataaaatttcagtttaacacataactctgattcaatgcttatgatgatattaatatagtaaaaatcctaaataataatgtgttttagctagccatactttttatgtgtagtgtactcagagttgcagacattggcagttccagaaactcatttcagtgtaccagtttttcttaacacagatgaataatagaatttyccccctactcacaactccaaaagctttctactgtttaattctattcatgtgttgtaatctatagttattcactcgaattctgttacttttgccttaaaaagtgataaaaaacataattctaaaacataacctagaccttaagtgctgaagagtttctt

SEQ ID NO: 861782 - DNA, 683 bp, Homo sapiens
ataatgattttttttcattacaagtgttgtactacaaaatgtagtgttatagaccatatagtcataattttctaggcacatctaaaacaatttgttttaaaaccacacaactaaatggaaattgaacaacctgctcttgaataaatactgggtaaataacgaaattaaggcagaaacaaataagctctttgaaaccaatgagaacaaagacacaatgtaccagaatctctgggacacagctaacgtactgtttacagggaaatttatagcactaaatgatcacctgagaaagtgggaaagatctaaagtcaacaccctaacatcacaaaataactagataagcaagagcaaacaaattccaaagctagcagaagacaggaaataactaagatcagagcagaactgaaagagacagagactctttcaaaaaatctttcaaaaaaatcaatgaatccaggagctggttttttgaaaagattaacaaaatcgatasactgctagccagactaagaaagaagaaaagagagaagaaacaaatagatacagtaaaaaatgataaaggggatataaccactgatcccacagaaatacaaactaccatcacagaatactataaacacctctgtgtaagtaaactagaaaatctaaaggaaatggataaattcctggatacatacactctc

SEQ ID NO: 861783 - DNA, 669 bp, Homo sapiens
gaaacaggaacacttttacactgttttggggagtgtaaattagttcaaccattgtagaagacagtgtggtgattcctcaaggaactagaaccagaaatatcatttgatccagcaatcccattacttggtatatacccaaaggattataaataattctaccataaagacacacgcacacgtatgtttactgtagcactattcacaatagcaaaggcttggaaccaacccaactgcccatcaattatagactggatagagaaaatgtggcacayatacaccatggaatactatgcagccataaaaaggatgagttcatgtcttttgtagggacatggatgaagctgtaaaccatcattcttagcaaactaagaaaggaacagaaaacaaaacactgcatattctcactcataagtgggaactgaacaatgagaacacatggacacaggcagaggaacattacataccagggcctgtcggggtgtggggtcaaggggagggatagcattagaagaaatacctaacgcagatgacggattaatgggtgcagcaaatcaccatggcacatgtctatctatgtaacaaacctgcatattctgcacgtgtctcccagaacttaaagtataattttaaaaaaagaaaaagaataatttgttttaaaagatctccttt

SEQ ID NO: 861784 - DNA, 662 bp, Homo sapiens
aaattaaatatactgttaattttaccttttcatatactctgttactgatattttaaaatacttacccctcttttttcctgagaatcagattttcttgccttttcacttatttagccatggaaattggtttaagtccataaagtatgagctgtaaagggcttttattccaaaatctacatsagattccaactacaggtgcaactatcagcctctctgataagaccatggagaaatttaaagagatggctcctataagttctcagctagacaaaagagtttctaagaagttgaatggaattgtctcatcgctctttgatttttaagcccaaagtagaaatgaacctggattgaaggtatacataggtgtggttttgtgtaacagagtggtttataatctaatctgcaagaattccatgcaacttttaaaggatttgtgccatcttgtactgaaagggtagcaattgtgtaaaatgaaaagaggactccttccctaagcagtctgagggaactactcaaatgcaaatatttgccatttttcatagaagagcagtgactcacaggatgggaccaagattacagcagtcagggccaaaagccctggagaacaattctcaaggagccaaactgagttctaatcaacaatatttcatgctctcagagca

SEQ ID NO: 861785 - DNA, 634 bp, Homo sapiens
gagcaaacaccttaaatatggtaacaatgaaaacagtttcttaaaaataagggacaactcaacgatatatactaccaccacatctattctattttattggcagtcttaagtagtataagaggaaataaaaaaggtattaaggktataagagaggaaagcaaaattattagagataacttttatcatttacatagaaaatgcaaaagaatccataaatcttacaaaaggactgaatataaagtcagtagcatttatatacaccagaagcaaatacctagaaaacaaaaataaagagaagaaaaaattttcaataatttaaatacagcagtatttacaagaatacaagaataatatatcataagatataaaaaatctctacaggtaaattataaaacttttagagctattaaaaataactgtaaaatgcagagaaaccatatttataaggagaaaaactttatattatagaaaaatcaattttccctaagtggaactccagatttaataaaatttcaatagaaatttctgtttttttaatgcaacttgttcagattgttataaaatttatataaaagaacaaaacgagctaataaataccctgaactaatctgaataagtgaaggatgggtaattt

SEQ ID NO: 861786 - DNA, 632 bp, Homo sapiens
gccaatctctttggcatgttgacttcctttcttttggatatacacccagcagtgggattgctgggtcatatggtacctcgaattttaattttctgagaaaccctcatgctgttttccatagtggctaaactaatttatatttccaccaacagtgtacaaggattccccattctccagatcttcatcagcttcaatattgcctgtcttttggatctgagccatttyaactggggtgagatgatatcttaatgtagatttgatttgtatttctctgattaatgatgcactgttcatatacctgttggtcactcatatgtcttttttgagaaaagtctattcagatctttgtccattttaaatcagattatttgatattttcctattgagttgtctgaactccttatatattctatcaatccattgtcagatgactagtttgcagatattttctcccattctgtgggttgtctcttgcctttaattgtttcctttactgtgtagaggctttttaaatttatgtgagtccatttgtctatttttgttcagttaactatgcttttgaggtgttacacaaaaaatctttgcccagtttcctgaagagtttctccaatgttttcttttagtaattttat

SEQ ID NO: 861787 - DNA, 637 bp, Homo sapiens
tgcattaaatttatagatcaactctgagacttttttttttttttttaccatattgaatctttcatttcatgaacaaggtagtctgtcaggtaaagcccaaaaatgtcacctgggctaattttctgggccatcacccttcctccactgtatactaaaaattattccgtcataggcatttgtcttatggtcaggactgaaaatataaaaatgctaaaactgagcatattcagcctctgttcaatataattgtgtttttaagaaaacttacaagggcaaacatcaagttacaaaatctgtcatttcagtgggttaaaggctaagagagtttcagatttgcaataacacagtaattttccctgttttaattttaaatgtgaaaggtatttgtatagttcaaaatgttgaactataaaaagcaaacatcgytattaggtaatcagttctgtgattacacaaagcttttgatcaggaattacggactcaatttttctaccaccataagcaatacagcgttagcatagtgcctcttatcaactctgttatccattgaaatggcaaacacagacaaagtcattggggcgaagcaactttgtttcaaatgaaacatttttcttaacatattgttagcttttgatct

SEQ ID NO: 861788 - DNA, 596 bp, Homo sapiens
gggaaagtttggaacttcctagagacttgtggaatggctttgatcaaaatgctgataagaatatggacaatgaaatataggctgaggtagtatcagatggaaatgaggaacttgttaagaactggagcaaaggtgattcttatcatgttttagcaaagagactggtggcattttgccccttccctagagatctgtggaactttgaacttgagagagattatttagggtatctggtggaagaaatttctaagcagcaaagcattcaagaggtgacttgggtgctgttaaaggcattcagttttaaaagggaaacagaccatgaaagtttggaaaatttgcagtctgacaatgtgatagaaaagaaaatcccactttctgaggagaaattcaagccaygtgcaaaaatttgcataagtaacaagaagccaaatgttagtcccccaaacaattgggaaaatgtctccagggcatatcagaggtcttcatagcagcctctcccatcacaggcccagaggcctaggaggaaaaaatcgtttcctggaccagccacttggtctacgactatgtgcagcctaggtacttgatgccctgagtcc

SEQ ID NO: 861789 - DNA, 655 bp, Homo sapiens
ggaaacagaggaagtacgattaagcaacttatcccagatcatacactcaagtaagcagtagagttgggaatcaaacccaggtctgactctagcatttttctgttatattctactttgtgccaggaactctgctgatgacataaaaatgaaaacatatgggccctgccttcaaggagctcagtctaatactggacagtggagacagatttataagcaaatagcatctgytttctacttcatgaagaaaacttcatacaggaattccctcaacctccttacacaatgggaataatgatgctgactgcaatgaacatttgagtgcccaccatttgtaccaaacatacacttctacatgcctttcacataattatctaacctaacattcaaacaacaagatgaggtaatactatgattatacccagtttatagagtaggaaacctaatcttagagatgttataaaggtttcccagggtcacatggctaggaaactggggtcctgggatctgaaacccaggcagcctgactaaatccgttactctttcctactaagttgtttcctgatacttggttgggagttcacaacacccagtagtttatcttttctttgtatcaaatgaagcaaaaaggaaaggcttttcctccaagagaagttct

SEQ ID NO: 861790 - DNA, 595 bp, Homo sapiens
tcaaaaaaaagaaaaaaattggctgggccgggtgcagtggctcacgcctgtaatgccagcactttgggaggctgaggcaggcagatcacaaggtcaagggatcaagatcaggctggccaacgtggtgaaaccccatctctactaaaaatacaaaaatcagctcggcgtggtggtgcccacctgtaatcccagctactagggaggctgaggcaggagaattgtgtgaaccggggaggsggaggttgcagtgagctgagatcatgccactgcactccagcctggtgacagagcaagactccgtctcaaaaaaaaaaaaaaaaaaaaaaaaaacggctggacacaggggctcacacctgtaatcccatcattttgggagggtggggtgggaggatcacttgagctcaggagtttgagtccagcctgggcaacatagtgggaccctgtttctaccaaaaataaataaataaaaattatgtaagcatggcgtgtgtgcctgtagtcccagctacttgagaggctgaagcaggaggatcacttgagcctgggaggtcaaggctgcagtgagctgtgattgtgtcactgcactccagcctgg

SEQ ID NO: 861791 - DNA, 595 bp, Homo sapiens
tcaaaaaaaagaaaaaaattggctgggccgggtgcagtggctcacgcctgtaatgccagcactttgggaggctgaggcaggcagatcacaaggtcaagggatcaagatcaggctggccaacgtggtgaaaccccatctctactaaaaatacaaaaatcagctcggcgtggtggtgcccacctgtaatcccagctactagggaggctgaggcaggagaattgtgtgaaccggggagggggaggttgcagtgagctgagatcatgccactgcactccagcctggtgacagagcaagactccrtctcaaaaaaaaaaaaaaaaaaaaaaaaaacggctggacacaggggctcacacctgtaatcccatcattttgggagggtggggtgggaggatcacttgagctcaggagtttgagtccagcctgggcaacatagtgggaccctgtttctaccaaaaataaataaataaaaattatgtaagcatggcgtgtgtgcctgtagtcccagctacttgagaggctgaagcaggaggatcacttgagcctgggaggtcaaggctgcagtgagctgtgattgtgtcactgcactccagcctgg

SEQ ID NO: 861792 - DNA, 595 bp, Homo sapiens
tcaaaaaaaagaaaaaaattggctgggccgggtgcagtggctcacgcctgtaatgccagcactttgggaggctgaggcaggcagatcacaaggtcaagggatcaagatcaggctggccaacgtggtgaaaccccatctctactaaaaatacaaaaatcagctcggcgtggtggtgcccacctgtaatcccagctactagggaggctgaggcaggagaattgtgtgaaccggggagggggaggttgcagtgagctgagatcatgccactgcactccagcctggtgacagagcaagactccgtctcaaaaaaaaaaamaaaaaaaaaaaaaacggctggacacaggggctcacacctgtaatcccatcattttgggagggtggggtgggaggatcacttgagctcaggagtttgagtccagcctgggcaacatagtgggaccctgtttctaccaaaaataaataaataaaaattatgtaagcatggcgtgtgtgcctgtagtcccagctacttgagaggctgaagcaggaggatcacttgagcctgggaggtcaaggctgcagtgagctgtgattgtgtcactgcactccagcctgg

SEQ ID NO: 861793 - DNA, 629 bp, Homo sapiens
aaagtgattctgggtggaaacagtgtggcaggaatatgggtcttaatgatgcctggatttttaagtgccctgtttaataacatgaccatcagcatcaagcagttcagaaactacttctacagtaataaaatgttctattgcccccaattcatgtttattacaatcatatcacaacctcctcctatgtcatcaaaaaaagggtggagctctgtattttatcagtttcatggaataaaagcagaagactttgctcctaattgaaaatttcagatatgacacagagcacttgcttcaaattaaagttcttatctaattaagaaaagtgttcactgtaatttgtgttaagattcatactcctttagagcaaagcgcatttacttaccagcaagtctgtttttcttgagttgtactaaacatcagggcaatttgattcggactccatgggaagttactttggaattttagaaactatrggcatgtgaagcaatggcatttaaatagcccttccggaataaagttcatccttcgcaagctctcactaaaaatgttcgaaccacacctgtctcgtgtttctgactctagtttggttcatctgaaatacacaggcacaggccatccgtcccattgag

SEQ ID NO: 861794 - DNA, 581 bp, Homo sapiens
tcagatatttctagggttaagctctcaagaacaaggctgtccataatctaaaactgtttcagggttcttccaaagcttgtttctcaaagcctgagcactttgggtgagatatgagatcatttatgatctggtccctgagcctctttccagcaaatttttagattccaggaaaaaaaaaaaaagataatttcaggtgctcagaacaaggcaggccttctcccattgcgggccctctgctcactcttgttctgaaagggttccacttcataggtatcttccctaggggatgattggtaataagtatttkttttcatctcttccttccacagatcaattcttaagtatctattctcagcatgcctccaatatacatgcacactcacctgtaattgcgtttatctgctgacctgaagttcctttcatgtagcttaggttatgaatccagcaaactcacttacatacacacaataataacactaataattaccaattatgaagtggttacagcgaggcactaaactaagtcctttatccacaaaactcaacgatttttcgatgtgaaatgctactagggtgctcta

SEQ ID NO: 861795 - DNA, 657 bp, Homo sapiens
tgatctcaggtgatccacctgccttggcctcgcaaagtgctgggattacagtcatgagctaccgtgcctggccagcagctgctatgtcttgctccatctttcttccccacctcagctctgtctccattccactggctctcttctgctcccaccattctctgaatcccctcaacaaaagccttgtccaaaagcctggggaactacagtttactccctcctcaccctctctatcaacaatgactctcctagggactccctmggtgaccactcagagctttgagattaggtaaacagtgttaatatgaccaacttggaacttgcagcttagtcaagcctgagacagtcaagttacccagataaggatagaccatgcacctacttaaaataacagcatcaacaggagttcttctgcttcccttcctgtttcaaattatagcaattgaccacttagttacattggttaatgcccaagacaaaaatgcagcccatctcttccccacctggcctgcatatatgttcattttgcatttagcagaactgaaaggacttctttctgttttattttcttgtaaccacagaatttaaatatctactgttttgtttgtgggctcacaaagagggtgaaaatcattgctattttatttcaaacaaaataaa

SEQ ID NO: 861796 - DNA, 630 bp, Homo sapiens
ggaaattacttttttaaaaactataagcagccaaaaaaagcagacagtaaaatgcagataaaacagctcgggcacagaggaaggtggaggaaaagtctcttgggtaactgccaaacttcaccctcatacaatgggccccagtaaaacagtgggccttaataagcacattcctttccctccaggtgcactaaaatagggaagctaaaagcagacttggggggtatgcctacagctgcagaaaaatgtataaaagcaaacacaccactctccctcccatataagcacaacaaaaaaacacagaagcagtccaagcctctaagaaactctcccaccctaaatccttaaacactcttagtctgtagaaaagactctaacctaattcagccagcagcccctctcaggtgtgttttctctaaaataaacctgtcttaaccatcaagccacttttygtgtttctttcctctttctttaattcttacactgacctagtggtggaggcttggcaaggatgcctgttaccaagtgggttacttctgcactgtttatagagaaggagaaatggctaaaagtagaggtaccaggttgccaataatggttacttggggggtagcattcaaagttctccaaagc

SEQ ID NO: 861797 - DNA, 650 bp, Homo sapiens
cttgctatgcattgaattgtgtctccctaaaattcacctgttgaagtcctgaatcccagtatcttaggtcatgaccttatttggaagtagggttgttgcagctgtagttagttaaaatgaggttatactgaagtagggtggacccttaatctaatatgactgggatccttattaaaagggaaaatttatatagacacacacatattgagactgccatgcaaagataaaagtagagactggaatggtgtgtctacaagccaaggaatgcaaaggattttaagcaacccaccagaagatagaagagagatatcaaacagtttctccatcacaaccctcagaaggaacaaaacctgccaaccccttgattttgaactcctagcctctataactgtgagacaataatgtatgttgtttaagccactcagtttgtggtactttrttatggcagccctagcaaactcatacatgaagttttaaaaacttcacctactgtgtaccatttttcacgtagaaactagaagttgtactctaccaaaattaggtagtaaataataaaatagaaaagcataggatgcaggaaactagaatctaatgcatgaaagagtcagaaggaatccccaggaaaatggtaaagggagatctttgctttg

SEQ ID NO: 861798 - DNA, 670 bp, Homo sapiens
tcatacaatattttctttttatttttagttgacatctaacaacagtgcctatttatgggatacagagtgagattttgatacatgtgtaatatataatgtgtaaggatcaaatcaggataattagcatatccatcaccttgaatatttatcatttctttctgttgtgaacattgaaaataccctcttctagctttatgaaaacatacactaaattttggttaactatatttacctcacagtgctacagaacattacaacttattcttcccatttagcagtaactttgtatatgttaatcaacctctccctatcctttcctttctcgattatttctaggctctaagaacaattctcctctctaytatgagctcaatactttttagcttccacatatgagtgagaatatgtggtatttataattcttttttttaacttttattttaagttcagggatacaagtgcaggtttgttatacaggtaaacttgtgtcatgggggtttgttatacagattatttcattacctaggtattaagcctagtacccattagttattctttctgattatctccctcctctcaccctccaacttccaaaagcttccagtgtgtgttgttctcctttatgtgcccatgtgttctcaccatttagttcccacttataagtgagaac

SEQ ID NO: 861799 - DNA, 600 bp, Homo sapiens
atgttgtttattgatttttcaacctatacacatagcaaggaatattttattatgattttggatcattacacaactataaaattaaagacacagctgacagaaggtgataggaggaaattggtggagaaaagtgaaagaaaatataggaatactgttagcttctttttattaagctgagcaatctgaattttctgatatccaaccatttttcaactaaaattaggagtttcatattgttcaacaaaatgcataatgggcagatgagagatacttttaaatacagatgraacaagatgaactaaaataatataattaaaattttgaagagtgagtgtgacttaaattctcacttttcttgcaaaagagtaaataagtgacatcttaagctaataaaccaagaaattccaaaataagtaaattacttagagttaaggaagttactaccccaagaatagaaacagacatatttaaatgttgaggaataaaggagaaaacaggcattcaggatagtttattatgagcccttgtgaacaatggaattttattatttgtgtgtgtgtgtgtgtgtgtgttacacacacatattactttgataaaaat

SEQ ID NO: 861800 - DNA, 680 bp, Homo sapiens
gtgcagagtgggtgcctgggtcactgacatccatgtgtgcatttgcatagcagaggtgtcagcttgggcatggaggctgactagcatagggctggttgcctccttgttcatgtccatgacacagttaacaacagcacagggtggtagctaaaaaagtggctttaaataatattgcatccacatggaaaagaaaaaaacaaaggtttttgctggtgatgaatgatatgatttggatatttgcatcctcaaaatttcatgttgaaatgtaactcccagtgttggaggtggggcctggtgataagtgtttcaggcatggggctggatttcttatgaatgtcttggtgctgtgctcatgktagtgagtgaatgtgttcacttcagagctggtcatttaaaggattctgaatctttctcctttcccccatgcttactgtataaccatgtgacatgccagctcccaatttgacttttgattgtatgctccctgaagccttcaccagaagcagatgcaggcactattcttcttggacagcctgcagagctgtgagccaaataaacctcttttgtaaataaattgcccagcctcaggtatttctttgtagcaatacaaaacatagtaacacagaaaatcggtacttagaagtgttgtgctattacaaagaaagttaaaaatgtaaaag

SEQ ID NO: 861801 - DNA, 666 bp, Homo sapiens
ctgcttttcataaatgcatacagcatttgacccttcctgtttcagtgaagcggtaatagaaaacataacatattagtctacggccatacaaccctgaagatgcccaatcttgtctgatctcagaagctaagcagggtcaggcctggttagtatttggaggggagaaaatataaaatatcagacatattttgataatttaatttaaataattactatagtttatttgataagatttcaacatgatcttgtttagttattttcccctcccctctcagtcaacagttaactatggcagtgcttcatataatcgaggatggcctttattatttaaacttgctgacattttctaccttrgaaaaaacgtgaccttttctaatggcattctatattattggggctggagaattgcatttatgcaacacactgacctggcttcttcacatttacttctttggtaaaattctatgaactgaggagttggtttattttcatcagttgttatttttgcagggacccttatgaaaactacttgaatcacacagttggttcttaaaaattagcataatgcatacttttacttttattcaaagctagaaatcagacttatttaaaaaaaactaaaaacttgccgctttctttcctaaggtaaatttagtaggttcatac

SEQ ID NO: 861802 - DNA, 665 bp, Homo sapiens
cttttcaattcaaatttcctttttttaaatttttattccaacttttgttttaggttcagggagtacatgcacatgtttgctacatgggtaaattgtgtgccataggtgttgggtgtaaagattattttatcacccaggtaatgagcatagtacctgataggcagttttttgaccctcactctcttcccaccctgcaccttcaagaaktagctagtgtctattgttatcttctttgtgcccatgtgtactcaaagtttatctaccacttataaaagagaacatgtcgtatttggttttatcctccttcattaattcacttagggtaatatgaaccacattttctttacccaatctgccattaatggacatttaggttgattctatgtctttgctgttgtgaacacggctgctatgaatatatgcatatgtgtgtctttatggtagagtaatttttttttctttacgtatatatatgcaacaatgggattgctgaatcagttggaagttctgttttaagttttttgaaaaatctccaaactgccttccagagtagctgtactaatttacattcccaccaaaagggtataagcatttcctttactccatagcctcaccagcatctgttttttgactttttagtaacagccattctgactggtgagaga

SEQ ID NO: 861803 - DNA, 653 bp, Homo sapiens
acacatgtatacatgtgccatgctgttgtgctgcacccatcaactcgtcatttagcattaggtatatctcctcatgctattcctcccccctctccccaccccacaacagtccccagagtatgatgtttcccttcctgtgtccatgtgttctctttgttcaattcccacctatgagtgagaatatgtggtgtttggttttttgtccttgtgatagtttactgagaatgatgatttccaatttcatccatgtmcctacaaaggacatgaactcatcattttttatggcagcatagtattccatggtgtatatgtgccacattttcttaatccagtctatcattattggacatttgggttggttccaagtcttttctattgtgaatagtgctgcaataaacatacgtgtgcatgtgtcttcatagcagcatgatttatagtcctttgggtatatacccagtaatgggatggctgggtcaaatggaatttctagttctagatccctgaggaatcgccacactgacttccacaatggttgaacaagtttacagtcccaccaacagtgtaaaagtgttcctacttctccacattctctccagcacctgttgtttcctgactttttaatgattgccattctaactggtgtgagatggtat

SEQ ID NO: 861804 - DNA, 560 bp, Homo sapiens
tccaggagttcaagaccagcataggctacatgatgaaaccccttctttaaaagaaatacaaaaattagccaggcgtgtagtcccagctacttgggaggctgaggtgggaggatcacttgagcctgggaggcagaggttgcagtgagccaagatcatgccactgcattccaggctgggtgacagagtgagactctgcctcaaataaaaaaaataagaagaaaacatataagagagcaaataaaggaaaaattaagtattaaaagatcaagtttacaaaaggctgacattctcatctgtcatagattttctgattcacagattctatttcacatggtctaaggaaaccargagaaatgtcttctaaattcttagacttatatcttcactttcattttcttctttgtgcctcccctgtactttaaaaatatacatcatggtaggcaactacttttaaaggaaagagtgggtaaaaaattcagataattttcttttccatgagtaagcataaaattcccatattactttaggaataacaaaatggaaagaggcattgaaacttc

SEQ ID NO: 861805 - DNA, 587 bp, Homo sapiens
taaagagcactcatggtatactaaggaatttagaaaccccacatactcacccaggataggaaacatgctcagaaaagacctcaaaagactcttaagttttcaccactggcttatctatatgctcagggaagtaaggaagtgaargcttaggcaaaattataaatgtcctggctaaatataaaagaagggcctggaataaagtcaacctgcaaagactgggaaaggcgggttttttgtttgtttgtttgtttgattttctagacggagtctcacattgttacccagtctggagtgcaatggtatgatcttggctcactgcaacctccatctcctgggttcaagtgattctcctgcctcagcctccctcgtagctgggattacaggtgcccgccaccacacccagctaattttttgtatttttagtagagatggggtttcaccatgttggccaggctggtctcgaactcctgacctcatgattcacccacctcagcctcccaaaatgctgggattacaggcataagccaccatgcctggccttcccccccacccccatccaagctactgaagttcaaggaaaacccagc

SEQ ID NO: 861806 - DNA, 587 bp, Homo sapiens
taaagagcactcatggtatactaaggaatttagaaaccccacatactcacccaggataggaaacatgctcagaaaagacctcaaaagactcttaagttttcaccactggcttatctatatgctcagggaagtaaggaagtgaaggcttargcaaaattataaatgtcctggctaaatataaaagaagggcctggaataaagtcaacctgcaaagactgggaaaggcgggttttttgtttgtttgtttgtttgattttctagacggagtctcacattgttacccagtctggagtgcaatggtatgatcttggctcactgcaacctccatctcctgggttcaagtgattctcctgcctcagcctccctcgtagctgggattacaggtgcccgccaccacacccagctaattttttgtatttttagtagagatggggtttcaccatgttggccaggctggtctcgaactcctgacctcatgattcacccacctcagcctcccaaaatgctgggattacaggcataagccaccatgcctggccttcccccccacccccatccaagctactgaagttcaaggaaaacccagc

SEQ ID NO: 861807 - DNA, 587 bp, Homo sapiens
taaagagcactcatggtatactaaggaatttagaaaccccacatactcacccaggataggaaacatgctcagaaaagacctcaaaagactcttaagttttcaccactggcttatctatatgctcagggaagtaaggaagtgaaggcttaggcaaaattataaatgtcctggctaaatataaaagaagggcctggaataaagtcaacctgcaaagactgggaaaggcgggttttttgtttgtttgtttgtttgattttctagacrgagtctcacattgttacccagtctggagtgcaatggtatgatcttggctcactgcaacctccatctcctgggttcaagtgattctcctgcctcagcctccctcgtagctgggattacaggtgcccgccaccacacccagctaattttttgtatttttagtagagatggggtttcaccatgttggccaggctggtctcgaactcctgacctcatgattcacccacctcagcctcccaaaatgctgggattacaggcataagccaccatgcctggccttcccccccacccccatccaagctactgaagttcaaggaaaacccagc

SEQ ID NO: 861808 - DNA, 597 bp, Homo sapiens
aagacctcaaaagactcttaagttttcaccactggcttatctatatgctcagggaagtaaggaagtgaaggcttaggcaaaattataaatgtcctggctaaatataaaagaagggcctggaataaagtcaacctgcaaagactgggaaaggcgggttttttgtttgtttgtttgtttgattttctagacggagtctcacattgttacccagtctggagtgcaatggtatgatcttggctcactgcaacctccatctcctgggttcaagtgattctcctgcctcagcctccctmgtagctgggattacaggtgcccgccaccacacccagctaattttttgtatttttagtagagatggggtttcaccatgttggccaggctggtctcgaactcctgacctcatgattcacccacctcagcctcccaaaatgctgggattacaggcataagccaccatgcctggccttcccccccacccccatccaagctactgaagttcaaggaaaacccagccacaacacaggttgaacacaagctaagctttcaacaactgaaaacaacataccctagggaataagaaaaatctgaaatcaagag

SEQ ID NO: 861809 - DNA, 591 bp, Homo sapiens
cctggttgggtgctatttctctagaccacatagtatatatctcatatcatgtttcctcacaaatatcagaatatcctggcacttaaaagagatttttgtaaattcttatagctgatagaatgtatagtatatgacattcagtaattcacttattcatcatcgcaataagcatataacttacaatgctgcaggccytgaagtggatagtgttgaaatatttgaggcattcacagaggtatcactaccgaataattcttattaaataaatctctaggagcattattggatataaatgcgtaaatttttctaagagacctataattcttcatttgaaagggttttcagaagtcacactatccatttcctacctccaagcagagctgcatccaactttgatgactgcaatcatgtgtagtatcactgatctaagattatatatatagagagtatagtatcactgatatatagtattgtatcactgatctaagattatatatatatatatatatatatatagagagagagagagagagagagagagagaaagagagagagagagatttaatccacaccataattctaacagataga

SEQ ID NO: 861810 - DNA, 590 bp, Homo sapiens
ccacactgtctcccacaatggttaaactaattaacattcccaccaacactgtaaaagcgttcctatttcttcacagctgtgccagcatctgttatttcttgactttttaataattgccattctgactggcatgaaatggtatctcattgtggctctgatttccatttaatgatcagtgatgttgagctttttttcatatgtttgttggcagcataaatgtcttgttttaagaagtgtgtgttccatgcacacatatgtttattgtggcactattcacaatagcaaagacttggaaccaacccaaatgtccatcartgatagactggattgagaaaatgtggcacatatacaccatggaatactatgcagccataaaaaaggatgagttcatgtattttgcagggtcatggatgaatctggaaatcatcattctcagcaaactatcacaagaacagaaaatcaaacaccacatgttttcacttataggtgggaattgaacaatgagaacacatggacacaggaaggggaacatcacacactggggccttcagggggtagaggactcggagagggacagcattaggagaaat

SEQ ID NO: 861811 - DNA, 660 bp, Homo sapiens
ccacgagataccatctcacaccagttagaatggcaatcattaaaaagtcaggaaacaacaggtgctggagagaatgtggagaagtaggaacacttttacactgttggtgggactgtaaacttgttcaaccattgtggaagtcagtgtggcgattcctcagggatctagaactagaaattccatttgacccagccatcccattactgggtatatacccaaaggactataaatcatgctgctatgaagacacatgcacacgtatgtttattgcagcactattcacaatagaaaagacttggaaccaacccaaatgtccaataatgatagactggattaagaaaatgtggcacatatacaccatggaatactatgctgccataaaaaatgatgagttcatgtcctttgtaggkacatggatgaaattggaaatcatcattctcagtaaactatcacaaggacaaaaaaccaaacaccacatattctcactcataggtgggaattgaacaaagagaacacatggacacaggaagggaaacatcatactctggggactgttgtggggtggggagaggggggaggaatagcatgaggagatatacctaatgctaaatgacgagttgatgggtgcagcacaacagcatggcacatgtatacatgtgt

SEQ ID NO: 861812 - DNA, 660 bp, Homo sapiens
caccagtcagaatggctgttactaaaaagtcaaaaaacagatgctggtgaggctatggagtaaaggaaatgcttatacccttttggtgggaatgtaaattagtacagctactctggaaggcagtttggagatttttcaaaaaacttaaaacagaacttccaactgattcagcaatcccattgttgcatatatatacgtaaagaaaaaaaaattactctaccataaagacacacatatgcatatattcatagcagccgtgttcacaacagcaaagacatagaatcaacctaaatgtccattaatggcagattgggtaaagaaaatgtggttcatattaccctaagtgaattaatgaaggaggataaaaccaaatacgacatgttctcttttataagtggtagataaactttgagtacacatgggcacaaagaagataacaatagacactagctamttcttgaaggtgcagggtgggaagagagtgagggtcaaaaaactgcctatcaggtactatgctcattacctgggtgataaaataatctttacacccaacacctatggcacacaatttacccatgtagcaaacatgtgcatgtactccctgaacctaaaacaaaagttggaataaaaatttaaaaaaaggaaatttgaattgaaaag

SEQ ID NO: 861813 - DNA, 701 bp, Homo sapiens
gataatggcacacacatgcttgtagcagcacaatttgccattgcaaaactacagaaccagcctaattcaggaatggaaaaccaaatatcttatgttctcactcacatgtgggagctaagctataaggatgcaaaggcataagaataatacatttaatgttggggacactggggaaagggtaggtagagtgtacactgcttaggtaatgggtacaccaaaatctcagaattcaccactaaagaacatattcatgtaaccaaacaccamctgctccccaaaaacctattgaaatgaaaaataaaaaataagaataataatgaacaatagaaaataacaactacaaaaacatctcaaggcatagacagtacaataagatatacaaattgtaacaagaagtttaaaagtgagagtataatgttaagacatcgagttttaattggatttactcttgcttgtttatgcaaacactgttgttatcaggttaaaataacaaattataagatattatctgcaagtctcatggtaacctcaaaattaaaaaaaaaatacaatggagatgcaaaaaaattaaaaatcctaattatatcaccagagaaaattacatttactaaaggaagacaagaatgaggggaagaaggaagagatgagagtgaaacaacaataaaacaacaaaatgacaaaaacaagtctttatttatcaa

SEQ ID NO: 861814 - DNA, 641 bp, Homo sapiens
acaggcattatcaggattatatttttgctctaatgatagtaaagaggaaagaatatttattttatatatacatacatacttatgtgtgtgtgtgtgtgtgtgtgtgtgtgtgtgtgtgtgtatcttttttctttctttttctttgtgagacacagccttgctctgtcgcccaggctagagtgcagtggcacgatctcggcttactgcaacctccacctcctgagttcaattgattctcctaccttagcctcccgagtagctgggactacagacgtctgccacaaagcttggctaattttgttgttgttattgtatttttagtagagacagggtttcaccattttggccaggggctcaaactcctgacctccagtgatcctccygcctcggcctcctgaaatgtcatggttacaggcatgagccatcacacttggccatatttattatgttataagaacattttatcttaaattaatcatgctgccattaagaaaatggaattatttaaagttttattgtctcagaaaagttaaaattttatatctatttttagtagatttttaccaagcactctcattaacttatgatatcttattttgttactaggtttgcaattatggcagttaatactttttgccaac

SEQ ID NO: 861815 - DNA, 641 bp, Homo sapiens
acaggcattatcaggattatatttttgctctaatgatagtaaagaggaaagaatatttattttatatatacatacatacttatgtgtgtgtgtgtgtgtgtgtgtgtgtgtgtgtgtgtgtatcttttttctttctttttctttgtgagacacagccttgctctgtcgcccaggctagagtgcagtggcacgatctcggcttactgcaacctccacctcctgagttcaattgattctcctaccttagcctcccgagtagctgggactacagacgtctgccacaaagcttggctaattttgttgttgttattgtatttttagtagagacagggtttcaccattttggccaggggctcaaactcctgacctccagtgatcctcctgcctcggcctcctgaaatgtcatggttacaggcatgagccatcacacttggccatatttattatgttataagaacattttatcttaaattratcatgctgccattaagaaaatggaattatttaaagttttattgtctcagaaaagttaaaattttatatctatttttagtagatttttaccaagcactctcattaacttatgatatcttattttgttactaggtttgcaattatggcagttaatactttttgccaac

SEQ ID NO: 861816 - DNA, 526 bp, Homo sapiens
tttccctacatcctctgaaatcttggtggaggttcccaaacctcagttcttgacttctgttcaccctcatgcccaacaccacgtataagccaccaaggcttggggcttccaccctctgaagcaacagcctgagctctacatcggacactttcagccatggctgggatgtaggtcatcaagtccccaaactgcacaaagcagcaaggccctggtcccagctcatgaaacaattatttttttctcytaggcctcccagcttgtgatggatgggagaggctgccatgaaatctgctgacatgtcctggagtcattttcccattgtcttctcgattgatatttggctccttgtttcctatgcaaacttttgcagtcagcttgaatttctcctcagaaaatggctttctcttttcaatcacattgtcagactgcaatttttccaaactttcatgctctgccttccttttaaacataaattccataagttcaaaaccatattgtagtgaatacataacactgaatgcttttg

SEQ ID NO: 861817 - DNA, 526 bp, Homo sapiens
tttccctacatcctctgaaatcttggtggaggttcccaaacctcagttcttgacttctgttcaccctcatgcccaacaccacgtataagccaccaaggcttggggcttccaccctctgaagcaacagcctgagctctacatcggacactttcagccatggctgggatgtaggtcatcaagtccccaaactgcacaaagcagcaaggccctggtcccagctcatgaaacaattatttttttctcctaggcctcccagcttgtgatggatgggagaggctgccatgaaatctgctgacatgtcctggagtcattttcccattgtcttctcgattgatatttggctccttgtttcytatgcaaacttttgcagtcagcttgaatttctcctcagaaaatggctttctcttttcaatcacattgtcagactgcaatttttccaaactttcatgctctgccttccttttaaacataaattccataagttcaaaaccatattgtagtgaatacataacactgaatgcttttg

SEQ ID NO: 861818 - DNA, 573 bp, Homo sapiens
actgttttccatagtagttgtactagttaactttctcaccatcagtgtaaatttgttctcttttcaccacatccatgcaccaacatgtaattttttttttatttttaaattatggctattcttgcaggagtaaggcagtatctcattttcttttcttttctttttcttttttttcttctcttttttttttttttttttttgagacagagtctcgctctgtcacccaggctggagtgcagtggtgcaatctcgagctcactgtaaactccacctccggggttcacgcatttctcttgcctcagcctcccgagtagctgggactacaggcgcccgccacctcgcccggctaattttctgtatttttagtagagacrgggtttcaccgtgttagccaggatggtctcaatctcctgacctcgtgatccacccacctcggcctcccaaagtgccgggattacaggcgtgagccaccgcgcctggccctcattttcattttaatttcctggcactatttattgaatggattgtattttcaccagtgtatgtttttggcacctttgctgaaaatgagct

SEQ ID NO: 861819 - DNA, 653 bp, Homo sapiens
gctcaggtgattctcccacttcagcctcccgagtagctggaactacagacacgtgccaccagacttggctatttttgtgtgtgtgtctttttagtagagatgaggtttcagcatgttggccaggctggtctcaaactcctggactcaagcaatccacccacatgggcctcccagagtgctgggagtgagccaccgcacckcacctggccttattttatattgagaatgctctctagtcttctggttatgttatactgcctgacctaattttcaagactgtagtattacctataatctttatgagatttattgttttacctgtcttcagcttctattttagagatggaatggatccttaaagatcatgtagtatcctagtctgcctctattatttgacaaatgatggaaccaaggcccagagaaagaactgacctttaatgagcagctattttatgtcaggtaatgtgctaggtaccatacctatgttagttctttatctcagagaggttataacattagtaagtggcagagagacagtctatagttaagtctgattgactcttaagttctccttccactatactacatcagaattctggcagatccatggctccccaatctcctggtttgaagtccataggcccttccctttt

SEQ ID NO: 861820 - DNA, 653 bp, Homo sapiens
gctcaggtgattctcccacttcagcctcccgagtagctggaactacagacacgtgccaccagacttggctatttttgtgtgtgtgtctttttagtagagatgaggtttcagcatgttggccaggctggtctcaaactcctggactcaagcaatccacccacatgggcctcccagagtgctgggagtgagccaccgcaccgyacctggccttattttatattgagaatgctctctagtcttctggttatgttatactgcctgacctaattttcaagactgtagtattacctataatctttatgagatttattgttttacctgtcttcagcttctattttagagatggaatggatccttaaagatcatgtagtatcctagtctgcctctattatttgacaaatgatggaaccaaggcccagagaaagaactgacctttaatgagcagctattttatgtcaggtaatgtgctaggtaccatacctatgttagttctttatctcagagaggttataacattagtaagtggcagagagacagtctatagttaagtctgattgactcttaagttctccttccactatactacatcagaattctggcagatccatggctccccaatctcctggtttgaagtccataggcccttccctttt

SEQ ID NO: 861821 - DNA, 620 bp, Homo sapiens
ggattgggctgttgtagtttccaattgaccttaatcacagggcatggtaataccaagagatgccctaaggggtctcctttattccatgcatactattccctacctccattgtggagtagtagactggtttcatctcggtagtcggggtcagttaccccagcaracactgtaactcccttcttagcctgttgacttagaggtaggaggagcccagagtggccaggtagcaatcttaacttccagtttaatggaattgttgttgtgtctcgtggtggcagcattcctccctctggaattaagacctctaggccagcagaacgtaatgtcatgggaacaggaagcaaaaattcttctagtaggttactaggggtgatggtgagtggtgccacttccacttccaccacttgattcctggacctgtgaatcctggctatgagaggaagcagtaccatatattggacagtgattcagaggatacacagccttctggagaactttgccccatccctgtaaggccattcacaattctatcaatccagctgcttcaggatgatggggaacactgtggaactaaacaagcctttcaacctgctgtacaattaggtttgctccctcataaa

SEQ ID NO: 861822 - DNA, 648 bp, Homo sapiens
ttcaatttccatgtagttgtgtggttttgagtgaatttcataatcttgagttctaatttgattgtgctgagagactgtttattattatttcagttcttttcatttgctgaggagtgtattacttcctattatgtgatcaattttagagtaagtgccatgtggcaacgagaagaatgtatattctgttgaatttgggtggagatttctgtagatttctattaggtccacttgatccagagctgagctcaggtcctgaatatctttgttaattttctgtcttgatgacatgtctaatattgtcagtacatgttaatgtccctcactattattgtgtgggaggctaagtttctttttacatctctaagcacttgctttatgaayctgggtgttcctatattgggttcatatatatttaggatagttagcttttgaattgaaacttttaccattatgtaatgcccttctttgtcttttttaaatccatattggtttaaagtctattttattagagactaggattgcaacccctgcttttttctattttccatttgcttggtaaattttcctccatacctttatttgagcctatgtgtgtctttgcacatgagctgggcctcttgaaggcagcataccaatgggtttggctct

SEQ ID NO: 861823 - DNA, 514 bp, Homo sapiens
gggtcagagcttgtaaaaatgcaataaaatttcctgtcagtttgaatatagctttatgttgatgggttatttgcttggttgccgtagacttttgaatgttttccaaagcttaatttagtcatttttggtggttattggtgtgtgtgtgtgtgtgtgtgtgtgtgtgtgtgcgtgcacgtgtgtatgtgtctgtgtgtcacctggggaaaggttttggagtttattagatatttttctgtcctctattattaacrtcttacattggcatggtgcatctgttacaatttatgaacaatattaatatattatgatcaactaaagtctatagtttactcagagttccttcatttttacctaatgtccttttcttattccagaatctcatccaatgtactatattacatttagttgttatgtctacttaggacgttttggctatgaccgtttttcttgattttgatgtccttgaaagttctgaggagtactcattaattatgccccgccactagaattt

SEQ ID NO: 861824 - DNA, 583 bp, Homo sapiens
acactgacaaaagcaatctacaaattcaatgcaatttccatcaaaataccaccataatttgtcacagaactagaaaaaacaatgctaaggtttacatgaaactaaaaaagagctcacgtagccaaagcaagattaagcaaaaagaacaaatctggtggcattacattacccaacttcaagctatactataaagccatagtcaccagaacagcatggtactggtataaaaataggcatatagaccaatggaacagaatagagaaygcagaaataaagccatatacttacagtcaactgatcttcaacaaagcaaacaaaaacataaagtgaggaaaggacaccctattcatcaaatggtgctggggtaattcgcaagctacatacagatgaataaaactggaaccttgtctctcatcttatacaaaaatcaactcaagatgggtcacaaacttaagtctaagacacaaaaccataaaaaatctagaatataacattggaaaaatacttctagacattggcttatgcaaaggctttatgacctggaacacaaaagcaaatgcaacaaaaacaaagataaataggt

SEQ ID NO: 861825 - DNA, 543 bp, Homo sapiens
attggaaaaatacttctagacattggcttatgcaaaggctttatgacctggaacacaaaagcaaatgcaacaaaaacaaagataaataggtaagcccttaattaaactaaaagccttctgtccagtgaaagaaataatcagcagattaaacagacaacccacagagtggaagacaatctttgcagtctatatgtcaaacaaaggactaatacccagcatctacaaggaactcaaacaaatcagcaagcaagaaagaaaaaaatcccatcaaaaagtgggctaaggacatgaatatacaattctcaaagaagatacacaaatggcaaaaaaaccacaatgcaatacaaccacactcctgyaagaatgaccataataaaaaaataatagatgttggtgtagatgcagtgaaaagaaaacacttttacactgttggtgggaatgtaaactagtacaaccactatgaaaaacagtgtggagattctttaaagaactaaaagtagatgtatcatttgatccagcaatcccactcctgggtatctatcc

SEQ ID NO: 861826 - DNA, 682 bp, Homo sapiens
tggtaacaacacagctttagaaaatctgactgtaagaaaaaaactcattcaacctttacaagaataagcagtcttagtcttacctagtaggcagaatgtgtgttagtgtttgttaaaagggatgggttaaggggatcacaggaacagctgtcttcctgtttctactcctgtgattcagtgtcttagtgagacatggttattgatgggagtgctatatcttccaggaatgtgctggcagtaggatttcagatcacttggcatataatctatgtaatcacttctggccatgtcaagtgtttaaaatatgttatccttctgcccaaggattcagtgaattaaaatttaacatgaatgcctgcaagagctcttcctgtgttggtaacyggagtgtctttttggtatttcttttatcaaattgctctccattcattatatatgcctctaaaatatggaaatttaaaaaggactttattcctagaaaagggaggattcctttgcactagggtactcagtggtttcactttaatagttggtggatcttatttttggttttatgtgagataaagtatctctgtgttttccaatgagttcttcttaatcatgatccaggatgtaaaacagtctccttcacctacacattataatgtcatccatgatagaaattatctgaatgtttaaactt

SEQ ID NO: 861827 - DNA, 610 bp, Homo sapiens
ttctgttgtttaaaagctacccagtttatagtatttttatagtatctcaaatgtaccaaaacactattttttatttccttttatttttgaccttcttgattttcaacttataatatacttaacagtgtattttgctatagtkagcatgttgtatttgctataaccaattgatgatattgtatatcttaattacatcatcagtagtgtacaaaactgtacctgttaataatattattagtggtactaattctatcttggattttctggcaggacattcaatatttagtggggtttaagagtcatcttttctggagcagagtatatggtgatataaactgagatattaaaaagaagagacatgtttaaaccaatttagataacctgcttaattatatacatagaatattaaaaacaagtgaacatctacagcaaaaaataatattttgatgaagactggaaagttgctaacacaacctgtaaaatatcattaactggtttaaagcaagtgagaagaagatcaattagaaactggaaagtgatcacttagtagttaccatcctgacaaagagcagcaagaaaataaaataataaattcttttttctgaagtcc

SEQ ID NO: 861828 - DNA, 610 bp, Homo sapiens
ttctgttgtttaaaagctacccagtttatagtatttttatagtatctcaaatgtaccaaaacactattttttatttccttttatttttgaccttcttgattttcaacttataatatacttaacagtgtattttgctatagtgagcatgttrtatttgctataaccaattgatgatattgtatatcttaattacatcatcagtagtgtacaaaactgtacctgttaataatattattagtggtactaattctatcttggattttctggcaggacattcaatatttagtggggtttaagagtcatcttttctggagcagagtatatggtgatataaactgagatattaaaaagaagagacatgtttaaaccaatttagataacctgcttaattatatacatagaatattaaaaacaagtgaacatctacagcaaaaaataatattttgatgaagactggaaagttgctaacacaacctgtaaaatatcattaactggtttaaagcaagtgagaagaagatcaattagaaactggaaagtgatcacttagtagttaccatcctgacaaagagcagcaagaaaataaaataataaattcttttttctgaagtcc

SEQ ID NO: 861829 - DNA, 610 bp, Homo sapiens
ttctgttgtttaaaagctacccagtttatagtatttttatagtatctcaaatgtaccaaaacactattttttatttccttttatttttgaccttcttgattttcaacttataatatacttaacagtgtattttgctatagtgagcatgttgtatttgctataaccaattgatgatattgtatatcttaattacatcatcagtagtgtacaaaactgtacctgttaataatattattagtggtacyaattctatcttggattttctggcaggacattcaatatttagtggggtttaagagtcatcttttctggagcagagtatatggtgatataaactgagatattaaaaagaagagacatgtttaaaccaatttagataacctgcttaattatatacatagaatattaaaaacaagtgaacatctacagcaaaaaataatattttgatgaagactggaaagttgctaacacaacctgtaaaatatcattaactggtttaaagcaagtgagaagaagatcaattagaaactggaaagtgatcacttagtagttaccatcctgacaaagagcagcaagaaaataaaataataaattcttttttctgaagtcc

SEQ ID NO: 861830 - DNA, 610 bp, Homo sapiens
ttctgttgtttaaaagctacccagtttatagtatttttatagtatctcaaatgtaccaaaacactattttttatttccttttatttttgaccttcttgattttcaacttataatatacttaacagtgtattttgctatagtgagcatgttgtatttgctataaccaattgatgatattgtatatcttaattacatcatcagtagtgtacaaaactgtacctgttaataatattattagtggtactaattctatcttggattttctggcaggacattcaatatttagtggggtttaagagtcatcttttctggagcagartatatggtgatataaactgagatattaaaaagaagagacatgtttaaaccaatttagataacctgcttaattatatacatagaatattaaaaacaagtgaacatctacagcaaaaaataatattttgatgaagactggaaagttgctaacacaacctgtaaaatatcattaactggtttaaagcaagtgagaagaagatcaattagaaactggaaagtgatcacttagtagttaccatcctgacaaagagcagcaagaaaataaaataataaattcttttttctgaagtcc

SEQ ID NO: 861831 - DNA, 618 bp, Homo sapiens
gaaagcaatcacttgaaggtactagcaggtgagctaaacaagcagactctgatgatttgtttacgtttggtgaagaagggaaaggatgattcatgtgagtaagtttctgccatcaaggattttagcacaggcttaaatagaataagaacagcagtctttccagattgaggaacytgaatagtgaaggcacaaaactctagtcagtcaagagagttgaaataatggccaaaaagctcccaaatgtgatggacagaaatttacaaatagaagaatctcaataaatgtcagagaaaataaacacaagtgtgcacacattgaggcttagtataatgttgaaagtcaaagaaaaatgaaaatattaaaattggcaaaaaataaacccatgttacacagaacgggacaataattagattaacttctcattagaagccatagataccaaaataaggtgaatatatatatatatgtattgtgtttatgtttagtgatgaagagggatgatgagtcctgtgagtcagtcagtcctgtgtgaaatatatatatatatatatatatatatatatatatataaggtgaatatatacacacactatgtatacatattaggtgaatagtgta

SEQ ID NO: 861832 - DNA, 613 bp, Homo sapiens
acttcatcggtaagtccaaacaaggttttctgatgagaacattgtatctattaagaagaaacacctttcttccttgtttatccacctggagcagggtgaggtacctggagaaattgctgaagcatcaaaatgcagttattacattttctgcaaaacaataaaagatttcaaattctccaaggaacaatctaggaaggagaaraaagagccaacaagattggtcatctgtttaagaagagagagagagagtgaattccaggaagcagccatgatggcacaaacagttcacatgggatataaatgtgtgtgtgggtgtgtgtgggtgtggtgtgtgtgtgcgtttgtgtgtgattttctgcactgtgaaatatgacccttttctaccaccttaaggactttaagaaagactacacaaacatttcaatacctgctgtgaacagatgtcatctgaaaatatgtgatggggccagattttgcatctgagaaagggtggatgcatatacacatgtagttggaagatcctgagctattttctgaattacatgggtgatactatattaattgcttagtaagtcagcaagacaacattgatttaaatctggaagccagaaaa

SEQ ID NO: 861833 - DNA, 613 bp, Homo sapiens
acttcatcggtaagtccaaacaaggttttctgatgagaacattgtatctattaagaagaaacacctttcttccttgtttatccacctggagcagggtgaggtacctggagaaattgctgaagcatcaaaatgcagttattacattttctgcaaaacaataaaagatttcaaattctccaaggaacaatctaggaaggagaagaaagarccaacaagattggtcatctgtttaagaagagagagagagagtgaattccaggaagcagccatgatggcacaaacagttcacatgggatataaatgtgtgtgtgggtgtgtgtgggtgtggtgtgtgtgtgcgtttgtgtgtgattttctgcactgtgaaatatgacccttttctaccaccttaaggactttaagaaagactacacaaacatttcaatacctgctgtgaacagatgtcatctgaaaatatgtgatggggccagattttgcatctgagaaagggtggatgcatatacacatgtagttggaagatcctgagctattttctgaattacatgggtgatactatattaattgcttagtaagtcagcaagacaacattgatttaaatctggaagccagaaaa

SEQ ID NO: 861834 - DNA, 570 bp, Homo sapiens
agcacacatttagtatctcccaggtcctgtgcaccaggaattctacaatgatttgctcactggatgaaatcaakatatcgtcagaatcctctttcaagatcacatgattgttggcagaattcagttccttgcaattggaggtttgaagcccttaacagctaaaggctgcctgcagttccatgccacttgaaccttttaataagcagttcatacatgtcatagcagcatgcttcttcaaggcttgtcatgagtttttcagtccagtctgctaagacagagtcttgcagaatgtgttgtagtcagagaagtgacatcatatcacctttgccatattctcttggttagaagcaagtcacagtttctgcccacactcaagtaaggggattacacaaaggcatgtacaccaggaggtagggatcattggggctcacctagggttggtatgccataccctgactgctttagtaaattgatcacactttattttgttcctcaattttgttctaaatgcatttctatcatgttacatatagtaactaagtcattatgtttgtgtttttcttctccagc

SEQ ID NO: 861835 - DNA, 651 bp, Homo sapiens
gaagcagttacagaaaaaacaaaaacaaaaacaaaactctacctcccatgaagatttatggggatcacatctcttagagggggagatgaggcaggaaaatagggtctcaaggcagggaacatgaagccgattcacacttcagctatgacaggaaatatcctctccacagggmgtaggccaagtaaatgacttcgtaactttacttcatcctctccatttacataaagcttaccccaagtaaccaatggaatcctgtagggggtatttaaactctcaaaaattctgtaacagagcctttgtgccctgtactttcattttcaataaatcccttcattccttaataaataaataaataaataaataaataaataaataaaatccatggatttaggtaattaaaccaaatttcatgctatgggccttgaattaaatttttaaaataaaaggcagtgtgtgctagcatttaggatcaaatgaggtggcactcaataaaagttgcataaagattttttataaattcaatgagaaccatatcagttaaaagaacagagagccttgattcatcaaataaatgctgcatgagtgttttccaaaatgaaattcaagtagctgttttaattttaatatttaagtgtttttttcactttaaga

SEQ ID NO: 861836 - DNA, 651 bp, Homo sapiens
gaagcagttacagaaaaaacaaaaacaaaaacaaaactctacctcccatgaagatttatggggatcacatctcttagagggggagatgaggcaggaaaatagggtctcaaggcagggaacatgaagccgattcacacttcagctatgacaggaaatatcctctccacagggcgtaggccaagtaaatgacttcgtaactttacttcatcctctccatttacataaagcttaccccaagtaaccaatggaatcctgtagggggtatttaaactctcaaaaattctgtaacagagcctttgtgccctgtactttcattttcaataaatcccttcattccttaataaataaataaataaataaataaataaataaataaaatccatggatttagrtaattaaaccaaatttcatgctatgggccttgaattaaatttttaaaataaaaggcagtgtgtgctagcatttaggatcaaatgaggtggcactcaataaaagttgcataaagattttttataaattcaatgagaaccatatcagttaaaagaacagagagccttgattcatcaaataaatgctgcatgagtgttttccaaaatgaaattcaagtagctgttttaattttaatatttaagtgtttttttcactttaaga

SEQ ID NO: 861837 - DNA, 734 bp, Homo sapiens
tttctttcacaacttttctatcttgtgatgtttcctcttatctcttacataaaataaataatatatttttatgtaaaatatatttattttataaagtaattcacaaggaaataaatgtactatagtagtccaagatgatgtacataaggaattagggttttctttcattttttactaaaaaaaaawagtgcagtgtaatcacagaaggaaaaacatccttatcttccaaaagtaggaaagacataatgtgtttttgtaacctggtaactctgtatctattactttcagaattaaagggtttcctgaattggtttataaattaagttgatgttatcctttaatgcttcagtgtttcctagcttatcttatgttgctcacaaatgttcttttatctttcctttggaagatcttgcataggaataaaaagtatgcacatgcagtacaatgtacatgagcaaacacacttatattttccttctacctgcagttcatttttcttggaataatctagaaaccaagaattattacttttaaaggtgttgatttcaaagaaataaaggtcttcatggaataaaagaagaaaaaaagcaatatggagtttataatgtcattggaatctaaaaatatataacatatatgaataattgtaaaatagtgtccaatttacctgatgctcatggcaggaagttattgtaggctcgattggcaaatgatgtagagaatgattctgttta

SEQ ID NO: 861838 - DNA, 631 bp, Homo sapiens
ctaattgtgagtgttcacacatcttgcagcagaaatattaatgagttgaattactggttactgaaacagatctttctggcagtgttgccttcaattatgtagtatatgcattgcatcttctgtttataaatgaaaaattctgaatttaaagcacatttgccctcagacattttagagatacattgtcaacctttattgctaaaccttataaccaatagactggaggaattattttccccaaattgggggtatgttaaaaacacaaatgatcatccatttacataagctatgtcytgataaatccattgtaaattgaaaatgcatttaatacacctaacctaccaaacatcatagcttggcctagcctaccttacttaaacatgatgagaacacttacactagcccacagtttggcaaaatcatctggcaatacaataagcacaatatgctgtagagtatgggttttttacccttgggattgcatagctgactggaggctgcagctcgctgtacctgcccagcattgtgagagtacagaacagcatattgctagcatgagaaaatatcaaaatccaaaattaagtacagttcctgctgaatgtgtatcacttttgcaacatcataaagtgga

SEQ ID NO: 861839 - DNA, 692 bp, Homo sapiens
agccatagttataactttgatcttcattttagggagttagtatttcttttccagacatttccttccctagtgaaactgactcacatagtgtatactattatttcttacaaaaaaagtaagaaaatgagatggatcaaggaatcattattataaaagcaactcaaagtatattctttactcacagagagccacgaattataatggagcagagcccatcttcagtacaaggtttagatattaccgggcagtctgctcatcagttccagrggacactcctttcttttcacccatcaccaacttgtcttccaagtacttcctctggaaaatgcccatcatgcacttcccttctcaaaactctcattctctctgcagtgttcgcatagtatatgtttgaaaatcattggcatcaaacattaattttgacatctgatattcactgtaactgcttttaacactattatcggaaactaaggagctaatggccttaacatacctccattccccaaaaatgcctcctgagtggagaaacaaaaaaattcaaaggtttatacactgtttcgagtatcattattcagccattatcacacttttattttatacttctgcattcatttgtcaggatgaagaaaaggaagttgctgctaaacaaaaagattttaggaaagaagccatcaccttttactggagaattt

SEQ ID NO: 861840 - DNA, 619 bp, Homo sapiens
ggtgaaataaatatctgccattatcattcattttccagcccctggagatttaacactgcatagcaagcgttctatcagccaaagcatattgttattgttttcttcctttccatttagtctttttgtatgccagctgtggaaagggcctattgatccaacagatatgattctgcctcctgtaagaaccatatcataagcatcacttccctcatggttggtctttcaggttgccacataaaattatttggatttggtatgaaacctaaggtccttacaagcmgagacacgaagcagctggtaggcaagtcatttatttcttacctcttgaaaaacagtctaagttacttgtagaactccagaggaaaacagaccatatggctttgtgatgccctcaatttcagtgtatcccatcttgataatggtgacactgggcaggccccacatataaacttagagaatactggttgatttactgagttggagatggatatcaactccaagtacctgtggagcaaactcctcttgagtgctgctgttttctctagtgggagactgacctgtggtgcaaagggctattacatgagagtagctttaaatctctgaaggccttgggggaaag

SEQ ID NO: 861841 - DNA, 628 bp, Homo sapiens
ttctcttggggtctgaactgggacccctttccggtaacattatcatcctgttgtgagccgggggctttggccctcaataaggcagcagagtttcctagagggcagaccgtcataagctattgtgctccatgacttgctttgcaygtttcagctcatcatcttcattaaataagtaaatcaccacacaagcctgtttaagaatgggaaaggggcacatttacttagatgagagttgggaagagagaggagagcactgggctttttgtgacatgattgtagctgcccataggctggagccagggtgaagtggaacagaaagggatcagaagggaggcacaaggaaagatgaaatctcgagctctaaatcgaatccttcttctgacagctgcctccattcttggtgcttctcctgattctccttctccaggccgcataacctagtggtcattatgatggcattgaatttgggaacctcttacacttggattgttcaggtttcaaacttttaatttttcccttcaaatccttggttaccttgttgtggctttttgttaattaatattgtctgagacttgcatttaatttcaagatggaaaaacaggaactagatttaccttcctttataaag

SEQ ID NO: 861842 - DNA, 604 bp, Homo sapiens
tcagaaaaaacttgagagttgcctataagaaattcatgtcaaatataaatacacaggtgggtcaaaagcaaaaagatggaaaaagttatataatgttaatactaaaaacagaagaaaacaaaacaaacctgcaatggctatattgatattggacaaagtggatttcagaacaaagaatatttatagggacaaagaaagtcatttcataacaataaaagggtaagtttgtccagaggacatagaaatcttaaacatttatggacctaatgacagagcttcaaaatacctgaagcaaaaactggtataagtaataactccatggagagatagacaagtctacaaccataarataaattttaatatctctttctcaaaaattgatagaaaaaaaggtaaaaaaaaaaaaagagagagagtaaagaatatagaatatttaacagcagtatcaactaaattgacctaattgacacttatagaacaatccacataacaatagaatacaccttcccctcaagtgcctgtggaacatttaccaagatagacaacattctgagttagaaaacaaaccttaatatgtttgaaaggattcaagtcatacaactta

SEQ ID NO: 861843 - DNA, 604 bp, Homo sapiens
tcagaaaaaacttgagagttgcctataagaaattcatgtcaaatataaatacacaggtgggtcaaaagcaaaaagatggaaaaagttatataatgttaatactaaaaacagaagaaaacaaaacaaacctgcaatggctatattgatattggacaaagtggatttcagaacaaagaatatttatagggacaaagaaagtcatttcataacaataaaagggtaagtttgtccagaggacatagaaatcttaaacatttatggacctaatgacagagcttcaaaatacctgaagcaaaaactggtataagtaataactccatggagagatagacaagtctacaaccataaaataaattttaatatctctttctcaaaaattgatagaaaaaaaggtaaaaaaaaaaaaagagagagagtaaagaatatagaatatttaacagcagtatcaactaaattgacctaattgacacttatagaacaatccacataacaatagaatacaccttcccctcaagtgcctgtggaacatttaccaagatagacaacattctgagttagaaaacaarccttaatatgtttgaaaggattcaagtcatacaactta

SEQ ID NO: 861844 - DNA, 638 bp, Homo sapiens
ttcaaaatacctgaagcaaaaactggtataagtaataactccatggagagatagacaagtctacaaccataaaataaattttaatatctctttctcaaaaattgatagaaaaaaaggtaaaaaaaaaaaaagagagagagtaaagaatatagaatatttaacagcagtatcaactaaattgacctaattgacacttatagaacaatccacataacaatagaatacaccttcccctcaagtgcctgtggaacatttaccaagatagacaacattctgagttagaaaacaaaccttaatatgtttgaaaggattcaagtcatacaacttatattttctgaccataatggaattaactcagaaatgattaaagataaatctccaaatgtttttaaatgatgcaacgcacttcttatttatttatttattttactttaagttctagggtacatgtgcacaacrtacaggtttgatgcataggtatacacgtgccatgttggtttgctgcacccatcaactcgtcatttacattaggtatttctcctagtgctatccctcccccagccccccagcccctaacaggcctcagtttgtgatgttctctgccctgtctccaagtgatctcattgttcaattcccac

SEQ ID NO: 861845 - DNA, 591 bp, Homo sapiens
atgacttgaaatatgggtggggttggggagggaaaaggagagattatgaagaaacatgaggaaacattggggctgatagacatgtttgctgtcttgattctggtgatcatttcgtggatatatacataggtcaaaaactcatctaatgctatattttaatatagaatttttatatttatcacatgttaattacatctaaataaaggtattacaaatacaacaatacatccttccattttttatttttatttattttatttttttgaaatggcatctcactccgttgcccaggctggagggcagtggcgtgatctcagctcactgcaatctccacctcccaggttcaagtgatcctcctgcctcagccttctgartagttgggattacaggtgcccaccaccacgcccagctaatttttgtatttttagtagagatggggcttcaccatgttggccaggctggcatcaagctcctgacatcaggcgattcacccgcctcagcctcccaaagtgctgggattacaggtgtggccaccatgccgagcccatccttcaattttttaaaaaatagctgttgctgaagattaagtta

SEQ ID NO: 861846 - DNA, 612 bp, Homo sapiens
aatcagtattctctcacagcagctcccaatcaatcagtgatggttggtcggtatataaataccccagctccctctcctttggatggaatagctctgaggcatgtgtattacgctgacacttagagtttccaagtggaataaagctccagctgtgtattaggcttctctagaaggacaggaytaataggacagatgtatatataaagaggagtttattaaggagtattaactcacaggatcacaagatgaggtcccacaataggctctctgcaagctgaagagcaaggaagccagtctcagtcccagtgctgaagagcttggagtcccatgttcaagggcaggaagcatctagcatgggagaaagatgtaggccagaagactaaaccagtctagtctttccatgttctgcctgcttttattctggctgcgctggcattggattagattgtgcccacccagattgagggtgggtctgcctttcccagtccactgactcaaatgttaatctcctttggcaacaccatcacagactcacccaggaacaatactttgccttcttcaatccagtcaagttgacactcagtattaaccatcacaagctgtccacagtag

SEQ ID NO: 861847 - DNA, 626 bp, Homo sapiens
cttgatcacgtcactatgagacatggaacataatgatatcaataagaattaaaaaaaataataagataaaaactccactgattctaccattttgcaaaatagcaaaacaaaacaaaacaaaacaaaaacccaccccaagctgatgaagatgtgatgaatctgacagacccacacttgttgctacaggttttaattggaaagcaatgtggaaatacatatcaaaaaacacacaaacaaaaatcackttatctttgtaagaactttggcccattaatctcttttttaataatctgctttaaggaaaccctatagaaggaaaaatataaatacaacaaagttcatgtaagaattctagaaatgtccagcactaggcagttacctaaattattacatatatatttcaaagggcattaaaatcagtaaatatgatgatcattaagtctatgtagaaacacacatccatgcttatgttagcatgttatgtgaagaaatcagcacacacatatatagaaacactgtgatgatttaaaaatagcaaatacctttggacaaggcggagacagaaatctaacaagaaaccaaccagcatgacttaaggaaaaggatgaattaggatgaatatttta

SEQ ID NO: 861848 - DNA, 618 bp, Homo sapiens
ttcaagacacttcaggacatatgatctaagcactatttataacagtccagaaaacaagcactgtgttttgttgcagtcccagtgtattttgttttaaagtcattcttcccctaaatagtcactggatgcccaaagtgaattaagactcctctgggagtgctcactccacaaaatcatgcactgagagtgaagtgacatcacaattgcactcaacatcaccaacattttaactggacaggagactaacaacttatcaccacgaaaccaaaagaaaatcccatcaggtgatggtwtatttgagattccaaacaataaaacaaatgaaagaacaacagtttaaagaatatacatttcactaaagagctccaaggtaaagaatagaacgaaaaaaaggaatagtttagagcagtgtaaacgtacgaggagatatgctgaatgcagtgatgctggtctgctgcgacctcgctcttctagttctctccccagcttttggggctagactcttgttcaagacaaatattgagaagaaacgtcgctgtagctccctgtttcccatcactcctctcttgccttcccttttgctgccatcactgaacaataaaaccagcacgttttttc

SEQ ID NO: 861849 - DNA, 651 bp, Homo sapiens
attagttgatgcagtttcttcatagtttcgatgttctttataatttggtatgtttttgccatggttggtaccagttgtttcttttcatgtttagtgttttccctcaggagctcttgtaaggcaggcctggtggtgacaaagtctctcagcatttgcttgtctgtaaaggattttgtttctcctttgcttatgaagcttagtttggctggatatgaaattctgggttgaaaattcttttctttaagaatgttgaatattaacccccactgtcttctggcttgtagggtttctgcagagagatctgctgttagtctgatgggattccctttgtgcatatcccgacctttctctttggctgcccttaacattttttccttcatttcaaccttggtgaatctgatgattatttctcttggggttgctcttctcgaggmgtatctttgtggtattctctgtatttcctgaattggaatgttggcctgtcttgctaggttggggaagttttcctggataatacgctgaagagtgttttccaacttggttccattctccccgtcactttcaggtacaccaatcaaatgtagatttggtcttttcacatagtcccatatttcttggcggctgtgttcgttcctttttattcttttttct

SEQ ID NO: 861850 - DNA, 588 bp, Homo sapiens
ttgtctttgagctctgaatttctttcttttacttgtttgactctattgctgagattttccagagcattttgcgtttctataagtgtgtccattgtttcctgaagttttgattgtttatatttatgctatctattttattgamtatttctcccttcacttcttgtatctttttttttatttccttatgttggtatttgcctttctctcgttcctccttgattagcttaataagtaacctcctgaattctttttcaggtaaatcaggtatttcatcttggtttggatccatagctggtgagccagtgtgatttttggggggtcttaaagaaccttgttttgtcatattaccagagctggttttctggttccttctcatttgggtaggctctgtcagagggaaggtcttgggctgaaggctgttgttcagattcttttgtcccacatggtgtttccttgatgtagtactctcccccttttcctatggatgtggcttcctgagagccgagctgccatgattgttatctctcttctgggtctagccactcagcaagtctgccaggctctgggctagtactgggggttgtctgc

SEQ ID NO: 861851 - DNA, 639 bp, Homo sapiens
tcattttgatgagtttgcttccctgtgtgtttatattttaatatgcttataattgggttgatttgctaagctggaattccctttattttctgttaaagattatgataaatgaggtttaaatctttctaaaattacagaatattctttctccctaggttccttactccagaataagctgatttttttctctcacttttgatggtccctagaaaattattatgccaaatgaaaagtgactttttctttccaagtgaaaggggaaaatacaatagtgttatggctatgaagaagtggggtgttttaaaaacagttttggaggagacaagtctgtattcttyaacactgagagctgagggattgccagctgaagtttgtttgattgatctgcctaacacaaaaaatatgttttctgacaaagtgttaataaactctctccagcagttgtaggctcctttcaagattctgccgtttgtttttgaagtaggaaaatttacagagaactattataaggttctaattgaatttcacagaaatagccctggcatgacccaaaatggaaggaaaaaaacccagcccacaaaaccccacaccataaagcaactctctgcagaatcattgtttaaggacatgaagtggaaa

SEQ ID NO: 861852 - DNA, 639 bp, Homo sapiens
tcattttgatgagtttgcttccctgtgtgtttatattttaatatgcttataattgggttgatttgctaagctggaattccctttattttctgttaaagattatgataaatgaggtttaaatctttctaaaattacagaatattctttctccctaggttccttactccagaataagctgatttttttctctcacttttgatggtccctagaaaattattatgccaaatgaaaagtgactttttctttccaagtgaaaggggaaaatacaatagtgttatggctatgaagaagtggggtgttttaaaaacagttttggaggagacaagtctgtattcttcaacactgagagctgagggattgccagctgaagtttgtttgaytgatctgcctaacacaaaaaatatgttttctgacaaagtgttaataaactctctccagcagttgtaggctcctttcaagattctgccgtttgtttttgaagtaggaaaatttacagagaactattataaggttctaattgaatttcacagaaatagccctggcatgacccaaaatggaaggaaaaaaacccagcccacaaaaccccacaccataaagcaactctctgcagaatcattgtttaaggacatgaagtggaaa

SEQ ID NO: 861853 - DNA, 600 bp, Homo sapiens
acaattgtttcaagtcatttcattgttctaagccttggcatgtatttctttgttctaaaatattgaaaatatatattattgaaaatgaatatttctagtcaaaagtagaatttaatgtgtaagctgaggatgtgtaagcactggtgggaaatctcctttgaccaataatatatttgtttccttattagaggagaagtcawttttagctcttctcatattttaaaacatattttctgactctgttaatggattcagatttcagaggcattgtataatttgtggagctggtatgaatagtagggatatccatatccagtaactgttgaagtggttcagtcatggctctgggaaagtcaccctggctgtagagtgttttcataaagatttgatcctcatcaaacacttttaatgaaaatcttttccaaatcatcacttatcaccaagtatttacttagtgtccgtttgcaaatgaatctgcagtggatagttttcaaacaggttaagcagtcgtggtccgtactgcctactggaaatttacaggaaataagagcctgggataaaagaaaaaaacaccccaagataatttttatgcaaagacaa

SEQ ID NO: 861854 - DNA, 505 bp, Homo sapiens
ttttttttggatgggatccacaactgtgccactgtggagggggtcttggtcctagggggtggagaggcttggtgacttcattcaggacagtagattcaaacatagtgttacccattgtccttcaccaagcagaggcgtgcattcatttgccaaagaaagaacctgaattgttaatgcagaaagcattatggagctggaaaagatcacttgcattacagggtctaaagaacctatagrttttctctgcaggaggttctttggaaataacatgtaactgacatacccagtcttttctcaggattcaagggtaaatgaagatgagcataacttagctattatagtaggtgacaggtaccctgatgatgctgaccagccgacttgctgcccttgcacgcagtcataaaatggggtgggataggatgcagtgagaatggatttaacttagattacatccgctcatgagactgggttttgccaagcattgttttaaaccagaattccctaa

SEQ ID NO: 861855 - DNA, 505 bp, Homo sapiens
ttttttttggatgggatccacaactgtgccactgtggagggggtcttggtcctagggggtggagaggcttggtgacttcattcaggacagtagattcaaacatagtgttacccattgtccttcaccaagcagaggcgtgcattcatttgccaaagaaagaacctgaattgttaatgcagaaagcattatggagctggaaaagatcacttgcattacagggtctaaagaacctatagattttctctgcaggaggttctttggaaataacatgtaactgacatacccagtcttttctcaggattcaagggtaaatgaagatgagcataacttagctattatagtaggtgacaggtaccctgatgaygctgaccagccgacttgctgcccttgcacgcagtcataaaatggggtgggataggatgcagtgagaatggatttaacttagattacatccgctcatgagactgggttttgccaagcattgttttaaaccagaattccctaa

SEQ ID NO: 861856 - DNA, 616 bp, Homo sapiens
ttcaacttaatcaaaatttaaaatgtttgctctataaaagactggccctgttaagaggataaaaagacaagccacagaatgggtaaaaatatttgcaaaccacatagctgacaatgcactagtatctagaatacataaaggtctctcaaaactccagcagtaaaaaagcaaattgtccaattagaacatgggttgggggagcgggtgcagtggctcatgcctgtaatcccagcacgttgggaggctgaggccagaggattgcttgagtccaggagttagagaccagcctgggcaacatggcaaaaccacgtctctaaaaaatatacaaaaattagacaagcatggtggcacacgcctgtagtcccagctacttgggargctgaggtgggaggatggcctgaacctaggaggttgaggctgcagtgagctgagattgcatcactacacccagcctgggtgacagagcaagcccctgtctcaaaaataaaagaacatgggcaaaagacatgaacagatttttcactgaaaaagatatacagatggcaaacaagcacatgaaaagatgttcaacatcgtttgctattaaataattcaaattaaaatcacaagacatcat

SEQ ID NO: 861857 - DNA, 639 bp, Homo sapiens
ttcttggtcatagaaaccagttttgtgaaacaagggaaatatagcagatggcaaggccacagctcagaaaaggaaaaaaaaaaaaaaatcatcccttctggtttagataatccctagagtgttggttttggaataagacaagtttcctayagcagtaccttaaaaagaagaatgaggttttgtggttggaatttatgactagaagtgaggaatcttgggctataattttgattgcaccattttctcattgtctcatggagcagtaaagcagcactgattaataaataaaaattgaccagctgtttctaggattctgtgaaaagcacactaagcaaatatgcattgtgacctgaagcatttaaaatattattcaactctcagatatcaaaaaatgaaacataggggatatttttgcttgtctgaaaatgtgtgtaaaatcctgcaaaaaccaaagtgactgtccccattttttttcccacaaggatgagagcataatattgaattgggtagaattatcttctcaaaatacagcatataaatctttctttggattactatgtcacattttctctttcccttgaacttttatatggtgggaaagaattccctaagagttcagtagaaacattacaatactaa

SEQ ID NO: 861858 - DNA, 604 bp, Homo sapiens
cagcagtcaaaaactagaacttgaaaagactcacattcttcttaaatgaagtacatgccaaattttatttcattaaaatttgaggaagtcaattgcaaataatacttcattaacttcatataaatgtcttttggttcatatgtgtaggccatcaaataggtcaagcagtttataaaagcagacaaaaatagacaaaaccaatccatgattataaaagtcagagtatggataatgattaggtgtacaaagcaagggttataggtaattccatatcttgactgggtggtgattacacagaaagtccattttgtaaatatgtgccaattarcagttaaaatatgtgtactttataatcattatactgtagtaaaactgcttaaatttttaaagaagaggtgtcaagaactaaggattttcatgaaatgtacaatatttagaattcccattggaatattatgcgtcattgtcctctgattttaattctcagggaatttgctaagccaccgcagatcaactcgggtacaaacacgtatacttttagatcatagcactcagctctatctcttcattctgcttcctagtgagtttcactcacattcaaatc

SEQ ID NO: 861859 - DNA, 619 bp, Homo sapiens
aaatggcagagcgcccacttctcagtcttcatttagccttcatgtaactcccatgagaagaatataggaatttaatttattttattatggtgataaatatggacaaatatcctaatataaaactgagcaaatcatataaataagggattattgcaaaccaggctaaaatatgcagcaaacatatgaaaggttctaaagcttactagtaggaaactgccaactacagcggtaatgagatagttttccttccttcaggtcagtgaaaattaaaagtggggaagccartcagtgtttcctatggtgccaggaagtaggcacgctcatggcttgtaaaaatccaaaattgctattaattcatgaaaaggaatatctactaaaataaacatgtataatcttaataaaataataactagcaagacaaatagacaaggagagaagtaaaaaaccctccaaaaatatacaaaatgttcatcactggggaaaagttaagtattgtggttttgatccatattattgaatattttaccttgattgaaagtgtttgtcagatccatacatttgactggaggctttcttttgacatgttttgtgaaaaagccatttttgctaaacagtgttt

SEQ ID NO: 861860 - DNA, 723 bp, Homo sapiens
ggcaagattttattcttgtaattatccttatgtatgcctggacatttatttcaatagaagtatgtaatataagccgtaaggttttctcctggtgaactctgcaactgggttcagttaagatttccattttatttctaaactatgatatcatcttatctttcctaaagttcatgatatctggaattctctacatgtcatgttaattttattatctttattccctatattggtttcatatgttaaagccttagtttttcaaatacatataaagtattcctcctcagagcctgttttctatggtttttagaatccccattctaactggttaactcttacatacagaaacacactgtatattgagttgaattttgaaacataagtagcttaaatttttgctttttctgtatgtaattatatgcaatctcatcaagtaagtttgttattttctaaaacattaaagaatcatgatattaaaaagagattctatcagtaagatttgaactttgtcagtggyttaacctctccattgatcacaaagacaatattacagataatgtaatgtgttgggcaaatatgtgtgtatatatatgtatatacatgcacacacacacatttacatgcatacacacatgcaaacatacatacacacctctatatggagagaggtaacaaagcagctttacttactactctgatggtttttcttcttaccctatttcttct

SEQ ID NO: 861861 - DNA, 581 bp, Homo sapiens
accaactaggaaatgtgaaaaagctggtttccacaccacattgtttcattttaaacttcctatccactggaaggttaaaaaggaaatacattttaatttactgataaaaataagtatatcagttctccaacagaggaaacactttctagcactaaattctgggagaaatttatcatgtgtgtcattatttgagatgttgactagtataatgaatagtggttttgcagacatcgtaagagtattcttcataagatcatttgttatagcaacctraaacaaagctaagggcataatattacattgtgatcagtgaatcaatttctgttagaggactgtgaaaacacttgttggggaaatggagaagtagatgaaattgaatcatttaaaagaaaagagaattaatttccccaatatggtgatgataaatgaaaaactgtgtgttctaaatagtttttgtttttagagtaaatattttcactttcattgtgaattcaaacttctaggacagaaaataattcttaaatctttttatatttgagaaagagagagcactgattagtcaaaatcagagaattattagt

SEQ ID NO: 861862 - DNA, 678 bp, Homo sapiens
taataaatatccccataaaaattaaaattttcattaaaaaccaaatggtaaataataaaaatacaatgctatagccaccactttctaatcttttttaaaattagaagcgaaaaaaatgtacttccaataatttcatatcatttttaaaatatggcttcagattttctccacttaaattgcaaagtaaaccttcattattaatttttatatccgtaaaatatactattttattcctgtatttatccattcaataaatgtttactgaatatgtactatgtaccaaacacagttcaacataagttaacaaaaagtcctcatttgcagcttaccatgagccatacgatggaaccagtagtagccaaagtcaactcctaagaaggctgaataccaagtccatggagaatcccaaggcaaattgaacagcctgtagttctcccagatataaatataactggtcagttcaatgctcctgaaaaatagactggaagataaaattcacaatcagtgattatataacattttagaaaaaaaattacrctaaaatgttttagataacatttaaaattaatatcttcatataaaaaaatgaaactctttcttctactttgtgtcttctatgtcattccttttaaaggctcaaattccttggtatcaaaatcattcacaggaagctttatt

SEQ ID NO: 861863 - DNA, 718 bp, Homo sapiens
aaaagagagtacttgtttaatgagtatagtgttttcttttgggacgatgtttggaattagatagagatagtgattgcccaaaattgtgaatgtactaaatgccactgaattgttcactttaaaaggggttaattttatgttgtgtaaactttaccacatttttaaaaagcacccctgttttaagatatcagagagcaaacagcataggtaggacttgataagccaaggtcctcaggagaagaaaagtgaaaataagtcatcctgacatttagtgataattccaggcatcaactaagaggctaaatgactggactgagagaaaatagttgacagaacttgaagctcagtataactttcagcaatgtgttggagctcaaggtgagtgcaggayatggggcaaaaattaaagttcttgtctccaataatgaagagaaacccaaagagttgcaagaataaggaagaattagaaatagatcatccctacaatagattaaaactcagcttcagattacttcattcctaattgaattaaggctatatgccgtaccctaaaagaatttcagaaggaaacaaatcctttctggagaaagacaaaatcatccagatctccagtgctaatgaatgtctttgtcaaggtaatgagaccaaagatggggcccaaaataatagacttaaagcgaaattaactgaactatctaccgtcagtttcagtgttaaa

SEQ ID NO: 861864 - DNA, 671 bp, Homo sapiens
gattacatacagcagaagaagaatggaaaacaggggagacagctattttcatgtgttacattaccctagacagtttgttaagtgacttcagggtagggcattgtattctgtcctcttgcccggggaactatctagaacttttactgctgcttggaaaaaagtcactgtttcatacagctttattaataaaattttttaatgcagatgactttttaaattttgaacatgttcatcaaaattattttgaacatctttaagtcacgttttgattgttttatgtaatcagactcttgattagaaagaataacagaaggaaccgtagatgcactcaaactcctaaagtaattatttacaagaaataaactttttgcacgrtctaatgacattttatacaatgaaaatgtataatattttcaaagtaacagcaataaaataataagtaatggtcaaaataaatttcaaaatataaagcataaatgtcagaatcaatattggttttgccgcattagcttgaaaatttactggtggaaaaatagtaatggttaaacacacagaaaagataagtcataaatgtcagccagcccttattaactgcctctgaaggtactacaaggacagctttggctgctcctagcctgcacttacagaaattgaattgctttgtgcattaa

SEQ ID NO: 861865 - DNA, 681 bp, Homo sapiens
ggattactgagctggctgaatacattgtgatgcaatcaaaagttttctggaatttttcaaaccacagttttaagctgcatttgaataaaacttagctattaaggggaaaaataattcataaaaaaatttttagtcttaaatatactttcaatgtatttaaccatcgtaaatgtgaagataagagtattgtaaaaatacatgatatcagagaattacttaaagaaaaaaacatatttaaaytttgagccgcatatttttataggttcttagagtttggtgtagcaatcctgttttctggagccatttttgttcctttgtctacgacttctagcaacattttgcaagagttgaaagcagaaatgttgaggtgcccatgaggattgttattcattaccctgaccagctttaggcaggagatataaaaacataaccaaaaaagccacttttatgacagtatttgcagatcaatcctgcgtattccacgcttgtaagatttggaatgtttgtagctgaaatttatttttctttctagattgctttttactgaaagaatgcaacaaagagagctgccaagaaaatacagttattcccccaaatagttcaaagaactatgccaggtaagtatttgttgttcatattttaaatattatattatagtctaaatactagtcacctcaaata

SEQ ID NO: 861866 - DNA, 604 bp, Homo sapiens
atttgttgattacatataaattaatatttttgcttccctagtgaggaaactgagaaacaaaaagtggaaaattcttagactcctgggaagaattatctttatccttttattataccagcttgatgaacgtttacagcaagaatcagaggagcaaatttcagtaaaatctctaaaataaaggctyattttatttgtgtgtgtgtgtatatatacacatatgcaaacacatacacacatatacacagatatgtgtgtgtgtatatatatctatagatagatacatctccttacctctaactatacatatgtctacctatctacatcaaaagaaagatagcattttaaaagaaaacagattatatattcttaaggccagttcaataaaggtaacgtttatttttctttggtttttaaaatattatttgaaatttaaatatttacatttattagggatgagttacttatttcttagtcttttactttatacaggtaatatttctgaaaattaattttaggttaaaacattgtttgcaccgaatagatcttgctttattattgatcttaagttacttttcatgtatcataaccttttttgtgtggaagc

SEQ ID NO: 861867 - DNA, 649 bp, Homo sapiens
gactatttgttgactgctcttccccatggaagtgtatctcatgcactgtcctgagattcatgtctgtggcttcattcactcactggacatttccactcagatgtcatgtgaaaactgccaacttaacatttccaaaattgcacttgtctttttcatatgtactcctgcctcacctgacatgttcttgacttcagttaatcatgtcgccatcaatacattctcccaataatatgctgagtcatcctcttctcttccctgtaccttagctcagcatcctaattcagccgactctatcccaaaaatgtattctgtgttttacctctactctcctaagatgctgccactgccttygtgttctaatcaccagcttccatgacctagcttccccctcattagtcttatccaactctagtataaccttcatattttacccaagtgaactcataagtagcaaatctgacagtgagactccccaacatgagaaaatcaccagtctcccttagaatagcatgtcaagcccatgacagagactggccagctatttgtcattttcctttcctcctgggcagacaatgagactacactgccaagccttccttgcaattagacatggccaaatgactgagtcctagtcaatacaatagaggca

SEQ ID NO: 861868 - DNA, 606 bp, Homo sapiens
aggttctaagatgcatttttgcagagtgatgtttcttccatagtgaaataggtataattttctggaaaggttaggcattatctttttgttttatttttaaaattatgtaacatttgatatgtacagagaacatatgtaaacttagaactggaacattactgagactgcttcatctacccaggtgctcctccccaatcttgaactttgtatttagtgtaaccttctgtgaggggtacagactacaacgcaaggctgcagctcargtgacttagggagcctgccttttgctttcaagtcatggagtaaattcatgcacctcctgaggaacatcctcaagtggctggctaacttgtagcacgactttcaaaataacaaactttgtgctttgctctaccaagtgagaccacatataggaaagttcttggaaattatgaaattgtacacacatgtaaatgtccttatgaagacacaatatgctgctattaaatttaacaactttctaaaatgtcctcaaagaaatacaattcttaaaaataaacaataaacagagaatataccaagagggctagaatacatggcaactggaagttggaggggaaaaaagga

SEQ ID NO: 861869 - DNA, 552 bp, Homo sapiens
aagagataacagcaagtatattttggaaaagtgcaaagcagagagcagagtggcaaattcctcagcagtcccccaaaagctgaatgctaaagcaatagtgggaaaacctgattcacatcacggagtccccaaaatactcaggtattggcagccctgaggtggggataaagagagaaggacttgttgaaaaccccacttaggaagaagttagacctcccccaaacacaggcccctctctcatcctatgcagcagggtgactaccctaccttcaccaatagagatgcttgaggaagtggagacactaaaatagagagtcaggattggggacagcaggtatagtagatgacaaagtacagtactagaaacacagaattgaaggtcaaatttacatacctttcctacaaagrttcaagactcaaatcaaaccaaattagcagtggacttctaaaggacagcaaacgagtgtcttcaaaattctgaggaaaaaagttatttccaatctggaattgtacagccatcagaattaatgcatgagggtttataaagccatt

SEQ ID NO: 861870 - DNA, 636 bp, Homo sapiens
gttttactttaatagtatagtgttaaacacagtcctaagttgataaatgtacttttacagatttatttataattattgcatagtatttccgtggatgtgccataatttattgactcgtctccctttgttagatagattatatctttgttgttgtttttacaactataaaatataatggaatagctatacttgtagttaaaactgttttcttatacggcatatacctagacattgtattattgggtaaaaaatgcaaacattgtaagaattttatgtgtgctctctaaatgccttccaaaaggttgaaccagtttacattcctactggctgtttaagagaggatgctatatatatgtattcatatctatagacatatatgtmtgtatgtgtatatatatgtagatatatgtatatgtctatagattttatgcatatgtctatagatatggatacatatatatacatacacgtttagaaatagacatacatgtgcacatataggtgtatatgtcacatacacatacacatttagagatagagacatatccatatacatatatgtaggtatgtatatgtctatagtttccatttggaaaaaggaaagttcctctttgggaaaaatgaaactcactggaa

SEQ ID NO: 861871 - DNA, 597 bp, Homo sapiens
agtctccctatttttgccgttatcttcttaaagcttattctccgcatagcagccagagtgaccacattaaaatgaaagatagattatattagatctctgctcaaatccctctcatcatgacttcattacatctcactcagaataaatctcgtagttcttattttgttttatagacccctatgtgattggtctcctgctacctttctgacctcatsatctttcactctcttcttacacagtcacgttcaaccacactggcctccttgctgttcttgctgttccttgaacatataggtaaacttcattttgaagtcttttgatcttgttctctgcccaaacactttccccaggtaccccctcaccatatcagtgagctcttccctgatgaccctatagaaaatagcaactctgtctctatcaggactcctcattgcccttatgctgtatttatcaccatcccacattttataaatttacttgtttattttttgttctccctcgtcatctcgactcaacttgttaaaaacatcatgggatcaggaggttatgtttactgctgaaatcccaactccaagtatagtgccttgaaggtactag

SEQ ID NO: 861872 - DNA, 612 bp, Homo sapiens
agacaaagactcagacaggaaagaatggtgtttgaggaaggtagtgactcaacaagatgggttgcagcagaggagttagggtgagcaacaggatagcttggaaatttccatctttgacttttgagaagaactttgggacaaagctctttgcttaagattggtattgagaaacaataacatgctagccactcttttttttttttttgaggtgaagtttcactcttgttgcccaggctggagtgtgatggcacgatcttggctcactgcaacctccacctcctgggttcaagcgattctcttgcctcagcctcccgagtagctgggattacaggcrtctggcaccacgccggctaatttttgtattttagtagagacagggtttcaccatgttgacaaggctagtctcaaactcctgacctcaggtgatccacctgccttggcctcccaaggtgctgggattcaactctttattgagcacttactacatacatgacattaggttaaaacttcacatgcattatctcacttaataataataactttcaggtaggtattattgtacctaccaaccaaccctgtaagtggatgaggcagaatgaaccaaggacagtc

SEQ ID NO: 861873 - DNA, 612 bp, Homo sapiens
agacaaagactcagacaggaaagaatggtgtttgaggaaggtagtgactcaacaagatgggttgcagcagaggagttagggtgagcaacaggatagcttggaaatttccatctttgacttttgagaagaactttgggacaaagctctttgcttaagattggtattgagaaacaataacatgctagccactcttttttttttttttgaggtgaagtttcactcttgttgcccaggctggagtgtgatggcacgatcttggctcactgcaacctccacctcctgggttcaagcgattctcttgcctcagcctcccgagtagctgggattacaggcgtctggcaccacgccggctaatttttgtattttagtagagasagggtttcaccatgttgacaaggctagtctcaaactcctgacctcaggtgatccacctgccttggcctcccaaggtgctgggattcaactctttattgagcacttactacatacatgacattaggttaaaacttcacatgcattatctcacttaataataataactttcaggtaggtattattgtacctaccaaccaaccctgtaagtggatgaggcagaatgaaccaaggacagtc

SEQ ID NO: 861874 - DNA, 638 bp, Homo sapiens
ggcatttaagagggtgggcaggaaagagatgaaattagcagactatccaatgtgttttgaatgtttgaaaaatattactagtggttggtagatgtgtggaaatattttaaaaattcagtgataattcatgtaaatctgagtaaatgaggctagtaaaagaaatgtcatcattggacatcatttggctcaacagcgaacaatattacacagacaaagttatgcaaacactgactacstatgtaaccataaattgcaacttcactctcctgggaagatgggtaggtggaaggggaggagttgatggtggtgctgaagaaaagcaccactatcagctaaattctcatctaaattgacaagaagctaagggataatatctaagcttgataaataaaaaatataagatttatatttagaaacttgcagaaaaacagctaaagaagctgcaagtggctatacttggagaataggacatggggagttagaggtttgttggatagaggccactgtcttttcttgtaagcatttatgaactgtttgacttttaaaacaatgatcactctgatagcagaaatagaaaaaagtgataatacatactatcttttcttttcgtaaataagttatatatgagttatcagtaa

SEQ ID NO: 861875 - DNA, 491 bp, Homo sapiens
gggagggaggattggaaagaaagatatttgaagaaatgatgcttaaaattgttccaattttgataaagttataaatccaagaagtccaatgagccctaatcacaaaaaatatgaagaaatcttcaacaaggcacatcataaacaaatttatcaaaaccagtgataaatataaagagggaagggcrttaaaactggttgccacatgggtaaataaagaagaatttttggtataatttaaatctcaaaaattgcttaaaccaaaacaatcacaatgtaatatggagttaaaaacatgagtgagaatcaaatacatggcagtaaaagcacaaatgccagaagggggaaaatggaagtatattaatataaggtttttatactatatataaagtggtataatatcacttgaaggtaaactgtgataagttaaagatgtatagagttaactctaaagcagtaactaaaataacaaaactaacaacagagaggataaa

SEQ ID NO: 861876 - DNA, 491 bp, Homo sapiens
gggagggaggattggaaagaaagatatttgaagaaatgatgcttaaaattgttccaattttgataaagttataaatccaagaagtccaatgagccctaatcacaaaaaatatgaagaaatcttcaacaaggcacatcataaacaaatttatcaaaaccagtgataaatataaagagggaagggcattaaaactggttgccacatgggtaaataaagaagaatttttggtataatttaaatctcaaaaattgcttaaaccaaaacaatcacaatgtaatatggagttaaaaacatgagtgagaatcaaatacatggcagtaaaagcacaaatgycagaagggggaaaatggaagtatattaatataaggtttttatactatatataaagtggtataatatcacttgaaggtaaactgtgataagttaaagatgtatagagttaactctaaagcagtaactaaaataacaaaactaacaacagagaggataaa

SEQ ID NO: 861877 - DNA, 585 bp, Homo sapiens
actatatggaatatttgaacaacacaaccaaaaaattgatctaatctgcaggtatagaaaactctatgcaacaagagcagaatatacagtgttttcaaatctacatagtgtgttatccaatgtggatcatattctaggccatgaaacagtctcagtaaattagaaaagtattcaagtcacaaaaactagtttctctgaccacagcaaaaataaattggaaatcagtaaaatagtccatttaataactaaatgaaattacttatacaacaattcaagtgaaagtctcctttgattttagggacaaaaacctatcaactctcacctcaggaggaaaaattattatgttagattatgcaaaaattaccaatataggaataccattttaggtacaagtttacacaggcaaaataatgtgggtactatgagaaagacttattcarcaaatatacatgtactttggataaatggaaggaattaggagactttgagatctggaaggtataatgcatagcgtaattttattttctctttgcattgcaaatacagcctaaaagtcactgaaaacacttttccttcagacaacat

SEQ ID NO: 861878 - DNA, 584 bp, Homo sapiens
ctgaattgtggtccataaagacatttataataggctcttagtacattaatatgtgttatctatgttccacatacttccacatcctttcttaggttcacatttcaggaaaagcaaaagagtatttgggtagaaaagaggctctagagatacctgtcttaaaacctgtgttaaaaaacagaacatggctgatctatttcctgaattctttggccttttaagtataaagtccttcygttctttaggaaggctctttgcttgaaataatacagcccgttcaccagaacagttacgtttgtaacagtatgtgaaacaagactttaaggatttaaaaaatgaaagaaacaatcaagaccttaacttttctaattccagtttaaattttttcttgatcctattagaattttaggagggatatcaaattgatggaaattgccatgacgtcttgaatcacaggggtgttaaatcccttttggatcaagacacacatagatgtcatcttctgccagagcttgatagtagggaagggcagtccttggaaggcagtgtggtttggcttcgtttctgaaaaagtgtaggtcctcaat

SEQ ID NO: 861879 - DNA, 652 bp, Homo sapiens
tagtgacttagaattttctagcaatttgcaatttacttttgcagttcaccaagtactttcatacaataactatagtcctctgaaagcagagcagattttatagataaggagttaacaaatctgtattgagtaactactgcaggctggtcatgaactaggtactgaggtcatagcagaaataaagacggacaaagtctctgttttcactgaagaggggaggaacacttaaatggttaccagagcatgcttgctgccaaggatcaggcataagttgctatggaaacataaaacagggggaagccaaagtaatataaggaccaagaaaggcttctctgaaagcattttagttcagttgagccttacaagattgcaggagttatcaaatggaagaagtgtggtaggtaaagatgaggcagaatattctaggcatattaaagcctgagtcaggatacaacatgtgtwgtttgaaaacctgaaagaactcaggtatggatggagcaggacaaggaagaggacacttggtgctagatgatgctagagaagcaggcagaggccaggtactcatcaccttagaccactcagtaccacatgtttgtgaaagttaaagggagaaacgtgaagtgcaaggctgcgtgtggctgatctagaactt

SEQ ID NO: 861880 - DNA, 601 bp, Homo sapiens
tttggattctgcttataacagacattttccatagattggaagatccaaaatgtaccttggtttggtaaaaatatatttaaagcatacacgatacgttacatacaaaaatacatatatttttacaaacatttcagcttatgataacatttttagacatcaacttaaaaacatgtaagtgggtagtttttcaaaattcttgygggaggtatgatagcaacaaattttgaagaccactgctttagggcatttttgttttaaaggtttctctgaaagccagaattcttcaagatccctaatgattatctaccttgaaaggcccacgttttactagaccaccacactccaccccccacgtttacttgaatggtaaatgttaagagaatgctgatgaaatgacacgcatacaagctacagtagttttgaaaagagtctttttcactctgtagtatttgcaggaagaggaagtgttttgatatttaccttgggtagaaacatgaaagggccgttttgaagtttcacatatttcagacatgcagaagtatgtcattgttgacgatggtaaacagctggtaaagataactgcctggaacagctggaggag

SEQ ID NO: 861881 - DNA, 583 bp, Homo sapiens
ctctggacctcttcatctcccttcctagttaccttaaaattaaaattcagatgtgacaaaactgtcgttaacatgtagaaagtggctaatatttttaacaatgagaactggccttgtcattttggattctgcttataacagacattttccatagattggaagatccaaaatgtaccttggtttggtaaaaatatatttaaagcatacacgatacgttacatacaaaaatacatatatttttacaaacatttcagcttatgataacatttttagacatcaacttaaaaacatgtaagtgggtagtttttcaaaattcttgtgggaggtatgatagcaacaaattttgaagaccactgctttagggcatttttgttttaaaggtttctctgaaagccagaattcttcaagatccctaatgattatctaccttgaaaggcccaygttttactagaccaccacactccaccccccacgtttacttgaatggtaaatgttaagagaatgctgatgaaatgacacgcatacaagctacagtagttttgaaaagagtctttttcactctgtagtatttgcaggaagagga

SEQ ID NO: 861882 - DNA, 611 bp, Homo sapiens
cagtttgtcttgatgtcttgctgtctctggacctcttcatctcccttcctagttaccttaaaattaaaattcagatgtgacaaaactgtcgttaacatgtagaaagtggctaatatttttaacaatgagaactggccttgtcattttggattctgcttataacagacattttccatagattggaagatccaaaatgtaccttggtttggtaaaaatatatttaaagcatacacgatacgttacatacaaaaatacatatatttttacaaacatttcagcttatgataacatttttagacatcaacttaaaaacatgtaagtgggtagtttttcaaaattcttgtgggaggtatgatagcaacaaattttgaagaccactgctttagggcatttttgttttaaaggtttctctgaaagccagaattcttcaagatccctaatgattatctaccttgaaaggcccacgttttactagaccaccacactccaccccccacgtttacttgaatggtaaatgttaagagaatgctgatgaaatgacaygcatacaagctacagtagttttgaaaagagtctttttcactctgtagtatttgcaggaagaggaagtg

SEQ ID NO: 861883 - DNA, 691 bp, Homo sapiens
atgtgtttcctggaatgataattcttttagacctaagtttgggtgggtttcttcaaacagagttcacattgacctccactgtacccctggaggcacctccacatgtagaccattttacagtaaattatcagcttcgacggtataaataatgttcccaatccacatgaaggcaggcttctgcttgtgaaattatatctatttattatttccccaacataggccagagaaaaagataaacaagtttactcacttcctttctctaggaggtggtccccaccattcactcaattttaaggggtccaggctttctaaaattgatagtggatcatacttcccaccttagacatgcgcttgacttagtcactcatccctcactggagctcttgaaaacctaagctctggcttccaggacaactacctactctagtgctccttcccctcgctggatttctgctttcctccaaggttttctttacagtctkgccagctcatctatgcctttaacattactttttaaaaaatattgtatccaccatatctgatcatcactttttaagctacctacaaataccattatatcagcaacagaaaccaagagttacagtttttactgttcctcggctacctgtttgctatcctatattaagttttctttttgtcttatgtctccacatcttttgaataagtgctt

SEQ ID NO: 861884 - DNA, 691 bp, Homo sapiens
atgtgtttcctggaatgataattcttttagacctaagtttgggtgggtttcttcaaacagagttcacattgacctccactgtacccctggaggcacctccacatgtagaccattttacagtaaattatcagcttcgacggtataaataatgttcccaatccacatgaaggcaggcttctgcttgtgaaattatatctatttattatttccccaacataggccagagaaaaagataaacaagtttactcacttcctttctctaggaggtggtccccaccattcactcaattttaaggggtccaggctttctaaaattgatagtggatcatacttcccaccttagacatgcgcttgacttagtcactcatccctcactggagctcttgaaaacctaagctctggcttccaggacaactacctactctagtgctccttcccctcgctggatttctgctttcctccaaggttttctttacagtcttgccagctcakctatgcctttaacattactttttaaaaaatattgtatccaccatatctgatcatcactttttaagctacctacaaataccattatatcagcaacagaaaccaagagttacagtttttactgttcctcggctacctgtttgctatcctatattaagttttctttttgtcttatgtctccacatcttttgaataagtgctt

SEQ ID NO: 861885 - DNA, 617 bp, Homo sapiens
atgttggaaacggggcctggtgggaggtgtttgggtcttgggggcagatttctcatagcttggtgctgtcctcattatagtgagtgaattctcatgagatctggttgtttaaamgtgtgtgtaacctccccagcctgcgttgctcttgttcttgctgtatgacatgcctgttcctggtttgccttccaccatgagtcaaatctctctgaggcctccccagaagtcaaagagacgctggcaccatgcttgtatagcctgcagaaccatgagccaattaaacctcttttctttataaactacccagtctccagtatttctagacagcaacacaagaatgacctaacactggccattttaatgatattgattctcccaatctataagcatggaacgtttttctatttgtttgtgttgtctgtgatttatttcaacagtgttttatagttttccttgtagagatcttttgctgccttgtgtaacctctctttctctctctctgcctctattcttctctcttacacacacacacacacacacacacactctcacacatacacaaacacacacaaaattataagcttctttaaacaagaatgtgtggttttatccatattcaa

SEQ ID NO: 861886 - DNA, 691 bp, Homo sapiens
agaggctccaccatcaaagtttggaggagaaggggtctgggctcctctcagtcatgtacaagttcctgcagtggaggaaagcccagttccaagaaacacagcgaaggaagcgtgggcagaggcacaaatagcagattggatgccccagcctagagccttcagagtgtggcttccagaaccacaacaaactctaacagactttccacagagatgggaaggaagttgctagaacaaacactatcctgaaacttgccccaaatctgaacctcatcaaaccccartgtttttttgaggttagaaaaagcctggcttagcatttttaaaacaatatctatttgccttttgtctaccatttgcagccagaagtggaagttctaaaaacccattaaaaactttgggttttattttgtatttatttctttactatatgctttgcctggccaaaaccagaaaatgctggaatggcacaagttcattctcctgagatatccagatcaaagttgtttggaactgcttggcaaaatatctgaatttttccattcttatccaaaccaatgcctccaatcccttgcaatttactcatatgcatccaccttctcaagtgttctgaggcatttctttcagcacacacactggccttcaaagggtaacaagaaattgtgtgctggcagaagctatattttcaagttta

SEQ ID NO: 861887 - DNA, 653 bp, Homo sapiens
tttaaagacaaggttaaaacaggattaagccagagatctaactaatcataccgtgtagatgcagggcatatgtgctgccacgcactccctctgtgcccagagaacatcagaaaccaattataactcacctgccaagcccagaacagccttagaatctttcttggcaggctgatgccatcctggattaaacagaggatagccctaaagatgtatatgggtcaggttagaacccaacacagctggacatggtggctcatgcctgtaatcccagcactttgggaggctgagaccggcagatcacctgtggtcaggagttcgacaccagcctggccagcatggtaaaaccctgtctctactaaaaatacaaaaattagctgggcgtggtggcgcatgcctgtagtcccagctactcaggaagctgagrcaggagaatcactggaaccaaggaggcagagggtgcagtgagccgagatcacgccattgcactccagcctgggtgacagagtgagactctttctcaaaaaaaaaatttaattaattaattaattatttttaagaaaagaagtcaacataaattcccacaggcaggacaaacaggtggcaaaagcaagtggagccagcggaatgggagcaggaagaatgtcaagtacatg

SEQ ID NO: 861888 - DNA, 665 bp, Homo sapiens
taagaacatgttgtaccagaaaagtaaatcctcataagaaatgacaatctacaatttaatgagctcagaattactctaatcttttaatctccaaatattcctcaatattaaaagccattatatgaaggtacatacatgaatcagaygaaataattcacaaaggcactcagagaatcttggactcttattagcttccttaagtctataatattattcagaaaaggaactaggtggaagtctacatattattttctgaacttgattgttaagactaaactggttatacatgtctagcttctctaactggcctgacattcaaataaagactacataaatacactatttatttatgcacacttgtacacggttgtaacaatttttatataaatataataaatatttttagaataatatagaaatatacatgatcacgctgtaaaacaatcccagttaccaagttctattctctcttatgtctaagtcactgtcttagactatagtttatgctatgtgaagtcaactctttgcagccacaagacagcctttagttctgtgctctactatactaaattcatggtatttagttatgaaattctggacttttgacaatcctctagcagaaaagccatgggtttccatatgccctcgaatatagcacttctgaa

SEQ ID NO: 861889 - DNA, 595 bp, Homo sapiens
gcagtaatattttgaaagaaatctttctttctgagcagcatgtctcagcaatgagcttaaaatattcagtaaaccaaggtatcaacagatgtgctgtgcccaggcttctttgttcctatagagcacaggaagagtagatttagtgtcattcttaagggcactagaactttcagaatgataaatgagcatttgtttcaacttaaagtcaccagctacaattgtccctgtctgtagaagctttgaagccaggcagagacttattctcatctagcctagataacatcttcttccaatagacggctgtgttgtctacattgaacatctgttgtatagtgtagccaccttaatcarcgatgttaactagatcttctaagatctagagatcttgctgcagcttctccatcagcacttgccacttccccagtgctataacataaaacttttatgttattgaagatggcttttttccttaaacctcatgaaccaacctctgctagcttctaacttttctattctttttttttttttccatttgaacaacttgacattttagggttgttaatagcctaactttaatatgttgtgtctcaaggaa

SEQ ID NO: 861890 - DNA, 688 bp, Homo sapiens
tgttcctttgatgtctagttttttgatggttttaacataaagggatgttgaatgttattgaaagccttttctgcatctattgagataattatgtgattttttgtttttagttctgttaacgtgatgaatcacatttatcgatttgcctatattgaaccaaccttgcatytcagggataaagcctgcctgatcatggtggattagctttttgatgtgctgctgcattcagtttcctagtattttgttgagaatttttgcatctatgttcataaaagatattggtctgaaattttgttttttattgttgttgtgtctctgccagattttggcatcagaatgatgttggcctcatagaaggccctagggaggagtccttcctcctcaatattttggaatagttttagtatgagtggtaccagctcttctttatacatctggtagaattcagctctgaatctgttgggtcctgggctttttcttgttggtaggctttttattactgatttaattttggaactcattattggtctgttcaggcattcaatttctttctggttcagtcttgggtggttgtattttcccagaatttatccatttcttctgggttttctagcttgtgtgcatagaggtgtttgcagtagtctctgaggggttttgtattgctgtggggtcagtggtgacatcccct

SEQ ID NO: 861891 - DNA, 688 bp, Homo sapiens
tgttcctttgatgtctagttttttgatggttttaacataaagggatgttgaatgttattgaaagccttttctgcatctattgagataattatgtgattttttgtttttagttctgttaacgtgatgaatcacatttatcgatttgcctatattgaaccaaccttgcatctcagggataaagcctgcctgatcatggtggattagctttttgatgtgctgctgcattcagtttcctagtattttgttgagaatttttgcatctatgttcataaaagatattggtctgaaattttgttttttattgttgttgtgtctctgccagattttggcatcagaatgatgttggcctcatagaaggccctagggaggagtccttcctcctcaatattttggaatagttttagtatgagtggtaccagctcttctttatacatctggtagaattcagctctgaatctgttgggtcctgggctttttcttgttggtaggctttttattactgatttaattttggaactcattattggtctgttcaggcrttcaatttctttctggttcagtcttgggtggttgtattttcccagaatttatccatttcttctgggttttctagcttgtgtgcatagaggtgtttgcagtagtctctgaggggttttgtattgctgtggggtcagtggtgacatcccct

SEQ ID NO: 861892 - DNA, 633 bp, Homo sapiens
acttgctcctctgtgaaatgggggtgttggtccttgaggtgggaaacactggcgaatgaggtgccatcactttctgcactgggtgggtaagatgctccctgcctcctcctcccactccctgcccagcttcttggcccagggaattactggttgtaagggtcttagaagaggttaagatttagttgtggctgcagctttgcagaaagcccagcatgctctgcaagcagggatgggaggtatgagggtcacagccgagtgacagcctgggcaggtgctagcaggtgagtggcaggtacctggmtgcccaggctgaggtggcgctgggctctgcaccgagcctggggcaggtctggaggcctggactgagttggcccgtctcaaacctgcagaggaaagaaaagaaaacagccattatgtgtcacacacacacacacagcaggaaggagcttgggaccactcagctggtgtggggtgagccccttggactttcactggaggcagctcctcactcgctcagctctttctgactcttctgccttcagtgtgttctttcttctcaatactcagactctggtgagtcacagcagcagcagttgttaaaaagcacaggttctacaatcctccttccacctg

SEQ ID NO: 861893 - DNA, 631 bp, Homo sapiens
caacgggacctgggggtcctgttaatctttttagccagactgaattccattctgttcttataaaatcccatgttctctctcacagttgggcttggcagatgccgtgtcccccactgggaactcctctgtctcctccacgtagtgctcctccctctcctggtctcagcttacacatcacttcttccaggaagctctccatcatcaccctcaggtctgagctaggtgactgtctttgtgctccacagttcactctgattctatgattatagctctgcacatactagagtgtatttgttggtgactggccctttatttgtttgtagactccactagacatatctttatacttggctaactgtgtccctggtgcttagcatggtgcttggtatttagtaggtacttggggtaagtgtttattaatakaggaagggagggaggaagggagggaggaaaggagggagggaggggggaaggagggagggaaggaggggaggagcctggggatgaaggacagaggggaagaggatgaacatgctacctttcaacctgcagcattcatgaagcctctaagaaccctgagaccttttggagtcatgaacttctctctggtgatgttcatatttgtcatctg

SEQ ID NO: 861894 - DNA, 642 bp, Homo sapiens
gccatttgaataattttctacctgctcacaggaagatgctacatctaaattgttttctactacatcccagcactgagcacagtgcatatcacatactataaacgaccaactagaagatgaggatttctcccaatcaaatattcctcagaaaacaaaaaatcagttccttcttttttgttttttttttaatttttgagatggagtctctctctgtcacccaggctggagtgcagtggcgtgatctcgactcattacaacctccacctcccaggtttaagcaatgcctcagcctcctgagtagctgggattacaggcacctgccactatgcctggctaatttttgcatttttagtagagacagagtttcmccgtgttggccaaactggtctcaaattcctggcctcaagtgatccgcccacctcagcctcccaaagtgctgggattacaggcgtgagccagtgtaccaagctgaaaatcactttctgtccaggttcttaaaacgtttttcacactgttaagcattctcttttctcccaatgtgctttctttttaaaaacaaaatagtttaagcaaattctttctcaattttttcaaccatcatgcaactccaagtggtatctcttcctttcctatttgtcaaca

SEQ ID NO: 861895 - DNA, 597 bp, Homo sapiens
gggagcctggctttctgtgctgaagtcctaactgttgtgctctatcaccagccagccagctgtcacgagggccacacctgcctggtgcacacatacatcccaggcttcaaccaaccaatggatggggctaaagaacagagagcccaacagtttgctgatggcacacacaggggtgtggtttcaactttccaccctctgggaagcaagcactgttgggtggtctggtggtctgtgggttggagcaggtgcagtgaccacttgcatccacctggaagtgctcacagccccacctgatgggatccaccgggaaggatcctgagaccaccaaattcaccatctgcttttttccagcctgtctgtgactgtggttggcccrgtggacccactatgctttggagctttatggtttggccactgtcatccctgatgactgaacctggttttcgttcctaactaatcttgcaatcttgggaaattggtttgcctctatggggcacagttccttcatctgtaatggaggaagtaattccaactctcctcttcaaaaagttattgcgaaacaaaactgaatctaaaagtaatttttttaaaaaaatt

SEQ ID NO: 861896 - DNA, 576 bp, Homo sapiens
aaggggtgggaaaagtaaggagacaggggcagggaaaaaggagagagagggggagagataaagacagagacttaggggcttagcaccacagtgacagaggaaaaacacaggaaggcagagacggaaaggggaaagggggcagggaggaagatgtgcaatggagcggaccacacagatgccatttggcagcaccttgcatgaaaagcctcccaacgaacttcgagaaaccatctctcttctctgcagccccagaatgccgccccgccatcaatggctggcaccaaaacctgcttacataatatgttctctgctgaaagctgcttccattcacaagtcaccactcgtcattgtgtaggtgcattaaaarggaagaaaaggaaaagaaagagaggaaaaagaaagaaaaatgcagctgaatgaactcactcagattatattgagagatgagaagatatttccccccctcgctctctaaataaatccttcatgaaccaaacatcattatgatgctgtcagatgagtttcctcttgttgattaattgcagggggtggtaaaaaacccagcttcctgaggca

SEQ ID NO: 861897 - DNA, 597 bp, Homo sapiens
ttctagaaactgcatctatatttagcttggttgccccacccctacccccccttcctgagctggggtataaatgccaaccaaccagaggatgacagggtccaggctcagagagcagctgaggcaatgggctctcatggaaacctgaagctcttgtttctcaaatccaaaccagctcacaggcaattagtattgggaggaaggcagggtakggtgtagaccttcaggacaaagcacagagccagggttgggcagtctggctgccctgactcctcgtgggcagagagtaaatgacagccacacatgtggaagtgcccttggaaggcaggagaacagggaagaacaggacctctgagccaagaggatctgtggcccagcaaacagacatgttgggccagacacacctgaaaggccagctctgggatctgagttccagagagcctctgggtctggcagttggagctggggagcaaactttctataccctgaacactgaccccacgctccagagcgtaatggtgtcctcttccttttcagtgttctcgggcttcatatgacaactcttaagcagaagcaagggcgccaaactttttttttacc

SEQ ID NO: 861898 - DNA, 496 bp, Homo sapiens
tcagagagcagctgaggcaatgggctctcatggaaacctgaagctcttgtttctcaaatccaaaccagctcacaggcaattagtattgggaggaaggcagggtagggtgtagaccttcaggacaaagcacagagccagggttgggcagtctggctgccctgactcctcgtgggcagagagtaaatgacagccacacatgtggaagtgcccttggaaggcagsagaacagggaagaacaggacctctgagccaagaggatctgtggcccagcaaacagacatgttgggccagacacacctgaaaggccagctctgggatctgagttccagagagcctctgggtctggcagttggagctggggagcaaactttctataccctgaacactgaccccacgctccagagcgtaatggtgtcctcttccttttcagtgttctcgggcttcatatgacaactcttaagcagaagcaagggcgccaaactttttttttaccccc

SEQ ID NO: 861899 - DNA, 538 bp, Homo sapiens
accagaggatgacagggtccaggctcagagagcagctgaggcaatgggctctcatggaaacctgaagctcttgtttctcaaatccaaaccagctcacaggcaattagtattgggaggaaggcagggtagggtgtagaccttcaggacaaagcacagagccagggttgggcagtctggctgccctgactcctcgtgggcagagagtaaatgacagccacacatgtggaagtgcccttggaaggcaggagaacagggaagaacaggacctctgagccaagaggatctgtggcccagcaaacagacatgttgggccagacacacctgaaaggccagctctgggatctgagttccagagagcctctgggtctggcagttggagctggggagcaaactttctatamcctgaacactgaccccacgctccagagcgtaatggtgtcctcttccttttcagtgttctcgggcttcatatgacaactcttaagcagaagcaagggcgccaaactttttttttacccccagtactttctcttttatt

SEQ ID NO: 861900 - DNA, 648 bp, Homo sapiens
ttgttacatggatatatcgtgtagtggtggagtctgggattttagtatatccataatctgaatagcgaacactatactcaataggtaatttttcacccctcacccccctaccagcctataatcttttgtagtttccagtttatattattccactctagatgtccgtgtgtaccctttgtttagtttcttcttataagcgagaacatgttgcatttaggtttctgtttccaagttacttcacttaggataatggcctatagttcctattcatgtaactgcaaaagacaggatttcatactttcttaggctgtgtagtgttctgtggtgtgtgtgtatatatgtgtgtatatatatgtatgtgtgtgtrtatatatatatatatatatatgcgtatatacacacatatatacatgtgcatatcacattttctttatccaatcatttactgatggacgcttaggttgattctttgctattgtaaatagtgctatgataaacatacaactgcaggtagctttttcatgtaacactttttgttgtttttgttgagtatatacccagtactaggattgcaggatccaatagttgtgttttaagttctttgagaaatctccatactgttttacataatgtttatattaacttaca

SEQ ID NO: 861901 - DNA, 678 bp, Homo sapiens
cagctaccatttattgaacacatactacatgcccagtattctgcatattctatctctagtcctcttaataatgtgataaggaatgtatgattaccctgatttctagtgatggagagatgaactcagagctgggtgtggtggctcacacctgtaatccaagcactttggggggctgaggcgggtggatcacctgaaatcaggagtttgagaccagcctggccaacatggtgaaacrcggtctctactaaaaatataaaaattagctgggcgtggtggtgtgcatctgtaatcccagccacttgggaggctgaagcaggagaatcactggaacccgggaagcaaaggctgcagtgagctgagattatgccattgcactccagcctgggtgacagagcgagactctgtttttttaaaaaaaaaaattagccaggtgtgttggcatgcacctgtaatcccagctactagggaggctgaggcaggagaatcgcttgaacccaggaggtggaggttgcagtgagctgagatcgtgccactgcactccagcctgggcaacagagtgagattctgtctcaaaaatacaaacaaacaaacaaaatgtactcaggctgtttcccagggttacacgactagtgatgccagcgctggaactccaaaccagttccatttgatttcaaagcc

SEQ ID NO: 861902 - DNA, 645 bp, Homo sapiens
aagcttttcacatttctctatcataatgaataccatattagattcatcttctttacttgtctggtttctctgaacacattttattagttgttgtatccctaatagctaccatggtgcctggctaagcacaagtgttcaattattatttaacgaaagaayaaactccaatccgtaatgatttgaatgatcttaccaaatgattaatgattatatacacctgtctgaatggagattttagtgtctagctagaggccctgacttatgcctattcaaaactacggtttaatcagtggtgaggaggaaggtatagcaagtaaatgttccgtttgtgaatggcatgaaactaaggacagtagcttcactggatgacagtgaggattcacaaagaatgaacataggctaagataatggtctgaatataatgagatgaaatttgaggaactgatatgaaggactgtcagtggattcaacaaaccacccagaaaacttttcagctggctaagcagaagtttctgagaaagactaggggtttttgatgattgcaagaccaacaaaagtcaacaccattatgtagctacgtgtcatcttagccattatcattatatatatatatgtgtatatatatatatatatatatgtgtgtgt

SEQ ID NO: 861903 - DNA, 645 bp, Homo sapiens
aagcttttcacatttctctatcataatgaataccatattagattcatcttctttacttgtctggtttctctgaacacattttattagttgttgtatccctaatagctaccatggtgcctggctaagcacaagtgttcaattattatttaacgaaagaacaaactccaatccgtaatgatttgaatgatcttaccaaatgattaatgattatatacacctgtctgaatggagattttagtgtctagctagaggccctgacttatgcctattcaaaactacggtttaatcagtggtgaggaggaaggtatagcaagtaaatgttccgtttgtgaatggcatgaaactaaggacagtagcttcactggatgacagtgaggattcacaaagaatgaacataggctaagataatggtctgaatataatgagatgaaatttgaggaactgatatgaaggacygtcagtggattcaacaaaccacccagaaaacttttcagctggctaagcagaagtttctgagaaagactaggggtttttgatgattgcaagaccaacaaaagtcaacaccattatgtagctacgtgtcatcttagccattatcattatatatatatatgtgtatatatatatatatatatatgtgtgtgt

SEQ ID NO: 861904 - DNA, 503 bp, Homo sapiens
ttcagcagaagcatggaggtggctgcggaggtatgccttactagaattttaaaaatataaagtgtgaaaaactattttttcctcagaactctctaaatgaaaagccagatctcatatcttgggttcctcaaccaggaaatgtatactatatgtacactaaaataatgggcacaagcattgtacagacctgtttttaaactcagttacatttgacaactattgacttaattggcaagtacatgcctctgatataattctaaagtgtgatgtgggtctgtttggtaaccctaaaatgccttaactctaarcagggaccttgtttgaaggggcaaagtaacactataataaaagccccatggactgtgaatcttaagtgtgtatcctgagtctggttatatttttaagtagcagcatgaccctatcaaccaattatcctctcagtttacttgcatgtaaaattatcacattggatgagaagatttgctctggttttataaactatg

SEQ ID NO: 861905 - DNA, 644 bp, Homo sapiens
ccttataatgaagcaagactgtagacatttttttttaaaagggaagctagcagagatcatgaaggaactgtgtataagaggacaggcacagggaaaacggacgtagtgaaagacaaatgtggttgatttcaccatgttgtcttggagagtcttaaaggattttttagtaaaggccttcaatctgtttcaggtcataggcccctttgagaatttgatgaaagttatcaaattcttccctttgggggaggaaagtcctcaaatgccttattactttcctctccaaaagggaaaatgtacatgcacacaacattttgctatcagtttagagtaattatagaacattgaatccctccacaaatcactactgtgcagagaaatattagtatgtttgagactacgagaaagaaakaacagggatacaccagaaggaagttctgttctgaatactatctagtttttctttcacttagagaaagtatatctcagttatgatgacgttaatgaagcttaaatgaataataaatacagttcagcatatctaacactacattcacaaaggctttttcatgaagaaaaaaaaggtaattatagttggagttgcattaggaggaccaaagagatatttcacgagtgagtaggctgag

SEQ ID NO: 861906 - DNA, 644 bp, Homo sapiens
ccttataatgaagcaagactgtagacatttttttttaaaagggaagctagcagagatcatgaaggaactgtgtataagaggacaggcacagggaaaacggacgtagtgaaagacaaatgtggttgatttcaccatgttgtcttggagagtcttaaaggattttttagtaaaggccttcaatctgtttcaggtcataggcccctttgagaatttgatgaaagttatcaaattcttccctttgggggaggaaagtcctcaaatgccttattactttcctctccaaaagggaaaatgtacatgcacacaacattttgctatcagtttagagtaattatagaacattgaatccctccacaaatcactactgtgcagagaaatattagtatgtttgagactacgagaaagaaataacagggatacaccagaaggaagttctgttctgaatactatctagyttttctttcacttagagaaagtatatctcagttatgatgacgttaatgaagcttaaatgaataataaatacagttcagcatatctaacactacattcacaaaggctttttcatgaagaaaaaaaaggtaattatagttggagttgcattaggaggaccaaagagatatttcacgagtgagtaggctgag

SEQ ID NO: 861907 - DNA, 581 bp, Homo sapiens
tcatccagtgtacacagaacattcttcaggataattcatatgttaggctaaaaaacaagtcttaacaaatttaagaagattgagatcatatcaagtacctttcatgaccacagaagactgaatcatggaaaaatagaaaatataaacaaatgaataataagcagagagtttgaaacagttatcaaagatctcacatcaaagaaaagccaaggacatgatggctgagctgctaaactctagcaaacgtttaaagaagaactaataccaatgcttcttaaactcttcagaaaacaaaaaatgaaaaggaggtaaaatttccaaacactttttacaaggccagcattaccttgagaagaaagccaaacaaagatactacaagaatsaccatagacataaaaatcctcaaaaatattagcaaactaaattcaaaaacatattaaaagaataattcaccatcatcaagtgggatttataccttggattcaaggatggttcaacatatgcaaatcaatcaatgtgatacaccacattaatagaatgaaggacaaaaaccatataattacgtcaatagatggaggaaa

SEQ ID NO: 861908 - DNA, 335 bp, Homo sapiens
acagaatacggagcccaggaataaatctacacatttactgtcaattgattttcaataaagacgccaaggagaaacaatgaggaaaggacagtctatttaataaagggcattgggaaaactagatatccatatgcagcataatgaaattagaccctcatctcacaccrtatgcaaaaataaactcaaattcattaaagacttaaatgtaagacctgaagctgtaaaactagtacaagaaaacataagtgaaaagctccatgacattggcctgggcaaagatttttttacatgaccccgaaagcacaggctacaaaagcaaaaatagacaaacagga

SEQ ID NO: 861909 - DNA, 654 bp, Homo sapiens
ggacccacaagggcaaagagaggatgggaggcaggaaccatggccaggggttctgtgcagtttgacctgccactgcgtctcagcagcagggggcagtgaagactgctgatacctggaggcctgagcatcctctgtactggcagccaccaggctacagcaccaacgatgccagcatctgaacctcaagccacaaggagcccagaggccagccggctcctcacccatgagggcccagagttcaaacgggaacaagacatgtgtggctcatggaaaatgatgagattggaagtttcattagcaaaatgtgaaggaaggccygaagctgttctatgtattgaaacccccaactagtccagccagctagcttctcagaggggctgacccgcctactcagtgtcccacatcaagttggcagcagcagaatgggcatcagaggtcaggctgtgggctctttgacccaaatccccatccctgaagccagcagagcccctgggtggggctctgcattctgactccctagaggaccaggtccaaactttccagttctgagccatttccttcaccgagacagcagtcagcagagcctctgggggctcactgcacaaagcccagggataccagagccccaccaccagtctggtgcagagccaagga

SEQ ID NO: 861910 - DNA, 654 bp, Homo sapiens
ggacccacaagggcaaagagaggatgggaggcaggaaccatggccaggggttctgtgcagtttgacctgccactgcgtctcagcagcagggggcagtgaagactgctgatacctggaggcctgagcatcctctgtactggcagccaccaggctacagcaccaacgatgccagcatctgaacctcaagccacaaggagcccagaggccagccggctcctcacccatgagggcccagagttcaaacgggaacaagacatgtgtggctcatggaaaatgatgagattggaagtttcattagcaaaatgtgaaggaaggcccgaagctgttctatgtattgaaacccccaactagtccagccagctagcttctcagaggggctgacccgcctactcagtgtcccacatcaagttggcagcagcagaatgggcatcagaggtcaggctgtgggctctttgacccaaatccccatccctgaagccwgcagagcccctgggtggggctctgcattctgactccctagaggaccaggtccaaactttccagttctgagccatttccttcaccgagacagcagtcagcagagcctctgggggctcactgcacaaagcccagggataccagagccccaccaccagtctggtgcagagccaagga

SEQ ID NO: 861911 - DNA, 614 bp, Homo sapiens
tttatgagggagcaaacctaattgtacagcaggttgaaaggcttgtttagttccacagtgttccccatcatcctgaagcagctggattgatagaattgtgaatggccttacagggatggggcaaagttctccagaaggctgtgtatcctctgaatcactgtccaatatatggtactgcttcctctcatagccaggattcacaggtccaggaatcaagtggtggaagtggaagtggcaccactcaccatcacccctagtaacctactagaagaatttttgcttcctgttcccatgacattacgttctgctggcctagaggtcttaattccagagggaggaatgctgccaccacgagacacaacaacaattccattaaactggaagttaagattgctacctggccactctgggctcctcctacctctaagtcaacaggctaagaagggagttacagtgtytgctggggtaactgaccccgactaccgagatgaaaccagtctactactccacaatggaggtagggaatagtatgcatggaataaaggagaccccttagggcatctcttggtattaccatgccctgtgattaaggtcaattggaaactacaacagcc

SEQ ID NO: 861912 - DNA, 671 bp, Homo sapiens
atgtaataggttagtgctaaaagggaagggcctatggacttcaaaccaggagattggggagccatggatctgccagaattctgatgtagtatagtggaaggagaacttaagagtcaatcagacttaactatagactgtctctctgccacttactaatgttataacctctctgagataaagaactaacataggtatggtacctagcacattacctgacataaaatagctgctcattaaaggtcagttctttctctgggccttggttccatcatttgtcaaataatagaggcagactaggatactacatgatctttaaggatccattccatctctaaaatagaagctgaagacaggtaaaacaataaatctcataaagattataggtaatactacagtcttgaaaattaggtcaggcagtataacataaccagaagactagagagcattctcaatataaaataaggccaggtrcggtgcggtggctcactcccagcactctgggaggcccatgtgggtggattgcttgagtccaggagtttgagaccagcctggccaacatgctgaaacctcatctctactaaaaagacacacacacaaaaatagccaagtctggtggcacgtgtctgtagttccagctactcgggaggctgaagtgggagaatcacctgagc

SEQ ID NO: 861913 - DNA, 671 bp, Homo sapiens
atgtaataggttagtgctaaaagggaagggcctatggacttcaaaccaggagattggggagccatggatctgccagaattctgatgtagtatagtggaaggagaacttaagagtcaatcagacttaactatagactgtctctctgccacttactaatgttataacctctctgagataaagaactaacataggtatggtacctagcacattacctgacataaaatagctgctcattaaaggtcagttctttctctgggccttggttccatcatttgtcaaataatagaggcagactaggatactacatgatctttaaggatccattccatctctaaaatagaagctgaagacaggtaaaacaataaatctcataaagattataggtaatactacagtcttgaaaattaggtcaggcagtataacataaccagaagactagagagcattctcaatataaaataaggccaggtgmggtgcggtggctcactcccagcactctgggaggcccatgtgggtggattgcttgagtccaggagtttgagaccagcctggccaacatgctgaaacctcatctctactaaaaagacacacacacaaaaatagccaagtctggtggcacgtgtctgtagttccagctactcgggaggctgaagtgggagaatcacctgagc

SEQ ID NO: 861914 - DNA, 636 bp, Homo sapiens
ttgtccttgggcttgcaaagtattctccagagtcaagcaaatgctcatataattaagccaccctttctgaggtaatcactttttaaccaactattttttataccaactacattcctttgggtaataatgagaggtctggtattataccctcatactgtatagtgttttaattaaaagaggtatcactgaatacataaatattttgcgtctgtcagaatctataatcatgcaaatggaaaagagctgggaaagaaaacacacatcttttctgtttatatttcaattaggatgtgaaacttcattgctaaaagtaagatttcggactttctaagagaaattaagacgtgcctttttttagttctaagttgaattgaygtctaccaacattaacatttaataattccatgttatacatatatgttgcatttgaacctacaaaatatgactaaactaagtcacccatttttagatttataacaatatggtgttataaatcacaatgttttattgcaatatttcaatgtggcatggtgaattagacatttccaaattgataagttcttctggagttgaaaaaacttcttaaaagatacatgcacacttttcatgtcatcaggtcattctgtaacatgtaat

SEQ ID NO: 861915 - DNA, 642 bp, Homo sapiens
agagccaaacccattggtatgctgccttcaagaggcccagctcatgtgcaaagacacacataggctcaaataaaggtatggaggaaaatttaccaagcaaatggaaaatagaaaaaagcaggggttgcaatcctagtctctaataaaatagactttaaaccaatatggatttaaaaaagacaaagaagggcattacataatggtaaaagtttcaattcaaaagctaactatcctaaatatatatgaacccaatataggaacacccagrttcataaagcaagtgcttagagatgtaaaaagaaacttagcctcccacacaataatagtgagggacattaacatgtactgacaatattagacatgtcatcaagacagaaaattaacaaagatattcaggacctgagctcagctctggatcaagtggacctaatagaaatctacagaaatctccacccaaattcaacagaatatacattcttctcgttgccacatggcacttactctaaaattgatcacataataggaagtaatacactcctcagcaaatgaaaagaactgaaataataataaacagtctctcagcacaatcaaattagaactcaagattatgaaattcactcaaaaccacacaactacatggaa

SEQ ID NO: 861916 - DNA, 621 bp, Homo sapiens
taagaatgtgcagagatcctatacaagtttgtgtcaatgagtacacatttagtggaatattccactaaattctaaggtccaacagcatcagcatcacctggtaatttgttaaaagtgcaggacctgaggcccacccagacctactgaactggaatcttcattttaacaagatccccaagtgaccratttgcacagtaaggtatgaaaagcccagatctgcaacatcgtttttaattgttgacaattacaccactgtatgattgggccatgaggctagagtttagtcatttgattctaactagtgttaggagaatttatccatctagatggccaggagccatttactaggaaaccttgttacagtcaatctcattggccttgggtgatagagacaattcctgctgggctgaggttgtaggaaaactgaagtctgggtgtaaggctatactggagaggcatctcacaaataactgttctcagaatggttttaaaaaaaatgtttactatgttgtgataacagatacttccaaacaaaaggaacaggaagttgttgtcttgtctgtctgccgttcaagaggactgaatacgttccattaaattcgcctgcaaacttttcctgaa

SEQ ID NO: 861917 - DNA, 600 bp, Homo sapiens
atcgtatgacttctatattttaatatagcaatgtaatgaattataatatcagatccctgatattaaaatatccttgcatttcaaggataatgcatgctttgtcataatgtattatcatttcattttattgctagtttcaacttaaaaatatgatttattatctttgtgtccttgttcgtaaatgtttcatattcttttaaagartttatataaataataattattctcaacttgtgtttcagtagaatttactttaaaaatgatttcttgtcttctttaggaatagggcttatattttcagttttttttatggttattagtctgtagtttttctatttctttgaatctattttaattatctgtattttcatagaaaatcatgtatatcttatttaaacatagtggtataaacttgcacatagttttgtcatttttaaaaggtcttattggtgttcatattcatttttaatgctatttactagggtcatccatcttatcttaatcaagctgttttatctgatcattttgaagtatcagattttgcttctattgttcaaatacactttttatgttctgttttatttatttttatctttaagc

SEQ ID NO: 861918 - DNA, 600 bp, Homo sapiens
atcgtatgacttctatattttaatatagcaatgtaatgaattataatatcagatccctgatattaaaatatccttgcatttcaaggataatgcatgctttgtcataatgtattatcatttcattttattgctagtttcaacttaaaaatatgatttattatctttgtgtccttgttcgtaaatgtttcatattcttttaaagaatttatataaataataattattctcaacttgtgtttcagtagaatttactttaaaaatgatttcttgtcttctttaggaatagggcttatattttcagttttttttatggttattagtctgtagtttttctatttctttgaatctattttaattatctgtattttcatagaaaatcaygtatatcttatttaaacatagtggtataaacttgcacatagttttgtcatttttaaaaggtcttattggtgttcatattcatttttaatgctatttactagggtcatccatcttatcttaatcaagctgttttatctgatcattttgaagtatcagattttgcttctattgttcaaatacactttttatgttctgttttatttatttttatctttaagc

SEQ ID NO: 861919 - DNA, 576 bp, Homo sapiens
ttggagaaattcaaagatcaggaatgtggagtacagggtttcaggcataaaggttgaatagagacacccactcccactgtgttccattccccaaacacaaatctcttgaggccacaaagcactgaaatgttgtcaygacaggtcatacctctgaaaatcacaaagtacaataaatttgtcttgcataaatgttctactcatgtcttcatcagcaatgcagttggccaccaaaggaatggagagcattgagccatgcctagatagtgaggagatgctagtaaaatagtaacaaagcatataattccccagtcaaatggaagtaaaaatagcaattaagtccaactaagttaacacaaaacatgtttttaatgtgcatattgattggtaatacagatcctgtcttggtatccaaggctgaaggtggggttaaaaaaaaaaacaaaaaactggagtatgttctttcttcccaagtctttgcttttccatgcctcaaagcaagagaggggtgcactcccttccactcaggaggtgggaaggcaagtgtagctgataggtttccaggtaactccctagcta

SEQ ID NO: 861920 - DNA, 663 bp, Homo sapiens
tatttctcactcaaattctaacagtagtgaccaaaatagatgtatagacctcaacggtctgatatggtagccactagagacttaatggccatttaagttaaaattcattaaaattaaataaaatttaaaactcatctctttatttgcacttactacattcaggggctcaaaaaccacatgtggctagtggctgccatattagacagagggataaaggacattccacagaaagctctagttagtcaggaagtycttctgctgacagcactggttaacaaggttagcaaaagggttccaatgttaatggggggaaagctcagaaaaatttcccaaattagcattcctttgatcaatatcttcaaatgcatctatatgttttacacacatacacacacaccacacagctgatcttggttatcatgaataatcatatcttcatatctttcatagccgctgttttaatattagcgaaacgaaccctgaatctgctagttgagggagactataatgactaattgttaataataagtttaacgaaaataatcctcactattgtaatagatttttcattgaggaggatacacttttgaatgcatgatactttatttaaacacacatatatacaatgatgacaaaggaaaacattgcagaattcagcacagt

SEQ ID NO: 861921 - DNA, 663 bp, Homo sapiens
tatttctcactcaaattctaacagtagtgaccaaaatagatgtatagacctcaacggtctgatatggtagccactagagacttaatggccatttaagttaaaattcattaaaattaaataaaatttaaaactcatctctttatttgcacttactacattcaggggctcaaaaaccacatgtggctagtggctgccatattagacagagggataaaggacattccacagaaagctctagttagtcaggaagttcttctgctgacagcmctggttaacaaggttagcaaaagggttccaatgttaatggggggaaagctcagaaaaatttcccaaattagcattcctttgatcaatatcttcaaatgcatctatatgttttacacacatacacacacaccacacagctgatcttggttatcatgaataatcatatcttcatatctttcatagccgctgttttaatattagcgaaacgaaccctgaatctgctagttgagggagactataatgactaattgttaataataagtttaacgaaaataatcctcactattgtaatagatttttcattgaggaggatacacttttgaatgcatgatactttatttaaacacacatatatacaatgatgacaaaggaaaacattgcagaattcagcacagt

SEQ ID NO: 861922 - DNA, 600 bp, Homo sapiens
aactgtggcaattacaaagattatttggaccaaaattacctcaaaatctacctgaaacatccatataattgcaggaaaaaatatattttttagatttgaatatattctgataatagctgcaattctctcctccactttgcatgtgcaggcacaaactgaagattctgaaatagcacccatagtgctgagatgagactggctttgtgttattctgaccagttacagtttgtcttctattattattagcacgtgtcccatacttctagttttaccaacccatacaatagaagaatccttattttactgagaataaaacattaaaggtgactgtgrgaatgacaagttcattttgccacattgaaggcagactttctaggaagatattgacttcctgttgtgtagatgacacaaatgctgcagaaagcaacctgcacctcaggtgacagcactgatgagcctgtaggcttattgaagagtcttgtcttctcttctggtaagttggatttgaagaagtttcaggcttgatatgaggatgtatcatttcaattttaaagactggtgtggagagtgtggactggatgtccttcaagacccactgaa

SEQ ID NO: 861923 - DNA, 664 bp, Homo sapiens
tttcaattttaaagactggtgtggagagtgtggactggatgtccttcaagacccactgaaaggcacttctagactcctaggactccagacaccaccactttcccaacctcatttgctgatagaattcagatatgatttagatcagatccagttgcttgggactttgattcaaaattgaattataacactaatgaaatgtcccattttctccatttataccattaagcattttaaaaaagtttttaacaactctgagttacgaagggcataagttatataaggagagaaacaggctgtgggcatcctcttcctagcccaaactgaggcagaggcagtgtggcctggagcaggtggccctggtggaaggttccagattctgcaacttcctgactgaggcaggagcggcagtgttcttggcagcctggttctgcrgtgaggtttccggagttgtttctggaagctcaacctagagcctgcgtctttgccacccacccctacagactctaccctttaataagtctctttctgcttcaagtaactagaatagattccgaggcctgaaactaagatctccgagcaacagcaggaccatgggagaaacactgttagattggttctcttgagtctcagagatggaaaacacaggcctctataaggcattacg

SEQ ID NO: 861924 - DNA, 585 bp, Homo sapiens
atctactgacataatcatgtggtttttctatttcaccttgttaatgtgtctgattacgttgattcgttctcaaattttaacactctcgcattcctggactaaaagtcacttagtcacgatgtagtaaccattttatatatcacaggatttaatttactgtttttacaaaaattcttatatatatttcatgagagagcttggcaagtaatttccttttgagtaatgttcttttcagaatttaatatcaaagttttgctggcatcataaaatatgttgggaagtgtttcttctttttcttttatcttgaagaattttaggaagaatccactagtgaagtcatctgggctgaggaaattttttgtggaaaagtgttaatttatacgttcaattactttactagatatagaactatttaagtttygtatttctgtttgtcaattttggtaaggtctatttttataggaattttctcattttccctacatttccaaatttattggcataaagtagttcctcatatctgtttttttttttttttttgagatggggtctggctctgttgcccaggctggagtgcaatggtgt

SEQ ID NO: 861925 - DNA, 585 bp, Homo sapiens
tgccagcaccaagaatcagcaagtgccccagaagggaaagcaacttccaggatatctgcctacttgggctgtcccctttcccttgcttgccttagcagctattcaaatgccttcaacaatgttttatgtgtattgtccagcttttctggttgttttgacgggagggacagtctgttagaagctactctatcatagccaggagtgaaaattcttctcaaatatatttactctgtcatttytttgatggacatttaattttttccctagtctccacctgttacaaaaattgtagcaagaagtaagtttggacatctgtctttgctgatgtgtgcatgtggctgttgaattcctggaaaagtagtttcttggtcaaagaaagcatgcatttgaatgttgatagttcttaccaaattttcctcccaagagatgtatcaataatgtgtgagagagtgtgtttccccaaagagggtgtgtgcttttatagaagaggtacaggagtttcttcagaggtacctgaagataggaagatgaatgtgtctgcttaaattcttggtccccccatctggcctcaggacaagatggaag

SEQ ID NO: 861926 - DNA, 585 bp, Homo sapiens
tgccagcaccaagaatcagcaagtgccccagaagggaaagcaacttccaggatatctgcctacttgggctgtcccctttcccttgcttgccttagcagctattcaaatgccttcaacaatgttttatgtgtattgtccagcttttctggttgttttgacgggagggacagtctgttagaagctactctatcatagccaggagtgaaaattcttctcaaatatatttactctgtcatttttttgatggacatttaattttttccctagtctccacctgttacaaaaattgtagcaagaagtaagtttggacatctgtctttgctgatgtgtgcatgtggctgttgaattcctggaaaagtagtttcttggtcaaagaaagcaygcatttgaatgttgatagttcttaccaaattttcctcccaagagatgtatcaataatgtgtgagagagtgtgtttccccaaagagggtgtgtgcttttatagaagaggtacaggagtttcttcagaggtacctgaagataggaagatgaatgtgtctgcttaaattcttggtccccccatctggcctcaggacaagatggaag

SEQ ID NO: 861927 - DNA, 585 bp, Homo sapiens
tgccagcaccaagaatcagcaagtgccccagaagggaaagcaacttccaggatatctgcctacttgggctgtcccctttcccttgcttgccttagcagctattcaaatgccttcaacaatgttttatgtgtattgtccagcttttctggttgttttgacgggagggacagtctgttagaagctactctatcatagccaggagtgaaaattcttctcaaatatatttactctgtcatttttttgatggacatttaattttttccctagtctccacctgttacaaaaattgtagcaagaagtaagtttggacatctgtctttgctgatgtgtgcatgtggctgttgaattcctggaaaagtagtttcttggtcaaagaaagcatgcatttgaatgttgayagttcttaccaaattttcctcccaagagatgtatcaataatgtgtgagagagtgtgtttccccaaagagggtgtgtgcttttatagaagaggtacaggagtttcttcagaggtacctgaagataggaagatgaatgtgtctgcttaaattcttggtccccccatctggcctcaggacaagatggaag

SEQ ID NO: 861928 - DNA, 578 bp, Homo sapiens
catctcaactcaaggctggaaggatgaggagtcctgaagtgggagctcaacaccttgttctgtgaggagaaaagaagaaattcttttttgttgttttttttgtggtggtttgtttttttaatttttattttaggttccaaggtacatgtgcaggaagtgcaggttggttatataagtaaacatgtgccatagtggtttgttgcatctatcaactcatcacytaagtattcagccccgcatgcatcagctatttttcctaatgctctccctccccacaccctaccccttgacaggcccctgtgtgtgatgttcccctccctctatccatgcattctcattgttcagctctcacttagaagtgagtacatgcgatgtttggttttctgttcctgttagtttgctgaggataatggctttgagctccatccatgtccctgcaaaggacatgatctcgttcctttttatgactgcagagtattccatggtgtacatgtaccacattttctttatccagtctatcattgatgggcatttgggttgattccatgactttcctattgtgaatagagctgcagtga

SEQ ID NO: 861929 - DNA, 578 bp, Homo sapiens
catctcaactcaaggctggaaggatgaggagtcctgaagtgggagctcaacaccttgttctgtgaggagaaaagaagaaattcttttttgttgttttttttgtggtggtttgtttttttaatttttattttaggttccaaggtacatgtgcaggaagtgcaggttggttatataagtaaacatgtgccatagtggtttgttgcatctatcaactcatcacctaagtattcagccccgcatgcatcagctatttttcctaatgctctccctccccacaccytaccccttgacaggcccctgtgtgtgatgttcccctccctctatccatgcattctcattgttcagctctcacttagaagtgagtacatgcgatgtttggttttctgttcctgttagtttgctgaggataatggctttgagctccatccatgtccctgcaaaggacatgatctcgttcctttttatgactgcagagtattccatggtgtacatgtaccacattttctttatccagtctatcattgatgggcatttgggttgattccatgactttcctattgtgaatagagctgcagtga

SEQ ID NO: 861930 - DNA, 604 bp, Homo sapiens
acgcaacttcttggcctcgctccagaacttttgagtcagagcctagaaggagagtgatgaggggggcgtgaatctatgtttgaagacaaattctctgagtgattcttatacatgccaaaatttgagaagcataatagcacaggattattcagtccatgacaaagaaaaaatcaccttaatgacatcttctaaatatgctagaggagaattagactatgatatattaatataaattagaataattrtttaacaataaaaagacaaagtatccaattttctaaaaaatgggaaaagtacttgaatagacacttctccaaagaatatatacaaatggccaacaagcacatgaaaagatgctcaatatcattaattttatgaaatatcacttaccatccactaggatggctagaatcaaaaagtcagataggctagacacagtggctcatccgtataatcccaacactttgagaggccaaggcgggaggattgcttgagtccaggagtttgagaccagcctgggcaacatagtgaaagcctgtctctacaaaagaaataatagtaatcttaaaaaatagccaggcatagtgacatgtgactgtagtcc

SEQ ID NO: 861931 - DNA, 641 bp, Homo sapiens
agttgcaagtacagctcagaagagtcccaattcatgggataaggtactaggtgccacctcctcatggaaggagtagcattttaattcaccacatctttcaaagatgtggtccactggtcttttattccctcctcctgacactgaattgtatctttccatagtcatgctttctcactcttctttacttggatttccgtgtgcagcattttcttggatagaaaagaaccagtaaagatcatctgctctgtgacctcctacccaaaagagagaaagatgctaaataaatttctctcttaaaagataagtggaaacaattaagtgataaagtacaatttgctgtttggtaccagctcccataaacccaattgagaaatataatctggaaagttgtaaatataattctgtttcttcygtattttttgttgttgttgtagggagcatggtgttcctcctaaccaaaaacatttacgtgatctatttgttaattgttcagaagcagctgatccataactcatgaagacaatgatagcaattttcatattttttattatgattaaagtttcagaaacaagtttgagttcttacagtgtacagcaatatgtaagactattttacaaaatgtgctcatggaaagtaaagaa

SEQ ID NO: 861932 - DNA, 586 bp, Homo sapiens
gggatttacaggcgtgagacaccacacctggcctttactataactttataagtcttcttatgtagtagagcaaatcgctctgcattgttcctcttcttaaaaaagtgtcttgattgccaggtgtggtaactcatgcctgaaatctcagctactggggaggctgaggcagaargatcccttgagctcacgagttccaggctgcagtgagcaaggatcacgacattgcatctagcctgggcaacacagcaagactccatcccttgaaacaagtgtcttggttattcttgacacttctgcatttccataaaaatttaacaatcaattgatcaaatttttttaaagttagaatttttattggaattacatcaaatctacagatcaatttcagaagaatcaacccccttataatactgagtcatctaatacatgaatagtatatataccatcatttaaaaaattcttcttcaatttctttcaacacaacttatagttttcagtgtaaagtcttgcccatattttgccaaattattcctagaatttgaaaatatcaaattctggaatttgatattttctgctgccactgtaa

SEQ ID NO: 861933 - DNA, 602 bp, Homo sapiens
atccatgcaatggaatactatgcaacaacaaaaacatactacaatatagctgaatctcaataaaatcatgctgcatgaaagaagccaaacaaataagaatatataatatatgctaaatcattcaatttgtacaaaattctgggagctacwaactaccatatagtaacaaaaagcagatcagtgtttgcctgggaatgggggagggagatagtggagacagtaattacaaagctgtacaaggaaacttttggcagtgatgaatatgttcactgattgattattgtgatgatttcaggggtgtactcatatgtcaaaacatatcaaattgtatactttcaagacgtgttgtttattgtatgccagctatacctcagtaaagctatttaagagaaattatctcagagaaaacttctttggcctccctcttccctgataaagcagcaatgcaccatgggcctcaagtaacactatatgttctttcacggcatgccaataatgcaaggccctgggtttgctcttgtatttggcaagaaatcttgagagatatggtaacatcatcctgcagacagatagcagactcatttactattcactacaaaagt

SEQ ID NO: 861934 - DNA, 662 bp, Homo sapiens
catggaatccatatatattcaatcaatttttccagtattcatcataagttttctaaggcaaagtctctgaatagccagccatagatgttatttctagcttcaggattggtatatttgagtggattttaactcttttggagtttaactaagaacacattccattctcataaactagactatgtgaataagccagtggttttcatttctcaggtggggaggttggctcctaggggacatagaacaatgtctggagtcatttttgtctgtcacagcctggggtgaggtgctagtggtatctgagggtaggggctacacgtccgacgatatacaggacagcctccatcagcaaacaactatccagacaaaaatgtcaacagtgccattggacaaacmctgaacaaatcaaattgagagtgcacttgatctcggggactgaggtttgcttgccttctggacataatcacacacccatgatgccaaaaagaacaatgaccaactgatgccagacagaccctgcagtccaacaaatcaggttgcccatgactggcaaggcgactattgccactccctgccagattgtggcagtcagtttgtcagaaaatcagacagaaatgtaccagggactttttgtcacctgggcataaagaaacaccttgaaagac

SEQ ID NO: 861935 - DNA, 578 bp, Homo sapiens
tgcctgccatcattgttcagagtggactgaaacttatttgtactcataatcctctgaaaagtagaaaaataatagctagacaatgaaggctatatatatcttgcccactgcctcatttacttttttttaatactagatttggggtattagatattgtaaccctaaatttaatccttaagatgatttagtaatgagacatgtatgagttctaaaggaagacaatttgaggcagaagctattgttttcataaatactttcacatgttatacatacacacacagacacacatatggagcaacagtaaaagaactacctgtaaacaatactgattttgtctgtctgaagcatttttaatttttccccaaatagaaatatttgttttccaaggaggcctacatctttgctgggaaaagaagtctatcactggaactttcckaagagtctgaaagacagcaaaaatgttgtggcaaagagaaaaaaaaaagaggccatttgtaaagaagaactatttgtatcgaatatcatgagaaaataagtgcatcatgacaattttgtacatcttctatgatttgattgtc

SEQ ID NO: 861936 - DNA, 605 bp, Homo sapiens
aaaggacaatcctgaacgttacggattttattaaaaccatatgttattttttgttgctaatcatttgacacttaatcgaaacagaataagttactgtggaaaaaaggatgatccaactcctgaggattgccgcctgtgtgtctttaattgattatctttgatagttagagttatttttcagatttttccccctcatactggattgtgatgctctgatatgagcatgcaatgactgatacagaaataggctggagcttcggtgtgtgcttttgctatacagcttacagttctaatgcctgatgtagagatgatgaatttctcctttttaaacctatcttctgtttactccttttgcattatgaaggccctcttcaatgatgtatgtttctgatggaatcagaaaatttcacactagaaaagtgtacctaacttgattcagtgtgagctcttgggacagggagkggagccaggggtagagcttaaagaagctggctctgtaagagttgtatatcaaagtaccttttgctacaaggtgcatatagaagtctaagataagaaatgtaccctctatactttatttttcatgcccctatcatgtttggtgt

SEQ ID NO: 861937 - DNA, 683 bp, Homo sapiens
ttttttttttttttttgagacagagtctctctatgtcacccaggctggggtgcagtggcatgatcttggctcactgcaacctccacctcccaggttcaagtgattctcctgcctcagcctcccaagcttgaccacctttgacacctccctgaagagtatggagtgaagggatccagggccacagcttaggaacttgctgaagttgattacgtagctattgattatgtagctctcactacactttccagattgagaagttaacacattattgggcaatgctgtttttttctttagtatacaaartgaatccttctttccctcaaaagcttgaattccagactgctaaaatttcaatttgagacatttaatagtatccatagaaaaataaactctaaattgacaagtttagttatgcttatccatatatcaacattctaagaagaaatggagaccaatttaaagcgtacatctgcctttaaatattaaaaatacaagattgcttcacttgggtgtctccagccaaaatgcagttaatcaatattccatagaacggagcattgtcggaggtgactgctgtcctttctttccctggtatgtacatcattcctgggccacacttaaggaacagcgtctttttctaggggaaaagaaagggtagttttttaagactgggtctaggaatg

SEQ ID NO: 861938 - DNA, 612 bp, Homo sapiens
agattcttaattttaatgattagtagactaatttacacacaatggtaatttttaaaaagtcatgtgatctgcaggcacattaacatctgagcctgtggcccacaaataaacctgagatcacctggcttgcaagatacctttaggtctatgggcagaaggtgctctgaattagtaatttagtgcaagagtacttgagcttgctttctgcatttgtagacacatgcttaaaacatcagagtggttagaacccttagaagccatctcttgctttgtatgtgaagaccttgagcatgaatgggccaatgtcaggccgggtgtggtggctcacgcctgtaattccaccactctgagttgggtggattgcttgaggccaggagttcgagactagcctggttaacatggcaraatcccatctctgctaaaaatacaaaaattagccaggtgtggtggcatgtgcctgtaatcctggcttcttgggaggctgaggcacgagaattacttgaacccaggaggcggaggttgtagtgagctgagatcgcaccactgcaccagcctgtgcgacagagtgagactctgtctccaagaaaataaagaataggccaatgtcaatga

SEQ ID NO: 861939 - DNA, 606 bp, Homo sapiens
aaaagaaaaaaatatgggcattgcataaggataaagtgttaaattaaacaagaagatctaactatcctaagtatatatgcaccaaacacaggaacacccagattcataaagcaagtttatggagaccttcaaacagacttagactcccacacaatagtagtgggagactttaataccccrtgacaatattagacagatcattgagacaggaaattaacaaagatattcaagatctaactcagcactaaatcaaatggccctgatagatatctacaggactgtcctacttgaaaccatacaattacatggtaattgaatgacctgctcctgaatgacttttgggtaaataataaaattaaggcagaaatcaagaagttttttgaactaatgagaacaaagatacaacataccagaatctttgggacacagctaaggcagtgttaagagggaaatttatagcactaaatcccacatcaaaaagttagaaagagctcacgttaacaatctaacctcacaactacaggaactagagaactgagagcagaaaaacctgaaagctagcagaagacaagaaataaccaaaattagagctgaactgaaggagat

SEQ ID NO: 861940 - DNA, 588 bp, Homo sapiens
tgtctccagaagtctttcactaaaggaaatgttgaaaagcatctttctaggagaaggaaagattccttctgaagaggaatggtttgaagatgggtgtctggagatgcagaaagaaacaaagaatgataaaaattgaatatgtctgartgaatctaaatgatttgcaactgcataaaataaaaataatgtattgtggtgtttaaaagatataacaattaaaatacaaataatagcagagagttatataagtgttttataaaatcattgcattatcccacatgaaacaaaaacaccaattaatattaaatttttgataggttgtaatgcatgccataatctctaggatgaatattaaaggaatgacttaaaaatcatataaaactcccaattaatagaggggcaagtgtaatatagaaataatcaaaaagagggcaagaaaggagggacaaggaaatgtaaaataggcaggaaaatagcacctaataagacggtaaatttagaagaaaatatatcattctttacattaagtaatttgttctgtgtaataaggagtctgactccactttctgatgtttgctggcagttttt

SEQ ID NO: 861941 - DNA, 589 bp, Homo sapiens
ttaagtctttaattcattttgattttaattttgaatatggcaagaggtaggagtctactttcatttttctgcatatagatgtccagttttcccagcaccatttattgaactgaaggttcttttcccaatatatgttcttggcasctttgtcaataatgagtttactgtagatatatggatttgtttctaaattctctgttctgtttgattggtctatgtgtctgtttttatgccagtatcatgctgttttagttactgtagctctgtagtataatttgaagtcaggtaatgccatgtgtggttttaagccttaaggtctctcaccattcaggacctgcactgtcccagtgtcacagctcctgagaatgtggagtgctgaggagtagcacttgcgacccattcgcttatatttgtttggaatcgtgtacacatctctggctgtccaggcacagaggacagtcagctctgggaagctctaattatgacaaggagcttaactgatgaggttctggtttctgaccttggccccttttgaattctctatgatctggcgtcaccaagtggttgagagttgcccagaaattgttgt

SEQ ID NO: 861942 - DNA, 637 bp, Homo sapiens
gcaaccgtactcgagacgggtacagtcaagtcattgggggatgatatgtttccagaaagcatttttaaggcaaatccacatatatagacttgctctatgaaaaaatatacatctggatagaggggactctggctttggaagggaatatttgctatctagaaatagggtattcttactaacatgcctttgtgttctgcccttttgtctatgaacatctaaataataatacctaccctctacttaatcccaagcaatgtaccaatggtttgagcttagtttactcaaacatgccaagaaaccattccgtttgggttagtataaatgcattctttgattcaaagtatgtattgagcaccatctatcraacagtggggtctttgattgcaagcgataaatattatctttggcaaacaagtaaaaacaaggaatttgttgggaggaacatagtgtagttcaccaaaaggggaggaactagtatgtctgtgaggaccaagggggcagaatcaaaagacaatctctctatcatagaattgtgaaatggacctactccagcccatttccacctttgagtcataggttcagaattcacattccatggagcaagagtttggttggccaagctggtgttctgtgccat

SEQ ID NO: 861943 - DNA, 591 bp, Homo sapiens
tgtcattacacaacagtttcttctgggggaaaaaaaggaatacattgatttcatgaacttgccattttacataagtagtctaaaggtgccccacaggattatcagatgagagggcttaatttggctctctaatgtttattttgtcaaaatcacatagctagttaatgacaaagcaagtactataaaccatctgatttattttacagtttagttaacttgtaattacacaggaaatcattctgttgcctaamtcctatgactggcagtcttttctaaaaatgtctgattgttttctaattgcttttatttgatttttatgaggcttatatttttccaaaggttctggctccaagtattatagaaaagggagttacttaccaatctcccttcttcaccatttattgaacctgactctttctgatcaagaacctgctatgaatatgacagaaactttccctcaagaatatcctggcagtccaaagggaagagagatgggcaatcgcctttgcaggatgataatgaagtaaaagaagcatgaacaaatgcagaaaaataaaagcagatgaaagaattactaattgcttgcatgga

SEQ ID NO: 861944 - DNA, 643 bp, Homo sapiens
ttagataatctgaatgagttctgttttccagtatttacattcttcactaaatactgaagaatggaggcaagatgaggaaaaaagtggtgtaatatttggcaggaggactcctctaataaagataatagactttgtgtctctgcagagtttcatccccgctggctatgacaagctggtaaatcatcacacaagtaatgggccttaaagactggaggaaatgcagcacctggattttgaaatccagaaattacttcccagaaaaatgcccagtcttctcatcatttttctggttgagctgtatttttgtcctggacataaactgaaaaagaaactaccaccatcttgtgcaccacagatgtcaggcccagtagatttgatttgttcctatgatttgattatttgtgtcttcacttttgcctgttcggatgatcactcacaatgcaacactcatactaaaagaatgaatagcataggycctaatatatttaaaagcatatgccagagccaaatgataaacaaaataatgggccatcattcctgataactcctttgaagataagacaggatgaaaaaccatctgaatgaaactgaatttcaccatgggtcaagaagttggggtgcaatatatctaaagagaagttct

SEQ ID NO: 861945 - DNA, 600 bp, Homo sapiens
tgatacttttcaaaaagcatctccttggatttaatctcacatatgggaatttagcccaatataataaaagaaagaaaaatgtatgtatatatacaccaaaatgtgtaatgttgtaatatttttgacctagaggataaaaaaaatttttattatactttaagttctggggtacatgtgcagaacgtgccggtttgttacacaggwatacatgtgccatggtgatttgctgcacccatcaacccgtcatctacattaggtatttcttctaatgctatccctcccctagctccccaccccccaacaggtcctggtgtgtgatgttcccctccctgtgtctatgtgttctcattgttcaactcccactatgagtgagaacatgcagtgtttggttttctgttcttgtgttagtttgttgagaatgattgtttccagcttcatccacgtccctgcaaaggacatgaactcagaggataaaaaaattaatgtataaatgaccagcagtaggtgacaggcttagcagattataacgagttgacacagttaattaaaaagataataaagaatgaagttttgtgccaaatgtatataaaataacgctaa

SEQ ID NO: 861946 - DNA, 600 bp, Homo sapiens
tgatacttttcaaaaagcatctccttggatttaatctcacatatgggaatttagcccaatataataaaagaaagaaaaatgtatgtatatatacaccaaaatgtgtaatgttgtaatatttttgacctagaggataaaaaaaatttttattatactttaagttctggggtacatgtgcagaacgtgccggtttgttacacaggaatacatgtgccatggtgatttgctgcacccatcaacccgtcatctacattargtatttcttctaatgctatccctcccctagctccccaccccccaacaggtcctggtgtgtgatgttcccctccctgtgtctatgtgttctcattgttcaactcccactatgagtgagaacatgcagtgtttggttttctgttcttgtgttagtttgttgagaatgattgtttccagcttcatccacgtccctgcaaaggacatgaactcagaggataaaaaaattaatgtataaatgaccagcagtaggtgacaggcttagcagattataacgagttgacacagttaattaaaaagataataaagaatgaagttttgtgccaaatgtatataaaataacgctaa

SEQ ID NO: 861947 - DNA, 625 bp, Homo sapiens
gtatatatacaccaaaatgtgtaatgttgtaatatttttgacctagaggataaaaaaaatttttattatactttaagttctggggtacatgtgcagaacgtgccggtttgttacacaggaatacatgtgccatggtgatttgctgcacccatcaacccgtcatctacattaggtatttcttctaatgctatccctcccctagctccccaccccccaacaggtcctggtgtgtgatgttcccctccctgtgtctatgtgttctcattgttcaactcccactatgagtgagaacatgcagtgtttggttttctgttcttgtgttagtttgttgagaatgattgtttccagcttcatccacgtccctgcaaaggacatgaactcagaggataaaaaaattaatgtataaatgaccagcagtagktgacaggcttagcagattataacgagttgacacagttaattaaaaagataataaagaatgaagttttgtgccaaatgtatataaaataacgctaatgttaaattgtagaaaacaaaacattttatatactagagactatggtctgaatatgtaccgcaaaatttatatgctgaaacttaattttcaatgtgataatattagagg

SEQ ID NO: 861948 - DNA, 647 bp, Homo sapiens
cacagccttggacagctctgcccctgtggttttgcagggttcagcctccatcccggctgctttcatggatgggtgtagagtgtgagttttccaggcacgtagtgcaagctgtcaatggatctaccattctggggtctagaggatggtggcccttttctcactgccctagctacactaggcagtgccccaatraggactctgtgtgggggttccactcccacatttcccttccacactgccctagcagaggttttccatgaggactctgcccctgcagcaagcttctgcctgaacatccaggcatttctatacatcctctgaaatccaggtggaggttcccaaccctcaattcttgacctctgtgctttcacaggctcaacactacatggaagccaccatgtgtttgggtttgcaccctctgaagcaatggcccaagctgtaccttggccccttttagccacagctggatctgaaggagctgggatgcagggcaccatgtctcaaggctacacagagcagggggtgcctgggtctggtctataaaaccattttctcctctgggcatgcgatgagaggggctgctgtaaaggtttctgacatgccttggagacattttccccattgtcttggtgattaacattcagctc

SEQ ID NO: 861949 - DNA, 647 bp, Homo sapiens
cacagccttggacagctctgcccctgtggttttgcagggttcagcctccatcccggctgctttcatggatgggtgtagagtgtgagttttccaggcacgtagtgcaagctgtcaatggatctaccattctggggtctagaggatggtggcccttttctcactgccctagctacactaggcagtgccccaatgaggactctgtgtgggggttccactcccacatttcccttccacactgccctagcagaggttttccatgaggactctgcccctgcagcaagcttctgcctgaacatccaggcatttctatacatcctctgaaatccaggyggaggttcccaaccctcaattcttgacctctgtgctttcacaggctcaacactacatggaagccaccatgtgtttgggtttgcaccctctgaagcaatggcccaagctgtaccttggccccttttagccacagctggatctgaaggagctgggatgcagggcaccatgtctcaaggctacacagagcagggggtgcctgggtctggtctataaaaccattttctcctctgggcatgcgatgagaggggctgctgtaaaggtttctgacatgccttggagacattttccccattgtcttggtgattaacattcagctc

SEQ ID NO: 861950 - DNA, 615 bp, Homo sapiens
gattatccaatgaattgccatgtagtacatctcctctttagtatttatcccactggcaaccagcttatgatagaatataacaaataagcaaataaactgcccctaacctagctatgttggcattatcttcatttttacttttagaagtcaaatctagtgtagttcaaatcacgtttctcacacctcactttttcctccccctctcttgggacttcaaattcatcttcaggcttcccatttttatcttcaaagacaacctgaacccttcaatctcttacctttgctctccccagtacatgttaacctgctgcacctttaaatgtgttgcctactgttaaataaatgtaagaaacatcctaccactcaaatttacctccttataagctcttcagaaatctttcttcyaatggaaatgttactactgtccattttatctcctccaagtttgacaatcaaacacattacaaaatgcaaaaagaaaaggcaaaacttgtacagctagtaatttgatctttttctaaatgtgtatattacaaattttacataaatacttgcttaatcaaataatttgcttcctgggaagtgacctggtcttttactagagggttgtaagtg

SEQ ID NO: 861951 - DNA, 642 bp, Homo sapiens
aaaacataggtccacacaaaaacttgtgcacaaatgtgcatagcaacattatttataatagccaaaaaatggaatcaacccaaatgtttgattaatgggtaagaaatgtatatataaaatatggcttagccatacaatggaatatattcaaatacgtaaagaaataaaattctgatacatgctacaatatggatgaaccttgaaaacaggctaagtgaaacaaacaaacaaacaaacaaacaaacacaaaaggtcacatattatgtgattccatttatatgaaatttccagaatgagaaaatccacagagtcagaaaggagattcgtgtctgcctagggttgggggaaaggagattcgtggctgctaatgggcacatggcttcttgtttgggtgatgaaaatgttttaaaattgaccatggtgatggttgcacaggtctgtgaccmtgctaaaaccattgaattgtacactttacattggtggattttactatgtgaattatatcccagtaaagctgttatataaaaagggatatattactggaattccaaggttattaacaaaatgcaccttactttaagcatcaagttaaggtgctctattatctgtgaaagagttgaagatatagaggactaaacccac

SEQ ID NO: 861952 - DNA, 625 bp, Homo sapiens
gaggcagagacaggagaatctcttgaacctgggaggcggaggttgcagtaagccgagatggcgccactggactccaccctggcgacagagcgagtctctgtctcaaaaaaaaaaaaaataaataaataaaaagaagaagaagaaaaacatattcctttgctggaacttccattcattccttctctgccctcctactcccttctgataaatcacgttcatcccccagctccaggtatcatgagacgttcccacccatggctgcaactccttggaacagggcgcgtctctaaatctgaaccaaccagacttcctctggggttatccatgtaggaaagcagaggcaggagactgtgttgctctaaggaaggagccagaaatcatgctttggttgttttccagctcccatgaggtatgcctctatgttctgaggcaatgaaatgtagccatcagacagaaagaagggcgtgggaatcagyagggctcagttcaaatccctcctctggctgttgtgtaatgattatttatttatttatttatttatgtatttatttatttatttttgtagagacagagtttcattctgttccccagactggagtgcaatggtgcaatcatagttcactgc

SEQ ID NO: 861953 - DNA, 561 bp, Homo sapiens
ttctattgagatagagataaaagaatctttctcagagaaaaggtagtagctaagtgctttgtaaaaaataacaaagcaggatcattagtctaaagaaaaaatagcactgtcagaaattatatattataacttttaaaggtaagtaagaagtcagagtcattgtcccagcctcatgaggcacttttttaaaagataggtttacactaataacactgtaatttatgccaacttctttacaaaaccttcctctctctctcttttcttacacataacaattgtaatatgtaaagaagtacagactaagccttcctttggtcttattttggactagtagcaatcctttatcagatgtaggaaggtgtgtgacatcatacaagwaaaaagagctcacgtttgttcattgtcaaaaataaattgaaatacagaagaaccaggggttaccagagaaccctattgaatttactgttgctattgagtaatacaaaggaaggttgcagtggtggagctttggcagtgatccaagatgagaaattaagacaattgtagtaatgaattagaata

SEQ ID NO: 861954 - DNA, 636 bp, Homo sapiens
aaacctgtttgacttaccaaagcaaaagggtcacaagcatcacaagcattatttctcctctgtaggctaggatagttccccactgcagaactgggtccagtgataccaagagataagataggacaggatccctaagcagaaaaggccccaattaattagtataatgagtagcaagacagttgttagcatccagaaaggatgactaactcatacagagtcacaaacctggttaatagaacatgatgcccctaggagcaacatagatgatagccattattgttgtgtgtgtgtgtgtgtgtatgtatatatatatatatatgcaaatctttgcytagtgtctatagctgagccagtttttgaatatgggactaacttgaaaagaggccaggtatacgtgaggaagtaccctgcaggaaaggtacatgttagtaattccagcattccttccactaagggatctgctgctatttttttaggtacttatagactagggaaagggaattacctagtattttaaggattattgaacatagggctcaaaatgacattgctacctggatatgtggggcagcagcatgtttcacccagttgatcagggcactaagaagaactgaaagcagagttctggctaagatg

SEQ ID NO: 861955 - DNA, 601 bp, Homo sapiens
tcagtaggtcagtatcatgaccctgcaccttggactttttcttctgtccggccttatagtataaaaagtgtcagtattggcataagatataaaaggaacttaaaggacaaacccattgggggaatgaaaatgtagacccttaggattccagagcaaattcattctatctgcaaatcacagtaaggtagaagcagtacctctgagaaccggcccaagcaggatgataaggcacaagtgagctataaaagcacagagcctagattcctcttccccattctacattctctgaatagttccctaaattcatagctatggccacataggatatgcctatgaccaatagacagatgtcaactcaygatgtaggtataagccaacaatggataacagttgccctgtagtcctggggcagcctagaaaggcaagggaaaatcttcccaagggttagacatttgcgtagggcacctggtcatcctctctgtgtgacctgaatagtccagagttagaatatatatagactcatgaataagggtgaatggcttggaagatttgttagaagccaggaaggagaaaaattggaagagaaggaatgaagaagtct

SEQ ID NO: 861956 - DNA, 593 bp, Homo sapiens
cattcgtgattcataggaggaggtcaaaatatcaacattaacaggagcttggaagaagctgatttccaccctcatgaatgacttcaagggttcaggtgcatgagtaaatgacagttccatcaacagactacaactttctgccctagttaacacagggcatctccatgtccccagttctccctatgggcatttttctctttgaaattccaaatcttttctgttctagaagcacraaactacaagttctctctcaactcttcaaatgaggttggaacaaacagaatgggggcatgaacttttttccccataactttaataaacaacagttttagcctcagtaggctttatgcaagccttcaacatctttttctaggtatcttgacactcatgttctttttcttcttgcagcctatggaaattcctagagacagataaatgtgcaaacctgttcatcttgccaagaaaaatccgcttttctgccacagaaacaaaatattgggaaagagtcttgtggtgaaacacccatcgttctctgctaaaacatttggttgctactgtgtagactcagcttaagtcatggaattctagaggat

SEQ ID NO: 861957 - DNA, 613 bp, Homo sapiens
aatgcttctggctaatgtaagccagagtttaaaagaaggatatagaggtcccacaggattgagggaaggctgaagaagcagtcttagaaatgggtaagaagcaggcaaattccagaaactaggaagcaggaaacacaaggctcacaagagtcccacaggtctggtcaggacactccacttggatgggatgaaactcctgacatctccattctttttgtccctctgttcaaaattcaccttccattgaagggagcatctgattggcccaacttgggtcaaaaacctcctaattgccagcaatatccacagactgtatcctactgggaaaagrtaatccgccaaaaggaaattagattgttattaggaaagggagatgagtgctaggtgctctggcagccaccattcccaacccctccctggatgtttaagaatatataaaacatttcaacttgagaaagcagattgaatttttttagaaaagaatatgtaaaactgtatttcttctccagctgtactttccgagccctacattggtctaaatggaaggatacctttcagtaccagcccagtcatgcttttgcatgattacctctatcaaactctatttctttgg

SEQ ID NO: 861958 - DNA, 398 bp, Homo sapiens
ccctttgggaaacttacatcctagttaaagagacaaaaaaaaattgacaattaaaataacagattaccaagctatgatacaaattggaaacaaattagggtgctctgaaagagaaaagaaggagagctctactttaaatagggtgcccagggaaggaggtatttatgatatgacctggaagatgagatggcaccagccatggttggggaggagctgtcagcatagaggaraaatggaccaacaggaggagaagccagccacagagagaaggagcccaaagaagagcattcccggcagagggggcagccactgcaaaagcccagaaaaagaggaatggatatttgaggaacaaaatggcagctaatctgactacagttttggggaacaagaagagtatc

SEQ ID NO: 861959 - DNA, 647 bp, Homo sapiens
tgaccccctctgggcatatgaactagaaaaaggtatccctttttccaggtaaatgcagacctgtgccaggacatatagctaagcatgctgagaaatgggtggattcttcttcttacccctttagctgggtgcccttggagagagcacaactcattcatctatatggggtggggggctgtgygtgcaaaacacttgtgggacagcatatatgtgtcagagagtaaacaataggctgtgactagaattcagagaagagaaaagatcctttgtttttactagtccaggaaaggataggatatagggatggatctaggtcaggaggcttcctctgtgagagatgttctctcaccatcacccacaacctgcatccagctaactcctactcatcctttagatcttaccttaaacatcttttcctggtaatccacctgctcccagcccctaactaggatggctattcattctcactgcacacggaaattttccgtcactgtacttatggcaaatgtaattgcatgatgtgtggttttgttttaaacctactcccctgagattacaaagctccatggagcaggggcctatgttttgttcatccattcattgtcaatacctgctatataagtacatgataaatatatgtatatata

SEQ ID NO: 861960 - DNA, 638 bp, Homo sapiens
ttgacaaaggaatatgtattttatgagtttcaccccagagtccattcctctgcaaaaatctaaatgtaacttttacccataacctagtttttgaagggccttttttctgaactcaggcaattataactggatgactcccaggccagttctctgcatttgtcttcctttagttgctttcctctaaaaccaggcaggaaaatcagagtttatgtaactttgttaaacatgactacttctayaaaaatattaataaatgagggtgacacaaactactggggggaaatgaggttcaaaatggcctatagctttttctatactcctcaacattctctcacattgagagttggttttagctctcagcctgaaaattcctcactttaactgccctcactctgttccccactgcatagtctgtcctttgtggcatttgcctcctttaatgttaacaaaaagtggaaaatgataaacgagcaggagtgaacacagagtagttactttaactgtgtctttattcacaggcgtttagcccacaatcccataactgtattcagaggaaagggctgagctcaagaggataccctttccccactcccagcacaaacattcctttaccttcaaagtctgaaaataacttgccc

SEQ ID NO: 861961 - DNA, 638 bp, Homo sapiens
ttgacaaaggaatatgtattttatgagtttcaccccagagtccattcctctgcaaaaatctaaatgtaacttttacccataacctagtttttgaagggccttttttctgaactcaggcaattataactggatgactcccaggccagttctctgcatttgtcttcctttagttgctttcctctaaaaccaggcaggaaaatcagagtttatgtaactttgttaaacatgactacttctacaaaaatattaataaatgagggtgacacaaactactgggggraaatgaggttcaaaatggcctatagctttttctatactcctcaacattctctcacattgagagttggttttagctctcagcctgaaaattcctcactttaactgccctcactctgttccccactgcatagtctgtcctttgtggcatttgcctcctttaatgttaacaaaaagtggaaaatgataaacgagcaggagtgaacacagagtagttactttaactgtgtctttattcacaggcgtttagcccacaatcccataactgtattcagaggaaagggctgagctcaagaggataccctttccccactcccagcacaaacattcctttaccttcaaagtctgaaaataacttgccc

SEQ ID NO: 861962 - DNA, 667 bp, Homo sapiens
aggtgtcccacagagcagcagacagaggaaagagacggcaaggaaggtaccaggcggccgcagcagggatgcacgggccgcagacagacagacacagctgcgtggctgtcagccacactcagggagaggcaggcagagggccagacgccgagcttacrgtcactcagcagagagacgccagtgggtctgtctgaggccgctggctgccacccagccgcatgtgcagagtggggaggaagaggaggatgtggtgagccgctccccgccagccccgcccacccgcagctgggctcctcctgggagggagtgagaaagaggtgggagggggcctggccccacagcaggcacccactgtcaccaaaggtcacctgcaagtaagacatttggggccatcggggtgacacttccctcttagggacctgtgacatcatccccacaggcctctcagtcataacccatgaggcaggcagtgcctcctggagccaccacattgcacagatatggaaactgaggccagaggtgtgaagatgtggcacagtttcacccgtggacccagagtcctcagtggccgactccagcccctcagcacagagagaaggaccagaaccttgcccaaggtcccacggaagcccctttttcagactttgcaaaccagcctgtttcttat

SEQ ID NO: 861963 - DNA, 667 bp, Homo sapiens
aggtgtcccacagagcagcagacagaggaaagagacggcaaggaaggtaccaggcggccgcagcagggatgcacgggccgcagacagacagacacagctgcgtggctgtcagccacactcagggagaggcaggcagagggccagacgccgagcttacggtcactcagcagagagacgccagtgggtctgtctgaggccgctggctgccacccagccgcatgtgcagagtggggaggaagaggaggatgtggtgagccgctccccgccagccccgcccacccgcagctgggctcctcctgggagggagtgagaaagaggtgggagggggcctggccccacagcaggcacccactgtcaccaaaggtcacctgcaagtaagacatttggggccatyggggtgacacttccctcttagggacctgtgacatcatccccacaggcctctcagtcataacccatgaggcaggcagtgcctcctggagccaccacattgcacagatatggaaactgaggccagaggtgtgaagatgtggcacagtttcacccgtggacccagagtcctcagtggccgactccagcccctcagcacagagagaaggaccagaaccttgcccaaggtcccacggaagcccctttttcagactttgcaaaccagcctgtttcttat

SEQ ID NO: 861964 - DNA, 639 bp, Homo sapiens
agaagagacagtaaaaagagctaatatttgctgaaagctcattgtgtgccagggttttaaggactttaaagatgcaccctctcatttaaacctcagaaatactcgagaaggctgtgtgcagcggtgcacacctataattccatcattttgggaggctgaggtgggaggatcgattgaggctaggagttcaagaccagtctgggcaacatagcaagacmctgtctctataaaaaaatttaaaaattagacagtcatggtggtgcacgcctgtagtcccagctactctggaggctgaggtgggaggaccacttgagccaaggagctgaaggctgcagtgagctatgactgtagtgctgcactcaagcctgggcaacagagcaagactctgtcttcaaaaataaaatccccaaaatgaaaaagaatgagtctagaagatagttatcatcatcatcatcatcgtccctgttttacagatgaggaaactgaggctcagagaggttaagtgacttgtccaaggtcacacagctgatgagtgccagagttgggatttgaactcagtcatttgggctccagagcccgcactcttaactcactacactgctctggggtgtgtatgaaaacaaggatattcaatttctc

SEQ ID NO: 861965 - DNA, 614 bp, Homo sapiens
ttacttaataatgccacttaatgaaaaatacgtataattcatagtagataaggaagttggagagtctaaaggaaacttttgggtacttaattttactagtttttttattctgtctaatcttactttaaaatataccattagtggccaggagtggtggctcatacctgtagtcccagcactttgggaggccaagacaggtggatcagttgagctcaggagttagagaacagcctgggcaacttgcaaaaccccatctctacaaaaaaggcaaaaattagctaggcatggtggcatgcacctacaatcccagctactcgggaggtgaggtagraggattgcttgagcctgggaggcagaggttgcagtgagctgagatcacgccactgcactccagcttgggcaacagagcaagaccctgtctccaaaaaaaagtgtgtatacatatattacatacacacatatatatgtaatgtatgtgtatatatatatataaagtgtgtgtgtgtgtgtgtgtgtgtgtgtgtgtgtgtatgtacacacataaaatatgtaaaatccaactccaattaaggttaataaatgttaggaggggtgctaatggggtgtgtgtgtgt

SEQ ID NO: 861966 - DNA, 584 bp, Homo sapiens
aactccaattaaggttaataaatgttaggaggggtgctaatggggtgtgtgtgtgtgtgtgcacgtgtgcatgtgtgtgtgtatatatatatgaacatgggcaaattacttcttagttcctttctaatttgtaaaatggagatctrattggggttggattttagttcatagagaatagaggagagaataaaatagtatgaaattacgtcccttttgtctttggataaaaatgggaagggtctaggagaaaagaggggaatgtttttaaaagaatgtgtatatacagtgagatttgcttgaagtgaaattaactgaactgtgggtacaaagaacaggattatggttttaagtgtaaaaagatacttggtctaaacattattagttcagtctaccagatgtagtgtgaacctggaacagatatgggtctgaaaaatatagaagcaaaattttagaggtaagaggtcttatggagtttattaatcagacctccattttgcaaattagaaaggaactaagaagttaagtaacttgcccatgcttgtacatctgttttgggactagaacccctctgtcctaattctcat

SEQ ID NO: 861967 - DNA, 711 bp, Homo sapiens
gtgtgccatccctaggcagcagccatgcttacctgctctgtattgatccaatttttaaatatgtgctgctgaaacaagtacaaagccctgtttgatacatggatactcatgagttatggatgaggcttagctctgttaaatccaactcactgactttagattcagataattttattgaatggcttcctgtgaggtagaattttaaaatatatttaaaactcctggaagagttgtgattagcccaggagattttcattatcatagagacacattacttgaggggccaattgcaagttggttcccactactcggtggaaagataacatggaaccttctgctatctaaccaaagstgctccacaggatgtaaaaaagcctcaaggtacagatctgatagcaaaagagaaagggaaccctaatctcttcctgcaaaattatttgaacatccctgactgttgagagcaatcccaactaatattggttaaagaacagacaaacacgggtctcataggataacttaccatgaatgcctaggctaagtctagctaagatgtgggctccaaataaggtttttagtgtagggtgaggatcaacttgctcgatatttgtgtgggtaaagctaggaggcctagctgccagatcagggtgctgggaacaatgactgagcataagtacataaattaataaaccccgtagctttgaactctatgta

SEQ ID NO: 861968 - DNA, 597 bp, Homo sapiens
ccatgaagacagcggacgtgatgagagggcaccagtgttttcacacaatgtgcacacactccagtcaaagacttcaagtccaccagacgctatgactcagacgtcactgtgtctctgccccatcaggtgctccgtgctgaccgagctcagggcccctcttccctgactgagcatgaccagaaaaatgccccactggacaaggccygttgccgccaaagcctcagctccccttcagtctcccaccacaaaacaaggagcaggcaccacccagccagacgcaggctcatcccgagtcccgggtcctcctccccaagacctgtctgtcatcagccaccctgcagcagccacctcaccaggcccggccctgagccacacgcccaggcagcctcgtccacgcccacagtaaccctccccagggagctcacctgcaaatgctcccatgggcccctggccaccctctgcccgcaacctggctcagccactcgcatgccctgggtggtccagtcccctacactccatgaccctgtccctgacccaggctccccagcaggcacccacatgctccagccccacggccttcccacacgctctccagct

SEQ ID NO: 861969 - DNA, 583 bp, Homo sapiens
actcgagtcataatgaactacctataggtccctgaacacaaaagactacttcattcgatagggtccttatttattctcttccctcttcctgttaatacccttcccaattttgtactttatttgaaaattttcaaaattcctctaagataatgtcacctttttyggggagccatccagtctctggtttggtttgacgactcactttttgctctcagtgcaccttaaggtacacgtaagatagtaattatgaaatcatatttttatgtgtgtaaatacaacatcagatgaattcatcaaagagtgcctgaggaatccaaagcttgccttaaattatctctgtgtcctcagggcctattatcacatctggcacagagaagtggcccaacaaatggatggaaactgaatcagttgcattttctttctcatccttacagtgtcttcccagatgtaaattgaaggcatcacccttaattgttttaaaaccaattccaagcagtcgtcggattcccaacagcacaatttctcctgcctcctctttctattttcatgagtccttaacatttaactctttggacttggatac

SEQ ID NO: 861970 - DNA, 593 bp, Homo sapiens
aactaaactttatcctcatgttccaacttgcatgaaggtcctcatggggaagatgagagagaaaacattaagatcaaaaatacttcagaaaacgcaagtgggaaggtccctgcagctctggcccttgacccactatcactgactgcaggatatgatgcctgcctgagacatttgctgtaattagtactgaaagggtccctgggggcttcaaatgaggctgctgaatccactttcctgtgtggctgacttccatgggttcaggccgttggccaaaggaggcagatgtggaggggcacatgcctttctcaggaagaagtgaacakatgaaaagaagaaaggaaggggatgtcagtggacttcctaatgaggtcccttcttgttgtgagccctctgggctgaggaattactgtgcagatcatttgctaatgagcacagccatagccatagaatgacttttaaatgttcaaagaatttgggataattctactgtgtgccttccctgacttggtgtgctgagaaacaagatgatatatttcaaaatgcaagtcctagaaaagacaatggtactgaaaggaaatttgggaaacagtgta

SEQ ID NO: 861971 - DNA, 553 bp, Homo sapiens
tcaaaaataaaatcaatatgttgtgttttcactttcttgaagtaaaaaactcaaagtagtcctaatgtaaagctgtggagtacatgtcttttgtgtacttatatttctattagaatcttagaaaatacaagtttgagaccatctataaaataaatatatttatttatctcagcactgccaaataaaaataagtgatcacaaatctaaattttctaatagccaccttaaaaaagtaaaaataggaaaaatgttaatatcttttttatttagcccaatatatccaaaatcattttaacataatcaatatataaaatttggggtcttttacattcctttttcatactaagtctctgaaatccatttacagcaygtcttaacttggacaaggctcattttaagtattcagtggccatacgtagctagtggttactatatagattgaacagtgcagttctaggttgttgaagcaggaactatatttatgattcaattatctgcttttttcagaagaacattattttttggtttgattatatagatagtaattttcatt

SEQ ID NO: 861972 - DNA, 567 bp, Homo sapiens
cttcttaatccatgacactctttgcaaaaagcaatctaggaaagcagatatcctcccccttattcttcctaaaacatcmgcgccatcggagaaatgtgatgaataattaccaatatgcctttttagtgttgtgcctgctgagtgttggtgaacctcttcctccagagatgatggacatagttgtgatgtctcactgttctatactttgcttggaggtaactacagactggcctctacttgggcacttgaggccatctgatgtgtctggagtaacagctgcctctgatcttaggcttggggcagcttcacttatgagtactggctgtgagcctctgaggcttcattctgttagtgctggggtatctcattttccactcattgatggagtggcagtgatgtgtgtctcctcttctctgagtcaaagaggcatctcctacaggacatgctgcaggcctgtggattggtgctgaggtgttgtaggtatttttgttctaagcattaacaggactgacactatctattttggcccttattccatagaggtcttttccttccaaagaaatccaa

SEQ ID NO: 861973 - DNA, 673 bp, Homo sapiens
cttgagctttcaaatgtttaacaatattctgtaatcctttatgagcttcaggccttaagggatattgcctttgataaggaaaagtggtgggatcttttaacctgatttggactgggcgggcatttttctcccttccaaattgtcattccaatgcccagacctcagggttgattccctcctcaagtaggggacaacaaatgggtaacttgttccccatattcatgtagataatagctccggccttggctaatatatccctccctaataagggtgtgggactttcaggcataacaagaaaggcatgtgaaaagagcaaagtctcccaattacaactgaggaggtgggagaaatacctggttacaggctgtctcagaattcctcggatggtaayggaccttgaggatagtcatccaggacaggagattaacactgagaaggtcatgccagtgtccaggaggaagtcaatttcctggccctcaatagataaacatacccagggctcagtgagggtgatgacatgagctggcgcttgccccaggcaccctcagtcctgttgttggatcatctggttgggggcttctgacccagggaaccttcatcctctggggcagtgcaccttccagtgattgcctcggcattgtggacatggatgagggggcagcttgtttctcat

SEQ ID NO: 861974 - DNA, 609 bp, Homo sapiens
gtcagcttgtatctcattgttaattataaggctttcaccgagtcctggcacttttcatctttattgtaatgcaattaaactgatgcctttatatatcaattgaaatctcatcttgaattgtactcccataattcccatgtgttgtaggagggagataattgaatcatgggggcagtttccctcatactgttctcatggtagtgaataagtcttgtgaaatctgttggttttataaggggtttccacttttgcttctttctcattctctcttgtcaccgccacataggaagtcccttatcctttggccatattgtgaggcctcccagcmacagggaaatgtgagtccattaaacctatttttctttcccgtctcaggtatgtcttgatcagtagtgtgagaacggactaataaatatatcatgctttgaggtatatattgttagttttcaatacgtatcaactaatcaaaacaataagaaagcagatctttctctggggacaaatgccatctgatattggtgccacttccaaaaaatacttaccaaatggagagctaagacatattgtgaatataaacaggactgaaatcaaaagcacaatttaaacaag

SEQ ID NO: 861975 - DNA, 609 bp, Homo sapiens
gtcagcttgtatctcattgttaattataaggctttcaccgagtcctggcacttttcatctttattgtaatgcaattaaactgatgcctttatatatcaattgaaatctcatcttgaattgtactcccataattcccatgtgttgtaggagggagataattgaatcatgggggcagtttccctcatactgttctcatggtagtgaataagtcttgtgaaatctgttggttttataaggggtttccacttttgcttctttctcattctctcttgtcaccgccacataggaagtcccttatcctttggccatattgtgaggcctcccagccacagggaaatgtgagtccattaaacctatttttctttcccgtctcaggtatgtcttgatcagtagtgtgagaacggactaatamatatatcatgctttgaggtatatattgttagttttcaatacgtatcaactaatcaaaacaataagaaagcagatctttctctggggacaaatgccatctgatattggtgccacttccaaaaaatacttaccaaatggagagctaagacatattgtgaatataaacaggactgaaatcaaaagcacaatttaaacaag

SEQ ID NO: 861976 - DNA, 573 bp, Homo sapiens
agaggttagaatcttctgttttttttttgttacctaagagttttaaatttctttactggtgtggtgaaggagatgtaatgttggtaccggttggtggcaagggaatggtgcttggctattggctggggaggagctgcgggttccagaggcagagccctgtgggctggaattttagagtaaccattttgtagatatcagatccaaatgaagctggatatacagagaagtgtgccgcagagagaggaagaaaatgcaccactttttgatggctacgatgtgccatattttgtgacatggactttcatatacattttctacttaatatgcacagcgatcctcaaagacaagtaaggagactacatctatctatgaatccgagatatctgattatttgcttgagwtcaagcgtgagagtcaggtgtgcactaagtgctgtgtaactgtggagtcaaggctgttttccaggatatcattctgccttctttgccgaagtatgggtatctgagatgtgatagagaaaattataagaaggtgcttaaagggaggcaatttgcaatatgactaatctattgt

SEQ ID NO: 861977 - DNA, 609 bp, Homo sapiens
taagaaaaatctctgttgtgtctgtcatagaaggataacaatcagaggctcatggactgaagaacaaaaaagtgagttgtcagttagccagtaagcactgatattctacttcagtgaagccttcagatttaaaggcaattaaagatgattgtgactcatcccaagtagtcatatgcaaaattctatgtattctttgctaattcgtttagtttgttgtattatcgtatataacatacccatttccctagtggcagtgaagggttcctagaagctggccatctctgctctgtgatgtamttatcttttacatatattatctgggttaatgatccatagttttttcatttgtttatttgttttgtttttcttgtgtagatgggggactagagcctcattctcttggctccctttttccccttttaacctttgaggggttctttgaagcacagattgaaaaccatcaacctagctaaatagcccaattgatctggtcattccagggttagcaaagagaaagaaatcacaaataggtaaccaatcaaactgataaacatttgtcaaatacctacttgcttgtcattgtgctaaagaggcttataatctatttaa

SEQ ID NO: 861978 - DNA, 629 bp, Homo sapiens
caactacccagataaagtaaatagaaaataatttataaagtgtaaaaaccagattgttgagttatctcaattatttatttattttttattatactttaagttctagggtacatgtgcacaacgtgcaggtttgttacacatctatgcatgtgccatattggtgtgccrcacccattaactcgtcatttacattaggtgtatctcctaatgctttccctccccctttcccccaccccacaacaggccccagtgtgtgatgttccccttcctgtgtccaagtgttctcattgttcaattcccacctatgagtgagaacatatggtgtttggttttttgttcttgcgatagtttgctgagaataatggtttccagcttcatccatgtccctacaaaggacatgaactcatccttttttatggcctcatagtattccatggtgtatatgtgccacattttcttaattcagtctatcattgatggacatttgggttggttccaagtctttgctattgtgaatagtgccgcaataaacatatgtgtgcatgtgcctttatagcagcatgatttataatcctttgggtatatacccagtaatgggatggctgggtcaaatggtacttctagttcta

SEQ ID NO: 861979 - DNA, 629 bp, Homo sapiens
caactacccagataaagtaaatagaaaataatttataaagtgtaaaaaccagattgttgagttatctcaattatttatttattttttattatactttaagttctagggtacatgtgcacaacgtgcaggtttgttacacatctatgcatgtgccatattggtgtgccgcacccattaactcgtcatttacattaggtgtatctcctaatgctttccctccccctttcccccaccccacaacaggccccagtgtgtgrtgttccccttcctgtgtccaagtgttctcattgttcaattcccacctatgagtgagaacatatggtgtttggttttttgttcttgcgatagtttgctgagaataatggtttccagcttcatccatgtccctacaaaggacatgaactcatccttttttatggcctcatagtattccatggtgtatatgtgccacattttcttaattcagtctatcattgatggacatttgggttggttccaagtctttgctattgtgaatagtgccgcaataaacatatgtgtgcatgtgcctttatagcagcatgatttataatcctttgggtatatacccagtaatgggatggctgggtcaaatggtacttctagttcta

SEQ ID NO: 861980 - DNA, 562 bp, Homo sapiens
aaagtgttggaattctactccagacactctattgacctgaaaatgaggtgtgatgtggcaaatttagtataaactatttcacacaggattgactcggaggagcagatggctttgagaaagaactttttgtcatccaaccagtatattcactgtttagcaaaattggcaaagggccgttaaacaaagagayacattctgttaacaaagcattctttgtggcctctttctgtctttcagacactcaaagttgatgcctgtgtgtctgatgtttctagtaactacctggtgtttgtttgttgtttggagtataactgaaaatatttttttcatggaaaaatttgctgaatatttttctttgggagcaagagaggtctttgtattccatttcaagcagtggggaatagtaatgtaaatattggctgaacagatttgcttgatttaagtactaatactttcatttgcacaataggaactgcattacagtatttgtagtctcattaaaaatggaccacattggtggtaatgtatagtgatacacatataccaaggtagaacatgtatg

SEQ ID NO: 861981 - DNA, 573 bp, Homo sapiens
tacttttatttttcatagtattttctgaatcttctccaacatttccacattttcttttttttattattattatacttgaagttctagggtacgtgtcaacaacgtgcaggtttgttacatatgtatacacatgtcatgttggtgtactgcacccattaactcgtcatttacattaggtatttctyctaatgctatcccttcccacttcccccaccccatgacaggccccagtgtgtgatgttccccaccctgtgtccaggtgttctcattgttcaatttccacctaagagtgagaacatgcggtgtttggttttctgtccttgtgataatttgctcagaatgatggtttccagtttcatccatgtccctacaaaggacatgaactcatccttttttatggctgcatagtattccatggtgtatatgtgccacattttcttaatccagtctattattgatggacatttgggttggttccaagtctttgctattgtgaatagtgtgcaataaacatacttgtgcatgtgtctttatagcaggatggtttataatcctttgggtatatacccggta

SEQ ID NO: 861982 - DNA, 573 bp, Homo sapiens
tacttttatttttcatagtattttctgaatcttctccaacatttccacattttcttttttttattattattatacttgaagttctagggtacgtgtcaacaacgtgcaggtttgttacatatgtatacacatgtcatgttggtgtactgcacccattaactcgtcatttacattaggtatttctcctaatgctatcccttcccacttcccccaccccatgacaggccccagtgtgtgatgttccccacccygtgtccaggtgttctcattgttcaatttccacctaagagtgagaacatgcggtgtttggttttctgtccttgtgataatttgctcagaatgatggtttccagtttcatccatgtccctacaaaggacatgaactcatccttttttatggctgcatagtattccatggtgtatatgtgccacattttcttaatccagtctattattgatggacatttgggttggttccaagtctttgctattgtgaatagtgtgcaataaacatacttgtgcatgtgtctttatagcaggatggtttataatcctttgggtatatacccggta

SEQ ID NO: 861983 - DNA, 532 bp, Homo sapiens
gtcccttgtaagttggattcctaggtattttattctctttgaagcaattgggaatgggagttcactcatgatttggctctctgtttgtctgttattggtgtataggaatgcttgtgatttttgccattgattttgtatcctgagactttgctaaagttgcttatcagcttaaggagattttgggctcagatgatggggttttctaaatatacagtcatgtcatctgcaaacagggrcaatttgacttcctcttttcctaactgaataccctttatttctttcttttgcctgattgccctggccagaacttccgacactatgttgaataggagtggtgagagagggcatccctgtcttgtgccagttttcaaagagaatgcttccagtttttgcccattcagtgtgatattggctgtgggtttgtcataaatagctctaatgattttgagatacatcccatcaatacctaatttattcacagtttttttagcatgaatggatgttgaattttgtcaaagggcttttctgcatc

SEQ ID NO: 861984 - DNA, 559 bp, Homo sapiens
aggtcatgtaacctttctgaagtcccacttagattgtcaagctggcactggacatgtctggagactggcatgtaaactaaggcctttctacaggatgctatccagtaataattaattggtcactgtatcctttagcccagtgctgtccaatagaactttctgtgatgatggaaatgttctatatctgtgctgtcttacacagtaaccactagctgcatggggctttggtgcacttgaactattactagaaaaactgaagagttattttaatttaaattttaatagtcataagtggctagtggctacagtattagataagcaaagctctaagcactattatactgtcttgtatataaaaacttgagtgcatacytgttttagaggttgcatttaagttgggtatacaaagataaaattgatgccttcccccctcaaatgagatatatatttttttctttactttttcctcctttaggtgactgtctttatcttaagcgtataatatagccttttggtttgaagggcttattgaattagaaatgaaagagagaggtcacag

SEQ ID NO: 861985 - DNA, 635 bp, Homo sapiens
caaataatttgtattttatcttgtattttcttttctcctttcgagatggggttcttactatgttgcccaggctggacttgaactccagggctcaagtgatcctcctgcctcaacctcccgagtagctaggattacagatgtgaaccatactatctggctttgtattttattttgtaagttgctgggccatgagctatcatatccagacttgatgcatcacatcacccagacatcctagactttgagccggttgctgaaattggataggactttggcactgggtcccttggagaggggcaggatgagttccatgtatgggaagagtaaatccgtgagtgatgaaagaggcagagtttgtcagagcctgctgattgatagstgctccttctgtgatagagccctcaatttttggctcagcataacctaacgtggagtgcatttcccagtttaccttgttattgaatgattttctaactcaggtctggccagtggtatttaagtagaaatgtgatgaaacgtccttaaagataatgtacatatgtgctttattgcttctctttcacttcctttattctatcacatactcgttgacaaccaccatcttgggctatgagagctcattttttttcctcatt

SEQ ID NO: 861986 - DNA, 618 bp, Homo sapiens
tggccagtgcagactgtgaggcacaggtgttccctgctctgcgctggcagtagaccgtttctgacaggctgccgcattgggcacaacctgaggctcccaggtggtcttcaaggacagcctgcactgcagccaactcattctgctgaggtcaaggagagagcttgggcacacaaccamggatccacagcaggtagaagtgaattattagagggcaagagttggcatttgggaaaatgattcctgactagtgataaagaaatgattaattctctcaggacagctgtgctgtatttaattctactttaaggtcagtgggaactttgaatgaatattaaagaggaaagattttattgctaacactttaatataatgtttacttaaacatttagcatatgaatgaatctctgcacccagagatatacaacttctatggcagctcactacctatgttttctttgaaatcttaacaaagaccatggacagacacaaattaagacagtcatcaggatggtgacccctgcatcttaacttgtgctgggttctacaacttcaggctattgaaagcctgtgggaattattaaacctgggccagacattccagcctggcctggtacaaaa

SEQ ID NO: 861987 - DNA, 631 bp, Homo sapiens
ggagctggctaggtgcattaaaatgtgtacttttcctagacctgatagggttacagcaacatgctcacgtagattgggacagagcctccttctgtttccctgtctagaatcccttgtaggctgtttgtggttgttgcaaaaacaatattgcccaaccatttcaagaacatcactgtaaactcttctggggcagttagtgaaaatgatgaatgagatttctatgagtaccagcatcatgcttctctgattcttcttattcccagttgtgctcttctgagtgctaagactttcatgaaagagttttctgcttaatatgtttcaaagaggaataatttttctctacatttcaaggaatagaaacacccacgtaggaaatgcagggcataagacataaattaatgtctttaattacaatcagcttattctactttatgagacagcarataaggctgactattaaataaaatcttaagttatatttaccttctacatagaagattcatcccacttctttttgcccttgaaagctgaaaactagtgaattttcattcattaggatgaggggactagattacatggacctcaggattcttgaagatgcataatttttctgtgccttcatttcctcatt

SEQ ID NO: 861988 - DNA, 612 bp, Homo sapiens
gggattatggatagtttcatttttttctctttgcttatctgaattttctaatttttctataacagcatggattactttgtattaatattttaagtcaagaaaagcctattttaaagtgaactttatcagttacatttaatgtgaaattcctcttctagagctgatcaaggagagaagataaggcatggatattcagtttaaaatggtgagattaaacttttcctttatgtgctagtcttttattcaataagtaatttggagcacagcttttgtcatggggaaaatagctgayggggagacatggatagaaaagggacatgaccctatcctcatagatttacagactggtcactggatgctggtgacacatggggatgttttcatttgctaaagtaaagtggaatgatgactttatactctgcatgtggtggctctgccattagacagtaagtttcaaatggcactaagtcaggcatagaggaatccctcaatattcatgggtgttagggagagggagagagtcttggtggatagatgcaagatgagggtcagaccttcctgggctctgattctctgctccttctgtcagttcattgccaagtgaccttggat

SEQ ID NO: 861989 - DNA, 595 bp, Homo sapiens
ggccagataaatgccagctcactttctggattttgctacagaagagaacaccatgtgtagggaacctgaattttttgtaataggccgtaagcatgcctgccctttggcctggaaagagacactatatcttccagggctgtttgctgtgtaaacatccttgaaaagacagccttgaacaaagggcagtcaatagttctactcaaaagacatggagaaatgcaaaagacccatggagatttgtcttctaatcggcagcatcttgcaaggtaagttgcataggcagtactagctagagaaattcagttaaaggaactataaacttgatcttcaattccaaacaccctaatttagttatttaagaaaggtttttatagagaaaattaaaattaagaagtctttggaagatgggaaatatctgaagggataaaggagaggataatgggcaytccttttgtggaaggtagtatgagttgggatgtactcatagctgcgatgttatgaggatgcattggttcagcctctcacttgttgaccatcttcatccaccctgattgttcagtatccttgctgtactgattgtttaggattttgaata

SEQ ID NO: 861990 - DNA, 534 bp, Homo sapiens
aacacaccagcacgagggggccacttttgcaaaccttcatagtgaggaggtgatgctagtggcctccattgccctttgtttctgactgtccctcctttcccaatacaaattatttctaatattatatgtttagatataatttgctggattaatatttggtggcttgagtttcatcattgggtatttctcattttatttattctttagaacatgatttgaaacttgagcacagtaatacctcatttattcagtgacagtaaatagttgttttgtgaattttctgaatgataatmgttataggggctagcatatattgagcccttatgtgctggcactttgctacatacaattgtagtcagcatcctttaagacggcccccacgacctccaccttgtgtaattcatgctttgtgtagttctaccccttggagtgttggctggatttagtaactctgagatgataaacgtttgcttttttcaaccactaacttgtggggcaatttgttacacagcaatcaacaatgaatacaacttc

SEQ ID NO: 861991 - DNA, 576 bp, Homo sapiens
ggttccatggcattgcctcaactctcaggtcctctgcttctctctctgccccctcccaaggctacacacttttgtggcccttcctatttctggctgtcctttggaatacttagccgccttctttctgtatctatcctgccaccatcttgtaaattagccccttcttgctgttgactctccctagcactcagaaatttagcagaaatsattttctccctcttgttgagttgtaaaataaccaactcatctttatgatgatgccagcttaagacgttccctggaggtatctctatgcttcaagatatattttccccacaacaaaggcattagactgttgcttttagaatagtttactgctttcatgtgttttttaaaaattctccttcttcttgaaccatttgtcttacaatctgggatggattgcatgatttgtatgcaaaatggaaatcgatagactctaagtaagggctgagggccactttctgtgtctgtgcattgtggccattttttcctagcacaggttcccagctttgttttgggtaattagggctgataaaatttcatttctacctaaat

SEQ ID NO: 861992 - DNA, 617 bp, Homo sapiens
cacagatgtttgatctgattttcctttcatttattttacattgtactccaaccaactttagctgtcttgcaaaatgctattctcttccttgcctctaattttcacttctgaggttcacttctcaatgcctatccctgtcraaggcctcttaacctcctcagatcatttcagttcatggtaatctttcctgcacttcaagtcagagtgtctcttattctcaacctcactgtctgcgcacttctttaggatatatgtttcttatgtctctcctttgagcatattttagagccctttagatagcatctagtttattttttaaagtactcaaatgaagctacttagaagaattgaatacactcaattttattatgacaaaagatgtgctgtgacaccacttctacctttctcagaccctagttctctcaacttcctgggatatatgggttatggcagtcaggttgtgaagatttttgttaaaagaacatttcaacaaagaccttgattctacaggtctctctcactattgcttctatagtcaccacagaaggaataacaaggctaatactgtttggataaatgtgtatatggaacagattaatctgaatttggcaaaagtt

SEQ ID NO: 861993 - DNA, 585 bp, Homo sapiens
atcctttgcccacattttagcagagttatttgctttttgcttgctgatttgtttaaattgcttatagattctggatattagacctctgtcagatggatagtttgcaaatattttccccttttctgtaggttgtttatttattcttcagatagtttcttttgctgtgcagatgctctttaacttaacctctgtttttgttgcaattgcttttgaggacttagtcataaattattygttaaggcggatattcagaagtctattatcttagttttcttctagaatttttatagtttgaagacttacatttaaatctttagtccatcttgagttaatttttgtagatagcgataggagtgatagatagggatccaatttcattctgctgcatatggttagccagttatcccagcatcatttattgaatagggagccttttccccattgcttgtttttgttgagtttgttgaagatcagatggctgtagatttgtgggctttattagtgttgtgttaaactgataggagggtattcatactggcagaagctgagatagtgttattgaacaaggtactcatcaagattctt

SEQ ID NO: 861994 - DNA, 671 bp, Homo sapiens
ggatactgttgtagtcagttcaggatgctataacaaagtaccatagactgatggcttataaacaacagaaatttatttcttacactcctggaggctggaatttcaagttcagggttccagcgtggttgagttctgttgagggtcctcttcaggtctgcaagctgcagacttccaacttcttgatccatcctcatgtggtggaaagaggactagagagctctctggggtcccttttatcactaatcctattcatgagggctctaccctcgtaaccaaattacctcccaaaggccccacctcctaataccatcaccttggtggctaggacttcaacatatgaattttaggggaacacaaacatttagtctattgcaaatgcaagtacatagagccatttctccagacatacagtgcaagagtgatttaataaggataagtttcaagtytgaccaaatatgagatccagaagcaacatgtctgtctgcaacacaggtcaaaactctttctttattatggcaaactttgggctggaagccctcattgtcctttttggtaaaaagacatatatatatatatatatatatatatatatatctttttttttttttttttttttttttttttttttttttgagatggaatcttgttctgtcacccatgctggagtgcaa

SEQ ID NO: 861995 - DNA, 598 bp, Homo sapiens
cttgaggattcaccacactgtcttccacaatggttgaactaatttacacccccaccaacaatgtagaagtgttcctatttctccacatcctctccagcatctgttgtttcctgactttttaatgatcaccatcaccattctaactggtgtgagatggtatctcattgtggtttgatttgatttgcatttctctaaagaccagtaatgatgatcyttttttcatgtttttttggcttcataaatgtcttcttttgagaagtgtctgttcctattcttcacccactttttgatggggttgttgttttttttcttgtaaatttaagttctttgtagattctggatattagtcctttgtcagatggatagattgcaaacatcttctcccattctgtaggttgcctgttcattctgatcatagtttcttttgctgtgcagaagttctttagtttaattagatcccatttgtcaattttggcttttgttgccattgcttttggtgttttagtcatgaagtctttgcccatgcctatgtcctgaatggtattgcctaggttttcttcaagagttcttatggttttaggtctgacgtttaagcctt

SEQ ID NO: 861996 - DNA, 598 bp, Homo sapiens
cttgaggattcaccacactgtcttccacaatggttgaactaatttacacccccaccaacaatgtagaagtgttcctatttctccacatcctctccagcatctgttgtttcctgactttttaatgatcaccatcaccattctaactggtgtgagatggtatctcattgtggtttgatttgatttgcatttctctaaagaccagtaatgatgatctttttttcatgtttttttggcttcataaatgtcttcttttgagaagtgtctgttcctattcttcacccactttttgatggggttgttgttttttttcttgtaaatttaagttctttgtagattctggatattagtcctttgtcagatggatagattgcaaacatcttctcccattctgtaggttgcctgttcaytctgatcatagtttcttttgctgtgcagaagttctttagtttaattagatcccatttgtcaattttggcttttgttgccattgcttttggtgttttagtcatgaagtctttgcccatgcctatgtcctgaatggtattgcctaggttttcttcaagagttcttatggttttaggtctgacgtttaagcctt

SEQ ID NO: 861997 - DNA, 624 bp, Homo sapiens
ccttgatcatgtatttacttaaaaaaatcgtcttcggaattgaatacaatttcttcgaggtcaagaactttgtctttttcactgctttatctctagctctagaatgatagatagtattggcctttaaggtgaagtaaaaatagtccaagggggacataaacattgacagttttaagagatattcacttccagttcaccttccattatgtactcttttctaaaattgatctgcttgagaatccatcattcagattatttcccaattcccctttaacaatagtttctatacctttttcttttttaaagcaaaccctatttcctgattatcttaatatcatgtrtttctctaaggtatcaaaacttctggtggaccaaaaaatggatcaactggaaatattagtaatgaaattgagaaagtgaaacactctgttgtctgggtaacaagtagtcttgtgattcagttggtttccaattaaaagctttcattgtaagaaagactgattgcaatttaaaaattatgaatccatatacattttttttttttgccatataactcagacgccattcaaagaattgagtggctttgttataacaaattctttttattcacctctactctttgac

SEQ ID NO: 861998 - DNA, 589 bp, Homo sapiens
atcttgggtaaccaggaaatagtagatgctctcataccctctgtggtcacggctaattgggaagctgcctcagttattttcttctgccatcatttctgtttctggttgcagcactatgttggggcaggaaagaattcagaataccttgtgttctgtgttcaggtcactcaaattttaaatagaatttctatgtatgctgggcttccaatgcattgagatgagttcgtgtgtatgctgattcttcctgatcattagaaaataaagttacattggttaagggattgaatagcagatggagaagagagcgatgaaataaactgccagtgggaacctcagcacagggaacttacacacacacatgcacatgcgattgaaagcyctgactttaaaataattctatctgtggctttcaagatccaagaatgtgattctttattcttgtctgtatcattccggagtgagagggggtctctagaattctgcaccctgattgacggaaaaagataaagagtccaaggaaattagtagagagtgtccattaattatcaacaagagggcagatgactggccagtctctgagaggcaagag

SEQ ID NO: 861999 - DNA, 569 bp, Homo sapiens
attattgccattatgaagataaggaaagtgaggctcagagagatgaagtgatttacctgaggtcacgcaggtataaaggatggcgctagcactcaaacttggatcccctgactccaaaccctggaataaaaagagggactatttcattcacttaaacctaaagtaaagtttcagttatgcttcttaaagaagatccagtggcactggacattttccagagcaaatcaactaaaatgaaagtgggaatgcagaaggcttatcagtgtgggacagactaactggctaggctctttagtctgagcacagtraagtgtggacaatatgggactagggtgaccgtggatccattcaccagctcctgagatggcaaaactgttgacctcggtaaggtcaggactggtaaaaatactttctcacagtaacttcaatatacttaagaaactcattgtcaagagatgatgcaggatagaaaaggtttagaaaaaaagatgttgagagattcataactaggctgaccatatcattcatcatcataactgatttgacagaaagagggtcctattagtaat

SEQ ID NO: 862000 - DNA, 664 bp, Homo sapiens
gcctgaaattttcttttttattgtgtctctgccagcttttggtatcaaggtgatgctggcctcatatactgagttgcaaagaagtccctcctcctcaattttttgtaatagtttccgtaggaatggtaccagctcttctttgtacatatggtagaattcagctgtgaatccatcaggtcctgtgctttttttggttggtaggctatttattactgattcaatttgggggcttattatwgatctgttcaggcataggcagaaaattgaagttggactccttccttacaccatatacagaaatcaactcaagatggattaaaggcttaaatgtaaaaccaaaactataaaaccctatgagacaacctaggcaataccatcttggacgtaggaatgggcaaaggtttcctgacaaagacaccaaaagcaatcacaacaaaaccaaatactgacaaatggggtataattaaactaaagggcttcttcacagcaaaagaaataaactatcaacagggtaaacagacaacctacagaatgggagaaaatatttgcaaactatgcatctgacaaaggtctaatatccagcatctataagaacttaagcaaatttacaataaaaaagcaaacaaccccataaaaaagtgggcaaaggacatgaacaaacact

SEQ ID NO: 862001 - DNA, 664 bp, Homo sapiens
gcctgaaattttcttttttattgtgtctctgccagcttttggtatcaaggtgatgctggcctcatatactgagttgcaaagaagtccctcctcctcaattttttgtaatagtttccgtaggaatggtaccagctcttctttgtacatatggtagaattcagctgtgaatccatcaggtcctgtgctttttttggttggtaggctatttattactgattcaatttgggggcttattattgatctgttcaggcataggcagaaaattgaagttggactccttccttacaccatatacagaaatcaactcaagatggattaaargcttaaatgtaaaaccaaaactataaaaccctatgagacaacctaggcaataccatcttggacgtaggaatgggcaaaggtttcctgacaaagacaccaaaagcaatcacaacaaaaccaaatactgacaaatggggtataattaaactaaagggcttcttcacagcaaaagaaataaactatcaacagggtaaacagacaacctacagaatgggagaaaatatttgcaaactatgcatctgacaaaggtctaatatccagcatctataagaacttaagcaaatttacaataaaaaagcaaacaaccccataaaaaagtgggcaaaggacatgaacaaacact

SEQ ID NO: 862002 - DNA, 664 bp, Homo sapiens
gcctgaaattttcttttttattgtgtctctgccagcttttggtatcaaggtgatgctggcctcatatactgagttgcaaagaagtccctcctcctcaattttttgtaatagtttccgtaggaatggtaccagctcttctttgtacatatggtagaattcagctgtgaatccatcaggtcctgtgctttttttggttggtaggctatttattactgattcaatttgggggcttattattgatctgttcaggcataggcagaaaattgaagttggactccttccttacaccatatacagaaatcaactcaagatggattaaaggcttaaatgtaaaaccaaaactataaaaccctatgagacaacctaggcaataccatcttggacgtaggaatgggcaaaggtttcctgacaaagacaccaaaagcaatcacaacaaaaccaaataytgacaaatggggtataattaaactaaagggcttcttcacagcaaaagaaataaactatcaacagggtaaacagacaacctacagaatgggagaaaatatttgcaaactatgcatctgacaaaggtctaatatccagcatctataagaacttaagcaaatttacaataaaaaagcaaacaaccccataaaaaagtgggcaaaggacatgaacaaacact

SEQ ID NO: 862003 - DNA, 638 bp, Homo sapiens
gctttgtctcttgaaattataggtttttgttcttgtcttctagtgtgcctggcaatttccttttatatatttttttcaatgttgtattgagcaaaaggaagtgaggtaaataggtcttaatgtgaagttctctgttaaccgtgttttcaggtttgagcccaagccgaggtcygaggggagtcagtgggttggtggtgggtagctggataaacactggaggaatcataggtagttgcaacatggctttattctctctctggtcacaagctgtatgtacagcattagcagggtaattataccttttacagacaatagtggctctgagccaaccatgagctcccatgagtggttacctaatgtgcctcatgtggcatggttacataatgtgtaaggttggcacctgtgctccaaacttgctgagtcatgcttccccagaaggctgcctcagcttactcctgactaaagtgtagccatctcccttatactccatcccctaggccaagggtgtcttctgggtagggacatgtgcccatagggtggagtcctgaatccataaccaacaagaacaatacagagagcaacagctcactacctggatcccaggtatgctacttatgactactagggtcgagcatagg

SEQ ID NO: 862004 - DNA, 638 bp, Homo sapiens
gctttgtctcttgaaattataggtttttgttcttgtcttctagtgtgcctggcaatttccttttatatatttttttcaatgttgtattgagcaaaaggaagtgaggtaaataggtcttaatgtgaagttctctgttaaccgtgttttcaggtttgagcccaagccgaggtctraggggagtcagtgggttggtggtgggtagctggataaacactggaggaatcataggtagttgcaacatggctttattctctctctggtcacaagctgtatgtacagcattagcagggtaattataccttttacagacaatagtggctctgagccaaccatgagctcccatgagtggttacctaatgtgcctcatgtggcatggttacataatgtgtaaggttggcacctgtgctccaaacttgctgagtcatgcttccccagaaggctgcctcagcttactcctgactaaagtgtagccatctcccttatactccatcccctaggccaagggtgtcttctgggtagggacatgtgcccatagggtggagtcctgaatccataaccaacaagaacaatacagagagcaacagctcactacctggatcccaggtatgctacttatgactactagggtcgagcatagg

SEQ ID NO: 862005 - DNA, 655 bp, Homo sapiens
aggctgtgacaggtatccatctcacagtggtattaccccaatgttgatctattcaccatggtgcttgggctgggggtactacatgttcccccactagacagccccacccatcataaatgctaccggtcagccagggagcaggcacactgtggaacttgctttgtccaaagcttgccacattcattccaggagtcagccatgggaccccatatctccacccatgtccagttctctgcagacactgaatgtatgtgccaaggcaagccattcatggctgttgttggaggggtggtgcagatccaactgttggaaatattggtcactgcagtgtaggtgtggacccagtccatgatacaggtggagcgtgttaacctgcagtcaaaatgacagatcaggcacaggtactaacagaggtaagttacmtctctcaggcaaaatacaggctaaactttcatccctgaataacaacgcagccaccaagggcttttgccctgggtaatggtaccacaacttctcagctcccaattgttcctttgggtcctgtatctgtgacaaagtcatgggggagctcataataggccacacagactgtacatacgtcccccggaggagggttccttctctcttcattcccctatgaacagtcaaccacaag

SEQ ID NO: 862006 - DNA, 634 bp, Homo sapiens
gaattatcattgaacttctctcactgagtaattagctcaacaacagaactaacattgttctcaagtttcatgttaatctcttgaaagttgtaatttgatttttctctttcaagagtctctgttattcaagcacaacatcttctttgccttctcaatggctgataatatccttaggaawctaatgactgtgcaagtgtcttacttcacgtattcaccctttctcttcagcattcataggtaatatatagaagcacctttttccagcttcagttttcttggaggtattgcacagtcatccatcttcggaatttgcctctgtaagtacactattttgtgttatttttcccttctccatccattgctaactggagcatagttggataaaggtatccaaccctttggattaatgaatgtgatttgtttgcttctcttggcagtttggaataaggataaaggggtaataactatatggctgcttgtgctgaagctaaaaggaagatcacatattactgatctcattcgtagttcttttcccccactgtgctgctgttgtttgcatgcctctttttcagcatgtaaaaacattttcaacttgcattttattttatttatttatcactccctgcagtaaaaa

SEQ ID NO: 862007 - DNA, 635 bp, Homo sapiens
tatgatttttatacttgtttcttttaaaaatcttacacaattctagttaaatgatgaagaccaatctgagctcctgttgtgttttatttgtatttacctaaaattttaaattagactatggtttttgtttgctttttgtatctagagaattaagtactctaaggaagactgcaactatattactctattcggtagttggtaaataatagttgcacacaaaattggaagaactgtaaattctggaattagccataatgatytgatgctttttaaaaattgaatttgttgttagtatctattttaacatattttaaaaatattttatctgttgtatgttcatgtgttgtaatgccattaaaatgagcatgtagctagcaaatcttctgtaaatgttcttacaatcttgtggaagaacatttttaaacttaaacaaatatgaatataagctgaaatttcgcaacttaattggtctttgacttaggacttcactgaattcattagtaaaatgacaggaaaaataactacaacccttttgaattgcagaatcacagattgtagcataatggacaagcctcctttgttaataaatgcataatagaaatgtattttaaatttccttacatttatacttccta

SEQ ID NO: 862008 - DNA, 635 bp, Homo sapiens
tatgatttttatacttgtttcttttaaaaatcttacacaattctagttaaatgatgaagaccaatctgagctcctgttgtgttttatttgtatttacctaaaattttaaattagactatggtttttgtttgctttttgtatctagagaattaagtactctaaggaagactgcaactatattactctattcggtagttggtaaataatagttgcacacaaaattggaagaactgtaaattctggaattagccataatgatctgatgctttttaaaaattgaatttgttgttagtatctattttaacatattttaaaaatattttatctgttgtatgttcatgtgttgtaatgccattaaaatgagcatgtagctagcraatcttctgtaaatgttcttacaatcttgtggaagaacatttttaaacttaaacaaatatgaatataagctgaaatttcgcaacttaattggtctttgacttaggacttcactgaattcattagtaaaatgacaggaaaaataactacaacccttttgaattgcagaatcacagattgtagcataatggacaagcctcctttgttaataaatgcataatagaaatgtattttaaatttccttacatttatacttccta

SEQ ID NO: 862009 - DNA, 632 bp, Homo sapiens
gagtttattaaagtttttttacatcggtgggcttttgtcatagtttctaataattttgatggttttctttgaaaacagaaaaggcaggatttatttgtcagttttttttttttttgcctcaaactagcaatattcagtatatgaaagctggctagccatcatttctattttagaattttacrtttcatacacctcaatgcacaatacaaacaaatcaaacacttacgacaagtcctgatttttttttggcacacaatattccacaaatgccacaaagaagaaactgaaaaggaaaagaagaacaattactccttatccaaagacacgaggacccctagattttagcttgtagttcactcatgacactttctccagggaagatagaacattttaaatttccttcaaaacctggagaggataagatctcattctagaatagtaaaggataaaagtataaaccctaataaaaatttattttttgctagattgttagaggtaattgaatcagttttagcatcaggtaaaattattaagtaaatgaatttagagctttgtttctcccatttcttttcaccgtctgattcctttctactttctcagggagaaaagtggtgtgatacattcattcacac

SEQ ID NO: 862010 - DNA, 586 bp, Homo sapiens
ttaaaaagtcaaactttaaatttgtgcattaaattatagatcagaaaactaaaagacaaattttttaaaaaaagatgcaatgacaacaaagattaaaccaacaggtattaggaaagttagaaaaaaatttaaaaagtgaaactatgcaataaattggtgtaaataattcgaataaagtcaacaataagactaaatgtgaatgttttccattttcttagcaagaggaaaaatggagaccagaaaagtactctgttagaatttctctaaartgagtaaaacccttttctttccctgctagtttgtctctcttctctgtctcccgctctttctttttctctctctctttctcttgcactggcctaggtgctagtcaatgagttccttattactattcttttctgtacaagaaagtttattttgggaaagagcaactaagagtaaaaaaggcaatggtagaattttccagtttgaattatgtaatggaaaattttggaaccatgattactgtggaagcagatataagcaatggttctattagccggcagggagagcaggcaaggttgaaggagagcaggcaaagttgaac

SEQ ID NO: 862011 - DNA, 513 bp, Homo sapiens
aaggggactgaacttttgttgaatgcttttggttttatttacatttgaaccatttttaggagttacttattcaaaaagttaaataagttgactcctatttgctcaaggcaaaattatgatgtaaatattaagaaaaaatagcccatcaagattcattgttattcagttttgtgttctccgtggctatttaaaaaatactaacaaaaactccctaatctgtacatactcaraatgtgtatttggaatgagagggtggcacccctttttggggtgggccaaggagctctgctagcgttttttcaaccacaaccaccgaggtcattgttttgcctgcctatatccaaggctggttttgcatgtggaattgaaatgaattcagaatctggagggtcaggtatttcaggaacaaactcaaaagttccatagagtagtttataagaattgagtacagaaataaattaagcctatcatggaagattgaggttgaaggctgagcgtagttttcttcttaaa

SEQ ID NO: 862012 - DNA, 640 bp, Homo sapiens
taacaggattatttaagggcttttgagcgagtccctctgcctttagtttctctaatatcactcactctaagttcattcctagtatgatttttagcaccttattagtgccttattttctcgttcaatttttttaatttaattttatgtatttctttctttctttctttytttttttgagatggaatctcgctctgtcacccaggctggagtgcagtggcccgatcttggcttagtgcaacctccgcctcccagattcaagcgattctcctgcctcagcctcccgagtagctgggactacaggtgcgcacaactacgcctggctaatttttgtatttttagtagagacagggtttcaccatgttggtcaggctggtctcgaactcctgacctcgtgatccacctgcctcagcctcccaaagtgctgggattacaagcatgagccacccgcccggcctttttgttcaatttttaaaatcaatgtctctccaaatttcttggcctggcatcagggcccaaatggatggttccaagccaatttgacaactggtctactgtggatcttctacagccaaagtgcacttaaattattctgtacactctcagtttatccctttttgcatattctacttctcttcttgga

SEQ ID NO: 862013 - DNA, 640 bp, Homo sapiens
taacaggattatttaagggcttttgagcgagtccctctgcctttagtttctctaatatcactcactctaagttcattcctagtatgatttttagcaccttattagtgccttattttctcgttcaatttttttaatttaattttatgtatttctttctttctttctttctttttttgagatggaatctcgctctgtcacccaggctggagtgcagtggcccgatcttggcttagtgcaacctccgcctcccagattcaagcgattctcctgcctcagcctcccgagtagctgggactacaggtgcgcacaactacgcctggctaatttttgtatttttagtagagacagggtttcaccatgttggtcaggctggtctcgaactcctgacctcgtgatccacctrcctcagcctcccaaagtgctgggattacaagcatgagccacccgcccggcctttttgttcaatttttaaaatcaatgtctctccaaatttcttggcctggcatcagggcccaaatggatggttccaagccaatttgacaactggtctactgtggatcttctacagccaaagtgcacttaaattattctgtacactctcagtttatccctttttgcatattctacttctcttcttgga

SEQ ID NO: 862014 - DNA, 607 bp, Homo sapiens
ttaagatatctttatcctttcaaactcaaatttaatatatacattgacaaaaattacatgacaaagaacaagataattatttggaggctgatagtaacttattattgaattcaaagtaaggattcttggatgaattcaatgttaggattgaacrctatttttcttttttgtagttctgcaatttaaaaacatttatctcacctgaaaaaatatataaatctaattatccaaagcaaaattttgccagtttcaaaaaaaagttacagcatctttcaaaaatgaattacttttgaataatttttcttgaactccgtaataatcattttcttttagtgacttaaagctcaagtgattaagccatgatggttaaacatgctacagattatcagtgacagaatactttctattgaattatcttgaaaagtaggatcaagctaggcatccagaagtatatgacacatatatagcttgaaggaaaaaactggttttcacaattagattcacattaggaatggtgctgagttattttattgaatcttggtggaagaaatgggtctctaaggctttcttggagattcatcctagtaaaaaagaagcttgttgagtc

SEQ ID NO: 862015 - DNA, 607 bp, Homo sapiens
ttaagatatctttatcctttcaaactcaaatttaatatatacattgacaaaaattacatgacaaagaacaagataattatttggaggctgatagtaacttattattgaattcaaagtaaggattcttggatgaattcaatgttaggattgaacactatttttcttttttgtagttctgcaatttaaaaacatttatctcacctgaaaaaatatataaatctaattatccaaagcaaaattttgccagtttcaaaaaaaagttacagcatctttcaaaaatgaattacttttgaataatttttcttgaactcygtaataatcattttcttttagtgacttaaagctcaagtgattaagccatgatggttaaacatgctacagattatcagtgacagaatactttctattgaattatcttgaaaagtaggatcaagctaggcatccagaagtatatgacacatatatagcttgaaggaaaaaactggttttcacaattagattcacattaggaatggtgctgagttattttattgaatcttggtggaagaaatgggtctctaaggctttcttggagattcatcctagtaaaaaagaagcttgttgagtc

SEQ ID NO: 862016 - DNA, 591 bp, Homo sapiens
tttatcaacacattacatcttttacttacaattcaagttttttgggattgtgatacatagatatattgactccataatgtggtgtggctgtgtccccacccaaatcttatcttgaattgtactaccataattcccacgtgttgtggaaggaacctggtgggagataattgaatcatgggggcgattttgcccatactgttctcacggtagtgaataaatctcacaagatttgatggttttataaaaggtttccacttttgcygtttcctcattctcttctcttgtctgccaccacgtgagatgtgtctttcacattccataatgattgtgaggcctccccagtcacatggaactgcaagtccattaaacctctttcttttgtaaattgcccagtctcaggtgtgtatttatcagcagcttgaaaatggacaaatacagtaaatttgtaccagtagagtggggtgctgctaaaaagattcctgaaaatgtgaaagccactttggaactgggtaacaggcagaggttgcaacagttggaagggctcagaaaaatacaagaaaatgtgggaaagtttggaactccctagagact

SEQ ID NO: 862017 - DNA, 629 bp, Homo sapiens
agttctgaaggctagaagtctgaaatcaatatgtctgcaggccatgctttctctgatgactctaggggacaatctttccttccttcttctagtttctggggttccttggcttgtaggtgcatcactctagtcatattgctgtctgatttctgtatatagtcacattgtcttcccactgtgtgtgtgtctgtctttgtgtccagatttcttctttttggattggattaggacccacactaatgacttcattttaaattgattgcctctgcaaagagctattttcaaataagttcatagtcacaggcaccaggggcttyaaacattaacatatctttttggaggcacccaattcaacctcttcagtatggttatattattcatatgttatataattagattttatttgttacagtttatattctcctttggctccactgacatcctggtgatatttttaaaacttgcatataattgtttattcttagtgctatttattcttaatgctgtatagttgtgcaggttttgacaaatacacaatgtcgtttatacacaaagtcatttatttatcaccacagtcatgctgcagcgcagttccattacccttccactgaatttctgcagccctccac

SEQ ID NO: 862018 - DNA, 620 bp, Homo sapiens
ctaacacctaaactagagctacctttctagccctcttttgtactttgagagaaaatttgtttaaaggatactctaaattcactctacatactttcttaattctatattttaaaatagccctctccactgaatttacrttatcatttgtaatgaactagaagcttgtgtctccccaaaattcatatgttgaaatcttaaccccagaggtgatggttttaggagatgaggcctctggaagttgattaggtcacaacagtggagccctcatcaatgggattagtgtcctcacaaaagagactccagagagatccttttcacttctaccatgtgaggctgtagcaaaaagatggccatctatgaagcaggaagtgggttctcagtggacacccattctgctgacccactgatcttagatttcccagcttccagaactgtgacaaataaatttctgttgtttacaagcctcccaacctatggtattttgttatagcagccaaatagactgagacaccagtcttcttgaattttattttcttttggcttttgtgaccctactcatatcttcttccagaaccatttctgtatattctttgttatgagctcaatctctgcttgatgct

SEQ ID NO: 862019 - DNA, 620 bp, Homo sapiens
ctaacacctaaactagagctacctttctagccctcttttgtactttgagagaaaatttgtttaaaggatactctaaattcactctacatactttcttaattctatattttaaaatagccctctccactgaatttacgttatcatttgtaatgaactagaagcttgtgtctccccaaaattcatatgttgaaatcttaaccccagaggtgatggttttaggagatgaggcctctgkaagttgattaggtcacaacagtggagccctcatcaatgggattagtgtcctcacaaaagagactccagagagatccttttcacttctaccatgtgaggctgtagcaaaaagatggccatctatgaagcaggaagtgggttctcagtggacacccattctgctgacccactgatcttagatttcccagcttccagaactgtgacaaataaatttctgttgtttacaagcctcccaacctatggtattttgttatagcagccaaatagactgagacaccagtcttcttgaattttattttcttttggcttttgtgaccctactcatatcttcttccagaaccatttctgtatattctttgttatgagctcaatctctgcttgatgct

SEQ ID NO: 862020 - DNA, 643 bp, Homo sapiens
caactaccttttgttttgctttattttgttttattctaggcatgccttagaatttcattatgataataatgaaaactaatatttattgagcgcttagcactgctagccactgtgcttgatgttttatacgtattagctcatttaatcctctcaaattctataaggtaggtaataatgttatgactattttgtaaaggaacaaattgagactttaaaaggttatgcaacttccccaaactcacataattagaaagctgttgcagtggtatttaaattcttgtttgttttagactacaagcctaatcccacattgtgtaaatggaaaattttctagtcttttccatcagcttttcagtaagacrtttatttaactttcatagtgtactttttgtatatttcttctgaaaccaaatgtaacgcatcttcatgatggtgtttgaaactgcagcctaaatacaatttaaaataatattaagaaaatgctactaattccaaagaacattaagactactttgtaatataatcctttctatctctctcagacccacaaatttaatgtcatctgttaggaatattcagcatttaaggtcttggttctgtatgtttgaaagagacttgaaagaaagtgagattttcattgctg

SEQ ID NO: 862021 - DNA, 643 bp, Homo sapiens
caactaccttttgttttgctttattttgttttattctaggcatgccttagaatttcattatgataataatgaaaactaatatttattgagcgcttagcactgctagccactgtgcttgatgttttatacgtattagctcatttaatcctctcaaattctataaggtaggtaataatgttatgactattttgtaaaggaacaaattgagactttaaaaggttatgcaacttccccaaactcacataattagaaagctgttgcagtggtatttaaattcttgtttgttttagactacaagcctaatcccacattgtgtaaatggaaaattttctagtcttttccatcagcttttcagtaagacatttatttaactttcatagtgtactttttgtatatttcttctgaaaccaaawgtaacgcatcttcatgatggtgtttgaaactgcagcctaaatacaatttaaaataatattaagaaaatgctactaattccaaagaacattaagactactttgtaatataatcctttctatctctctcagacccacaaatttaatgtcatctgttaggaatattcagcatttaaggtcttggttctgtatgtttgaaagagacttgaaagaaagtgagattttcattgctg

SEQ ID NO: 862022 - DNA, 620 bp, Homo sapiens
atgaaaggcacaaaggttttctgaatcccgtagcatgtgggtatggcaggatcttggtagcaaatgtctatgtgatgcctttagagaggctgaacaactgaaaccaaacatctttctattgcaagttaacagcacctgagcttggcatctaaggtagtttggacactaggtatgtcaaccatgaccagtattgactgacaagcagggagcccttccccaaatgttctaccacttactgagggaactcagtgactragggaacacgcacatttttctatcctattagtctttatgttaatccttcattggcaactttttagctttcctcactccacctattttataaaagccattttcatcaaagccattttcctttccttttgttaaccttccttagcactgtttccttttcactccatgcattctcctgggtaatcctattgtttcaataatcatctattatttatttgttaattatctcagtgtaaactttacttttaccaggaaattattcttgacactgtaggtctagattatttgtctttctgtgtgagattttagagtccaaccttataatatcatgtgttggagtctactataatgactgtctcctataccag

SEQ ID NO: 862023 - DNA, 568 bp, Homo sapiens
aactttaatctgtattttaatggctgttgcttaatttgaataactttaattaggaatacatacttcagagatgattggttagtttagccagatttagccaaatgccatatttcactcaaatgtgttccatgatctttagttcttgtgagtttaactaatacaggagatgttagaaatgatttttcattggtgatgttattcaaagtatcttgatttggttagcatgttggacctttcagagtaacatcctaggcccaaaactcttgaatcagcccttcattcagacatggaataaataattatgtaactatattcgaaccagatgaacagctgagttcttctactagaagactgtcatttatgccttgagacgcaagattctcactagaatccccaaaatgataayaaattggactctactgaacttgtaagaaaaggtgatatgactgtttttgtcactgtttcctaataaatatttgcatgtgtattagtattctgaaattcatatttatcttatttactatctggtagtggcattgtaagaaacaaaaaacttaatggctttcac

SEQ ID NO: 862024 - DNA, 634 bp, Homo sapiens
cagacgatgaatgatattgcctgccatgatgatttcttacccttcaaacattttgcatattcttttaggactaaagagtaattctttccagctcttctcatttttatttttttctttatttttcaaaattcatttttatttgtaagtttgatggatacataataggtatatatatttatgagatattttgataaagcatacaatgtgtaataatgacatcaaggtaaatgtggtatctattgcctcaagtatttatcatttcctwgtgttacaaatattccaattatactcttagtaattgttaaatggacaataaattattattgactgtagtcaccttgttgtgctatcacgtactacatcttattcattctatctctagctctttttagttagcatataaaatccacctgtggtcttttacaaatatcaaaacatgggtactgaggtcatatgcaggatccattttgaaataaaatgaaaatagttataagtaggttccatttgagaggcagaaatggacacccaaattgcttgtcaattgcaaacaaaatatacttaagcatataagttctgtttacacctagataaagcaatagagtgatcaactgatagatcaatatacagatcaatt

SEQ ID NO: 862025 - DNA, 570 bp, Homo sapiens
ctccctgtgggatcaccttttttccatagaacatttttaaagtattaccatctttgtggaatatgtgctacaaaacgtcagctatagtgatggaaagcagcatttcttttgggcagaaagattttattttaccatttagaacaccttaaaatagatcttccattacacaaaatggatattttaacactttataggcaatttgattaaacttgcccctagcagctctgtggtatgattcatctttctatagtaaataatttgraagttttaccactatttagtttccaaaaacccacggaccagaagctttaatatccatagattccaattaaactcagtaataccagggttatataatcagttattgaattggtccaggtagactaacttttataacaaacaaccctaaaatatctgtggtattgggcaaacaaagcttatttttactgacaattcaatgtgggtaggcatgaggggtgatgtaggagtggggaggatgaattgtgatccacatagtcattcagggatccaggccttccatattgtggctcccttctcctctaagccttt

SEQ ID NO: 862026 - DNA, 612 bp, Homo sapiens
ttatacacatgcacgtatttgcatatcataatatatatagttacacaggacagataatcttcaatttacatgtgcgatttgaaaatatgttctccttttgtcctaaattaaacactagtatattatcagtcaaaacaaggttgcaataacagatgtcaggaattctacatatgttctacataaagtgttaactgctaataagagcaagtcaggaaaagagtattaaatgcaatatatcttgggctggcataattacggaagaaaaaaatatcaaagccataaaaatactttgatgttgtatgaaactcaggtgctagcaaatataatattgatggattatatggcttttcaaagtttttcattcacagttaaatccaaaccgaaacatcagtgcattaaggtcagaaaaatctggaagcttacatttatttatttwttttttttgcaatgagcagagtattttaaggtatcctctaagtgagcagttcttttgtcattctgatccctgctccttgaactgatttcctgtttggagtctgaaccaaggattatttaaatttgatttgaaaaatgtcactaatgaaacatcagaaaagggggaaaaaggaaatg

SEQ ID NO: 862027 - DNA, 601 bp, Homo sapiens
ccagcagcacatcaaaaagcttatccaccacaatcaagtgggcttcatccctgggatgcaaggctggttcaacataagcaaatcaataaacataatccatcacgtaaatagaaccaacaacaaaaaccacatgatatctcaatagatgcagaaaaggcttttgacaaaattcaatggcccttcatgctaaaaaatctcaataaactaggtattgatggaacgtatctcaaaataataatagctatttatgacaaacccacasccaatatcatactgaatgggcaaaaactggaagcattccttttgaaaactgccgtctctcaccacttctgttcaacatagtgttgaaagttctggctagggcaatcaggcaagagaaagaaataaaggatattcaattaggaaaataagtcaaattgtccctgtttgcagatgacatgattgtatatttagaaagccccattgtctcagcccaaaatctccttaagctgataagcaacttcagcaaagtctcaggatacaaaatcaatgtgcaaaaatcacaagcattcctatacaccaataacagagagtcaaatcatgagtgaactcccactcacaa

SEQ ID NO: 862028 - DNA, 601 bp, Homo sapiens
ccagcagcacatcaaaaagcttatccaccacaatcaagtgggcttcatccctgggatgcaaggctggttcaacataagcaaatcaataaacataatccatcacgtaaatagaaccaacaacaaaaaccacatgatatctcaatagatgcagaaaaggcttttgacaaaattcaatggcccttcatgctaaaaaatctcaataaactaggtattgatggaacgtatctcaaaataataatagctatttatgacaaacccacacccaatatcatactgaatgggcaaaaactggaagcattccttttgaaaactgccstctctcaccacttctgttcaacatagtgttgaaagttctggctagggcaatcaggcaagagaaagaaataaaggatattcaattaggaaaataagtcaaattgtccctgtttgcagatgacatgattgtatatttagaaagccccattgtctcagcccaaaatctccttaagctgataagcaacttcagcaaagtctcaggatacaaaatcaatgtgcaaaaatcacaagcattcctatacaccaataacagagagtcaaatcatgagtgaactcccactcacaa

SEQ ID NO: 862029 - DNA, 601 bp, Homo sapiens
ccagcagcacatcaaaaagcttatccaccacaatcaagtgggcttcatccctgggatgcaaggctggttcaacataagcaaatcaataaacataatccatcacgtaaatagaaccaacaacaaaaaccacatgatatctcaatagatgcagaaaaggcttttgacaaaattcaatggcccttcatgctaaaaaatctcaataaactaggtattgatggaacgtatctcaaaataataatagctatttatgacaaacccacacccaatatcatactgaatgggcaaaaactggaagcattccttttgaaaactgccgtctctcaccacttctgttcaacatagtgttgaaagttctggctagrgcaatcaggcaagagaaagaaataaaggatattcaattaggaaaataagtcaaattgtccctgtttgcagatgacatgattgtatatttagaaagccccattgtctcagcccaaaatctccttaagctgataagcaacttcagcaaagtctcaggatacaaaatcaatgtgcaaaaatcacaagcattcctatacaccaataacagagagtcaaatcatgagtgaactcccactcacaa

SEQ ID NO: 862030 - DNA, 577 bp, Homo sapiens
tggtagatccaatatatgatcacattttggtttctttataagatcaaagatattagatagaagatagagtcacccgcatgaatgcatataactgctttataaatactgtattgacttttaatgtcttggaattatatagatgttttatatgtaaaaatgtttagaatgatgttagtaaaatgttagctaatgaatcattttagattcatggcctgaaattttatggaaggaattatccaaataccctcttacaccctaggtaatcccaataaatagtgtccagttgtaaggtaatacctasagaaaagacaaaagagatccaaaatcatgtaataatgataaatgtgaagatgatcagaggtctaatgtaggcaagatgtgtaaaataaagacattctaaattaaaggctcagggtgcttctcataatagggactgagaaactagccaataaccaacactaccaaagcctctgcaattgtctggagataaaactggccttttgtttaattatctctgtagtcaggtgtaagaaacactgcctcaaaatcttaaattctccttcagcaaatcagctaa

SEQ ID NO: 862031 - DNA, 577 bp, Homo sapiens
tggtagatccaatatatgatcacattttggtttctttataagatcaaagatattagatagaagatagagtcacccgcatgaatgcatataactgctttataaatactgtattgacttttaatgtcttggaattatatagatgttttatatgtaaaaatgtttagaatgatgttagtaaaatgttagctaatgaatcattttagattcatggcctgaaattttatggaaggaattatccaaataccctcttacaccctaggtaatcccaataaatagtgtccagttgtaaggtaatacctagagaaaagacaaaagagatccaaaawcatgtaataatgataaatgtgaagatgatcagaggtctaatgtaggcaagatgtgtaaaataaagacattctaaattaaaggctcagggtgcttctcataatagggactgagaaactagccaataaccaacactaccaaagcctctgcaattgtctggagataaaactggccttttgtttaattatctctgtagtcaggtgtaagaaacactgcctcaaaatcttaaattctccttcagcaaatcagctaa

SEQ ID NO: 862032 - DNA, 614 bp, Homo sapiens
ttatcttcttactcagtccttgctgagaataggacaaaagctcttttcgtctttgtagttccaaagcctagtataatgcccgaaacaaaacagtcttgagttcaatacaatgccaagaacatagtaagttcttcttcgtgtccctacttaaatattgatgtggacagcagatagggaaatactgcgtagaagagggcagttccccagcaaaggccacaccctaaaacctggaaacccatgaccctgtgygagaacaggcatttttgtttttgtacccaaattgttgccttttggcccaccagtaccccctatcctgtaaccatttaaatcccgaaccccaggctccaggagacgagcagatagataaacggcagaattgggtggctgagaaggagagaagagaaggagcatccaaatggagagaggagttaggctgggatgatcggagaggagatgggctgctgggtggcctgaccccaggggaagatcaccttcctcctccatccctcttccagctctgcatccatcccactgagagccaccttcaccactcagtaaaacccccacattcactcttcatgtccatgtgtgacctgattcttcctggacaccag

SEQ ID NO: 862033 - DNA, 690 bp, Homo sapiens
tatagccgttcaaactgttctatcagtttacagaggaaaaaattgcaatttagatattgaataactttcccaaagtctcagaacaaaagagtggaggaaacaggacaattctggaactttgggatcctccttagatttcctcacataacaggactctgaacccagatttataaatccgtctctgtgattttaaaatatgcagtgaatttaattaaaagatcataatttaattacttaacatttcatcagaagaaaatggtttggtttaataaatactttcatttttcaccttttaaaactttttaattcatatatgtacaaactaatttgtaaaatatattgctagcaatccaattgcatcattattaatattcwcgattttacatttaaccaataaattacatgataacaattttgtaaatagctaagtttatttattcatttatttgtttatttatttatttaatatattaaatatatttttaatatatttaagctggatttcattaaaatatgttttctcagctgtgtgaagggcagtgaaggaatgggagaaggagtaaaatgtgacaaaactatgacaaaggagttagaaaaaacatttcaggaacaaagagaactaattaactcaaacatacggttcatctcactctgctaagagctaattgtgttttacacactccagctgtt

SEQ ID NO: 862034 - DNA, 579 bp, Homo sapiens
agtattaaatgagaataagagttattatattataccttcacagcaaagataaaacagatatgaatccctaaatgttatataatatacaaaccatttttataaaacagaatctacagatggttcattagaaacacactgaggtaagagaatttaatacaataaaaccgtcttaggtcaagagtaaaaggattatgtgagaatctagatagaatctatttatatctacataatttattgagatattcaccccaatattaaaaatatagtttctaaccaattgcacctgaaaatattttgaaaaataaaaattatagaccataaagaatatctcracagattacacaaaattgaaaaggaaacaatgttcactgaccaaaatacaaccttttacatagagattcaatgaccctctataaaacaagaccttatgggatatagttaagacagtacttgaaagaaaattcatagctaaaaatattcattttatttaaaaatgaaagagtgaaaacagtaaattaaacatcccactcaaaatgtcaggggccagaaaaggcaaaccaaaagaaagagaagaaagga

SEQ ID NO: 862035 - DNA, 663 bp, Homo sapiens
tatagtaatatattgccttttgttatctaccttacacagcattgagtaacagtggcacaaaaaaggcaggtcataagaaatgtcccttaggacaagagtctccaaccctcaggccatggaccagtaccagtctgtggcctgttaggaaccyggctgcacaggaggaggtgagcagcaggtgagcaagcattaccacttcagctccgcctcctgtcagatcagtggcagcattagattcttacagaagcataaaccctattgtgaactgcacatgtgagggatctagtttgcacgctccttatgaaaatctaatgcctgatgatccaaggtggaacagtttcatcctgtaaccatccttctccctaccccagttcatggaaaaactgtcttccacaaaactgttccctggtgccagaaagattgggaactgctgccataggagaccaaaaggaccagtcacggcatgataattcatcctgacaaacactaagagaggaaagggcttattgtcctgcaaggcatgggaggcattcttgggggacaggaagggactgtaaaagtaccgcactccttggccaccaacattagttgaacaaatgttcaaagtcctggagggcccaaacaccctcatagctgagtcctgcactgtctaacactggagaa

SEQ ID NO: 862036 - DNA, 663 bp, Homo sapiens
tatagtaatatattgccttttgttatctaccttacacagcattgagtaacagtggcacaaaaaaggcaggtcataagaaatgtcccttaggacaagagtctccaaccctcaggccatggaccagtaccagtctgtggcctgttaggaacctggctgcacaggaggaggtgagcagcaggtgagcaagcattaccacttcagctccgcctcctgtcagatcagtggcagcattagattcttayagaagcataaaccctattgtgaactgcacatgtgagggatctagtttgcacgctccttatgaaaatctaatgcctgatgatccaaggtggaacagtttcatcctgtaaccatccttctccctaccccagttcatggaaaaactgtcttccacaaaactgttccctggtgccagaaagattgggaactgctgccataggagaccaaaaggaccagtcacggcatgataattcatcctgacaaacactaagagaggaaagggcttattgtcctgcaaggcatgggaggcattcttgggggacaggaagggactgtaaaagtaccgcactccttggccaccaacattagttgaacaaatgttcaaagtcctggagggcccaaacaccctcatagctgagtcctgcactgtctaacactggagaa

SEQ ID NO: 862037 - DNA, 672 bp, Homo sapiens
cttcaaatcatggccgagaaaaaagccttggtgttttagtccatttagtgttgctattaaggaatacctgaggctgggtgatttatgaagaaaacaggtttatttggctctgcaggctgtacaagaagcatggtgccagcatctgctcctggtgagagcctcaggctgcttccacttatgtcagagggggaaggggagccagggtatgcagaaatcacatggcgagagaggaagcaatagagaggggagggagatgccagagtctttttcacaacgagctctggcaggaattaataaagtgagaactcacccaccctcccacacccccgaaccagggaggacattaatctaatcatgagggatccaccctgatatggtttggctctatgtccccacccaaatcttatcttgtagctcccataattcccatgtgttgtgggagggacctggtgggagataattgaatcatgagggtgggtctttcctgtgctgttctcgtgatggtgaataagtctcaaragatctgatggttttaaaaacgggagtttccctgcacagctctctctgcctgccaccaaccatgtaagacgtgacttgctcctccttgccttctgccatgattgcgaggccaccccagccatgtggaactgtaagtccattaaacccctttct

SEQ ID NO: 862038 - DNA, 645 bp, Homo sapiens
tttctcttacccattttcggtaataagagaaatatgactctgtcctgcctggctccaggcagtcagatctaatggttatctcccttgttccctgaacattgctgttatcctgttcttttttcaaggtgcccagatttcatattgttcaaatacagatgctttatgaacaggttatgcagttaacgcaattatcacagggtcctgaggtgacatacatcctcagcttacaaagatgatgggattaagagattaaagtaaagacaggcataggaaattacaagagtattgattggggaagtgacaaacgtccatgaaatcttcacaatttatgttcttctgccctggcttcagcaggtccctccatttggggtctctgacttcccgcaacacaagaggaaacgtaatcatggctgtcttacttgggcccggaaaatgcttaatgactttagcagagttatatctatactacactgctttcatsgagtttccccagacctaacataaggagaaaggaacttgaaaaattggagatggtaggcaaaactggttttcagcatgccccactgtatcagttatctatcactatgatacactatataacaaatacaaaatctagattacacataacactacgcatcgaattct

SEQ ID NO: 862039 - DNA, 659 bp, Homo sapiens
agaacagcataggggaaatcacctccatgatccaaccacctctctccatgtaatacccatgggtattacaggtctctccctccctcgacacrtgaggattaaaaatcaaaatgagatgtaaatggagacacagagccaaaccatatcacccagcatgagagacaagggccatgcccggtggaacagagagaaaaggctaaataggaacattgcctagaacaggagacaagtcttgggggtcatttcaatacagaatataaacgctgaggaacaataagaaatgtgttcaagattccaaggttacaaaaatggttatcacagaagaaaacaggaaggtttagagaaagaactggttgcggtttgtatattcatgtatttacttttcctttgttgggggaaagggttggtaattattttaaatatttagagtttgaagtgatggtggaatcaacaagtagaaacattttgtttgcaaacagaaatatggaactagggttcaactggggagagaaataacaatttttacctctaaaggatagaaatgatagttgaaataaactaagacatgacataagccaaacaaacaaaattgttgagaaaactcatttcttccatttgactaaaatattttgacaaacatgaatatctgatttaatcta

SEQ ID NO: 862040 - DNA, 630 bp, Homo sapiens
taaaccagacacgttctgctcctctttgcaaagcaccttccgataccatactttgttctctagagatgttaacgtaattgctgaggatgcttgccagtggtattttttccaatggtatttattataaaacaatcctggcaagtgaaagaaaacagcacacactgctaatattttggtagatttgtgtgtttattctagcactgttaawaagagagaagtaagcaaccaatgagcacagaagaatgctgctgatgtaaatgaatatgtactcaaagcttagctcttcctcccccttctgacaggggaatgacaaggagtattttcatcttggatttctcttagcctcccacattaacaaatgcagcacccaaagacatgctgttgatgccccgaggcggcaataaggacagacaaagcaatagcctgccagagagcttcccatgtaatggaaaaaaaagggcaggcgaatccaaattacagagaaagagaatccagctgaagggccaatgaagtcagttggctgctaatgaggtcactgttataaggtggctttcttcagtccctcagcacagccttcagtattgcatcttatcaacacgcatatggccatgctaccaggcagacaggaca

SEQ ID NO: 862041 - DNA, 573 bp, Homo sapiens
ttttaaataggtggccaaagaagttgttctaaggaggtgctgcatgatataaaatcagatataggtttagtgagagtaacatcatgtggataagtgacagcagaattttctggatagaaaaatcgttgaacttgctgccctaagtaatatcctcttccaagaaaaggcaaggtgttcggacaaggagggtgagtgttacaaggtgaagtaagaatattagcaagaactaaatcatgtgcttatgcaggccttgatactccctctgaaagttataccaaattttttatatatatatatatatatatatatatatatatatatatatataacgtatacttatatatatawaatgtatgtttatcaatgagttctctgaaacaccaacttttgtatcattgtaactgcctcttctatctcctttcttttcctcctttcttattccctttcaaatgtaccatacttgagcttttatgctacacctggtttttacatagaaaaggaatttaatgagagtgtgcctgtcactgcacaaagaatattcccatttgatctttacagctaccttcttttttt

SEQ ID NO: 862042 - DNA, 661 bp, Homo sapiens
aggtaagagccccacttctgccagccaatgaccatttctcagtctctgacactccagcctggcaaaaggaaacgatggcttttgcagtgctaaggaaagagccttgttccaattgttcaccctgaccatttccatctcaaggccatatggttggctgttaaaaatattcgttgcactcacattggcaaatattttgtttctccaaatcagatctagagtcataaatacctgtatgtagcttagctgttaaaaatagctcaatagcatcctgcaaacagtacatacttcctgttgaaccagatggagaaatccgcacacaccaagccaatgtggagagagcaacagcagtcactggaacccagccacttatgccagaggagctggcaaaggtctgcatataaaatgtagtctagacctggtcaagcctttagctcttccaggaacccgagctcgaagtgaggaatttgggcttttattttccctagtgggaaaayacttagagatcattcatatgatactagatgattatgtgtaaaaataatgtttttattttccttctttaaactccttgcattacttttctctttggaaccctcagttcaactttatttttctaagtgcattcattcaacaaacattgagcatcctttgcatgcctata

SEQ ID NO: 862043 - DNA, 636 bp, Homo sapiens
ccttagtttattactcaaaggtgtttctatatggacaaatagaataagaattgcaaacagtaagggagaatttttatggacttgagaaagctgtaatgaggaatatgtggcagcctaatggagaactgaaataagtttgaatttttactacttatagcaaatatgttattgtaaggattagtattatcgtagatttaaataataggtttgcgtttatatatctttatatattttaattgtattcatgatcrtcatctcactgaatcttcacagtaccctgtgagataaaattatcattctcattttacagatggaaaagttgagattcaaaggtgttaatttacattgcaaatcatatattctttatatttgtcaggaacaaccataaatgatttgaaagtggatatgtgatctgtgggtgtcctttcaatgaaatgttgagtgttttttgtaaaggaatctgagccttttatcgactcagccactttacaactctgtaaattatggaaaactgaaaggaacacaaatgattcttgtgtgtttacaggcaaatgaattttgtctggcaggtttataattgacttctactctgtagaatagatcattcaaatattatctgtttttactggtagatag

SEQ ID NO: 862044 - DNA, 636 bp, Homo sapiens
ccttagtttattactcaaaggtgtttctatatggacaaatagaataagaattgcaaacagtaagggagaatttttatggacttgagaaagctgtaatgaggaatatgtggcagcctaatggagaactgaaataagtttgaatttttactacttatagcaaatatgttattgtaaggattagtattatcgtagatttaaataataggtttgcgtttatatatctttatatattttaattgtattcatgatcgtcatctcactgmatcttcacagtaccctgtgagataaaattatcattctcattttacagatggaaaagttgagattcaaaggtgttaatttacattgcaaatcatatattctttatatttgtcaggaacaaccataaatgatttgaaagtggatatgtgatctgtgggtgtcctttcaatgaaatgttgagtgttttttgtaaaggaatctgagccttttatcgactcagccactttacaactctgtaaattatggaaaactgaaaggaacacaaatgattcttgtgtgtttacaggcaaatgaattttgtctggcaggtttataattgacttctactctgtagaatagatcattcaaatattatctgtttttactggtagatag

SEQ ID NO: 862045 - DNA, 637 bp, Homo sapiens
catacttgaattaaggtcttctgtttctaatcccagggtttataaatggaaattcaaaggagctagataaaccttgcctctgtcaactgtaaattccacaaaagattagccaaaacacattgatcaaacctattgcaataagaaaaaatgccactttgccaacaaaaaatttttacacatacacacagggagactggagaaacagaaaattgtttttattcacaaaggcatgactgtgtaagtagacagtacataaaaatgtacagataaagaatttacattaagaagctattttatcaaggtctctggatacaacaagtaaatagaataaaaaagattccatttataattgaaccaaaacaaaatatttaggaataatgtacaaaatgtctatacggaaagctgtaaaacatyagcgagagaaataaagaagacctaaattaatatatacatatttggaagagtcaatagtttacagattacaattcatcctaaacggatcaataggtggaatgcaatcactggatgtgctttctgaaaattggtaagctgattccaaaatttatttggaaatgcaaagggccaaaaataaccaagaaaatctcaaagaacaccaaccaagttggggatgcatagt

SEQ ID NO: 862046 - DNA, 642 bp, Homo sapiens
ctaccttttaaatttagcttctccaagaatatactattttataacatctatctaggaagcctaagtataattaacccattacctaatgcattcgtgtgtctaaaggaagctctctttggccttagcagcagtggaatgggaagaagctggggccaggtgtgctactgactctccattctcatttccttctgattctgccgtagtagctcttgatttttcttgtttacaattgttgagctttggacatctcttcttcctcttcctctttctcttcctcttcctcctcctcctcctcctcttcctcctcctccccctccccctcctcctcctcctgctcctcctcttcttcttcttcttttgagagggagtctcactctgttgcccaggctggagtgcagtgacacgatctcagcttactgcaacctctgcctcccaggttcaaccaatttctggctcatttttgtatttttttcaatggagactgggtttccccaygttggccaggctggtctcaaactcctgacctcaagtgatctgcccaccttggcctcccaaagtgctaggataacaggcatgagccaccactccgagctggatgtttctttattatcaaaggccttgccacttatgcacaggaaggat

SEQ ID NO: 862047 - DNA, 582 bp, Homo sapiens
gggtcctctggaaactctgcctaaggacctagaacccaggcattcattaagactttttgtggcattagctcacagccttctagtttaaactttttaaaacattcttctttttgttgttgttttctatgaggttaaaatatccagacttcaccactaaggcattaatgtttgctcttttcttgatatgaagtttaaatgcattcctattcttgaacacacaatatgtatctttctgaagttatgggcaagttcaataacagctctctccaaatctttgttttatttccactctattagaagcgattaaggcttctatggagwtctcccaaatgactaacattttataacttttattttcctttacatgttttatttgtagtaccacttgaacctaattcagttataaagccaataaaagggggatggatttggatttgggcatacttggctagaattagaggttctagtcttaatgtccattatattttaaacattaatgagttatatgtttttaatctggacaagtcagtggcctagaaattcagggaattgttagaattgaaatttcaattctctatttat

SEQ ID NO: 862048 - DNA, 658 bp, Homo sapiens
ccacccgcctcggcctcccaaagtgctaggattacaggcgtgagccactgaacctggccaattgcgaatatgttattctgcctccaattcattaagaattgtcactctctgtgataacatgtaacattggttgatgtgttaatcctaagccaagaaaaagttgaaaataatgccaggatgttgactggcttcattaaggtcttttattttatgctgcatgaaatatgttaagacacttcccatgtaggtcaccctttaaaaaagtaagcaagtcaatggacgacagaatacaaacaacctaaagttagttatctattctctcacccttcccaggcagctcattcaccaccaaaacaagatcattgacctccagttccattttgtccttaactgatggcaygttaaggagtctgttcgcaattaggacaacgttccaatttctttgtttcaacactaataaagtggtctttcttacatctttcttgcaagaattgcataaagctcttgcttgagaggaaacttggtttttgtaaggcttctgcatttgatacctgatgggatttcctggtttgaggaaattttaaccagatttagctttttgattttcatttttcaaaacagcaatttaaaacaacacaaatgagaaccatgagtattt

SEQ ID NO: 862049 - DNA, 582 bp, Homo sapiens
attataaatatcttaaataagacaattcttccaagattcctttgcagttagtgtgcaccagtaacaaagttcggccagtgatatataaatgaaagcaatggtgtaacttcctggaaggaagagacatgttcttttccctttcttttctcctccctcaggagctgyaacaatcagtttggaccaaggtgtagagaatggtagtgttgcaagattgaaggaacttaagtgcatgaggattaagtcactgttatattttctattactcataaccaaaccggatttaactaattcagttagctactctgaaaactaacaatatcttaaaagtccgctgtgaggacgaaatgagatcatgtaggtaaaccatctatcttactggaatgtctacagaaggtaaaataaatgttaattatcttctcttttccatgataactgaagttttaaagaccttcatccgtgaaaatatctcaatgagaatgatcttcaaagttaatggaaagcaatatttttgacttggaggtagagatgactttagaaggacaataaaaaaacttattctgtttcttaattcatccatttaca

SEQ ID NO: 862050 - DNA, 645 bp, Homo sapiens
actctgctttatctgtgtctctcaatttttgatatgtcttctttacttttatttcaagatattttctaattaattttgctattttttatttgatccatgggttatttagaagggtattaattaattatcaaatattttaatttttctagatacctagatattttgttattatgactattgcttttcaatttaatttcattgttgtcacagagtatgcaatgtattggtagggcacggtggctcacacctgcaatacaaagcactttgggaggccgaggcaggcagatcacttgaggtcaggagttcgagaccaaccctgtctctgctaaaaaatacaaaaaattagcygggcatggtggcaggcacctataatcccagctactcaggaggctgaggcaggagaatcacttgaacttgggaggtggaggttgcagtaagcagagatcgtgccactgtactccagcctgtcaacagaaaaaaagaaaagaaaagaaaagataaaaaacatgcaatgtatgatttcaaacctttgaaagttattaagacttgttttattatcctgcatatggtgtttggttcatgtgatccagtatatagtttattttggtgatgtggtttggatgtgtgtcccctccaaatctcatg

SEQ ID NO: 862051 - DNA, 613 bp, Homo sapiens
tagccaaagactcaggaaggtaacaggtcctgaggaaaagcaggatacaggtgaagaaaaaaaaaaaaaaccaccaccaaaaacctccttccagcaattcttctctgttctgggatgcaagccaagcctagccacyggactgggggtgagaacagagatgatacattcaaaggagacttttacatccgaaagagatttctgcatccagtatcagtgttctagcccggagcctcttgggagagcagcttccagaggctggcagaaggggtcatgctgaggtcagcctccagcctagggacactggtaatggtggtggaagcagctgagagaagatttttctttcaaagctgaatcttcagatctggggaactaaaagaaccctccaagatcacctaacccaattcctaaatgtttcagatagggaacttgaggtcttggtaaggaaagagacttgatcaaagtcacacagtacattagggttacagccaggacacagttccatgtctcttgatcccaacccagggttctctgcaggacaacttttctcatctgggtcccacatggacgtagccaggagagcagctggtaggattaaatggccaccaagaatttc

SEQ ID NO: 862052 - DNA, 508 bp, Homo sapiens
ctattttaattgtttacccagatttatgaaaactgcaatagtcatcatttaaagttatgaaacttgccattgcaaaattctgagacagtgaaaaatatatgacctaatggactccatcttgcttctaacctccaagctgtccttgttcattcctgaactttgggagtaacttagtttatagtttcactttgaaacgaagatgataacmgtcctttccgaaaacacaccttactgcctgtggactagaccacctaaagccacaagatagaagtatggtaatcttattaaattcaagatgcagctatttttattaaatcaatgtcagtgtcttatttattaaagacgacatgagcaaaggtcattatgttttgggctggctttatagttttgtaacccccatgtcaaattttgacaccttgtagtatttggcagggataagtatgaaattgcttggtcaataaatgcaaacaaaaagatgtatgctggcaattcttaagacatttctaat

SEQ ID NO: 862053 - DNA, 658 bp, Homo sapiens
ttctgctaagaattttgaaactgtgtgtcttagccttggttccaggtgtgggatctgcgaactgtggcccacagagctaattaattcttcttgctttgaaaactccagaattgggcacagcagccagcactctcccctgcatgccaaatcagatcaagtgcaggttggcggcagaggggcagcctcactgagggccatgagtggggccagtggggccaccattaggctggggtctggaggaagcagaccccacttcaggggagaggacaagggggaggctggggcgtgggagctgcagcctggtttgggggtgctccaagcctccaaggagccgcaaggggctaaaaggaatcaggcagtgcttggaggggaagctttgctattccacaccctgcccctctgtcttgtcagttccaacctgcctctctcccttcgragcatttcctgtgcctgggtctccccattgcccccattctgctttcttctctctgctgtcatgcttgctctgagctgtaccttgcaattattttatctttccatctccttgccaggaaatccttgacgccgggttcccctgggacactcactgcgggggaggcaccgcacatgctccatccatcctgcctggagcagcagtcagttggggagggaggatggg

SEQ ID NO: 862054 - DNA, 647 bp, Homo sapiens
gctgcttaccttggtaaatgtttacaggagcaagagataaaatgtaatcccgttataagcctctgtttaatttgggtttttgttatagcagctacaacctatatcctaactaacacacaattaatattttaaatattattctgactttctccttccaaaagccctgaaaatcagaaaagaggataattctaacaaaactagtacatgaactctatttaaactaatagttgaggattttcacataatgtaaactagctctttttattaaatgatatttggctaaggaaagaaggttgaaaatgagcaaggactgggtggaaaaggcaaaattcagtcatctgacactgagtgtttgtccccaaccttcaaactgttgaatgtatacagcaaaatcacgtggagttggttagatgccactgagtacttctccaaacacatacaacttcattygttggctttttctaagcagcagtgatatggtttggatctgtgttcccacccaaatctcctgttgaattgtaatccccagtgttggaggtggggctggtgggaggtaattggaccataggggctgatccccactttggtgccattttcgtgataagagttctcaggagatctgtttgttcaaaagtgtgtggcatctt

SEQ ID NO: 862055 - DNA, 573 bp, Homo sapiens
aatctttcccaaacatgaggtatgatagcagagaaaagaaaacagggcatgtcttacagagtaagggcgctgcctggtgaaagctttgggtattggcttactgtagaaatgatttcttcctgtttgaatgccactggccttatgcatcaaacatgaaaaattcaagccatgacagaacaaaatagaaacataggtgaaattttatctggtctcagagtaagacagagatttataaacacatatcaatgccagaaattctaaacaaaaagaatgatggacctgastggataaaaacctcaaaatcttagttcatcagaaaccactgttaaaaacaaatgacatattgggggaaaagtgaactacatatgaagaattcatatcaaattaaggatataaaagaataacctgagaaactattgagaaaaaaaatcagcatcctaaaagggaaatcataaaggatatagggcattttaaaaataattacaaatagcatacacgcacacatacacacctttaacctccagtatgatcaaagaagtaagaaatcaaaatgtgtaggagtcagataattgt

SEQ ID NO: 862056 - DNA, 604 bp, Homo sapiens
agggcattttaaaaataattacaaatagcatacacgcacacatacacacctttaacctccagtatgatcaaagaagtaagaaatcaaaatgtgtaggagtcagataattgtctcccaagacccattcttctgcctagtaatgagaaccttgattttctgctggcttactgcttttgacctgaaaactctgtactccccagcatctaggtaggaccatgcgtgactgtactcagactaaattcagactgagatggccattgagatgtaagcagaactgtatccaaattcacagaggtctgctcaaaagaaaggggtgcccttctttgctcttcaatttttcccactgactggactaaagctggaatggctggagctctagcagacatcttggaccatgaggcagacttgtttgagcaacargagtggagcctggttcccttatgattgaggttgcctcatacaagccctggacttcctaccacttgactcattttatgtgaaaatgaaatacaccctcttttgtttaaaccactgttatttaggttcaggagtgtcagtcacctaccgttaaactaaatccctgctaagaaagctacctttttct

SEQ ID NO: 862057 - DNA, 618 bp, Homo sapiens
tctgtgtggtacacacacatttctatgagttaaggcttccaaataagtcagagccttaaacttcttgaagaccaagctgttaaaaatgtaaaagaggaaaatgctttttttttttacaagagaatagcagctacaaaatttaaaagaaaggctagagttagaaagtcaccattttgaaactcctcatgtaattaattgagtcagaaaaggaccatttaatatttgctaaaaattttgggtgaaagttattagagaatgaaacattcacacagtcttaaaatgtctccttatagtgttattattacacaaagaagaaaatgcacacyttcaataaaacaaacggcagtcaccccttaacaaagggaccaagggtccaagctaataccactggcggcgggacaggctggcatgtgcctcctaatatgcaacaaaagaaaatacacagtagcacctgtgaggcactgtattaaaaaggttgaacccgactctatgcattaggaaacagacaaatccaaaattgaggacattttataacagtctgaactctaaaagcaaaccaaacaaacctggggcaggtggattatcatactagagtaatcatttctaattaaaataaat

SEQ ID NO: 862058 - DNA, 649 bp, Homo sapiens
ttttatgcatttttaaccacaccctttacgtgcattatgcattcctagaacaactctgcaaggtattatcatcactattttaccaataacaaagatgtagcccacagaatttaagggatttgcccaaagccacacagccagtacctggatgcctggcttgagaacctgagctaattacaggactgacattgcctccctggtggggactgtatgacaaggactagcagaaccctgtgcacacactcacgactttcacatttccacgcctttactccgctcttcaggccacttggaacacttctcttccacacctctcagcttgtggaawtgcttcccatgcttcaaatacatcttggatatctccttgtcgaagcctttgctgctgggctcctgataaggaggggctctgtgcacataggcaaaatgaatgcattaatgccaacttcatcttcttttccattaggaaggctctaagggtgaggtaaggatatctaataaaatgtgacgagggaattttgtttcattcagcaaacatccatagagcacttggcaaagtcttggtagcataccaaggaagttgtgttaccaagaggaagacccctagtgtaaagcaactttcccctgctttctaaaagaggctgtggcaaca

SEQ ID NO: 862059 - DNA, 620 bp, Homo sapiens
atggctgggccaggactgagcccaggcagtctggttccggagttggtgtccttcaccagtgcagtagcagggctggtggtccagagggaggtggaaagggattacatcccagtttgagttcagcaggttgcaatgttgtgctctgcaggtgacagaattagattttttgtgcttttttggtaaggtaaaagatgtgatacctgttgggtactatggtcgctatttgggtgataggttcactagaagcccaaaccccgcattacccaatatgcctgtatgacaaacctgcacatgttcccccgaatctaaaacttaaaaaaaaaaacaaaacacgcatgatagtttttcattagtatttgggggaaggaagtggttgtttctttaatgagtaaatcattgacttgagatgggagagatcagatgcaagagcttyccaagcagcacctgagtaggacagtgtaaggaggggctgggaaagaaatccacgtggagtttctgaagggaacctgagaatgtagaaaagaggtgtagaggctgtaacccaggagaagagccctgggagtgaggcagaactttccagggtgtggagggatgcagtttttctcaggttgactggaggc

SEQ ID NO: 862060 - DNA, 614 bp, Homo sapiens
attaatgataaatgaagagtttcgtaatatagtattaagtgaaaacagctgaatatttaaaagtgtaaaatatgatctgaatttgcatcttataggaaaaagactgttaggataaacaccagaatgttaacagagcttttctctgggtaatgggagtatagttcatttttcatttcatcttcattttttttgtmgttttcaaattatctcatggcatgtcttagagtggaaaacaaccacaaagaaaaacgatgttagaatcacaccacctcaccagcttatttttgttctcctgatttttaccactgcaccaaatacctacagatacagatacctcacacactcaccaacaagtggatagatagagaaaaaaataataggaaaaccatggggggaaggggtgaactactggagaatcaagttctttgaggaagagcagtgagatttccaccctctgaggagcccagcacagcagcttgcatcaccacgcagtcaacgcactacagtgaaataaagttaactttgcaccttcttctctgtgaggccttcagggaaattttatccagatataaccaacccgtgaacatagtcctcatgcggaagttgccttttgt

SEQ ID NO: 862061 - DNA, 625 bp, Homo sapiens
aaatgcagctacaggtgaactcctaaacataggccagttttaaatgtaggacagtaaattgtattatatttcaaaagagtcatttgcttcttagttcagctctgttttgcagagagcagtcttggctggcagcacccttttagtccttttgatactagagtcccactcccagacaccagagtgacctcagaatgctaaaaaatggcctccttttttcatccagagtgcccctttacctttttctttcccttttccttttacatccatgatttctcacaacactaggagcagcaacaaatgcagtaccataagaatttgttgcaaagaaaaaagaagtatttttaatatatatatttttattatactttaagttctagggtacatgtgcacatgctgctataaagacacatgcacacgtgtgtttattgyggcactattcacaatagcaaaaaagaagtatttcaaatttttttcaatctcacattctctctgacttagatgcctttcctaggatttgaattcttgggcacttaaggggcaggtggcggtcagtgcctaccaaaaagcccctcactgatagtcctcacatcattttctatgccacctattttcaagtctgtattac

SEQ ID NO: 862062 - DNA, 750 bp, Homo sapiens
taaactttcaaacattgctcatgagaattattgaaatagtgaaggaatgaatttgataaattgcctccattaggttgaaaatagatagccaacattgtgtatgaatgctactgaaggagagaccagtaaagacatttatatagttatttcaagttacagctaatgttgttgtatcagggtcatgttgaaaggatccttgaatttatgtggtatatatttacctttagactaaatataagaacagtaagagattgcagtaattcttactgcacagaaataactttgtaacaaaaaatcattaatttttataaatggaataagtaagacatgctcactgcctatactatatattggttaagagatggtcaattttattatgttatataaaatatgccccctccaaaaaaaaatggcaagaactctctttcatttagggagaagatgtgactactgtcctagcatcactcacatgtttaccttgagttgttttttccagcaatggtaatagttaaatgacccatatcctctttaacctaattttcttatagtatttacttttgcaaatgagtctgctgacaaaggttataaatgckttctgtgaatacgaaatgatgcaaggctaactggcttatttgggcatcagttctacctacctatcattaggtcgatggatctatctaatttaatagatctacctatcaaattggtagcagatctacctagtgatagatagttatcattttgttctta

SEQ ID NO: 862063 - DNA, 540 bp, Homo sapiens
gaatacttttagcttctttatatacgaaaaaaagtatttattttaccctcattttgaagatatttttcttttagtactttaaggtgttgctccactttcttctagcttgcatttgtttttccaatgagaaatgtgctgctattttggttttttcctctataaataatgtccttttttcctctagctgctttaaagatttttctctttaacactgtttttgagcaatttgattatgatgtgccttggtatagttttcttcataaaaatgcttgttctgagacamagttaagttacttggaaacaattcaatcctctcaagctttgctttcaagttttgttagggaagaccaagcagtgtttagtccaggatgcattttccccatttctggaccaacatctttcttaatactctaactgataacctgtgaattatgagcttttatattcttgctgctgaaaagcagtgctattctaggctgtgtgagtttggggcactgtcctctcgaatcctttagattgcttctttccctttctacacat

SEQ ID NO: 862064 - DNA, 510 bp, Homo sapiens
tttctgacaggttttagtatcaggatgatgctggcctcatagaatgagttagggaggagtccctccttttcaattttttggaataatttcagtaggaatggtaccagctcttctctctacctctgctagaatcaagctttgaatccatctggtcctgagctttttttggttggtaggctatttattactgactcagtttcagaacttattattagtctattatgggagtcaatttcttctttctcctggattttctagtttatatgcatagagrtgtttatagtattctctgatggttgtttgtatttctgtgtggtcagtgatgatattccccttatcatttatgattatgtttatctgaatcttctctcttttcttctttattaggctagctagcagtctattttatttattttttttttcaataaaaaaacagcttctggattcactgatttttttgaaggatttttcaggcctctatctccatcagttcagctctgatcttggtta

SEQ ID NO: 862065 - DNA, 603 bp, Homo sapiens
gcagggcacgtttcccctcactattctaatctccctgattctagctaaagaaagctcttcgcttttaagaattcatgtgattacattacgcactactggataattcagaataatatccctatattaagctccataactttagttagatctgcacagtcccttttaccatgttacttaatgtgggaaacacacattcgcctgtctgaacccaaagactgcacttggagacacaaagaacagcaaaagcgagacttttaatggtggtcttgcaagatggggcgtatggtaggcaggcacacccagggcagttacagcagttaatttacctcctagcatgcaaatccctcccctagttcctcatwggtcgagtattacagggttacaatcttcccggacatcatccaagtttcattatccccctaataagggtgtaatcttcccttccctgcttaagtttcgatttcccaataatgaaactttcttcgcttttatgggctgaccccttctctacattctgtttgctcattgtgaccttctaggtgcgtgagccgtgcagtttgttacatccgcaggctggttgccagtatatttagatttatcatg

SEQ ID NO: 862066 - DNA, 576 bp, Homo sapiens
tggcttgagccaccacgcccggccaactgtggctgaagtttaagtaaaggcctataggcaagaaatgtcctggggccttaggcaactgtatatgactagaggaaagacagaagacaggagtggctaaaaatgtggctagagatataagctggggcctcgtgaatcacarttggcttaatcagatgggcacagaggctcacgcctataatctcagcactttgggaggccaagacaggtggatcacctgaggtcaggaatttgagaccagcctggccaacatggtgaaaccccatctctactaaaaatacaacaacaacaaaaaaaattagctgggcgcagtggcaggtgcctgtaatcccagccactcggaaggctaaggcagaagaactgcctgaacccaggaggcggaggttgcagtgagccaagatcgtgccattgtactccagcccgggcgacaagagcgaaattctgtctcaaaaaaaaaaaaaaaaaaaatggctttatcctgaaagcaatggggaaccactgaagggcttatggtaggaatacaacctgaacaagggtgcaacttaggag

SEQ ID NO: 862067 - DNA, 663 bp, Homo sapiens
gatattgctagcatgcattcacttttgacctataaaatggcaatttcatatggttccccctaatatgttcttccttaccataggccaaaatctgtctcattgctacataggaattttctaaaaactgttcaggagaggagatttaagcactgtctttggtatattattctcatacttcactttttttttttttttttacctttttgagtatgaaatacgagaaaaacaacttcacatattctttcacgattatgtctttttaaaatgacttataaattctgctgggtgctttggctcatgcctgtaatcccagcactttgggaggctgaggtgggaggatcacttgagtccaggaatttgagaccagcctgggcaaygtagtgagacctcctccctacaaaaaatacaaaaattagccaggcatggtagtatgggcctgtagctacttggaaggatcacttgagcccaggaggtcaaggctgcagtgagccaagatctcaccactgcactccagcctaggtgacagaccgagaccctgtctcaaaaaaaaaaaaaaaaaaaaaccaaaataaaataaaaatgatgtataaattcaaaatagaattgattattgcttccatttgcttcagttctgttttgcttcaggatttcttggccgggtgt

SEQ ID NO: 862068 - DNA, 665 bp, Homo sapiens
accttgcaaccgaccttttgtgttgtctaaggacaatagctcaggaactctagatctgtaatcagatataccctgagtagagtttgctgttgtaggcaataaatttgaggcttagaaatgtatagatctctggggcttcagctcctaatacttgggaggatctacgctatacaaatatccagtgctcattgtcactttaatttgtagcagagcaattggagtatattaaaaatgttaaaaaggacttgagatgccaactcaagttcaacctgagaatgtgaagttgtcaactttgcatcctggtttctccaccaacttaaaaaatgtagctgacaaaacaatatcaatatcttcacaatcaccaagtgctgataccaggtagatggacaggtgctcaataagtacttgcttaatgcatacatgaatataaggaaaagaaagaaaaaaatagtatttggtaggtttctccaaaagakaagttccaaatgtgaactttgttttgcctgaatgcttggtaatgtttcttaaattttgaaataataatacattttcttctctggggttaaataatacttgttagaaaatttgtggagatgacagatgggcacaaaagaagaaatggaaaggctttggggtgagcactgtgctgctttattactccagaa

SEQ ID NO: 862069 - DNA, 639 bp, Homo sapiens
tttttttttttttttacctaatctaccactgatgggtatttaggttgattccatgtctttgctattgtcaatagtgctgtgatgaacataggagtgcatgtgtattttttgtagaaggatttattttcctttgggtatatacccagtgatgggattgctgggctgaatggtaattcagttttaaattctttgagaaatcttcagattgctttccacaatggctgaactcctaccagcagtgtataagtgttcccttttctctgcaaccttaccagcacctgtaattttttgactttttaataatagccattctgactggtgtgaggtgctatctcattgtggttttgatttgcttttctctaatgattggtgatgtgagcatttttttatatgtttgttggccacttayatgtcttcttttaagaagtgtctattcatgtcttttgcctacttttttaatagggttatttgttttttgcttgttgagttatttaagtttcttatagattctggatattggtccttcgtcagatgctgacatggtttggatttgtgtccccaaccaaatctcatgttgaactgtaatccccagtattgagaagaggcctggtgggaggtgattggatcatggaggcagat

SEQ ID NO: 862070 - DNA, 597 bp, Homo sapiens
aataatcttgtgtgaatccttttatcatccttcccacacccttcatgttccatgtaataaaattgaggctcagagagcttaagtgacatgctcacaaacatataaagctagtttgtggctgaaacagagcagttttgggtcaagaagcacactttcttcacctggttgccaagttcacaaagttccttctcacattgactctcatgccctcaacaagatgattgccttccctccacctgggatcatccctgtgcagttctcaaaggggcctagttatcccttagaaacaaagacccccatgaaaactcccccaaatgtcatcaaatcctgagatagtttagtgagaggctatttcctgtttttgactcaacacacttaatttcctttgrgccctcagactagaagaacaaaattattttcctggtcagcctactgtagagataattgtgttgtccacacttccttgaatcttaatacttttaaaagtttttaattgtgaaatatttcaaatatatgaaacagaaaatatcacctaccacctagcttttatagatctttgccatatttattgctttgttttaaaaaataaggcattac

SEQ ID NO: 862071 - DNA, 597 bp, Homo sapiens
aataatcttgtgtgaatccttttatcatccttcccacacccttcatgttccatgtaataaaattgaggctcagagagcttaagtgacatgctcacaaacatataaagctagtttgtggctgaaacagagcagttttgggtcaagaagcacactttcttcacctggttgccaagttcacaaagttccttctcacattgactctcatgccctcaacaagatgattgccttccctccacctgggatcatccctgtgcagttctcaaaggggcctagttatcccttagaaacaaagacccccatgaaaactcccccaaatgtcatcaaatcctgagatagtttagtgagaggctatttcctgtttttgactcaacacacttaatttcctttgagccctcagactagaagaacaaaattattttcctrgtcagcctactgtagagataattgtgttgtccacacttccttgaatcttaatacttttaaaagtttttaattgtgaaatatttcaaatatatgaaacagaaaatatcacctaccacctagcttttatagatctttgccatatttattgctttgttttaaaaaataaggcattac

SEQ ID NO: 862072 - DNA, 617 bp, Homo sapiens
gctggaaactcatgtcctttaattatgaattttttaaaatatcataactttgataatttccttttccctctattttttctttctggacctcatatgaatatctaaactttattcagaatttactgtgtgtggcagactgtcttctaatggctttgcttgtattaggttgcagyaggtatcactatcatcttcattttccagatgaagaaattgaactcagagaggtcaatgtgtctcagattatgcaggtgatacatagtggaactgggattcaaaccttggctgtgctgaattggggtagggattttaattcctctttatacaaactttcaagtgccctgaatcccaaactttagagttgtgtggtgtctctcttgagcctttctgaagttgtgcagctatgactagactagattttgctctctctgatcagctgagtctactagtctgacagctttccagttcaaatactttgtagtattaatttattttcagatgtaaaatataaatattatataccatataactaattattgtttcttaatgcattttgatagtgtctgtctcttagtgcaacactcaattagcttaattatattctgtacatctcactttat

SEQ ID NO: 862073 - DNA, 610 bp, Homo sapiens
tattttaacttgttaactctgtattgtaagtctattggaattgtacctttatcttatactatatgcagaaatcaatatcaggtgcattacagtccttaatgagtctttaagctacagtttttaaacagtaaggctttcagaaaataacataggagktgattttcatgaccccaaggtagggaaagatttcttaaacatgaaacacaaaccctaaaggaagagattgatgactcctaatgtaccccaaacctcagcatcatgcaatatgcccatgtaacaaatctgtgcatggccccctgaatctaaaataaatgttgaaataaaaaaatgaaaaaaataagaattcatccaaagctagcacacagagaaaaatattttacacatatatttcatatataaaaatcaaaataaagtgaggaacaaaataaaaaggaaagaaccctccccttagtaattgcctgaactgtttattcatttacacaacaggttatttttttttctagagtaagacaaaaatttaaattgtgcttgggtatctgggaaatgtaaataaaatgatattgatgcataattttgatatgagtgttcctgatatgtagacataaacttt

SEQ ID NO: 862074 - DNA, 653 bp, Homo sapiens
atgtatgcgacagtgttctatatctttttgcataaaatagagcctgcaagggtggggaatgaatctgaggagcagagatgagaaatgaagaactagcataattactatgtttgctcctgtattttatacttatcagattataattagaggactatatatcctatgtcaaaaaatgccaaattgagtttaaaataatttgaattgaaaaatgaaaattattctggtgtataagcactacattttcattttccagtctatcattggtgaggatttaggttgatcccgtgcctttgctactgtgaatagtgctgcratgaacatacgtgtgcatgtgtctttataatagaaaaatatgcagccataaaaattaacgagatcatgtcctttgcaagaatgtagttggagttggaggccattatccttagcaaactaatgaaagaagagaaaaccaagtactgcatgttttcacttataagtgagaactaaatgataacacatggacacataaacggaacaacacacacaggagagcggaggagggagaggatcaggaaaaataactaatgggtactaagcttaatacctgggttatgaaataatctgtacaacaaacattcatgacacaagtttacctatgtaacaaacccacgcca

SEQ ID NO: 862075 - DNA, 642 bp, Homo sapiens
cagatgagaagttttcaattaaaaaaattgcaacttatcttttttgtttttggttaatggttttagttttacatattaaaactcatcatcagttccaaagtcacatcatttcttccatgttttcttctagaatttttatagttgcatgttctacacttaggtttatgctccttttgacttaatttaggtgaaaggtataaggtctgtgtaggggtgtgtgtgtgtgtgtgtgtgygcgcgcatgtgtgtgcatatctttctattctatcttgtatatgaaagttcaatcatttcagaaccgtttgttaaaatgactctacattctctattgacttgcctttgttcctttgtaacttgacaaatttgtgtgtctatttctggatttgctattttgctccattaatctacgtatctattctttaccagtaccacactgtctgaatttctatagattttactacagagttatagaaattaggtagtataaacattctaactttgttcttcctcttcagcattgtattatgtgttcaaggtcttcttttctacatacactttagaatcagtttgttaatatctatgaaatagattgttgtgattttaattgggattatgttatctgtatgctgagttgagacgagg

SEQ ID NO: 862076 - DNA, 567 bp, Homo sapiens
aaatgctgagaagcaggagtttagtgggaggaggaggagatccagtcccaaataccggcaaagaagtcctttccctctcccaagcaaggcagtcagccctgcaggaaacaggacaaaaggaaaagccatcatacctgccagtcttcctgaaataaactacaacagggctgctagatcagcrccacactggccagtacttcaatcatgatgctgccagtggctctacctgaaaggccaggagaacttcctttcactgaagtatctgtcatggaaagaaaagaagagaaggaataaaggtgatgttattttacagcgtggtaccttaggaaccatcactaagtatttagtagtttctactttttccttcggggattacattaattttgtgggacggttgctggtagatgattagccaactatattcttgcagtttttttctctctcaacgtgtttctaggttagtgatcagtcttctgtcaatttcatcctgaccatgctgcactcagatattttcgaaagctttatgatgtgagaaaggctgactgctattttctgtcactagaactt

SEQ ID NO: 862077 - DNA, 690 bp, Homo sapiens
tcctgccatatatatttcttgctttaccagctgtttgttagctaagagctccctctagaggaaagtaattttgccacattaagtggggatgtaaaccgttctttcctagggttaatttggaggcttttctgactagtagagctattgtgacagtggtttggaagcagatgtaaacaataggtcctcctaatggcaaataagaggttgagaaaaatattggattagaatttttcctgagacaccccttatggttgtgctatgggaagaggggaggcctggataagaaaggagaaaagagagagactagatctagtgtttagaaggaggtctactttcctccctataatttccagaatsacctgtgtctcctgtgctgtaatggcagtttgagctgctggagccaggggtttgagccccaggacccatcagtcttgctggaccactgtgagactggtactgaacccagtgacctccaactctgggagcagttgcatctccagtggtctccaccacaggctggtcattgtcaaggtggcttcctcttgctgtttggacactccttcctaaaaatgccctggcttgccacaccgagagcaactagtggatacacctctgggatcctggactttgcaactctgcaaagtagctattagaggctttgtccttctcttgagctttctctctttcttc

SEQ ID NO: 862078 - DNA, 690 bp, Homo sapiens
tcctgccatatatatttcttgctttaccagctgtttgttagctaagagctccctctagaggaaagtaattttgccacattaagtggggatgtaaaccgttctttcctagggttaatttggaggcttttctgactagtagagctattgtgacagtggtttggaagcagatgtaaacaataggtcctcctaatggcaaataagaggttgagaaaaatattggattagaatttttcctgagacaccccttatggttgtgctatgggaagaggggaggcctggataagaaaggagaaaagagagagactagatctagtgtttagaaggaggtctactttcctccctataatttccagaatgacctgtgtctcctgtgctgtaatggcagtttgagctgctggagccaggggtttgagccccaggacccatcagtcttgctggaccactgtgagactggtwctgaacccagtgacctccaactctgggagcagttgcatctccagtggtctccaccacaggctggtcattgtcaaggtggcttcctcttgctgtttggacactccttcctaaaaatgccctggcttgccacaccgagagcaactagtggatacacctctgggatcctggactttgcaactctgcaaagtagctattagaggctttgtccttctcttgagctttctctctttcttc

SEQ ID NO: 862079 - DNA, 690 bp, Homo sapiens
tcctgccatatatatttcttgctttaccagctgtttgttagctaagagctccctctagaggaaagtaattttgccacattaagtggggatgtaaaccgttctttcctagggttaatttggaggcttttctgactagtagagctattgtgacagtggtttggaagcagatgtaaacaataggtcctcctaatggcaaataagaggttgagaaaaatattggattagaatttttcctgagacaccccttatggttgtgctatgggaagaggggaggcctggataagaaaggagaaaagagagagactagatctagtgtttagaaggaggtctactttcctccctataatttccagaatgacctgtgtctcctgtgctgtaatggcagtttgagctgctggagccaggggtttgagccccaggacccatcagtcttgctggaccactgtgagactggtactgaacccagtgacctccaactctgggagcagttgcatcyccagtggtctccaccacaggctggtcattgtcaaggtggcttcctcttgctgtttggacactccttcctaaaaatgccctggcttgccacaccgagagcaactagtggatacacctctgggatcctggactttgcaactctgcaaagtagctattagaggctttgtccttctcttgagctttctctctttcttc

SEQ ID NO: 862080 - DNA, 631 bp, Homo sapiens
ctagtcatgatgctgacagtggccccaactgagagaccaaaagaactttcttatcctgaagcagctgtcatggaaaaaaaaagaggagaaggaataaataataaagacagcaagggttttagccaattattttttgagatagggtctcactctgttgcctaggctggtgtgcagtggcacaatctcagctcactgcaacctgtgcctcccaggctcaagcagtcctcccacctcactctcctgagtagctgggactacaggcacacaccaccatgcatgcttaatgtttgtattttttgtagagatgggcttttaccatgttgttgaggcttgttttgaactcctagacttaagttattcactgccttggcttcccaaagtgcagggattacaggtgtgagccacctctcctgccggtttcatgctttttataataagaatgaactccttatgtaataataaataaataaatgaaattatttgctttggatgtarcaaatgtagatttagattgtccagagtcaggagctaagcctcatattttttttgttttagctcagtgtagagtgcattgaaggtgtcctaaaaataattccatatagtaagccaattttaaaccctgctcacagcc

SEQ ID NO: 862081 - DNA, 665 bp, Homo sapiens
aaacatgctgcaggatattatccaggagaatttccccaacctaccaacgcaggccaacattcaaattcaggaaatacagagaaggctacaaagatactccctgagaagagcaactccaagacacataattgtcagattgactaaagttgaaatgaggaaaaaatgctaagggcagacagagagaaaggtcaggttacccacaaagggaagcccatcagactaacagtggatctctcagcagaaactacaagycagaagaaagtgggggccaatattcaacattcttaaagaaaataatttttaacctagaatttcatatccagccaaactaagcttcataagtgaaggagaaataaaatactttacagacaagcaaatgctgagattttgtcaccaccaggcctgccttacaagaactcctgaaggaagcactaaacatggaaaggaacaaccggtaccagccactgcaaaaacaggccaaattgtagagaccatcaatgctacaaaaaaactgcatcaactaacgagcaaaataaccagctgacatcataatgacaggatcaaattcacacataacaatattaaccttaaatgtaaatgggctaaatgctccaattaaaagacacagactggcaaattggataaagagtcaagacccatcagtg

SEQ ID NO: 862082 - DNA, 665 bp, Homo sapiens
aaacatgctgcaggatattatccaggagaatttccccaacctaccaacgcaggccaacattcaaattcaggaaatacagagaaggctacaaagatactccctgagaagagcaactccaagacacataattgtcagattgactaaagttgaaatgaggaaaaaatgctaagggcagacagagagaaaggtcaggttacccacaaagggaagcccatcagactaacagtggatctctcagcagaaactacaagtcagaagaaagtgggggccaatattcaacattcttaaagaaaataatttttaacctagaatttcatatccagccaaactaagcttcataagtgaaggagaaataaaatactttacagacaagcaaatgctgagattttgtcaccaccaggcctgccttacaagarctcctgaaggaagcactaaacatggaaaggaacaaccggtaccagccactgcaaaaacaggccaaattgtagagaccatcaatgctacaaaaaaactgcatcaactaacgagcaaaataaccagctgacatcataatgacaggatcaaattcacacataacaatattaaccttaaatgtaaatgggctaaatgctccaattaaaagacacagactggcaaattggataaagagtcaagacccatcagtg

SEQ ID NO: 862083 - DNA, 694 bp, Homo sapiens
tggttcaggatcaactatcatcaaacggaaggattaactagacagagaatgtttctaacagttgctgttatggaaatctcttttaaagtcttgagtacatgctaatcaataatctccactcatgcattcctactgcttggagtagctgtactggtaaatactactgtaggagtatctgcttgttaaaatggaaaaatgtgtctttagagctcagtattctttattttacaaacacaacaaaatgtagtaacttttttccagcatacagtaggcacattcaaagtggtccaagatggctcttttttctttgaaaggggcctgttctcagtaaagatgagcaaacatttggaatttacatgtgggcagacattgggataacaactttcatcaccaatcattggacttttgtgaagtygacaccagctaaggctgcttaaaataagttctgatcattatataagaagggaaatgcctggcagacaccatgtaagttataagtgtctgtcttatctttactacacatattgtaacaaattcaatatcctagtcttcatttgtatgaatggtttgtattgtacatagtttaaccaagtgttatttgagctgcttattaatattaacttgtacttgtctctctgcttgttattggttaagaaaaaaggatatgaggaattcattttatcaatgtagctgt

SEQ ID NO: 862084 - DNA, 614 bp, Homo sapiens
ccaaacttctatatcaacaacacctctatctgtaatagagaaaaattattatgatatagaactttgattcaaagaaatgtatttgcacccattaaattcttcctttctttgacaaggaaatgggtgaaggaagatgatcaatgtcaaagaaagatcaaaggctcagaggaaaactattagaccaacttgttgcttaaacaaactggttaagttttaactgtgttagaaaatgcttttgttatttggaaaataaactttaagcaacactaagaaaataacattctctagaatcttaaatgttattttacrtctttgctgaagtatagaaaaaaaaatcttccaggtggaagtggttagtatctgatgcaaacatgggtttgtcatctcctattgttcgtttcaaaaacattttagtaaaatcaacattattataaagtaatgattgttgtagcttcttgcctcatggaagaaaaatgatacaaattactggtttatttctttataaaacaaaaaaaatgaattgtcatgttctcagttgggcatttttgggtccatggctcttgagagaatttctctgaatgagtggaaggggcatacctggtaatgtcacacag

SEQ ID NO: 862085 - DNA, 642 bp, Homo sapiens
ctgtgaggaaggtgctctcatgccggtgttacaagaggagactgatgcttagaaacatgaagtaacctccctgaagtagcacagctcttaagtgataaatcagggagtcaaaacccatctctagactccagaaactgactttttaaactgttactcctctgtgttattctattttcaaattgcattgaaaacacttstacccaaaattggcacatttaatgtaaacataagcatggtatcattacatcgaaaagagatgaataattcatttaattcatttatttttcttcggctttttgctatttttcttatttgctcaggtccccctcataatcctgtggcgaattccagccctggtagctctcaggcagaaaccagctatacaatgtagttgcctctgccaatacactgctgtggtagctagcattgttccccaaactactttttataaaatcatttttgatttagggccagagttgtttctgagcttgatacatatgaaagttgcaggtcagggataaatggagctataacgtaattcagaattactcaagattccttcacaggaatctcatttcagggaaatactactgcatgcttaggaaactttcagcaacgtgacttaagttttcctcaaaaatg

SEQ ID NO: 862086 - DNA, 545 bp, Homo sapiens
acctgaggtcaggagttcaagaccagcctggccagcatggcgaaacactgtctctattaaaaatgcaaaaattagctgggtgtgttagcacgcacctgtaatcccagctactcggggggctgaagtagcataattgcttgaactcgggaggcggaagttgcagtgagccgagatcgtgccactgcactccagcctgggcaacagagcaagactccatttcaacaaataaataaataaaaataaaagcaacactgttktttgaaggaaggacaaattcagtgaaatgcaataattcaaagttaatttcactctgcatttctgttttcagaccagtatttagtgacttcgaaaatacagtatttctatgtccatgtatactttctacataaagtttgaataaaattaggcttaacacttatatattaatacactctctcagtgcctaaattgtaagttcctactactatgttttattctttttatcttcagtacttgccctggtgtctaatttatgttaagtgctcaacgagtgtttgattagtgaa

SEQ ID NO: 862087 - DNA, 614 bp, Homo sapiens
aaactttttgttgccttaaggtttgcagcacataaaatgatattgttggagaacaatttgaactgaggatgggttatgaaaagatctttttatcccaagtaataccaataccaaagtgactatttcctgtgcctactgattcttaaatgacaatttggctcaccacactcagacttmtcaaaatagttcaacctaagtggatctgacaactgcctagaaagcttgtccgacccaccttattttgttgttgctgtttttctgttttgttttgggcttttagcagcctgaagtcatgttttttgttttctgtctgaagtggtaagcagaaaagaggggagaggaaggggctttactggcccaaccagaaacagaaactaagaacctatgtctgtattctctcccttggatacctgaaaaaggacattaaaaagtcagtgtaaaacaaagaaaaaacaaaaatgtaagcgaaatttatgactttggttcaattatatcccagatatcccaaatctgtagaaataaccaaggggagatcaaaatttttcaagtataaaggtagtactcagtttttaacttcttaaatgaggagtgcccctcagtcttctgttatataa

SEQ ID NO: 862088 - DNA, 642 bp, Homo sapiens
ctcaaaatagttcaacctaagtggatctgacaactgcctagaaagcttgtccgacccaccttattttgttgttgctgtttttctgttttgttttgggcttttagcagcctgaagtcatgttttttgttttctgtctgaagtggtaagcagaaaagaggggagaggaaggggctttactggcccaaccagaaacagaaactaagaacctatgtctgtattctctcccttggatacctgaaaaaggacattaaaaagtcagtgtaaaacaaagaaaaaacaaaaatgtaagcgaaatttatgactttggttcaattatatcccagatatcccaaatctgtagaaataaccaaggrgagatcaaaatttttcaagtataaaggtagtactcagtttttaacttcttaaatgaggagtgcccctcagtcttctgttatataaaaatttactgttgcatatgtttccaaataatgaattaccaagtatgactgatacataaaattatactatgaaagaaaacttacaagtatttgaaatatatcaagtatcccccccaaaaaacaaaccaattaacttgaaattgtaaattacacaaaatgtaataagtaaattaacatataaagtcttttgtaaattaaacaaaat

SEQ ID NO: 862089 - DNA, 642 bp, Homo sapiens
ctcaaaatagttcaacctaagtggatctgacaactgcctagaaagcttgtccgacccaccttattttgttgttgctgtttttctgttttgttttgggcttttagcagcctgaagtcatgttttttgttttctgtctgaagtggtaagcagaaaagaggggagaggaaggggctttactggcccaaccagaaacagaaactaagaacctatgtctgtattctctcccttggatacctgaaaaaggacattaaaaagtcagtgtaaaacaaagaaaaaacaaaaatgtaagcgaaatttatgactttggttcaattatatcccagatatcccaaatctgtagaaataaccaaggggagatcaaaatttttcaagtataaaggtagtactcagtttttaacttcttaaatgaggagtgcccctcagtcttctgttatataaaaatttactgttgcatatgtttccaaataatgaatyaccaagtatgactgatacataaaattatactatgaaagaaaacttacaagtatttgaaatatatcaagtatcccccccaaaaaacaaaccaattaacttgaaattgtaaattacacaaaatgtaataagtaaattaacatataaagtcttttgtaaattaaacaaaat

SEQ ID NO: 862090 - DNA, 622 bp, Homo sapiens
atcacattaaaaactgaacacttttactccacatattctaacattttgtttttaatgccacagtttaattttttaattacatattccttaacacattattgcagctgtttttttaaatacttttgcattttactctttatacaaggatatgtgataattagccattacattattagcatattctgaatttgactttcaccagagagttttactttcagatgattgtgtgttatacattagtgtcccattttttttcagcttgaagaactccctttcacatttcaggtctggtagtaattaatttcccaaatrtttgttttgttttgttttgtctgaaaaaggctttatctctcctttgtttctgagagtatctttgtcaggtgcagtattcttggttgacagtttttttttttttctccgcagcattttgaatatgcatttgccatccattatctattggcctttaatgaattttttttctgtgaaatctgattctagcctgattggaactctcatatatgtgatttgcatcctttctcttgctgctttcaggatcttctatttgcctttgatttttggcagattgtttataatatgtctttgtgtagtcttatttagattg

SEQ ID NO: 862091 - DNA, 587 bp, Homo sapiens
aaaaggtgaagaaagttagctccacaaatgtgctaaagacaaagagacaagtggcattatttcatctgcctttggttctaatcttgttaaattaggggagagaggagaataatctttaaaatgccatgtgtggaatgtcatacatgactggaatctaggttccttcaaaccaacttaatattatgataaactggaactgttgtcattgttgtcatttatgccatcactgtatttatggccaaggatgctgcattttatgctgaattacacattaccataaacaaatgacgataattttgatgcctataasaagttttattttttaatgaaaaaaagcaggcaagaagttgtaccgtttggcaagatagaattttcatgaagacaaagtatgtcattgttcatataatgtagtttggcaagtgctaagtaagggtctcagtctcaaaacaagacacccttttgacttcagcagatatgtaaaggctgttcattaccttcctacttactccttttggtagatttcacagtatgtaatgcatcagtgcagaggctctcaggataccatgcatgtaaactgtgatgactgg

SEQ ID NO: 862092 - DNA, 581 bp, Homo sapiens
tcctgtactagctggaaaaaataaagtagcttcactgagcctagtcttttacacaagtaaagtaggtgtgctttctattacatgctacattctatgcagatgaagtgaaaaaaaaaaaaaccaacttactatcagtcagctcgctggcaggaaacataggacayattcaaatgggaaattgagggaagcaacaccttgtaaaagtatgggcaagtttaaaggggacctacaaggtaatatgaagtatcctggaccagcaacagtgggggatcctcgctatgcataggcctgaaggggagtgataggaatgaagtttctagaacccagaaatagtgttagggtgtaggagagtgccttctggaacggaggcctttggtagaagaatgaagctgaaccatagcctggtagggcatgagaacagggagtaaatacaataacttgacttgattcccactctcccattttctgctagggcttctgattggacaaactcagtcagaaaggaatccactaatgcaatttatagaaattagcctctagggaacagagaagggtggaactgagaggataataaacatatc

SEQ ID NO: 862093 - DNA, 581 bp, Homo sapiens
tcctgtactagctggaaaaaataaagtagcttcactgagcctagtcttttacacaagtaaagtaggtgtgctttctattacatgctacattctatgcagatgaagtgaaaaaaaaaaaaaccaacttactatcagtcagctcgctggcaggaaacataggacatattcaaatgggaaattgagggaagcaacaccttgtaaaagtatgggcaagtttaaaggggacctacaaggtaatatgaagtatcctggaccagcaacagtgggggatcctcgctatgcataggcctgaaggggagtgataggaatgaagtttctagaacccagaaatagtgttagggtgtaggagagtgccttctggaackgaggcctttggtagaagaatgaagctgaaccatagcctggtagggcatgagaacagggagtaaatacaataacttgacttgattcccactctcccattttctgctagggcttctgattggacaaactcagtcagaaaggaatccactaatgcaatttatagaaattagcctctagggaacagagaagggtggaactgagaggataataaacatatc

SEQ ID NO: 862094 - DNA, 643 bp, Homo sapiens
tccaggaaatcctattagaaaaaggagccactcatccatttattcattcaacagatattctttcctgaattcactctaatgactatggggacattgggcacaggctaatgactaatttcatcaaggttcttgctttcatgggtcttacattctgaggaggagtattactaaataactaagtaagccagaaaatgccatatgacaatattaggatgaaaataaagcaagatattgtgattggaataaacatggactttttcggatcccataggttgagaaagatctctctggggatataactttttaaacggacacctgaatgataggcaaaagtcagtcatacaaatatatgttgcagtaatttccaggcatatagttccagcatagagcaaaagtcttagggctgaaatgagtgtgactttgtcttttaycagaaagaaggcaagttgtatagagagagtagaataaaagtgaggcctgtagtcccagctactcgggaggctgaggcaggagaatggcgtgaacccgtgagacggagcttgcggtgagccgagatcttgccactgcactccagcctgggtgacagagcaagactccctctcaaaaaaaaaaaaaaaaagtgaggccgggcacagtagctcat

SEQ ID NO: 862095 - DNA, 565 bp, Homo sapiens
tttaagcctttcggatgaattcagaacatttaattttggttcatcatttcaagtttaccttttgcctttatcctatgttatgatacatgaagaaaaacattaagagaatcatcaactgcctggtggttataaatgtactggaaatatttttcaatacatttttgaaaatgcttgtaatggataattcatggctaaaataattagttcttttttgtgtagtctattaattttcgagaacaagtataatattctttaagatactttttcctactttgwcttattctgtatattttttctgacacacagaacaatataaggccattgatcctcccacctccaccctattttctgcttctttttggtaaatcttagaagcattttaaattccatctgtccctttttaagctttcaccaatttacgaaggacttattcactttctggagcacctagcttcaatctcaacctttacttgacaaaataagtcttccatgtaaacatatatttgatgaaaaaatttcaacaaacaatgaattattattatagaaaatgagaaaaagctgtaac

SEQ ID NO: 862096 - DNA, 557 bp, Homo sapiens
accagatgaaataccaaaaaaggagaatattttgggaaggaatatgagcaaaaaggatcagaaaataaggtaaagaaccaagagaaatgaatgtttttaaaaccaaagaagagatggcttctctgcccctcccaaaaaggactgacaccagtgaccagtaattcatggaagaaaaaaactgaagttttgcagttgcaactttcaaaatttaattgttctgtatccactaactttacacagcatgtcaactcatttaggagtctagcctagggatacattttactactaatgtatcttgaggttataaggaagtaacataaaacatgtaatgttagkacattaatattttcttggccactttaatggctgcattttaacactcttaagtagatttattatagcagtctttccagggtagtataatttcattgctagaggtagatcagattttagttttggaatgtcaattatgtcctgtaggttattgctttccaaagatccttcagaattctgaattgcaactgggtattttttttaaagcattttcttttagagct

SEQ ID NO: 862097 - DNA, 620 bp, Homo sapiens
tgtgttacacaggggaatgatactgactaccttagcataaaggcaggaagcattaataacttttttactcattggtatattctgtactactaagtgacacacaccataagggacagaaaaattcttatcctcggagttaatacatttaatttccaaaataataaaatgtatcttattaaagtactcacaaggtctttagtaaaatattcacaatttagtatgctatttgtgtcagtagaattatatcatcagaacatatcctaagttggagatagcacctgtaaagagtaggaagaaatatatctcatcaatattggagagtgtctatattttattattgcactgctcttagctgtaggtaaccctcccaatcctgacaactattcccccacaatattcaggtgagcagaatttctactatatcatttccgtagaagaaagscttgacaagttccctactgacagtgtcagtagtaaaacccttgacagtttttgttcagccagctgatatgtgaagaatgtccagcttatgctggcgtgaaatctacccttatcagaatatgacaggaagaggccttgcctgtggggaggttatctgtatgagtcctagaaagttgatg

SEQ ID NO: 862098 - DNA, 566 bp, Homo sapiens
cagctgaggaatgtggagtctgcatgttcctcccatgtctgcatgggttttctctgggtattttggtttgctcacatgcctcagagatgttcacatcaggtgaattggcatgtctacggagtccctgtctgagtgagtgtgggtgtgtgtgtgagtgcaccctgagatgggatggtgtgttgtccagccacagttcccaccttgctccctaaactgacggaataggctctggccacccacgaccccagactggaataattaggtaatgaatgatcttacttgtttttaatctttcttaagtgtatgtaagcttagatttatttcagtgtttaawattaaaagtgttttggtctttatttagaagtttagtgatgtttttgtgaccagacgtatgcggtgggaacttaactctcttgtttatatcaattagcctatggagaaatgagttctcttttaacgatcattagtcaaggcttccaagaacctattggtgacgttaaatgaggacttactgtatataataattaaaacataggaatccccaaaggaatcagagcctccttgtt

SEQ ID NO: 862099 - DNA, 654 bp, Homo sapiens
ctgcaccatccaaaattatgaattatgcaaggaaaaataatccatcataaacaggatttaaaatgcctaacaagcagtaagattagactcccaagattgaaaatactgtattagaaatagcagatagaggccaggcatggtgactcwtgcctgtaatcccaccactttgtgaggctgaggcgggtggataacttgagtctgggagttcgagaccagactgtgcaacatggtgaaactgtctctaccaaaaaaatataaaaactgccaggcgtgatggcatgcacctgtagtcccatctacatgggaggctgaggtaagaggatctcttgagcccaggaggtggagattgcagttagccaagattgtgccactgcactccagcctcggtggcagagaaagaccctgtctcaaaacaaacaaaaaatcacatagagaccataaaatgctaaaaacttattaaagatttaaaggaaaaactttacaagattaaaaataatgagtcagatttaaaaagaccaattttttaaaatagtagttttagaactgaaaaacacattcactggaaataaataaatgggtagtttggacagattgaactaaagagttattagcaaactgaagacaaaaaaaataaggaaataattgaatatttaa

SEQ ID NO: 862100 - DNA, 654 bp, Homo sapiens
ctgcaccatccaaaattatgaattatgcaaggaaaaataatccatcataaacaggatttaaaatgcctaacaagcagtaagattagactcccaagattgaaaatactgtattagaaatagcagatagaggccaggcatggtgactcttgcctgtaatcccaccactttgtgaggctgaggcgggtggataacttgagtctgggagttcgagaccagactgtgcaacatggtgaaactgtctctaccaaaaaaatataaaaactgccaggcrtgatggcatgcacctgtagtcccatctacatgggaggctgaggtaagaggatctcttgagcccaggaggtggagattgcagttagccaagattgtgccactgcactccagcctcggtggcagagaaagaccctgtctcaaaacaaacaaaaaatcacatagagaccataaaatgctaaaaacttattaaagatttaaaggaaaaactttacaagattaaaaataatgagtcagatttaaaaagaccaattttttaaaatagtagttttagaactgaaaaacacattcactggaaataaataaatgggtagtttggacagattgaactaaagagttattagcaaactgaagacaaaaaaaataaggaaataattgaatatttaa

SEQ ID NO: 862101 - DNA, 654 bp, Homo sapiens
ctgcaccatccaaaattatgaattatgcaaggaaaaataatccatcataaacaggatttaaaatgcctaacaagcagtaagattagactcccaagattgaaaatactgtattagaaatagcagatagaggccaggcatggtgactcttgcctgtaatcccaccactttgtgaggctgaggcgggtggataacttgagtctgggagttcgagaccagactgtgcaacatggtgaaactgtctctaccaaaaaaatataaaaactgccaggcgtgatggcatgcacctgtagtcccatctacatgggaggctgaggtaagaggatctcttgagcccaggaggtggagattgcagttagccaagattgtgccactgcactccagcctcggtggcagagaaagaccctgtctcaaaacaaacaaaaaatcacatagagaccayaaaatgctaaaaacttattaaagatttaaaggaaaaactttacaagattaaaaataatgagtcagatttaaaaagaccaattttttaaaatagtagttttagaactgaaaaacacattcactggaaataaataaatgggtagtttggacagattgaactaaagagttattagcaaactgaagacaaaaaaaataaggaaataattgaatatttaa

SEQ ID NO: 862102 - DNA, 676 bp, Homo sapiens
ggctgacatagggtgacttgtatggatctgtcagtttggggctgtctaatccctgagagtgcactacaccatggtccgtccttaataacgaacctgtacccttattcctcaggtgaattttttttctctaaagcatatatcctcaaaatatagtttaagaatcacctgcatgctttaagaaaatgcagacattcctagatattacccactggggctgtaattctgtaggtcctgaatgaggcaggaatctgttttttataaggattgtcattgattataatcaagagttgattttaccatgcagctaatgagagtcttttgggacccaaagcttatgcgatttagagaaccctaaatgttattttaaaaaaaacagccagatttcaaaattccaaattcaaaatcactcactaacatctctgccagggccttagaagggcccaaaccttaarcttcatgggcttctcaataaatctacccctaattctaacatagatttttgtcctctattacagccagtgagaatgactactttaagatgagaaacagaaacacatgcattgtttcttgaaaagccttgttttccccatagttctagaggtacgactgggaagaatggaatgactagaaaaagtcactatatattttccaaagtgaactggacctttcagtaatg

SEQ ID NO: 862103 - DNA, 570 bp, Homo sapiens
acagagatatgcagaaggtcagcagagtgaagaactccccatcccacatacgttgctgtgggttctctcattgtttctgtccagaggagaaaacaatctgaaatgtctgagaacagtgaacttaataataatacaacagataaggactaaagttgttgaattgcaaataaagttttaacgaaaagtaattaggtaattagtatgatacttaaaatactatttaaattcacraaagaataacgataggaaaataacaagattttgagtgactatagtagattagaagtcaacaaaaacataaatgtaaaaagcatagtgctgagattagagttcaaataggtgagataaaatgtaaggactcattaatagtaattaccaaaaaaattaggtgagatagtttaaaatctataaggagaacattttttaagtaaaggaagagcttaaagatttgagggagagaaaaggaaaagaagagaacgagactgggagacgtggagtgagctagggtcaaaatatgcaaaactggtctgacttgtggtgaatcccaagttgaggtaacagggtccatat

SEQ ID NO: 862104 - DNA, 628 bp, Homo sapiens
atttgtaagagaattaggaagggaccctggcaaggctcactggcatcctagcttggaagagtgaagactgaaggcaagggcagtcaggacccatcgctcaaatatcctcctaacttgctgacacgcagcattcaggcagcagaccagctgcaaggtgggctcagtcctttatgtagaggagaaggctttcttggagatctgtccctatctgttacaacactgttagtgtccacgtgataactccctccycaccagcagtgttttcgacacccataattgggaagttaaaactagaatataaagctgaggagaaaagaaaaaggaatgctcttcaggtttcagtctggacctaaaacgtccttttttcaaatatttggaaagaaccttatctaaatttatataatgtatacagtgtatctttcactcgattgtaaaccaaaatagaccaagcctagaccttctctaactccaaaagaataaacagaaaagtcaacaggtttatgtaaaaatgttctaattccaaagacagtgaccgctccaatgaacagcttagctctgaaatagtctagtgtaagaaaaaacactttttaaaaatatgatttgtgacctcaccacaattcaagagatt

SEQ ID NO: 862105 - DNA, 575 bp, Homo sapiens
tgcatgggttgcatgctataagggagcaagaataattctacgactgggtatctaaataaaccttatctggaaggcgaaaaaactggaaggagactaaagctataattggtaaagaagcagaactcatttatattagctggtagaaggaaagatttgatatttcagggctctcacagtgaccttgtttttgcttagacaaattttatagtcttattttttgtctcactccatcatagtcacagaatatgtgatgtgctgccctatgaagttgttcatgttaaacaggaaccatgtcataggtgtgagtgccaggccagcccctaaaagcatcaggcctagctgaaagtgtcaggccaggtccctgatattcatgactgctttcctctttctcagacttatgcatttatcccaaaaccttatgatactgcattttyaaaaaaataaaataaagctttatatgaatggtatcattaaaaaatatattcttcggcttgctttttcactttctgatgacatgtatgtggattttatattggtgattatgctctagcttatttccacctctgtatagtttt

SEQ ID NO: 862106 - DNA, 607 bp, Homo sapiens
ctgaacacttctcatatgttgtaagaagcataaacctacagattcaagaagctggatgaattccaaataagttaaacctgaagaaatacatgccaagacatattataataaaaatctgaaaacgaaagataaaagtatttgaaagcayccagagaaaattgataaccttactacaagaaaaagaaatttgagtgacagtgaaccagaaaccatataggtcagaataaagtactaccatatttttcaagtgctagaggaaaagaactgtcaacttgcaattcaatactcagagaaaatatctttcaagaatgaaggaaaaataatgacattcttaatgaaggaaaactaagagaagttgttaccagtagacttaccctaaaagaatagctaaagaaagttcactaaataaaaacgaaagattaaaggaagaaaccttggaatatcaggaaaggagaaagagcgggtaaacaaagtatagctaaatacaataggcttttcttcacttgagttttctaaattatatttgacagttgaaacaaaaattataacactgctacctgatatgattctaaaaatacgtagacgatatatttaaaacaatttatta

SEQ ID NO: 862107 - DNA, 607 bp, Homo sapiens
ctgaacacttctcatatgttgtaagaagcataaacctacagattcaagaagctggatgaattccaaataagttaaacctgaagaaatacatgccaagacatattataataaaaatctgaaaacgaaagataaaagtatttgaaagcatccagagaaaattgataaccttactacaagaaaaagaaatttgagtgacagtgaaccagaaaccatataggtcagaataaagtactaccatatttttcaagtgctagaggaaaagaactgtcaacttgcaattcaatactcagagaaaatatctttcaagaatgaaggaaaaataatgacattcttaatgaaggaaaactaagagargttgttaccagtagacttaccctaaaagaatagctaaagaaagttcactaaataaaaacgaaagattaaaggaagaaaccttggaatatcaggaaaggagaaagagcgggtaaacaaagtatagctaaatacaataggcttttcttcacttgagttttctaaattatatttgacagttgaaacaaaaattataacactgctacctgatatgattctaaaaatacgtagacgatatatttaaaacaatttatta

SEQ ID NO: 862108 - DNA, 638 bp, Homo sapiens
gctacctgatatgattctaaaaatacgtagacgatatatttaaaacaatttattacaaatgagggagggtaagatttctatactttagttgaactagcaaaatgaaaatatcagtaggctgtgataagatatatatatatagtatatcttgtatatatatgtacatatatacacatatacacatacacacccatatatatgacatatatatgtaatgtaatatctacagcaaacactaaaagagctatagaaggacatgcactcaaaaacactgtagataaatcaaaatggtattctaaaatgtgttaactcacaggaagrcagggaaaatgaaacagaaatgaataaataaaaataaatagaagacttagtccataacatataaataactacattaaatgtaaatagtctaagtatactaattaaaacacagattggtagagcagatttaagaagcaggacccaactattcacattctacaagaaactcacttcaaatataatgttatatgcaggtttaaagtaaaataatgagaaactgtgtgtcatgaaaatgttattcaatggaagcaggagtggctatgataacatcgaataaattaggcatcaaagcaaagaaaattaccagagacagagaa

SEQ ID NO: 862109 - DNA, 665 bp, Homo sapiens
gaatgtgttgatcatcagattcacccaaatggacttttaataatggaaatccccaaatcctttttatgcttactgaataagaatttggggtagcgggaatccctactttgaacatgaaccctgggaaactagagctctggagcctgttgtgagtcatactttgtgggaatggaccctgacaggggctatgaaaatagtgtatccgatcccagaagcactggagagtagcagggagagtgggttttgagggtctggatgtgtaggccagttatagggatggaagacaggaagttgtgctttggcgctagtgacyttgagtgatggtgaggattacagtgggactttcttgtgggtatttgaaaggctaattgagaattctggtggtggaagagaaggaggggagggatgaaggaggaaaacagaccaagtgaaagtgaatgagtgagagacataatgaatgaatgaatgaattgttgaatcaggtagatgtgaaaatggggctggattattggctggtttggaagccatttcttcattgagacctctcagtgtaaaggaagagtggattatcttctccatgggggaagtgtttagaagtccaattccctggacaaagcagatgacatatgttgtgtttggattctgagtggttaagcaagtagagt

SEQ ID NO: 862110 - DNA, 642 bp, Homo sapiens
actgaagatagaaaaagaagaaaattgggtaaataaaagttgaggaagaaaaaagacattggagtataaagaaaatcaacagtgacagttatggtgggaccctaccatagaacagatataaagagtaaaggaatatgtagaatttccacattgttctcaaaggtcccttggttgtaaaaagcttagacaatatcatggatgtttgcatcatggttctactcacttgcccacatgtgcacagaattgrgctactatgaaaagctcgtatgaagatcacccttgcttttcttacatgctgtagttcattttagtgggtttcaggtgggaagggagagataataagggcaggaatcatttcctatccttatggcattctacaaccatcacaaaaacctagtgtgggtttcaggtgggaagggagagataataagggcaggaatcatttcctatccttatggcattctacaagcatcacaaaaacctaaaaaattgtatccctgaagatacccagcagataagcataacattgggttaaatggcagtggatgccttcctggaatcaaagaaaagatgatagtgggaaaggagcatccttatttttgagaacccatgatgtggcagacgtgagataagagttttgta

SEQ ID NO: 862111 - DNA, 642 bp, Homo sapiens
actgaagatagaaaaagaagaaaattgggtaaataaaagttgaggaagaaaaaagacattggagtataaagaaaatcaacagtgacagttatggtgggaccctaccatagaacagatataaagagtaaaggaatatgtagaatttccacattgttctcaaaggtcccttggttgtaaaaagcttagacaatatcatggatgtttgcatcatggttctactcacttgcccacatgtgcacagaattgagctactatgaaaagctcktatgaagatcacccttgcttttcttacatgctgtagttcattttagtgggtttcaggtgggaagggagagataataagggcaggaatcatttcctatccttatggcattctacaaccatcacaaaaacctagtgtgggtttcaggtgggaagggagagataataagggcaggaatcatttcctatccttatggcattctacaagcatcacaaaaacctaaaaaattgtatccctgaagatacccagcagataagcataacattgggttaaatggcagtggatgccttcctggaatcaaagaaaagatgatagtgggaaaggagcatccttatttttgagaacccatgatgtggcagacgtgagataagagttttgta

SEQ ID NO: 862112 - DNA, 642 bp, Homo sapiens
actgaagatagaaaaagaagaaaattgggtaaataaaagttgaggaagaaaaaagacattggagtataaagaaaatcaacagtgacagttatggtgggaccctaccatagaacagatataaagagtaaaggaatatgtagaatttccacattgttctcaaaggtcccttggttgtaaaaagcttagacaatatcatggatgtttgcatcatggttctactcacttgcccacatgtgcacagaattgagctactatgaaaagctcgtatgaagatcacccttgcttttcttacatgctgtagttcattttagtgggtttcaggtgggaagggagagataataagggcaggaatcatttcctatccttatggcattctacaaccatcacaaaaacctagtgtgggtttcaggtgggaagggagagataataagggcaggaatcatttcctatccttatggcattctacaagcatcacaaaaacctaaaaaattgtatccctgaaratacccagcagataagcataacattgggttaaatggcagtggatgccttcctggaatcaaagaaaagatgatagtgggaaaggagcatccttatttttgagaacccatgatgtggcagacgtgagataagagttttgta

SEQ ID NO: 862113 - DNA, 625 bp, Homo sapiens
acattttttagtacctacaatgttccaggcactggccaggtcaatgtgcacacatcactgaagaaactagacaaatgtcttcaactaggcattgtgagtagtggttctcttctacaccagctttcctgtcacccatttccctggtctacttcctgtatatcttcagctctgcatggcaaggaggacatccccaacagagcttctattagctggcttgttactgaagtcagcaatgggacaggttagcaggagtttggaggagaagtgggaggaatggaargtgggtgcatctcctctgtttcagccttgggcagcaacgttgcagccacaactgatatatcttcactctgcaactcactctctggggtgcctactgctctagttgggctcctcagcccttcctttccctctgcagacaacaccatatggtaattccccttgactgaaaatactctgactatttagcccctgaagttttttctatttacctaattagaaagcatcatagagtgttagctaaatcaaaaaaggtgcgtttttctttcaggtaatttatgctaccctaccagggagtggacacagcttcagtgtttttcttctttttttttaatggaactttcaagtt

SEQ ID NO: 862114 - DNA, 625 bp, Homo sapiens
acattttttagtacctacaatgttccaggcactggccaggtcaatgtgcacacatcactgaagaaactagacaaatgtcttcaactaggcattgtgagtagtggttctcttctacaccagctttcctgtcacccatttccctggtctacttcctgtatatcttcagctctgcatggcaaggaggacatccccaacagagcttctattagctggcttgttactgaagtcagcaatgggacaggttagcaggagtttggaggagaagtgggaggaatggaaggtgggtrcatctcctctgtttcagccttgggcagcaacgttgcagccacaactgatatatcttcactctgcaactcactctctggggtgcctactgctctagttgggctcctcagcccttcctttccctctgcagacaacaccatatggtaattccccttgactgaaaatactctgactatttagcccctgaagttttttctatttacctaattagaaagcatcatagagtgttagctaaatcaaaaaaggtgcgtttttctttcaggtaatttatgctaccctaccagggagtggacacagcttcagtgtttttcttctttttttttaatggaactttcaagtt

SEQ ID NO: 862115 - DNA, 663 bp, Homo sapiens
aagttttgcaggtcaaatggcaaaacacatattttttaggcacttatataatgagaaaacaaattctcacaaaatagtttttcaaaactcaaaatataataatgcatacataaaacaggtaaagatacgtgaacacaaagattaggcaatactgtaaatgtctactaatggggactgcttaaaaaaattctgttagctgtttaaaaatttgtggtagaacaacacaccttgaaacagaaaagtattcaaaggtatattgctaaagtgaaacagttaagtggaagaaaagtaaaacatctcatttggggtgaaagcaacagcagacacattttatgtgcaatgaaatttctggaaggatatacaagtaaataataactaaattctgaggagtggaracttttatattctatcttattctggcagtttaatttttttaaagctatgactgtgttcctttataattaaaaactaataataaaaaattttcaatgaagaaaaaattaagtttactatatgaaataaatcaattaagggtttgggctattaagtgaaaagaagtaagctgtaagttctacatgcagatatagaaaaaaattccttttcaaatttctcttagccacactcctaattttttttaggactcattttgtattgagtcagaaa

SEQ ID NO: 862116 - DNA, 645 bp, Homo sapiens
ggacaagaaaccttgatggctagaatgggacttgagtgtatctgttgaagctattagcattattgaagcgatcttagagcaactttcagcccctggagatgaatgccacaggacatgctttaagccatgttaaaatgctagaaaaacagtggacaggctcttcagtctgacctgaaagtttaccagaagttaaatcttttaactatagaggttgctgaaggagggggaacaaaggaagaaggtgcaccccattatgagcaaragagtgagacatcaagagaataacgcctgattcagctctgcaggccttgctggggtgctcaaaaaaggattcaccccattcgctaaagatctcgctgctgcttttcagggatgggcgggtctctgcccataagcaagctaccaaagaacattctgctttcttgacccctgatgtgtggcctcggacacgatctgagaatttgtgacatggaggaggaggggcctacactcacagcaagagcaccactgccctgtccagaaagcaggagttaaatgtttagtaaagggcaaacttgtctgtacttgccttcctttccaagaggttgggcatttcatgacagttacttcaaggacaagaattcacagcttataataggaaagttg

SEQ ID NO: 862117 - DNA, 581 bp, Homo sapiens
ctgctgaaattaacgtccttacatagtttttggtattggcatggcatcaatcacatattatccatatagccaaacacacagacatggctgaaattaaagctggctttccctcttacaatgggtactcactctccacaaagggttatgcccacaggacaagaatgatactgaaacactactttgctattttactttctttacttggatctcctttccaactttcccttcaagcatgttgggccattttgatcgctggtgagcacatgtgattgggggaaccagggcaaaggaagcagtactggatccttttccttgtgccttttaaaaccacagatatttctatgccataaagccagaggaagattttargcataagtggtttttctttcctcattttttaaaagatggcacagtggcaattcagtgattaaagctcattgtctgaatgacaaagcttctggcccactgtgtcctgtcattgtcgtggcttctgattcaattagggactgcacactgggggggttcttcctggtttccacggacctaagacttttatttttatcacatacgaacttggtttt

SEQ ID NO: 862118 - DNA, 591 bp, Homo sapiens
gaagataaagttagaaggtctaaaaggattgaattggaaactctcagaaggagaggaaagagataatgaagcaaagacagtatttcaaaagatgatggctaagaattttgtttggaattaaagacatcagttcacagttcaaaaggccagtgaaagtcaaattggataaattttttaaaaatcagacctgaatatattgcagtgaaactgaagaaaaccgaagacaaagaaaaaatcytgaaagcagcctgaggaaaaaaacattatttttaaagtttccacacttggaattacacctaacttttgaactgaaacaatggaaactaaaaaataatggaatgatatcttcaatatgacaaaggtgaaaacaatgccattcaagagttctacacaaattttccagcttttttttgtctgcaaatatctttcttttgtcttcacttttaaagaatactttaaaagtggtataaatttgcattgttttctttcagtgcttcaacagtgccatttgactgtcttccagcttccataatttcagcagaaaattttgccatcagtattcttagtgttcctgttaaggtaatgtatctt

SEQ ID NO: 862119 - DNA, 639 bp, Homo sapiens
tagagtctccaataaaaacctatagcaaacatcatactaaatgatgaaatactgagcacttctcttctgagactgagaacaagagaaagatatttgctgtcattacttccaatgcacagcatgctaatgtctagcctgtggaagaaagaataagaaatgaagagcataaggattgaacaaaataaaaactattattatctgcagatgacctgtttgtgtatatacaaaatccaaaatcatctacrgataagtcagaagtaaatttagcaaagtctgcagataaaagctcaatatacaaaacttaactgtagtttaataaagccacattaatttagaaaataagcttgggaaaaaataccacactagctataaaattaaaatagataaactgtacttcatcaaaattaaattgttctgctaataaaaagacattaagaaaattaatttctcactgtgagaaaatattcacaataattatttctggaagacttatataaagaatatatatatatatttctttttcttttttaagatggagtctcactctgtcacccaggctggagtgcaatggcttggtctcagctcactgcaacctctgcctcccgggttcaagctattctcccgcctcagcttcctgat

SEQ ID NO: 862120 - DNA, 639 bp, Homo sapiens
tagagtctccaataaaaacctatagcaaacatcatactaaatgatgaaatactgagcacttctcttctgagactgagaacaagagaaagatatttgctgtcattacttccaatgcacagcatgctaatgtctagcctgtggaagaaagaataagaaatgaagagcataaggattgaacaaaataaaaactattattatctgcagatgacctgtttgtgtatatacaaaatccaaaatcatctacggataagtcagaagtaaatttagcaaagtctgcagataaaagctcaatatacaaaacttaactgtagtttaataaagccacatwaatttagaaaataagcttgggaaaaaataccacactagctataaaattaaaatagataaactgtacttcatcaaaattaaattgttctgctaataaaaagacattaagaaaattaatttctcactgtgagaaaatattcacaataattatttctggaagacttatataaagaatatatatatatatttctttttcttttttaagatggagtctcactctgtcacccaggctggagtgcaatggcttggtctcagctcactgcaacctctgcctcccgggttcaagctattctcccgcctcagcttcctgat

SEQ ID NO: 862121 - DNA, 586 bp, Homo sapiens
cacaaaacacaaaaagacataagataccctggttgaaaaccagcagaaacaataaacagcaaactaaataagtagacttaatttgaattatcagatacaaaatataaaaaaaccacacttaatatatttaagaaatcaaagggaaacttgaaaaataaaagaggggagagcagtcagatttgataagaactaaataaaacttccagaaataaaaacaataataataattaaaaagttaaaactcagcaggtgagacttcactgaagaggggattattgaatggaataatgaataaaaagaaagtatccagatcagtctacagaggaaaagaaatggaaaatatagaggtaaaaatgaatgaataacagtgcaataatagattaagtattggaataatagagtattccatattccagaacaagamggaaaacagcaaataatgcatatggggaaacaatgacacacggcctctacatcacacatacacaaaaattaaataaaagatgaggcattaacctaaagacaggagctaaaactataacccttccagaagtaaacatgggagattatattcatgatcttgcag

SEQ ID NO: 862122 - DNA, 635 bp, Homo sapiens
taggttggatttctatctgactccacatcatttctgtgggttcttcatcttgtggatcttagcttactctttccccggctgtgcgcctctgttttctccctacaacgcccttctgcagataatctgggtcaatcaacatgaatgggtgaagcagaagtgagaaggaaatgagaaaaagcataaaataataaatggcaatgtaaaatattaatttggaagccaactttggagactgcataatgtacatgccatctacatgaccataaattaaatatttgcaacaatgtgtaattttcgtgattatggagggtgtggccttcaagaaaatactagtggcaacagatacagtcctatattcctgtaagatgttaygtaggatatttgcatgttctaaggattaaagtaaccggatcttaatagactagtgggcacatataagaacattctgaattggggtttacatttttaaaatgttagacaaatatcacaataagtcaaatggaaaacccatggggcattaaattacctgcaaattttaatatacagacaacctcaatccaccagtgtggctcctggggatgggctccttcctgagtcctgtattcctcaggctttcaagcactggggacaccagt

SEQ ID NO: 862123 - DNA, 635 bp, Homo sapiens
taggttggatttctatctgactccacatcatttctgtgggttcttcatcttgtggatcttagcttactctttccccggctgtgcgcctctgttttctccctacaacgcccttctgcagataatctgggtcaatcaacatgaatgggtgaagcagaagtgagaaggaaatgagaaaaagcataaaataataaatggcaatgtaaaatattaatttggaagccaactttggagactgcataatgtacatgccatctacatgaccataaattaaatatttgcaacaatgtgtaattttcgtgattatggagggtgtggccttcaagaaaatactagtggcaacagatacagtcctatattcctgtaagatgttacgtaggatatttgcatgttctaaggattaaagtaacyggatcttaatagactagtgggcacatataagaacattctgaattggggtttacatttttaaaatgttagacaaatatcacaataagtcaaatggaaaacccatggggcattaaattacctgcaaattttaatatacagacaacctcaatccaccagtgtggctcctggggatgggctccttcctgagtcctgtattcctcaggctttcaagcactggggacaccagt

SEQ ID NO: 862124 - DNA, 557 bp, Homo sapiens
agccaagccatggatattttattttattttattttaagtcctgggatacatgtgcagaacgtgcaggtttgttatatgggtatacatgtgccatggtggtttgctgcacctatcaacccatcatctaggttttaagccccacatgcattaggtatttgtcctaatgctctccctcctcttgcccctgaccccacgacaggccccagtgtgtgatgttcccctccctgtgtccacgtattctcactgttcaactctcacttatgagtsagaacacgcagtgtttggttttctgttcctgtgtaagtttcctgagactgataaaccatggtctttgctgtgtcttttctgccttatatattgtaggtgaccgatacacctgctcaaaagttacttgttgatttgaattgaacttgtacctctcacctctcctactggaccacaagctctttttttcatctcctagcagaacatctttcccatggtgataatcaacagatactaatttgttttaatgaacaaaatatgatggaatccactaccaaaataaatggtcttga

SEQ ID NO: 862125 - DNA, 613 bp, Homo sapiens
cccaactcctgccatgcttgcttggtagtgtgggaacacatgagaaatactagttgggttataaaaaaatacttaaattttcttcacaaaaaatatctaagatgattgagattaagcatcttttaatatgtctttcatagaccttctattctgtttaaacacttaccaattcatacatgtctattcatctatttgccaatttttctattggataatttcacttttcctcatgaattagcaggagttagtttcatgtattctgaaggttcatgtattctgattttaatactttgcctattatttatgttgcaagcattgtctttttactgtgttcatgaaatctttttgtttggaaatttgcttaatgttagggagccacacttacyaacctttttctttatggcctttgcattgggcatcttgtttaagaccttcacacttgctagcatataaacataaccacctatattttctcctgatattttaaaaagtttgtttttcattgttagctgtttaatagatctgagatttttttctgtgaaagatgtgaggtaaaagtctaacttttctattatttccaatggataacaaattgtttctttgccttttatga

SEQ ID NO: 862126 - DNA, 613 bp, Homo sapiens
cccaactcctgccatgcttgcttggtagtgtgggaacacatgagaaatactagttgggttataaaaaaatacttaaattttcttcacaaaaaatatctaagatgattgagattaagcatcttttaatatgtctttcatagaccttctattctgtttaaacacttaccaattcatacatgtctattcatctatttgccaatttttctattggataatttcacttttcctcatgaattagcaggagttagtttcatgtattctgaaggttcatgtattctgattttaatactttgcctattatttatgttgcaagcattgtctttttactgtgttcatgaaatctttttgtttggaaatttgcttaatgttagggagccacacttaccaacctttttctttatggcytttgcattgggcatcttgtttaagaccttcacacttgctagcatataaacataaccacctatattttctcctgatattttaaaaagtttgtttttcattgttagctgtttaatagatctgagatttttttctgtgaaagatgtgaggtaaaagtctaacttttctattatttccaatggataacaaattgtttctttgccttttatga

SEQ ID NO: 862127 - DNA, 694 bp, Homo sapiens
cagtctttgatccatgtagaggcagttcccttctactcctagtttgttactttttttttttaatcataaaagggtgctaaattttggcaaattctttttctgtgtttactgaaataatcatgtggtttttgtcctttattctattaatatgttstattacattgattgattttcttatgttaagccaacctttcatcattcaggataaatcccacttcgtcatgaggtataatcctttccacatgttgctggatttggtttgctagtattttgtcaaagatttttgggtctaaatccataaaggttatgggtttttagctttcttttcttgtaatgttttcatttggttttggtatcagggtaatactggcctcataaaatgagttgaaaagtgttcccaccttcttattttttggaagagtttgtgaaagatttatgacaattcttcattaaacattcagtagaatttaccagtgaagccacttgatcttgttttttgtttgtttgttttttggttggaatatattacaggtctattcagattttctatttcttcttgagtcagttttggtagttcgtgtctttctaggaatttgttcatatcatctacattatctaatttttggcatacaattgttcatagcattatccactaatccttttaatttctgtaaggttggtagtaatgtccttt

SEQ ID NO: 862128 - DNA, 694 bp, Homo sapiens
cagtctttgatccatgtagaggcagttcccttctactcctagtttgttactttttttttttaatcataaaagggtgctaaattttggcaaattctttttctgtgtttactgaaataatcatgtggtttttgtcctttattctattaatatgttgtattacattgattgattttcttatgttaagccaacctttcatcattcaggataaatcccacttcgtcatgrggtataatcctttccacatgttgctggatttggtttgctagtattttgtcaaagatttttgggtctaaatccataaaggttatgggtttttagctttcttttcttgtaatgttttcatttggttttggtatcagggtaatactggcctcataaaatgagttgaaaagtgttcccaccttcttattttttggaagagtttgtgaaagatttatgacaattcttcattaaacattcagtagaatttaccagtgaagccacttgatcttgttttttgtttgtttgttttttggttggaatatattacaggtctattcagattttctatttcttcttgagtcagttttggtagttcgtgtctttctaggaatttgttcatatcatctacattatctaatttttggcatacaattgttcatagcattatccactaatccttttaatttctgtaaggttggtagtaatgtccttt

SEQ ID NO: 862129 - DNA, 691 bp, Homo sapiens
tgttgagaagtcagctcatactcttattgctcaattgaaacaatctatcttgtcttctgatagatttaatttttatgcacacatatttatttatttttgtctttagctttcagtgattttactataatgttcctaggcatggttgcatytatcctttaaggggcttgtagcacttattgaatatgtgaataattgtctttcatcaattctgaaaaattttgagtcattatcttttcaaatattgtttcttctccacttttcacctctctgtcttttgtgtgtgtgtgtgtgttctttttctatattttgtctctgcatgcttcagtattttcagatattttatttgatttatctaatttccactttacaaaatctctctggctatacctaacaagcggttaaattcatccactgagtttttaatttgttattataacttcttagttctagacttttcattagaatgtttctagttttcagatctctgcttaattttgataaaaacatttttaaaatctgtgtctgataattctatgatctgtttctcctgggtttgtttctattgtttactctggttttctatcagattgtcttacctcctcatgtgcttggtcattttttgattgagtgctgatcagtatatataaaagttatagacataatttaaagccacaagaagataactccctcc

SEQ ID NO: 862130 - DNA, 691 bp, Homo sapiens
tgttgagaagtcagctcatactcttattgctcaattgaaacaatctatcttgtcttctgatagatttaatttttatgcacacatatttatttatttttgtctttagctttcagtgattttactataatgttcctaggcatggttgcatctatcctttaaggggcttgtagcacttattgaatatgtgaataattgtctttcatcaattctgaaaaattttgagtcattatcttttcaaatattgtttcttctccacttttcacctctctgtcttttgtgtgtgtgtgtgtgttctttttctatattttgtctctgcatgcttcagtattttcagatattttatttgatttatctaatttccactttacaaaatctctctggctatacctaacaagcggttaaattcatccactgagtttttaatttgttattataacttcttagttctagacttttcattagaatgtttctagttttcagatctctgcttaattttgataaaaacatttttaaaatctgtgtctgataattctatgatctgkttctcctgggtttgtttctattgtttactctggttttctatcagattgtcttacctcctcatgtgcttggtcattttttgattgagtgctgatcagtatatataaaagttatagacataatttaaagccacaagaagataactccctcc

SEQ ID NO: 862131 - DNA, 617 bp, Homo sapiens
aaaacatgttaggaatgtagatctcatgttgtgttcttaccatacacaaatataataataaacagagaccacacacataaaataatacaagaaagtttttgaaaattgtgaatatgtttagtaccttcattgtactaaatggtatcgcatgtatacatacgttcaaatttatcaaaatacatagattaagcatgtgcagttttttgtttataaattatacctcaataaacctaaaaaaatcctatgaccttggattagacaatggtttcttagatatgacagcyaaagcacaagcagccaaaggaaaaaaatacataataaaacttcattaaaattataaaacttgtgtgcttcaaagaacattattgagaaagtgaaaataaaacccacataatggaataagatatttgctaattatatatctcacaaaggtctagtatccagtatatataaagaattcttacagctcaacaataaaaagataagtagcccaattaaaaaccgggcaaaggatttaaatagacatttctcctaagaagataaataaatggttaacaagcatgagaaaagatgctcaatatccatagtcattggagaaattcaaataaaaacaataa

SEQ ID NO: 862132 - DNA, 707 bp, Homo sapiens
ataaattttgacttatttttactgtcttattttgaaatttcagtcatcaaattttttcttcttttccttctttcaaactatattgactaaatattttagtaacccctcttattggtgggaagtttctcattctggttctattttttaatctttgtaattttaacatgcatgcatgacctaatgtttaaatgaatcagcctctccatttaatacagggactaaggattcagtaatttttatttctcacagtagtgcatatttgtcatgtttttggctccccaccagctccaaacatatatttaagaaatgttctttcttttgtctatgtcccccccaaggtagaagtaaaaaactcatttgctagcctttcttgtagctggaggacatgtaacctattgacagttgaagttaataacacaaagtggcaagtgctactcagattccccattctgcaatgttctctataggcaatgttctgactgctgtgttcaataagcagtcttaatcatgcaagctctaatgtctatcygaggtatagcaaaaatgggttgctagtatgtcatttctccattgctgatttgggtgttgtaaagctttaacaaaagacatgtagtatgtttagaagagtggctcaatggagattaagtattactgtttaataattaggagaacatatccatatgttttgtaatatgtttagttttaaa

SEQ ID NO: 862133 - DNA, 613 bp, Homo sapiens
tgtatttctacgaacaaaaacattcttctgtataatcacattacaatcatcaaaatcagaaaaatcaacattgacacataattgctttataatcctcaggctccaagttttttcagtcatccctaataatgccctttattacaaaaagaaccatttcaaaatcatgcattgcatttgactatcatttttctttttttttcctttttgagacagagtctcgctctgtcacccagattggagtgacaactccaacttccaatttatgtsctttttttctcttagtaattataaataaactaaaaatttttattatatataacaatatattactaaattatataagcacacatacaaaatataaaccacaataattatcatttcataccattcaactttatttagatttactcatttttagcatttttctgtctcttcctaccatcatgaatctctaatttttcatgagatcttatgtattccttctgaagaggtatttttcttaacaatagtagattctactagtgataattctttcagaatttgttcacctaaaaatatttttttcaccttaatttttaaaggcatatttgctgtacatcaaattctggttggc

SEQ ID NO: 862134 - DNA, 612 bp, Homo sapiens
tgggaaggcagaggtggaaaccaggaagagcgcaaatcctgcatctctagtccattatttttctgaatgagaccaggagaacagaagttctacaagatgttaatagttgcaccctattggtccttcagttctacttccctcttggagattcataaggtacaactttagcagaggttatggtgccggtctaactcaaagatttgttttttgttttattttttgagacaaggtttcactgttgcccaggctggagtgcagtggtgcaatcatggctcactgcagcctggagtccctgggttgaagcaatagagcaatagatcctcctgcctcarcctctggaatagctgggactgtaggcacgcaccaccaccacgactgtttcttttctttttttttttttggtagagatggcattttgccatgttccccaccctggtcttgaacttctgggctcaggcaattttcccacctcagcctcccaaagtgttgtgattataggcacgagccaccatgcctggcccttaaggacttcttataaggaatcaataaataaggtgaaaattaaacgagacaatacacagaaagtgcttagcagagtgcttgacaccaatt

SEQ ID NO: 862135 - DNA, 651 bp, Homo sapiens
tcacttacaacaatgtagggtacaagcaaaacatgatggcaaaaaagaccttcattaactagctgccatatccatgagctcagttttcagcttatggatgctcccatcttttctagcagcttcccttccatacagccaataaaatgctggcagttaaagctgctgctttggcccttcgcgtatagctagataatttttatattgcaaaaatgcttcccaattcttaagggtttttttcctttacttaaaacaaattttttaaagcatatcttttaacagtgaggttttctacatagactctgggacgacaatgaaggtcatctaagagaaagaaaattgcattgatatattcggtcactgtrtaagtggctcaagcagtctaagatctggatgtgtgtttttttttaaatgtatttgatggcttttgaacattctcatctcctaagaatttgaacacattaaaatgcagacttcatgagatctggaatcctttcttctgtgcagggtgttttaaaaataggacaattaaatttcttgttcttagatacataggtttatagaattttccagctaaagaggcttcagaactcctgtattctactatatctcaagttttgagggaataaacacctttgaaaatctagtaaagcc

SEQ ID NO: 862136 - DNA, 651 bp, Homo sapiens
actatgtgctcagtgctgagtgggagcatgggagatgtacaagagctagcagtttagatattaacccaatctctcttcttttgacgccctttcctttattccaccaacacctataaatggctgattgtgtgccaagtattagggataaagcaataaatgagtagatacagtatccaccctcagtctaatagaggagacagctacttaataaataatcatgcagaccctcaacaatacctagaagatctttkcagggatgcaagagtgataagagtatttgcctctgggaaggagaactgagaatcagagggccaggagcagaagctaattttcttttcctagtatgctattattactgtctgtattttatatgcgggtattttatgaattacctttttttaagtgaaatttaataatcatcacacaaataaatatgccattaaaaactgtgataaatgccatgatggaaaagtttaaggtatctgagagggtaacaggaggaactactttattttattatcattcattttttgagatatggtttccctctgttgcccaagctgtagtgcactggcttgatcatggctcactgcagccttgacctcctggggctcaggtgatcctcccacctcagcctctgagtagctggga

SEQ ID NO: 862137 - DNA, 579 bp, Homo sapiens
aataatcagatgtgctactaaataagatatggtgtcttcttcataattatcaaggaatccaatatttctaggtttttttaaaatcagtttctgagaaaagcttctccattattcttgtggtatgctctcttgtttacattttggtttttctatttcagataatactggggatttgctcatgtagttcatctgtatctatatacttgttaaactctgcatagaaactttctgaaggaaataataatgataattattatagctaatcattcccattttctatgttattcaaacatgcctgtatgatgtactaaaattatctctattacttagtactgtacttatgacaaagtaggagctcaaataattctaatttgctgaaaastctacagtctaactgatatgttggaaataatctacatgttatgtcttcataggaacttcatttatgatcattcctttctttccctaaatggtacctaaaaaaagattccatttcacttttattgagcatctactcagtgtaagactattctttttaatgcatggaatgcaagaactgtgatagtaactggcttcata

SEQ ID NO: 862138 - DNA, 624 bp, Homo sapiens
gggattacaggcacccaccaccatgcccgactaatttttgtatttttaattgagacagtgttttaccatgttggtcaggctggtctcaaactcctgacctcaagtgatctgcccgccttggcctcccaaagtgctggaattacaggcatgaggcaccgcgtctgtccatagcaactttatgtgtaataggcaaactgggaaatgactcaaatgccattgaaacgtgaaccgatagataaattatggtgtatccattcaatggaatatgacttakcaatgtaaagaaataaactcattctacagttacaacatagatgaatctaaaaataaatatgctgagccaaagaagccagaccaagtaaaaggaggagtacatattatatgattcatttatatggaaatctagaacatgcaaactaatctatagtgacagaaagcactgtcaggatttgcttagtaacaaggtggaacagatgtgtcagagagggattttaaagtgaggaaacttcaggaggtgatggatacatccattatcttgattgtggtgattggttcatatgcatgtacatatatcaaaactaaactatacactttcaatatgtgtagtttttatattattataat

SEQ ID NO: 862139 - DNA, 568 bp, Homo sapiens
ttcagctatcttggaacaataaaaacacaaaggtttacttctgagcactcattttaatcttgttttcattacgggaggaaagggtctaggagcaaatgtaaactccaagttttgctaataattgataaggccgtaagttctgtttacaagggccaaccaagagggccacagtgtccctgaaaaaatggaracattccaaagccggtttcctgagagattcgtcttaaagtacataggactggctacttctcaagatagagcattcaggcttttctgttgaccgaattgttgtttaactaggaccaattaattttgcagttttacttgtgccagcttttactttgcttgccaataactaattgcattgttttcttatttttgtttttaacaccaacagtcagttttttgtatttaaaaaagccactttgggatactgaagttttaagccaagactatttagttgattggctcggtaagtaggtcactggagaagtcacccattctttctggcataccttcaaatataaatgagatatatgttttccaaagatggaaaaattctattttg

SEQ ID NO: 862140 - DNA, 665 bp, Homo sapiens
gagttagaagaggagagagtattcaggcatgtgcctttgagttttactcagtgaaatgaccctggactggaggacttgtgcttcgatatatatttttgaagaatccctgcagctgctacatgagacttccctagaaggtagagaagatgaggacagaagcagagagaacatataagagatacatggtggccttagagaacaattctggaaatgctttgaagttagagctgacttgatatgctgcctgattgaatgtaggtgtgtgggaaagaggagagtcagagatgagtgacacacatatctattccacaagcgtagcactgctggtgcataacaacataagcattaagaaaaccctcaaaataggccccagttagcaccattgttctttttccccatttcatttttatctccttttttcmttcttgcctttttcattttatcttctttcgtgtctcttgatcactgtggcaacaaatatactttataaagtcctttttcactcttattatttctattttattcatcactaatttaattcatgacctctaagatgaagaaaattcagaactaaaaaacaaacaaaaaacaagctaaaaaggctggcagtctctgttcagtctactgtaacaaaacagcttagaccaggtaattcacaaacaaca

SEQ ID NO: 862141 - DNA, 632 bp, Homo sapiens
gaggtagtctgagtcagccaaattctccaacttagctcattctaaatatttagatactgctctttcttgatcaacatcctggcttcctcataagagactatatataagtccatgaattaaaccaataaaatttggcaaccctgaggatcaaacactgtgtctggcctacagttgcttcagttcttcagctgcaagagcctatgtcttgcwaaatctcttacagatctttgtagcagagccacagaagttccctgggtttctctgataacttgagctaataatttagaaatcttgccttttttttttctcccccaggctgtagtacaatggccccaactcagctgactgcaacctctgccgcccaggttcaagtgattctcgtgcctcagcctcccgagtagctgggactacaggcacccactatcaaacccagctaatttttgtatttttagtagaaactgggtttcgctatattggccaggctgtctcgaactcctgacctcaagtgatccacccacctcggcctcccaaagtgctgggattacaggtgtgagacacggcacccagccttgttattactttttaagatgttcagcaatattagaagcagtcacaacacctgcacaaccctc

SEQ ID NO: 862142 - DNA, 545 bp, Homo sapiens
aaattggggagatgttggtaaaaggacacaaaatttcagctagacaagagcaataagttcaagagctctattatacaacatggtgactatagctaataacaatgtattgtgtatttgaaaatcaccagaagggtagattttaagtgtytttatctcaaaaaatgttaagtatataaggtaattgatatgttaataagcttgattgagccactccacaatgcagacatatttcaaaacatcatcatacctcataaatacatataatctttgtgtgaatttgaacataaataaattaaaaatattttttgaagaataagtgcctgaataaatgaatgaggaagtgaacaaccaatgtgtggaagtagtatagattctgaatttttcacaagctccctgagcaatgcttaaccagagttgagggcctctcccctcaaccatctgtggtcaaaatttctggaatctctacaccagccttgttgcctcctctagccctgtgctcaggaagtccttggcctaagtcctcttttttttttttttcttttttt

SEQ ID NO: 862143 - DNA, 605 bp, Homo sapiens
catgttctcactcataagtgggagttgaacaatgagaatacatggacacagggaagggaacatcacaccctggggccttttgggggctgtgggggcaaagggagggggagcattaggacaaatacctaatgcatgcggggcttaaaacctagatgacgggttgataggtgcwgcaaaccaccatggcgcatgtatacttatgtaagaaacctgcacgttctgcacatgtatcccagaacttaaagtaaaaaataaaataaaatataaattaaaaaatcatgctgctctaagagaatcattcaccctccaatgatgcttaggcaaataccagctgttctgaccccaccttaagggtcatatcctaagatcatattctagcagcagctgctgttggagaatatatacaaggctccagggcagaaattgggtaccacaagtggatactatgggtgctgctatgtccaggctgcgggagcctgtcccctttgtctctccttcagtatgagttgttgcaagtagagtcagaaatcatatcaaaatgagtacagtcacctgtaaactaaaagtaacacctaagccaccaccaccaccaacagctgaacaga

SEQ ID NO: 862144 - DNA, 605 bp, Homo sapiens
catgttctcactcataagtgggagttgaacaatgagaatacatggacacagggaagggaacatcacaccctggggccttttgggggctgtgggggcaaagggagggggagcattaggacaaatacctaatgcatgcggggcttaaaacctagatgacgggttgataggtgctgcaaaccaccatggcgcatgtatacttatgtaagaaacctgcacgttctgcacatgtatcccagaacttaragtaaaaaataaaataaaatataaattaaaaaatcatgctgctctaagagaatcattcaccctccaatgatgcttaggcaaataccagctgttctgaccccaccttaagggtcatatcctaagatcatattctagcagcagctgctgttggagaatatatacaaggctccagggcagaaattgggtaccacaagtggatactatgggtgctgctatgtccaggctgcgggagcctgtcccctttgtctctccttcagtatgagttgttgcaagtagagtcagaaatcatatcaaaatgagtacagtcacctgtaaactaaaagtaacacctaagccaccaccaccaccaacagctgaacaga

SEQ ID NO: 862145 - DNA, 584 bp, Homo sapiens
ctcagaaataacaccacacatctacaaccatctgctctttgacaaacctgacaaaaacaaaaaatgggaaaaagattccctatttaataaatgatgctgggaaaactggctagctatatgtagaaagctgaaactggatcccttcctcacaccttatacaaaaattaattcaagatggattaaagacttaaatgttagacctaaaaccataaaaaccctagaagaaaacctaggcagtaccattcaggacataggcatgggcaaagacttcatgactaaaacaccaaaagcaatggcaacaaaagccaaaattgacaaatgggatctaaytaaactaaagagcttctgcacagcagaagaaactatcaccagagtgaacaggcaacctaaagaatgggagaaaatctttgcaatctacccatctgacaaagggctaatatccagcatctacaaagaacttaaacaaatttacaagaaaaagacaactccatcaaaaagtgggccaaggatatgaacaaatacttctcaaaagaagacatttatgcagccaacagacatgtgataaaatgctcatcaccactggt

SEQ ID NO: 862146 - DNA, 584 bp, Homo sapiens
atttgaacccagttccattccccaagatcaaccagaatgatgacaacctagttctgtctccttcaaaggccatacattttccagcaattatgccatctttataaacatgctgaatataaaaatcatatatatatatatatatacacacacacacacacacacacatacatgcacacatatagcatatactctctatgttttatattccaaaatttcctgacgttcataaacactcttagttttggttgcrattgaattagtcatctattagttttggttccaattgaattagtagataaaagaaggataataaatatggttttgctattaataaaaatgatataaaatcctcttgaaactggatcttgattcacattccctgacagtgcctgctttcttgcccattgtctttcactgcatggggtgcatggtgcatgctttatggattcttgtgagtccaaaatacactgggcggacactgggcaccagggaactctggctgccctgcaatggcctggaaagatcagcctcacctactgctaaccatctctaccagtggttgagcaattccgccaatgaaagtt

SEQ ID NO: 862147 - DNA, 599 bp, Homo sapiens
tttctcctctctaattagctgtattcctaggtattcttttataagttttttattactttttttgtggctattgtgaatgagattgcattcttgatttggctcccagcttggacattgttggtgcatagaaatactactgactttggtacattgattttacatccggaaagtttgctgaagttttaaaaagacatatctaggagcttttagtcagagactatggggctttctaggtataaaattatattgtttacaaaaaagatagtgtgaattccygtcttcctgtatggatttattttctttctttcttttgcctgattgctctggctgggacctccggtactatgttgaataggaatggggagcgtaaacatccttttgttgttccagttctcaaggcaaatgcttctagcttttgcctgttcagtatggtgttggctatgggtttttcatagatggctcttataattttgaggtatgttccttcaatgcctactttgttgaaggcttttaaaatgaaaggatgttgaattttatcaaaagccttttctgcatccatttagataatcatgtgggggtttttttagttcttttatgtg

SEQ ID NO: 862148 - DNA, 630 bp, Homo sapiens
cccataataaatgcccagtaagttagttgctgttattatcaccctccccccttttaaagctaaaggtaaacacatttcgctaagcagaggatctaagagagaacagtggacagtctccttagacctcaggaaacccctgcacgtgtgagactgagcagaaagaagaacaacaccaggacagggaagaaatgttggggcaggcagaggagagccagaaacatgtgggtgttgggggcctctagggcagacagcctagcaggtgttttcagggtcagattggatcgtacagttagataatccttgggggtccttgatgggtttttttctgaagttttgaaattataacttgcatacagaaaagtaaacaaatcctatgtatatrgctgaattacacactcatatagcaaattcttggaacaagcagcagaatgttaccagtgccgaagccccttgtcatcctccttccagtcactcctcatcctccaaggataacctgacctcaaacaccacagattagttctgcctgtttttaaactttctatgcctggaatcataccatactctattgtgtctggattctgtcattcaacatcatgtttacgaattgtatctgttttgttatacatatag

SEQ ID NO: 862149 - DNA, 585 bp, Homo sapiens
acctggaaaaagatgtgctttttccacaaaaattggtggaactattttctcttttttatttttattttttgtgtttgataaaagatacataacataaaattagcatgttagcaatttttaagtgtataattcagtggcattaartatacacatattgttgtgcaaccaccagctcccaaatttttaatcatccccaactggaattctgtatctattaaaccataactctccattcccttctcccccaggtcttcggccaccaccattctactttctgtatctctgagtttgactactctgagtacctcatataagtagaattatgcagtttttgtccttgggtgtctgactacttcacttagcataatgtctcaggatcatccatgttgtggcctgtggcagaatttcattcctttttaagactgaataatatttcattgtgtggttataccacatttttgtttatgcactcatccactgatggacacttggattgtttggccactgtgaataacgttgttatggatggctgtacaaatatctctttgagtccctgccctattctttgggtgtatgcccaggagt

SEQ ID NO: 862150 - DNA, 601 bp, Homo sapiens
tgggagctccacttacgggcagccttggctggtttctgttgagcgtcttcaccgttatctacgagtccagaaacatccagcagagggattgtgcatcgatattgccatcaagatgaaaagacatgctcattttaaatctgagccaccctttaaagtaaaactaaccttctgtccatctctggggcgcagcctgtgtgctcccccaagcagcatgctggaggaaccctgaaaacggatccgctgtttggtacagttctggctggactgttcccttcagcgagaaatgccccaactctggagagcaggtgactgcacagcccctaccaggccctctccacccctggcccggctctgtttacctggctaaatttaaacctccgccccctscatcccagtttgagccactggcttgcggtctcgccactgggctggctgctgcggcagcatttcctgacttcttcgcccctgtggttgcagtgtggtctctttgtgctgcatgagtcctcttctaggctttctaaagttggtctctctccccgctgcttctccacccatgtggctttcttcccatctctttcctcctgggtgagttggaacctgg

SEQ ID NO: 862151 - DNA, 607 bp, Homo sapiens
attgataaggaaatgatcaattgaaacagacatgcaggtagaaaagaaatctaaattgcagagaagtaggtttgggtcacaaggctagaaaataatatcgaactctccactatcttaaatttagtacataatacgttttgagaagcaaaattgccatttcacattgaattaaccacgtggaacttagcccaggctgtcccaaggcagattaataaaaactgaatttgtgagagtgcctttgaaccttcttgaagtacatgtaatcgtatgtgaggcttttacagatgcattttgtttctgaatcaaggattggcacattgtaagagcttgatataatgacagsagtctttccgctgaaaccagtcagaagccaaaaacctcataaatgtttaccataataaatcaccttaatatatctcactttgctaagttgttacccaattagtgtaatgtaagccaagtctgtggtaggagctatctgaactcagtgtaaacctattaaagaaatttacttacccctgaattgacctgttttgaacactgagccatattttcagggacagattaagaaacagattctagcctgaatatagaagacttttttcct

SEQ ID NO: 862152 - DNA, 625 bp, Homo sapiens
tcattctgcgcaaaggcatcaacagctttagtactaaacttttttccaaggatgtctgtgtaatacagagccaggactagagtgaagcaagcgtggcacctaggattcaaagcttaaagagtcgtggtggcacagataatgaaraaaagcaggtggggcgacagcccacccaggagtggcacagagaccaaggaacccccacccccagccaagggaagcagtgagtgattgtgcaatcccacccaggaaaccacacttctcccatggatctttgcaaccagcggatcagaagatcccctcatacgcccactccaccagggctttgggtccaatacaagagctgtgtggtatcctggcagagcagctgctcaggcacacacagaggcccaggagttttgcataatcctgccccaggattcctgacaaggcagaagattcatccctacatatcccttggagtgggggctgaatccagggagccaagaagtgtctgtgggccccatttccatggcacctcataacttaagacccactggcttcgaattccagccagccagcggtgacaggctggagccagcctagtaaaaggactgagttcccagggggaggagcggctgccaactct

SEQ ID NO: 862153 - DNA, 638 bp, Homo sapiens
ggactaagggtaatctactctaccttcttgcaagtgattggttcagaaatgggcatgttactcattaagggccaatgagattttcaatgagacacttttggggagagggtaggttaatttttcttcatttttcaggagagcttttggtagaactctttcttctcttccttgtggatgctgtcatacacaagcgtgagatctggtcagagtaagaagtcaacacttacaaggaagtagagtaaagacaaacatagggaaatggagccagagcaactggacgatacgtccctgaagccccacctcaccactggatttcttcaccagtgtagaaaygtatgccagtacatttcttcaccgtatgggccaggtggtgtcagattttctgtgacttccttcccatgcaggtcagatgatacgaagccaaagacaaatgttgtgctgtgtgggtcccacagccactgtgctctgagcagatattgttttttaaaaaaaatcacaagcatctataccatctgtcacttggtataagtaaaagctagacagaaaaaagacatgtgactttccaaggcattgccgtgcaacggacaaaatctaggttgaaatattcttgtctctcctactctgacagtttcttcccc

SEQ ID NO: 862154 - DNA, 641 bp, Homo sapiens
ggggaactggcaagatggccaaataggaactactccaatctgcaactcccagtgagaccaacacagaaggtacatgatttctgcatttccaattgaggtacccagctcatctctttgggactgattagacagtgggtgcagcccatggagggtaagcagaagcaggatggggtgtcgcctcacccaggaagtgcaaggggtcaggaaactccctcccctacccaagggaagccatgagggactgtgctgtgaggcacggttatatctggcccagatactacacatttcccatggtttttcaacctgcagaccaggagattcccccggatgtctacaccaccaagtccctgggtttcaggaacaaaactgggcagccatttgggcagaccctgagctagctgcagaaattttttttcataccacagtggggcctgraacaccagcaagacagaacagttcactctcctcgaaagggggctgaagccagggagccaagtggcctagcttagtgggtcccacccacaaaaagcccagcaagctaagatccactggcttgaaattctcgctgccagcacggcagtctgaagtaaacatggtatgcttcagcttggtgaggggaggggcatatgccattactgagg

SEQ ID NO: 862155 - DNA, 527 bp, Homo sapiens
tatagtcaagtggcagcagtgtaattcaggaaaccaacaacgtattgacagtcgtaatgttttcacaattctagagatagaaacatttaggcatggcaaaatgaccgtttacataacatacatacatgcctttatttttgaacaatcagttatgatactatttatctgaatgacaaatttgtgaaaacaataatgatgtagcaaagttgggtaatgagaattgtccacactgagtgcaggctataaaaaaggtgtattctctgtagaaaatttaaaaacagaaaaaccaactttgtctgcttaaattttcatcatgctytggcaattttaaacaatgttaatgataaaatacttttccccagaaaaatattttcttggtccaagctctatacaatcgatgaagttactgttgagttttattaatatgtatacgtcagcttcaaattagcacattctctttaataagaatcctattgtccataaaggtaaatttagagaacttccagttataccaataccacccaaca

SEQ ID NO: 862156 - DNA, 605 bp, Homo sapiens
actggtaaacaaacaggtaaaaactcacttttgctacaacagcaccaagaagaatggtcttaaagtatgagaaaccacctccattatccaatcacattcaaccaggctccacctccaactttggagattacaatttgacatgagatttgggtgggggtaaaggtccaaaaaattattattatttccatggtccctcccaaatctcacatctttctcacatttaataatatgaggatggcttcccaacagtctctagagtcttaactcattcagcattaactcaaaagcccaaaatagcawgtttcatctgagacaaagcaagttccttttacctatgagcctgtaaattcaaaaacaagttagttactttcaagacacaatggaggtataggcattgggtaaatactcccattccaaagggaagaattaggctgaaggaaataggatacaggccccatgaaagtctgaaagcttgcagcacagtctttaaaatttaaagctccaaaataatctcctttgaccccatatctcatattcagggcacactgatgtaaggcttaggcttccaaggttctgggaatcacagaaacattccaagagagtga

SEQ ID NO: 862157 - DNA, 574 bp, Homo sapiens
gtgccacatttcccttgagatgttatgtaaaagtttgaggttgagatgacatatctgacactctgttgttaccctcagaagctactacatgtgaaattctaatgactgcattatcctgccaagtgaaagaggcaggcacaagcaaggacagctaagaggggtgagagcctcatcatgatggggagtcttattctgacatcttgggaaaarctgtccacgtgtgaagtcatcaacttgttttccttgtttacagtttgagcagctgttgttatggtgttgaacattttggtgagttctgagtggctcagacatcaggtacaaggattttcccatgaaatttacattgagttgtccaactctggcttatagggcttctggaacagagtgggtcttgctctttgaggttccatgggagaagatggaattggaggaactagtagaattcagggtaatgtccagtctacaggtggataataaaaacacagaaacaatgaacagagctgcaatctcataacaggtgtactacagtattattttccacataatttttctctctatgggcatctctagtttt

SEQ ID NO: 862158 - DNA, 613 bp, Homo sapiens
cagggaagaacaactggagtggagggagggcatcaacatggatgctgaaccaagccaatgtactgctaagagtgaggtggaaagtatcatgtgaaccccagagcttcaattgtcaataagtattggggtgtgaccagcagattgatagaagacagsaaagagagaggggtgaatgccaatagagcagaatagcatgacttgtcaagagacaggacttttcaaggtgaaaggaagggagatggtcctgaagcagcagtcatgtctatgacccacctaagccctaagcaatgacagataggaacagagtcagggtcctcagaggacaacctagttttaattaaggacagaagttgagaagaatattttaagaaacatttgaggacatattacagtttgctggctatgggttagggtagggtggaagagagatatttggaataaagggtatggatgggacaagacaaagcagggcaccagccctaccttggacctttccttaacttgagacagccatgtccatgttgattcagccaatctgactcaggtattatgtaacttgaagttgaaccatcccaactgatataagtggtgatactgagtaacacaaatgtgc

SEQ ID NO: 862159 - DNA, 624 bp, Homo sapiens
gtccctttaatcattggaagcataacaaaaagttataaaaaggattcaaggtgaattgctgtcatcagtcattctcaccctagactcaagaggaaggatcagctctttaacacatctttcagaataacagtgcagactatcctgtgtgcaaaatgtaaggggaatcagcatgctaattattagccatataaccttgaagttaacgtctctgaatctcagtttcttttcctattaaatgcggacattaagctaagtagtctttacaattcctaaaaacactaaattttataggctttttttttyctacaaatgaaatcaggcagaggggcataaaagaaacatattaaattcttcttggtttagttacattttcatgagcatttagggagggtgggttttttattaggtctcagctatttggtaatatggtaatatgctcagattcatttgacatccaagcaatgccaggtactttcataaaattttttctcatctcatcttcgctaaaacctttttaggtgagcattattatgctcatttttgctgatggagatcaaggggttaaggaactgacaaaaggtctctcttgacatgttgtggtgagactgaaatccaaatgcttct

SEQ ID NO: 862160 - DNA, 667 bp, Homo sapiens
ttaagctacagggtatgggttatagtgtctggtgtggcattattagattaatttatagctatttgtggcaatagcaagcagtttcaagagatgaataacatagcctaaagcggggagtaggacttgactgcggtctcattttaatgtctctctgggcctgataattaaaaggacttgcattcttcatataaaagctattttcttttctcatcacaaacttttttttttttttttgagacggagtttcactgttgtcacccaggctggaatgcaatggtgcaatctcggctcactgtaacctctgcctcccagattcaagtgattctcctgcctcagcctcctgagtagttggsattacaggtgcctgccaccatgcccagctaatttttgtatttttttagtagagacagggtttcaccatgttggcctggctggtctggaactcctgacctcaggtggtcctcccgcctcagcctcccaaagtgctgggattacaggcatgagccaccatgcctggccaaaaacttttattattagcgacttgtgctaatcagaatattctgttccataattggtagttgtatttgagaattaggtagaattatctcttttcttttcatgtttttggtcttttcttttgagtttgtgggattgctgtgtttcataa

SEQ ID NO: 862161 - DNA, 583 bp, Homo sapiens
aaaatattaaattttaacccaggcaacttcaagtagcttaaagttagagaaagaagtactacagtccgggtgcggtggctcacgcctgtaatcccagcactttgggaggccgaggcaggtggatcacgaggtcaggagatcgagaccatcctggctaacatggtgaaaccccgtctctactaaaaatacaaaaaattaactgggcatggcggcatgcacctgtagtcccagctactcgggaggctgaggcaggagaatggcrtgaacccgggaggtggagcttgcagtgagccgagatggtgccactgcactccagcctgggcgacagagcaagactctgtctcaaaaaaaaaaaaaaaaaaaaaaaaaaagaagtactacaacccagtcataccttctaaatttttactgttatcagttaattacaggttgttatattcctgtgtgtttaatactcatctttagcattttctttaggagtctagaatgactagataccatggcttttttttttcagattgtaaactgactttctaaaatgtaccaatcagtccctgttaaattttagttaaaacagtaaatt

SEQ ID NO: 862162 - DNA, 622 bp, Homo sapiens
tcttggaagataattcctttggggaaaaaaatgtgaataacattttatgtccaaaatatctttgtaggtctcagagcttattaaagaatgcatataatacacctttaattttaggattagtttattgttcaattttcaragccactcatcaattggtacccaattgatgcatgctaagtgagttaattagtaaattatataaatgaacttgatatactttaaatttcactaaactcaaaattatgaccaatggtgacactttaaaatgaagatgttcaaacacaaactaaatccaccaatcagaagccacagtgcagtcaaaaaaaaaagaagtaagcagtaattacagcagtgaaaacagatttaattcagaaaaaaacaattgcaataggggaaacaaaacctcagtataatactgggctcaattccaaaaacaacaaggaaaagtgataatttgtagccaacggcagggtggggatcagcaggatagaaaattactaagaggaaagatctcaggtaaggcaggttctggtgaaaacaacctaacagtactcttactgaaggctggccggggtgatcagacatctcctggggggtgacggaggatgaggaacccccaaga

SEQ ID NO: 862163 - DNA, 622 bp, Homo sapiens
tcttggaagataattcctttggggaaaaaaatgtgaataacattttatgtccaaaatatctttgtaggtctcagagcttattaaagaatgcatataatacacctttaattttaggattagtttattgttcaattttcagagccactcatcaattggtacccaattgatgcatgctaagtgagttaattagtaaattatataaatgaacttgatatactttaaatttcactaaactcaaaattatgaccaatggtgacactttaaaatgaagatgttcaaacacaaactaaatccaccaatcagaagccacagtgcagtcaaaaaaaaaagaagtaagcagtaattacagcagtgaaaacagatttaattcagaaaaaaacaattgcaataggggaaacaaaacctcagtataatactgggctcaattccaaaaacaacaaggaaaagtgataatttgtagccaamggcagggtggggatcagcaggatagaaaattactaagaggaaagatctcaggtaaggcaggttctggtgaaaacaacctaacagtactcttactgaaggctggccggggtgatcagacatctcctggggggtgacggaggatgaggaacccccaaga

SEQ ID NO: 862164 - DNA, 657 bp, Homo sapiens
gtgtaactagaaaataatccctgatactgactctttagcatctcagagtattaccttcttggagaatacataggttccactaaatacatttttaattttatttctttcttaatcttcttgtgaagtaaaatttttatcttstaaggtaaatatcaagctgaaaaaatcaattcaatacatgttttctaacacttgaagagacagtttgcacagtctgtgggtttctaaaatcttccatgaagggtacatggagcttatccggtctggtactagggcaactagaaacagtaattgctatggcactgtggcttctatcagcagcataaacacatcaggttaccaatgtccaatgacgaagggtcatttagtatgaaaggtagcttagctcagtgacttttgggttgatgtttttcttaactgaagtttatgtatgttcatgtgactttcattggaccttctcatggagaagttttaagcaatgacttggtaaatgccagtatctttctaagatagtgtagtcacattgaaattgttatcccctgggtttgaaaaacgtaagtcaaacgtaagtcatatggctgaactattcacatcagttggagattaccaccaaatgttccctgacatcatatttgtcagacacttttaaaagtccat

SEQ ID NO: 862165 - DNA, 621 bp, Homo sapiens
atgtcctttcccaggattccattcaggacaaaacattatgtgttcctgaatggaacaagaagaaaatgctcatgacaattatatttctcacttctgtaattgtttacatgggcacagcaggtattcataactactttctttcattattcattttgtattcactttgttttcagcaaatacttcagctgatcgtagttctttacctggtggtgtaaaccaaaccttcattctgaaaggtctgggtcattacagacctggattggactggacagttgctatggttttccactgaccttaatcactaggcatagtaatgctaagagactccctaagggatctcctgtattccagacctattctttcttacctccgttgtgaagcagcagtccaaatttccccytgttagtcagaataaatcaccccagctagcacagtaactcccttttttgcctgttgattcagaggcatgaggaatccaaagtaactgagtggcagtcttaacttccagttcaatagaagcattgttgtgtctcctgaaggaagcatttctccctttgaatctaagacctctaggccagtggagcataaggtcatgggaacaggaagcaaaaactttgctgg

SEQ ID NO: 862166 - DNA, 601 bp, Homo sapiens
atgtagtgtcactgacaatggaagcatcttagtccttatgggctgctgtaacaaaattccacaaactgagtagcttaacaaaataacaaaaatgtatttcttgtagctctgaaggctgtgaagttcaagatcaaggcgctggcagatttggtatctggtgaaggcctatttcctgatttatagatggcactttctcgctgtgtcctcacatggtgaaagagacaagcaagctctctcaggcttcttttataagggcgctaatctcattcatgaggggttctcccttgtgatctaatcaccttccataggccacctcctagtaccatcacactggggastaggatttctacatatgaagtttgaaggacacaaacattcagaccacagcaagaggagaggaggaagaggaggggcatgtgttcattatcatcaaatttggcataaaattaaaataagaccaaggtcaatgaccattatatttcaggatattcagaaaggcaaagtacagaaatatattgaggagtgtgacctgagaaaatggtgacaatggcataaatgacttgtttgaaattttgattatatagtggaaaaaaaggatggg

SEQ ID NO: 862167 - DNA, 601 bp, Homo sapiens
atgtagtgtcactgacaatggaagcatcttagtccttatgggctgctgtaacaaaattccacaaactgagtagcttaacaaaataacaaaaatgtatttcttgtagctctgaaggctgtgaagttcaagatcaaggcgctggcagatttggtatctggtgaaggcctatttcctgatttatagatggcactttctcgctgtgtcctcacatggtgaaagagacaagcaagctctctcaggcttcttttataagggcgctaatctcattcatgaggggttctcccttgtgatctaatcaccttccataggccacctcctagtaccatcacactggggactaggatttctacatatgaagtttgaaggacacaaacattcagaccacagcaagaggagaggaggaagaggargggcatgtgttcattatcatcaaatttggcataaaattaaaataagaccaaggtcaatgaccattatatttcaggatattcagaaaggcaaagtacagaaatatattgaggagtgtgacctgagaaaatggtgacaatggcataaatgacttgtttgaaattttgattatatagtggaaaaaaaggatggg

SEQ ID NO: 862168 - DNA, 639 bp, Homo sapiens
attaaagactcaaacataagaccccaaactataaaaatactagcataaaacataggggaaatgcttcactacattggcctgggtacagaatttatggctaagacctcaaaaacacaagcaacaaaaccaaaaatagacaaatgggactacgttaaatgaaagkcttctgtacagcaaagtcaacaaccaacagagtgaagagataacctgctgagtgagagaaaatatttgtaaacagttcatctggctagggactaatatccagaatatataaggaactcaaacaactcaacagtaaaaaaccaaataatcccattttaaaaatgggcactccaaccttggtttgcatcttgaccctagcctttgttttctagtggtttactttgggaaagttggtcagagtaaggtctcagtttcttcagataataacagtgtcaccatcacagggtattatggagattaaatgagaaaatgcctataatttcttaacacaggcctggcccagagcaagtaatcaaaaaatatgagctgaaataaaaataacaacaatgttagcatatggtgcttactatgtaccaagtactgatcaaagagcttacacatatgaattcatttcattctcacacagatgaggaaaca

SEQ ID NO: 862169 - DNA, 626 bp, Homo sapiens
tgatggataaagaggtataatgattaagttacatttaaatattattattcttgtttcatgtttcaggattgtttttcaagttgcatcacctataactgaaaaagaaatacagaatacattgttatgatgcatttcataataaagaatgtaagcttcaccaagttctcaactttaagtgcagggggtttaatttcattttagaagatggaggatctactcctgtgtttgaatctatgaaattatttcctctcatrtatgatacaaactctatactagttaacatttttctcatcttcccaaatcactactgggcctacagagaggagaatgtagctattttccttttgcctttctggttgtacagaatgctgtaccaagcaatgccttagcaaaatcccattgaaggaaaataaattccaagttgatcctctcattctgtttcttgcttcttgaaagaccactttctagcggtctgccatatactaaaacaacctttcatagaattgtgaaatttcatttttctctttctttctttttttctcttttttcactttttttttttttttcaaaggggagcaaactcacttctgccagaagtagtaaatcaacagtttggttgaatttat

SEQ ID NO: 862170 - DNA, 657 bp, Homo sapiens
accccacgacaggcccccgtgtgtgatgttccccaccctgtgtccaagtgttcccattgttcaattcccacctatgagtgagaacatgtggtgtttggttttctgtccttgcgatagtttgctcagaatgatggtttctagcttcatccatgtaagatcggggtggggccaggcacagtggctcacacctgtaatcccagcactttgggaggctgaggcgggcggatcacaaggtcaggagatcgagaccatcctggctaacatggtgaaaccccatctctactaaaaaaaatacaaaaaattagccggacgtggtggtgggtgcctatagtcccagctactcgggaggctgaggctggagaatggcgtgaacccaggaggtggagtttgcagtgagccgagattgcgccactgcactccagcctgggcracagagcaagactctgtctcaaaaaaaaaaaaaagatcagggtgagcttgcacatgtttatagactgagtggaataggccataaaaatagggactctcattaacttagtgcttacaggtatcaacgttcttggcaaggatgttaccatgaggtggacgccatcactgttgtatccagtgagaaatcttattctctgagcatcatggcagcttgcctaaggttcagag

SEQ ID NO: 862171 - DNA, 620 bp, Homo sapiens
ccacttcagccataaggggctcctcccaggtcctcatatagcttcctgctctgggctgcagttggagacccctggacccagctagctcagctcagggacttctcctcaaagcccccagcccctcccttgtatctcacaactcctgtggccccatcacaggtcggaccactctttrtctgctttttcctccttttccaggagactcagctctgggaggacggccaccatctctggctcagtcacatttggtccccagattctggcaaccctgggtaaaagctcagtcacctgacctagtgacgaccacaaggtacatttccaaagctctacggaaaactcactcactgcctcacagaacagcctgtgtgcccctccctttcccaggccccagggtaggggggtcagggagagggggtgggtggtggacatgagccagatatggtttctgcctacagggagctcagaatctttctggaagacaggactgggagcaaggaaagaggcacctgagagacctgggatgggtggcctgtcaatgtttcaagagaccaaggtgggctgttgacaccagggttgcttccggaggttcagggagcacagtattgtcagatgtgctagga

SEQ ID NO: 862172 - DNA, 544 bp, Homo sapiens
ttaattggcatacgttccacaggctgtacagcatggctgagaaggcctcaggaaacttacaatcatggcagaaggtgaagagggaggaggcaggaggaagagagatgggggaggtgctacacacttttaaacaagcagatctcaggagaactctaacaggagaacagcaagggggaagtcagccccatgattcaatcacctcccatcaggcccctcctccaacastggggattacaatttgacatgagatttgggcagggacgcaaatccaaaccatatctggaaggctaggaaatgtagtctttcactgggggaaaaaaatctaatattatgtaagaagaggggaattgatattgagggacaactagcaatcatctgtcatgtggatatagattcaactcattcatttcaatagctacaaaatattccacagtgcaggaatattcaaccattcctgttgatgatcattcagtttgcttctaatttaattttgccattgcaaaaaatactgcagtaaccattaatatatatatatccttatgta

SEQ ID NO: 862173 - DNA, 632 bp, Homo sapiens
gcttgccactatttttactttattcatattcagttataaagctgctcaactttgttgatagaaatattctaaattttaaaccagttaagaaaatataaagttactttgcaaataatgaaatacacattttttggttttaaatttaaggtgtaaaaactgcagtactccatttcatatcaatggtgtgcttaaagaaaactatcaacaactaaccataataccagaagtaatatcagacaataacaccagaaatagaaactaactactttgttcattttttaataccattatctgtctaatttcccagggtgtctattttaggactggatgttaaaactatttcaggtaaaatttcattcagtascaatgcctaaactggaggtcccagactctaatcctgatggtaaaaagcttctctggagcctgttttactgttctggaaaaggagggtattaaaaagagtaaagatggcaataatggctaccttttagttctgagccacagacctctaggctgagtaaaggctcaaaaggagttgactgattagtgatgcccgcatgggtgtataatatgacattattagagtgcaaaccatgaatatgcatgccatccacacactgcaagattctgaa

SEQ ID NO: 862174 - DNA, 646 bp, Homo sapiens
ccctagtaaagaaaaatgcaagaaagaggcagagacaatgggaaagaaaattagcaaaatgatccaaaaaaccctcttcactcatcacctagtgagataaacgcattttattgggaaaccttataaagatacacccagatactctttacagtaaaacagtcctttaaggcctctgaacgcactatagaatggagatgcatccctttaacatgtttgatccaatggagccccaggaaagagaggtaccaacctcaatgaatcgttacacagtcttcatgttcaatgtccttgaccagctcaagaatcttacacttctgacacaaacagcaacctttttgggtgacgcttacacagccatctagatayatgcttttcaaaaacccaaataattaataatgtgataaaacacagaggtttcctttaactcagttttacttagtatatatttcctgagcaataattgaggtcaatgcactactgtgagggctagggaaaggtgggttggtggtatacaaaaagaagaggaacaagacacagacttcaacttcagagagtttatactctagtagtctcaggctctaccccctaatgcctattttttataatttgtagctaataagctattaggctgtccctttccaatcta

SEQ ID NO: 862175 - DNA, 662 bp, Homo sapiens
ttaagaactcctactttaaaagtgcagaacagcatgtatagtatgctaccttttattaaggcagaaattacgaacatatataatttaattatatttgcataaagaaaccctggaaggataaatgaaaactaataaatatggttacctgtgggaggatagggtggggacggaatatagaattcaccaacatggtggaaataagacttctctgcatatacctttttacattattttgactttcaaatgctgtacatgtattatctatttttaaaaattaaattacaaaaactaaatgactaaacaaacaaaaaaataaacataacacttgtttactgtgtctccctttccttctccaaagcggaatatgagtaccgtaaaaacacagatcttatctaaacagctctctttggtgtcccagcttctagaacagtgcctgacacatactaagcattcaaaaamtgcttactataagtatgattcatgtgtgaggtattataaataatgcatacataattcatacatgacaaaatatatagcttattgattactcaataaatacgttcccgcttttgactatacttcccaaagggtgtgtttgttcttcagaaaagcttcatgaatgtgactgtggatataaaaaaatgagccttaatagcaaagga

SEQ ID NO: 862176 - DNA, 626 bp, Homo sapiens
ggtattcccattctttccattgaatacctgccaaataagacatgtaaccacctggcacacagaccacatgagggcgccggctgcaacatatacatcaaatattaacacagctttcttttaattgacaaaacataaaactagtattctaaaaccyttctctgagccaccatggttcaacattttatattccactttggagaataattttatcacgtatcagaattcacctgggtagattaaagaaaatgtggattcctaggaacaagattagaaatttgaataggtctcaaggggggccctggaatctgaatttaatataattattccaaattaggtacttcatgcctcctaagctttgagaaactccaactacgatagaaataagctgcaaatggcttttataaagacatttacacatgttcaaagcactcttttcttgcacagtagctcctcaaccttgctgcacaatcatgtcactgggaggcttgctgaaagagcagatttctgggttcccatgccagaaatgctgatccagtgttccagggcagttgtgccaaatgatgctcatagcaactgactttgaaattagtaaccagagcaatccaaattgaaatcaatttgacagt

SEQ ID NO: 862177 - DNA, 626 bp, Homo sapiens
ggtattcccattctttccattgaatacctgccaaataagacatgtaaccacctggcacacagaccacatgagggcgccggctgcaacatatacatcaaatattaacacagctttcttttaattgacaaaacataaaactagtattctaaaacctttctctgagccaccatggttcaacattttatattccactttggagaataattttatcacgtatcagaattcacctgggtagattaaagaaaatgtggattcctaggaacaagattagaaatttgaataggtctcaaggggkgccctggaatctgaatttaatataattattccaaattaggtacttcatgcctcctaagctttgagaaactccaactacgatagaaataagctgcaaatggcttttataaagacatttacacatgttcaaagcactcttttcttgcacagtagctcctcaaccttgctgcacaatcatgtcactgggaggcttgctgaaagagcagatttctgggttcccatgccagaaatgctgatccagtgttccagggcagttgtgccaaatgatgctcatagcaactgactttgaaattagtaaccagagcaatccaaattgaaatcaatttgacagt

SEQ ID NO: 862178 - DNA, 667 bp, Homo sapiens
aaaatcctgtcctgggaaaatccttctataatgctaaggaaactgtgtagtgctgtaatttacagaagcaggttctcctacaacctctgcaagggagtttcattgatcttcctatgagttttttaaactagctctcgctgatttcaagttcaaaagcatttgtacatgctcttaccttcttacctctgtttacttttctacatctaagtcaatgttctattaaattggtgcttgtttcaaaaatcactgcagtgtctgcaaacaaatacccatgtgggtgctttaatttaacagggcrgaggtaaacctaggatatgtaggaatagggcagatttaaatattttggcatgcaagttttgcaccttatgttggaatcccagttgttcaagtcttggttagccagggactactggagttcttaggactgggattattagttattcttatggccttcggcctgcagaaaataacccaaatagccctaactgacccccctctaccgagatgaagatattctgatatcttcagtcacttagctagttgatgaccataaagctgagtttcttgacctcagccagcacagacattttgggctgctaactgttggttgtggaggactctcctgtgcactgcaggatgttcagcagcgttcctgggcactctccgt

SEQ ID NO: 862179 - DNA, 667 bp, Homo sapiens
aaaatcctgtcctgggaaaatccttctataatgctaaggaaactgtgtagtgctgtaatttacagaagcaggttctcctacaacctctgcaagggagtttcattgatcttcctatgagttttttaaactagctctcgctgatttcaagttcaaaagcatttgtacatgctcttaccttcttacctctgtttacttttctacatctaagtcaatgttctattaaattggtgcttgtttcaaaaatcactgcagtgtctgcaaacaaatacccatgtgggtgctttaatttaacagggcggaggtaaacctaggatatgtaggaayagggcagatttaaatattttggcatgcaagttttgcaccttatgttggaatcccagttgttcaagtcttggttagccagggactactggagttcttaggactgggattattagttattcttatggccttcggcctgcagaaaataacccaaatagccctaactgacccccctctaccgagatgaagatattctgatatcttcagtcacttagctagttgatgaccataaagctgagtttcttgacctcagccagcacagacattttgggctgctaactgttggttgtggaggactctcctgtgcactgcaggatgttcagcagcgttcctgggcactctccgt

SEQ ID NO: 862180 - DNA, 667 bp, Homo sapiens
aaaatcctgtcctgggaaaatccttctataatgctaaggaaactgtgtagtgctgtaatttacagaagcaggttctcctacaacctctgcaagggagtttcattgatcttcctatgagttttttaaactagctctcgctgatttcaagttcaaaagcatttgtacatgctcttaccttcttacctctgtttacttttctacatctaagtcaatgttctattaaattggtgcttgtttcaaaaatcactgcagtgtctgcaaacaaatacccatgtgggtgctttaatttaacagggcggaggtaaacctaggatatgtaggaatagggcagatttaaatattttggcatgcaagttttgcaccttatgttggaatcccagttgtycaagtcttggttagccagggactactggagttcttaggactgggattattagttattcttatggccttcggcctgcagaaaataacccaaatagccctaactgacccccctctaccgagatgaagatattctgatatcttcagtcacttagctagttgatgaccataaagctgagtttcttgacctcagccagcacagacattttgggctgctaactgttggttgtggaggactctcctgtgcactgcaggatgttcagcagcgttcctgggcactctccgt

SEQ ID NO: 862181 - DNA, 667 bp, Homo sapiens
aaaatcctgtcctgggaaaatccttctataatgctaaggaaactgtgtagtgctgtaatttacagaagcaggttctcctacaacctctgcaagggagtttcattgatcttcctatgagttttttaaactagctctcgctgatttcaagttcaaaagcatttgtacatgctcttaccttcttacctctgtttacttttctacatctaagtcaatgttctattaaattggtgcttgtttcaaaaatcactgcagtgtctgcaaacaaatacccatgtgggtgctttaatttaacagggcggaggtaaacctaggatatgtaggaatagggcagatttaaatattttggcatgcaagttttgcaccttatgttggaatcccagttgttcaagtcttggttasccagggactactggagttcttaggactgggattattagttattcttatggccttcggcctgcagaaaataacccaaatagccctaactgacccccctctaccgagatgaagatattctgatatcttcagtcacttagctagttgatgaccataaagctgagtttcttgacctcagccagcacagacattttgggctgctaactgttggttgtggaggactctcctgtgcactgcaggatgttcagcagcgttcctgggcactctccgt

SEQ ID NO: 862182 - DNA, 520 bp, Homo sapiens
tgcaggaacgtgagaatttgcaaacttttcctacatagatttatgtcattttccatctaaccaccaatatatgagcatgcctgtctatgagagtctcaccactagggtgattggaatgatctgaatgctagctgtggtaggcagcaggtcccccagtacacacacaccaaagatgtccatatcctaatcctcaaatmtgtgaatgtgttacttttcatagcgcaagtgactttgaaggtgtgattaaagaatcttcagatggggagattatcttggcctatccagctggagacagtgtaatcacaagggtcattttaagaggcaggcataagtggcaaaagcagagaaagagatgtgatgacaagaaggatgtggccatgtgacgaagtgagggcagcctctagaagctagaaaaggcaagaggtagatcctctcctggagcctcaggaatggcaggtagctaggcccacagattaattttagctcataagacatattttggaattctgaactgcagaac

SEQ ID NO: 862183 - DNA, 520 bp, Homo sapiens
tgcaggaacgtgagaatttgcaaacttttcctacatagatttatgtcattttccatctaaccaccaatatatgagcatgcctgtctatgagagtctcaccactagggtgattggaatgatctgaatgctagctgtggtaggcagcaggtcccccagtacacacacaccaaagatgtccatatcctaatcctcaaatctgtgaatgtgttacttttcatagcgcaagtgactttgaaggtgtgattaaagaatcttcagatggggagattatcttggcctatccagctggagacagtgtaatcacaagggtcattttaagaggcaggmataagtggcaaaagcagagaaagagatgtgatgacaagaaggatgtggccatgtgacgaagtgagggcagcctctagaagctagaaaaggcaagaggtagatcctctcctggagcctcaggaatggcaggtagctaggcccacagattaattttagctcataagacatattttggaattctgaactgcagaac

SEQ ID NO: 862184 - DNA, 619 bp, Homo sapiens
cttaatctttttaagttaacaggggatcctagaggccactctgcagtggtgtggcagtattccttattcttgttgtaagttgggtgctgttccaggatattgtcggtgggaattttggttcttttttgctattacaaataagaaacatttgaatagttttgtaaatctacctttttcgtggttttgcttgtatacttttttcactggagaagggggaattctgcatgaaaatgtaaattttaagtgttagaatgtgaggatttgcaaacttatcttacacagacttgtgtcattttccttctaaccgccaacatatgagcatacctgtctacccagggtctctccactagagtgatctgaataatttgaatgctagctgtgtggtaggaaggagcctccccaccgctctcaacaccaaagatgtccatgtcttaatctcaaaatctgtkcatttgttacttttcatggcaaaaatgactttgccaatgtgattaaaggatcttcaaacagggagagcaccatggactattcaggtgaaggcactgtaatcacatgggtcattataggagggaggctgaagtgtaagaagcaaaggagacctgatgacaagagagatgca

SEQ ID NO: 862185 - DNA, 587 bp, Homo sapiens
ccagatcatgaatcatccctttgtctagcacatccatgctgtatgccctacctgccttttagtctcttagtctcgtctagcttttcagatctgttgtgtgtagtgaatatagggttcagtatcattccgggtttctggcgtccactgggtcttgaaatgtrtccactgtggataaggagggatgactatacccacacatcagaagggaaatagaccctgcttggatgtactttatactttggttttgtatgaagatgccatctgcctcaaatagagaaacagaaaagaactttcctgataattggccctgtgaagaacaagtggaagaagggaaaaggggaaaaggaagaagctataagtctggtgggatgctgagtcaatgtgtagatataagtattattgtatgcataagatatcttagtgtctgttaaaaaaggccaggaaatgaggaacaaccatggctctctgtaggaaattggagttgaagacaatcttcatgtgacaaaaaagtaaaatgtgagaaaacagtagatgatggactcagcattctgtgtctttttctagtattgttctcttcagtctgtcta

SEQ ID NO: 862186 - DNA, 615 bp, Homo sapiens
atgtttggcacagctgactgccttgacagggctgtagggcacacaacccactctggggaaagaaccatctgaaatagagaaaatagtgcatggtgctcacacagggctggaaagagtgcctgtttccaccagccagactgaaaaaaaccttgtaatgcataagccatttggctagactactcagaaaggtcttgtgtgaatagtggggaatatttagctgcaggctgagtcctgctctgaatctccctaatgattcacaatagcaaggctccaacgttgycaattgtctccaagtaacttaacccaaactgagcagatcgctcaaaaatgtttgcaggaatataaaaatatctggcatcctaaaaagaagactcacggtgtttggcatccaatcaaaaatgtctaggcatgcaaagaagcaggaaaaaatgatacataatataagaaactcatcaacagacactgactaagaatggatgtatatgtgagatcttatttttggtctcaagattttgctgcttgtttgcttcttgaagtctcatggttttaggttttatatacaggtctatggtctatcttgagtaacattaggatgcgtgtatgtttatttgtatg

SEQ ID NO: 862187 - DNA, 573 bp, Homo sapiens
ctaactaaatataattgtgattattcagatagactgggctggaagtttcatattgttaatcaatatcataaagcaaattgttgtggaaatgcttaaaatatttaaaagaacaaaaacattctcatataacatagaagaaccagttgataaaatgaatttgcataattttatttgrtcctatccttttataaagcatgcaccctacaggacttttgaacagattaacacgagataaatgattcttatcaagtaaatgattaaatgaatgttgctaacctagtttgaattacaaacttgcactagttggagtaaccaacactgttcacaccaacagtttcctcaaatcctgtctcttaacattaaaaaacaaaaccaaccaaccagtcaaccaaccaacaaacaaacacatgtatttcttgattaggtcaaacaaacaaacaaacaaacaaacaaacaaatgtatttcttgattaggtcaaactccaatctccaatgtgggagatggtggtataagggtagaggagatgtctcttctctgcattcttttagggatccaggattctttcattgttt

SEQ ID NO: 862188 - DNA, 573 bp, Homo sapiens
ctaactaaatataattgtgattattcagatagactgggctggaagtttcatattgttaatcaatatcataaagcaaattgttgtggaaatgcttaaaatatttaaaagaacaaaaacattctcatataacatagaagaaccagttgataaaatgaatttgcataattttatttggtcctatccttttataaagcatgcaccctasaggacttttgaacagattaacacgagataaatgattcttatcaagtaaatgattaaatgaatgttgctaacctagtttgaattacaaacttgcactagttggagtaaccaacactgttcacaccaacagtttcctcaaatcctgtctcttaacattaaaaaacaaaaccaaccaaccagtcaaccaaccaacaaacaaacacatgtatttcttgattaggtcaaacaaacaaacaaacaaacaaacaaacaaatgtatttcttgattaggtcaaactccaatctccaatgtgggagatggtggtataagggtagaggagatgtctcttctctgcattcttttagggatccaggattctttcattgttt

SEQ ID NO: 862189 - DNA, 692 bp, Homo sapiens
tgcatgtgagggatcaataatctccgcacagaaatctttataggcctcctttatgtaaggtgcagtactaagggagagtgacattgcatagaggtgtaattcacagtccctgccctgaggagctttacacagagaaataaaacataaggagtgatatatttaaaagtgatttgtaaactttgacakaatatgaaaatatagtgggttaaaatttactaacaataaattaataagtgccacataaaatgaaagtgtaagtggaattcaaaactgttagaccatgacttttagctggaagaaagatgtcttaaaaggggtagtaattgggctggaattttaatgattatatttaagaatttgataatttgagaatgagaggatcctttagatatagaaaatagcaagaacaaatgcttggagttatattttaatgacattaatcagataatttttaatgggattatagcatagtggttaaaagcataactttaaagacatattacttgtgtttaaatcttggtgccaacactgctatcattattattgttagtaacatttatgttgaggtgttatacagtatttggccaaaaaggcaatagcaattatgattgcattattttattataaacttaataatgtaacaatgatagtgattactgatatttttaaagaacttattgaacagtgcaggc

SEQ ID NO: 862190 - DNA, 653 bp, Homo sapiens
gcctacagtggtgtacagtaatgtcctaggccttcccattcactcaccactcactcattgactcacccagaacaacttctagtcctgcaagctccattcatggtaagtgacttatacaagtaccacttaaaaaaatattttatactatatttttactgtaactttcctatgttgagacatacaaataccattgtgttacaattgcctacctgctgtacaggtttgtagcctacaagcaatacaatataaataaataaataaataaatatatatatatatatatatatatatatayacacacacacacacacatacacacacatatataatagagctacattatataataatataaatattactatattactataatataaatataatattactacaatatagctattatacatagtatagctgtattatatagcctaggtatatagtaggctataccatctaggtttgtttaagtacactctatgatgtttgcacaatgacaaaattgcctaatgatgcagttctcagaatgtatccccatcattaaacaaaagatgaccgtattcttttagcaatgatggaatgcatttaagagtagttggttcaaagatttccatcagtagaaacctgtttgacttgagtagttgtcattg

SEQ ID NO: 862191 - DNA, 593 bp, Homo sapiens
ctataaataatttattaagtcagaggaggggtgctaatatagatttgattttagaatgtagaaaagatcgctttgaggagggtctcatgctgtattcatcctcccaatatgtgctaagtgcttactgggtgacgggagctgtgttaggtcagaggatgcaatggtgagcaagaaaaggtggcctctgccctcatgggactttctctgaaatcctgatacaatktggaaggcattcttaggtaacaaagaactagcagctgattggtatatggggaggagttaattcagatttgactttacttacatctttcctcctgatctcaaggcaaaataacagaatatagtctaattagttgttttaaagacatattctacatacttatatcttactgactaaaggtcagttatcaaaattatagggaggtgagaaaagttttagtgtaagtgttgatgactgacctccaaataaactatattgttttctttggatttaatatgttctaggattatttttacagaaatattatggtggaaaatattgttgtgagctacatagcccagatgtgagtcatgaaagctggtataaaccagat

SEQ ID NO: 862192 - DNA, 652 bp, Homo sapiens
aaagtttaagagtgtcttggcaaccattttcaaagtatcacattgagaagcaattctttaatagagtatactttattgctagcatggtgtaggtaggattgacttataaaacataactttaagtatttggtgtattataaattgaatgtttactttcttttgtttctgayttttcagcatcctaaatattttttaatgagcaattacaggtatggttagtagtcactaagttgtaaatagaattagcacacattttgaattatggggcaatgtgtagtgcttatttcaaaacttgtcatttctgttttctttaacacttatctgaacatataagcagtgttttcttgttaaaaacattggcttgagggaaaaccatgcactagaaaattagtattttgagaaatttcaatgaaaagtgacattcaacacccgagctatatcttaagtgttttgtcagtgatagaaacctcagggacaagccatcaggagtgagagtagaactgtgttgaagacctcagtgatcctcttgcaaatcactccagctctgatattaccttacatcactgtaactatgctccaggaagactgccaagatgttaaagctcccccgcctccacatcacccacagctaattgatgatctgatatgggat

SEQ ID NO: 862193 - DNA, 598 bp, Homo sapiens
tcagattcatacaattttggctttttaatttacaaccataaattcttatttctaaattatctgctgaagctatatacctaaagcagatttctatacgtaatgaaggaatgccaactaaaagacgttcatttggttgagttggaggccaagctcagctgactggctgggtcctcagaggtcgctgatgtrttacagcagacagtagacgtgagggagttgtcagactgccaccagggctttgtttttcccactcatccccaccctggttcttgccaaatctgctttgcatttgaagttgactgaaatgggtttcactgttaacctgtcaactgaaacctgtgatttagagagctttttgttcatttcagttgttgcaagacattgaagtaaaaaatctggattcttttagagcactgaagatggccaaatagagcagcatctggacctacccctaattaatcgaaaagtgttgtcaggtgcaagagatgagatttttgttagaaaggtggtccttcagtaccaaaagtttgttgtgggtaatgacctctctagggctgttcagcaaatccctggaaaacattataaagaattatacctt

SEQ ID NO: 862194 - DNA, 560 bp, Homo sapiens
tcttgccttgctcctgagtttagagaaagagcttcttaatttctcaccattaagtgtgatgttaatagtttgttgtttgtaggtgttttttctctggttgagaaagttaccctctattcttagtttgctgtgtgtttttataatgaataggtgttggattttgtcaaatattgtttctgcatctatttatatgactgtattgtttttctttcttagcctgttgtgtggtggatttcattaattgayttttaaatgtcaaattggtcttttatacctggcataaatcccacttggttgtggagtataattcttttaatatattattggatttgattttctattaaactctattctttatcataaattactggaccaagtgcataccaacagaaaagatagccttcttcatattttcatagcagtcttgtgttaagttagtactgaacagagataggatttgggaactgattgaatgtggttagtgaggaagataagattattgaagatgacattgatgtattgagacttgttgagaatatcaatgaagaaaggacaggagg

SEQ ID NO: 862195 - DNA, 618 bp, Homo sapiens
gcttatttaaggtcaaagagaaaagaaggccaaaggaaatatgtaatatagttttcagctaggtgaagtagaatttagtacactataaaattgggcattttctcttccagcttcctttaaccaagaaccttattttattgaccttcattaaatttrcattttagttttgcttttctacattactaggaaatttgcagctaagtatttttgtgtaacaataataataaaaaagaaaaatagcattatattcaaaactgatgcaaaaagaatcttgattattttccattgaggcagcagtggtgtagccagtggaaggggctcaggctttggaaccagacagacctggccctaattctggctcagctatttacccactctctgggcttggcaaattactaaaatccttccagtctcagtttcctgatccataaaactgaaaggctaatatctgttaagaattagaaataatgcatagtaggcattctagcacaatgctggcccataggaggggattcaataagtgagttatagtaattatgctggcaagatattagataattatgatctttagattctaatttttattgaagtaattatatgccataggttttccaggtg

SEQ ID NO: 862196 - DNA, 624 bp, Homo sapiens
ctatcatccttgatccctgttattttgggaatactatgttttactacttggttagtagttacctgccatttctaacactcttaattaaaccttcatccaaactaaataaccatgccccccagtcccacaccaacaaagatgaaatttttagaggaattttatatctgaatgcctgcaatcctagttcaggattttgctgagatggtctagaatttttagttccacgctatttcctwgatgttccaaggcagtacgatccttccaagaattcttactttacacttacattctgaatcttcagccgtgttaatatcttccatttatgtatgcaatgtttcctgctgcaacattcactgctctctactgttacttatattattcattttcttctatcttcatatttctattctgagccaattaccagcatccaattggacatctgaatatttgttcaaatgagatggatgaatccctcatggctaaaaatattcttcttttgccctggttcgctgaattatatctgggcaagagtacttgatctctgacattctttctgactacctagcttttgaacccttctttcctaagcctggggactttcccaccttattagtctcagttaaa

SEQ ID NO: 862197 - DNA, 613 bp, Homo sapiens
gccaagggggctgaatatagtttaaatcaggcctaattcatttaaaaaatactctctactcaatgtgccataggtcagtatggttctcttttatgagtagttgaattcacacctggattcaaatcccttggcatgacacaggagaagttcacagactaggaatgctgcactaaagcctaccctacatgtgcatccagcccactgtcccacccggcagaggcccaggccccctagggacctgagctacagaagtcccagtacttaatctccaggagcagaacagtcatgggtacccacatacccagcaaggccagtgtagtaatagtccttcagaaagtcaaccaattttcagtaagatktttaaagaaaaacatctttgttaaaagggaaaatgtcacatcagaaaagattgctgtcacttgcaaaataatgatcactagcaatactgaacactacagaaaatccaatcaatgaatgagaagaccgactaagaatactgaaatgaatagaagttttaaaaatttaagagacatagaggactgaaaagatccaatacaagtataacaggaaagccagagagccaggagagggcacacacagaagaaaaagtaat

SEQ ID NO: 862198 - DNA, 595 bp, Homo sapiens
aagagtgagaaatgagttgaagaccatgcaaaggtctgtgacctgggtgactgtaagaatgagggcactgagagttctggtggagtaaaagatgtgttgattttaaacatggatgcctcaaggtctcaatcaggaatcattttcactcaaatcaactcaagtgaaaatggggctcattaaagataaaacaaaattttgtagataacacagaaaagaaaaaaatgtacggcttggccacatgagggcattccatctggaaagtgaggaagtaaagctgatggtcctttcctgggtccttgtctggcagatctctcagctctgattctctggtccattttcctctgctttttcaaggcatctctgctcccmcaaaactttcagcttgaatgtgattttagcttgccatgatgccaactctacatgaacatccaattttttttgttttaattctgaaaagtgtcaaagtttatcacatactttcacaagaaaagtgctatcattgctctattttcttgtgaaactatatgaagtcaataattatccaagtaagcaaatgcattttatgtttactatcaacttgaagtatacatatgga

SEQ ID NO: 862199 - DNA, 486 bp, Homo sapiens
aatcaccagggcaaatccaaacctgaagcatttctcctgatccacaatcaccagtgacagagctttccctgctgtctttgctgtgatgtcagttacaaagccctgaagcgtttccttccctttcatagtgctgtccaggcttccctgcatgaaggggcagaaactgcattaatacttgcttcctagtaagagtcagccctctgttccgtgtcctcccaccctctggctctgcccacctgctttccattgtcgatcatggacacaaatgcctctgcccggagcaacaccagtacwgttggctcctccacccagtcctctctgtcctgccaaagtacccagaacacagcacagggagggaggtcagcaggtattgagcacctgtgagagtggcccaggtcttctgggtgaatgaactaactcccaccccttatgcattatcctttctggaatgaagtcactgtggcaagaaacagtgtcgctgtccct

SEQ ID NO: 862200 - DNA, 563 bp, Homo sapiens
gaggacaaggtgggaggatcgcttgagcccaggaatttgagagcagcctgggcaagaaagcaagaccctgtctctatagatgaaaaaaaaatcttaaagaaaaaagaaaagaaatccacatagaattcttgaatgactttttataacgagataaaccaaagactctccacaagtctttgctcagatggaatagcctttatccatcttttaaaagaaatgttaagatacggtctaaagtaagcctggtcttggatagtcctgttattccttcagaaaagtaacttaaacaatttacttagctaagtaaacaatttaaacaataaatattataaccaggtcaggtacctacactggctttaccaaggggtatgygatatagtacactgtcaaattaatggaattccttgcaaaatcaacacagagcctctatggggttacacattttagtttaggatccataggactactggattctgctgaggaattctgtcataataaatcccattcagctataacgtccaggtgtcagacggtgcaaaacagaattaaaactgttttttaac

SEQ ID NO: 862201 - DNA, 591 bp, Homo sapiens
ggggctagattatgttacaatgccataaaccctctgttctttcccactttcagcagtttttctggaacaaactctcctcagattactgtaaacctttggttaatttcaagatctcttaaataactgattttttgacaattttggctactgtgtttattgctctgatggaaaggtagattcatagggattgtcaacctactattctggtggtaaaattttaataagttaaattataagggaatgtacccacaaagatagtgcattttatttaataaaaaattgttgagyagctagtatttactgggcagtggcctagccactgaagattcaagtgtgggaaagaaacacttttgctcacatttagcatttgctaacagaaagtttaccattttcaaaggaaatagactcgcagataggaagaagtaagctgaggaaggaaataagtcttcctcttcaggactaaaaaagggacagttggccagagaatggagtaaagaggctgacacatccacttccatttacattttggccaagccagagaataaaaaccgtaaggtcattgtgagagtccttccacattaaactttgccc

SEQ ID NO: 862202 - DNA, 564 bp, Homo sapiens
atagtcttatcatatgatccagcaatcacactcctaagtatatacccaactgagttgaaaacttatgtccacacaaaacccttcacaggaatgtttatagcagctttatacataattgcaaaaaactgaaagcaaccaagatgtttttcaacagaggaaaagataagtaaactagggtacgtctctaaaatgaaatattatttggtgataaagggaaatgagctatgaagccaaggaaagacataaataaacttacatgtatttttctgagtaagcctgaaaagactcccatactaaattacattttctttttaaattaattttttttcattcccactttaaattttccattcccactytaggttcagggacacatgtgcagatttgttacataggtaaattgtgtgttgtgaagagttggtgtacagattattttgtcacctgggtaatgagcatagtacccaataagtagtttttcaatcctcacctcctcccatctgacatttcgaaaaggcaaaactagagagatagtaaaataatcagtggtttccagaggttttggag

SEQ ID NO: 862203 - DNA, 544 bp, Homo sapiens
caaatcttccctttgcttttctgttgaactcccatgtttgctctttgataatgtattgaaagtgtgattgaccacacactgttttggttcttttaagtagatgaagcatgatggaaatgcttccactcagccattttggaaaaaataaagactgtttatctttacctaaactactaatagttcttcgtaatgaacatcattagtcagattattgtayattctgttaatactgcaaaccataaaattatacttttaaaagtacattactttatgccacccctatgggcaaaatatctcaatgctttccatatcaggtaaggcacattcaaaacatagacatcatgctaggaatttcaaacataagtcacttaatgtaaataattggttcctcaggtattaataacgcaaaacaatataggatctaaaagaagcagctatagcacctaaggcttgagaaccaaagtatcataagggtcaccagaaactaggagtttatcaaagctaatctgttgaccaccaaagggcttccaggcaactggtgttg

SEQ ID NO: 862204 - DNA, 615 bp, Homo sapiens
aattctgtgagtgctggagtacttgacatactataatctcattgaattaaaaattggttttcatttatttatttttaatcattttagggttaagctattactttctgaatgtacaaagtagacttcaaactagagaagagacaagcaayaagaaatcatcagatactaatttcaacaagtaaaagtgatctttatacatacattctaccaatctttgtttggtttataaactctaaaataatattctacctgacacaataaaatttatcatgtaaaattaaaatgcaaagaagggtatatttaagaattaatactgaagcaggtgagaaacaaagtcaaatgcttacaataaagaatgtctatttcaatcaatcccctaacttgatttaaaactccatgtggttattgatctgtcctttgacatctgtccaagtttttaaatttaatgcatttttatcagtgactgaaactaatgaaagtaaacccacataactgaatttctttgcagccataattctacctacagcctaatgttacatttagaggctcctggttctgaaagcacattatgtactaacattgagagaagccttagagctaatttgagtattactg

SEQ ID NO: 862205 - DNA, 623 bp, Homo sapiens
tacagtaggaggaactcatatagcggcagacaaatacctctaaagtactctttctatttctttaccaatccttaaatgtctcaaatgccttgctttgatttgtctataatgatttttcatgtcttcaaaaagaagcaggaaaggaaggaaaaagacttaggaatggaggtggtcatagctcaggattgcagggaaacacagggcaggcctgtttgcgggctcggcatcctccacccccgccttcttttggcagcagacttagactttcctttggtaaatgattactctcccattcccatgtcatcctgctgmgttgtttctcaggcttccaagtttccaggccaataaaacttgcctttctaggaatgtgaaccttgagcagtgttacaaaagggcagagaatacttaaatcattgcagtggtgacacttggaggggactaggctttcatttatatcagggtggtccctgccccgtctttgtttctcccatggtgtaaatgattaaatatctccttgtaatgactttctgcttcagggttataaaaccagctattgatgtgattatgtccattcactacacacacacacacacacacacacacacacacacacacacacacac

SEQ ID NO: 862206 - DNA, 623 bp, Homo sapiens
tacagtaggaggaactcatatagcggcagacaaatacctctaaagtactctttctatttctttaccaatccttaaatgtctcaaatgccttgctttgatttgtctataatgatttttcatgtcttcaaaaagaagcaggaaaggaaggaaaaagacttaggaatggaggtggtcatagctcaggattgcagggaaacacagggcaggcctgtttgcgggctcggcatcctccacccccgccttcttttggcagcagacttagactttcctttggtaaatgattactctcccattcccatgtcatcctgctgcgttgtttctcaggcttccaagtttccaggccaataaaacttgcctttctaggaatgtgaaccttgagcagtgttacaaaagggcagagaatacttaaatcattgcagtggtgacacttggaggggactaggctttmatttatatcagggtggtccctgccccgtctttgtttctcccatggtgtaaatgattaaatatctccttgtaatgactttctgcttcagggttataaaaccagctattgatgtgattatgtccattcactacacacacacacacacacacacacacacacacacacacacacacac

SEQ ID NO: 862207 - DNA, 497 bp, Homo sapiens
tgaaaacctgacaaaaacaagcaatggggaaaggatcccctatgtaataaatggtgttggggaaactggctagccatatgtagaaaacttaaactggacccctcccttacaccttatataaaaattaactcaagatgaattaaagacttagacctaagacctaaaaccgtaaaaaccctagaagaaaacctaggcaataccattcaggacataggcatgggcaaagacttcatgastaaaacaccaaaagaaggtttgtttaaagtgggtgtgagttggctgaggggccttgagttgagagatattaatgcctggcgcaggactgagatatccatttaggggttaattggttattttgcaacttaaatacaagttctttgaggagcccattaggcctcacagttaaaccagttttcttggacatatttgggatatgaaagttatattgaatgccttctttgagagcctggtgtgattctgagaaatgaaatgtgtgc

SEQ ID NO: 862208 - DNA, 619 bp, Homo sapiens
ttcctgagacaggaagaaaaaaagtgtttgtcttttccatttctaaattcccaagaaactacagacataaattactagctaaaacaacagcataagcccaaacaaaaagcatctcagaaaaaagaacaggtatttatgctttctttgttctgttgatgactctcaaaagttgcatatatagcaaatatgataaattaatatacttatctataatttctatctcttatattgaataaatgatagtgacagttacaataaattctatgccttttcacaagtatattgcacaaatttaaggaaaataagtgggtttactgaagyacaagtgatataaaataagctgtctatatttaaagtaacaaattttatactttttaaccaaatatatcagtatacatctctacatagttacacataaaaaatagagtaggtaaatagatgatagatagataaatagatagataagtttgctagggttgccataacaaagttccacaacctgagttaaacaacagaaatttattttctcatcattctagaggttaaaagtttaaggcattagcagggttggtttctcctgagacattctctttaggttgtaaatagccaccttgttctc

SEQ ID NO: 862209 - DNA, 548 bp, Homo sapiens
tttttttttttcaatgtacactcattcccttgatgatctcagctaataaaatctgtctttaaaaagccatccattcactgataactctgaaatttatctctactgtggtactctccaattaagtccaagttcatatattcaattatctattttacatttgtaattctaaataatgtcagtctacattagtcatactaaccatatctaaaaccaaactccagcccccacccacctcactttcacattttgcactcttgcttatacaaataagtcgaaatgctattcttccaatttcyactagctggaagatagggaatagtcatcactgactcttttctcatacatttttctcatacccacaaccacccatcagcaaattctgccgactcatgttcaaaatatacctactatgtttctaagtatcccacctcttttttgtccaagtcaccaatatattttacttggattattaaaatatcctcctaactggcttccctgctttcactcatccctctgaagaatatactccacagataagccataataat

SEQ ID NO: 862210 - DNA, 548 bp, Homo sapiens
tttttttttttcaatgtacactcattcccttgatgatctcagctaataaaatctgtctttaaaaagccatccattcactgataactctgaaatttatctctactgtggtactctccaattaagtccaagttcatatattcaattatctattttacatttgtaattctaaataatgtcagtctacattagtcatactaaccatatctaaaaccaaactccagcccccacccacctcactttcacattttgcactcttgcttatacaaataagtcgaaatgctattcttccaatttccactagctggaagatagggaatagtcatcactgactcttttctcatacatttttctcatacccacaaccacccatcagcaaattctgcygactcatgttcaaaatatacctactatgtttctaagtatcccacctcttttttgtccaagtcaccaatatattttacttggattattaaaatatcctcctaactggcttccctgctttcactcatccctctgaagaatatactccacagataagccataataat

SEQ ID NO: 862211 - DNA, 665 bp, Homo sapiens
tcaccctcttacttactctgcttctgtctcattggcctttctgaacttccttgaatgcactccagtgtaattctttttcctcaaaatgtcctcaattaagtcacctgctcaggtctttgctcggatgttaccatatcagagatcttccctgagtgtcctgtataaaataaacccagtgttttctagctttcttgttctgctttattttcttttccagttttcatcaccaaatatatattaatttgtttacttcaaggctttctccagaatatcagtttcatgaaggcagagctcttgtctatttttttcctgtatgtatccacaatccttataaaatgcttctcaaatgataggaagcttaataactacttgctgaatgagtaagtgatcagagaagtaataaaaataccaattattcatgaacctagcattgtcaamtaagacagtaaggatgtgaacctgaaaatagacatttttgctctcttgttatgcagcaacaactaaaatttagtatataatcaatagagaaacctgttactaaacttttaaatataattgcaaaataataattggttacgtggataaatacataatccatcttcactaatggcgaggaatataaaaatgaaattaatgtggaatgcaattccacaaaaatggaatgc

SEQ ID NO: 862212 - DNA, 636 bp, Homo sapiens
ttataaagaagcactgtaactgtcctagaaaacgtcccacatatacttatactttcctttttcatgggggcatgttgaagatgacagagattcagtcagcttgggtctttgaatgactctatggagtagagacaacctccttctcatccttgtgcacacacatttttctggattgattgctctgtgaacttcaaactttgacttacatcagaatcacccaggaaggtttgtttaaacacagattgttggccttcagtatcagtttctgactcaacagatagagggtggagctgaagaatttttatttctaacagctcccaggttatggctacagggatcctactttggggagcactgccttagactatggcatagaatgaaacaaatgtctatttttctgagccattacattttgagtctattgttaaagagctttagtcttccctatytcattcggaaatgattatggaaacttgatgagaattattttatttttatgctgtcatgcgcacttaatttggcataaaatagagcaaacccttataaggtaacattgagtgactggaaaatgggtcaaactactgtatccatgttctccggtttgtcatcttcctactttttgtgctgttctcttaa

SEQ ID NO: 862213 - DNA, 546 bp, Homo sapiens
ttattcaaattgacagtctcttgattggttgatattcaagacaccttgaattattcaagaaaccacttagacaaaataatgttccccagttttttgttttcttgtttatttttgttttatcttcttcattcttttcattttaatcataaatcctaaaggttacactgaaattgtccccaggttaataaaggtaacctaatcttttttttcctggaaacaaatcttttaattccttataattttatctctctccttcttggctaccatataaaaaatgggcaaatttccraggaagaacaaagtgtggtaagttaggcaaacctgaaaatgaaaggataagttagtaagaaaaagagaaacatcctactgaggaagtgtaaagttcatatggtttctttaaggcaggaagagaagtgatggatgactactaaaatcagtacattgtacaatgtattagaaagccacattcactggaagtaaaatccataagagattatattttaatattaagatgatttctaggaggagtagaaaccaattatggtg

SEQ ID NO: 862214 - DNA, 546 bp, Homo sapiens
ttattcaaattgacagtctcttgattggttgatattcaagacaccttgaattattcaagaaaccacttagacaaaataatgttccccagttttttgttttcttgtttatttttgttttatcttcttcattcttttcattttaatcataaatcctaaaggttacactgaaattgtccccaggttaataaaggtaacctaatcttttttttcctggaaacaaatcttttaattccttataattttatctctctccttcttggctaccatataaaaaatgggcaaatttccgaggaagaacaaagtgtggtaagttaggcaaacctgaaaatgaaaggataarttagtaagaaaaagagaaacatcctactgaggaagtgtaaagttcatatggtttctttaaggcaggaagagaagtgatggatgactactaaaatcagtacattgtacaatgtattagaaagccacattcactggaagtaaaatccataagagattatattttaatattaagatgatttctaggaggagtagaaaccaattatggtg

SEQ ID NO: 862215 - DNA, 628 bp, Homo sapiens
taggcttccctctttcttagggtacattcaaaaagacttaagctgggctatgttattctgcctctattggcccatgcacctttgccagctccaatggtggaagtgcaagtccctttattcttttccctacacgttcctgtgcagtagtgggctgctcaagccacattctcacccayagaagattccatgcagtaaagaggtctaagctttcatatgcataaatgcatccaccctttagaggactcggttaagcactgtctagtgttctcctctaagaaatgccccaagatgagactgagaatctgtggctcataaacattcaaccatggtgtgagaaacagtctacatcttttaaaaccactgccagtctctctgcatgcttttctaaggttacattgccttgggagagaaaaagcttccattccccattactctcctctggtctgacaagccaacaatccaaatgaattctctctatacgtaaacccctctagacctggccttacttagtctggatgggttgtgggtatgagtgtcaaaagacttaccctgcaatctttgattaaatactataagggttacttgtaactacttgacactctaaaatataggggcaatttctgccgag

SEQ ID NO: 862216 - DNA, 578 bp, Homo sapiens
agtaacacagaagaacttggtaggggctcaaaagtgatagtggcttgcattaatcagagctccatgattctttgtccataatacacaaatgrcactccagaggagaggcagatatactgtgtaactgagctggcattaggagagtcatggagtctcatgtttcataatcatagtactctagtctgaaaaaaattaactttttattctcataatgtccagtaatagaaaatataagtcagtagacatattaacatagttttcttaattgtcataccacttgaactatctatggctcttttctttgactaatctgcatataataaatttattatgatcaaagtagataaaggccacactaaatgcagatactattttatcagtcattatttacgtatgtttatctagatatacacacacctaaatgcatttttcatatttgtgaatatatataatatgcagttatgtcaacttcaattatccttaagttgaacaaatgtctaatgcaatgataaaaaaattcataaattatttaagtgtgtttaaagctatcatcaaaatgaagatttaagtagaaagtt

SEQ ID NO: 862217 - DNA, 618 bp, Homo sapiens
caattagaggccacataagaaaaaaggagagattccggaagacctccagctgttaaagcccttagctgtttgagtcttcgcagcatcagctgccagacatgtgagtgaacaagtcttaagatgattccactggagccttcaagctgtcccagctgatactgagtggaacctacaagctgcctctaagccttgatcaaattgcagatttgcaaggagactgaatgttgtcactgttttaagccactaaatkttaagtgattagttacacagcatttgatacaataaaaaaatttatgtatattttaaattgcatgctatcaataaattcagtcctccattatttaggaaatagtttacactttatttatacacttaaatctttgtcatatctcttctgcccatctactggatgttgcatccctaataatgctacactggaaataaaattaacattagataatatgtttgtcattaggatctttaaaaagatagttcgggagagaaaacggggagaaaaatttgcataattaggacactgtgatatattcaggaagtatacaaaaatagtatttctcctcaacagcattttcaatgagaatatatagggtaaaatttttt

SEQ ID NO: 862218 - DNA, 605 bp, Homo sapiens
tagggattacactgaatatgtaggttgctttggttagtatttactcttaatataaagccttccagtccttgaatgtgtaatatatttctattatttatgtcttcattaacttcttttagcagtgttagttgttattgttcaagattttagttattttgttaaatgaatgcctaaggattttactctttatgatactaatgtaaataagatagttttcttaattttcttttcaggtttttatatgtagtataaaaatacaacagatttttgcagttcactttgtatcctgctgttttgattaattcatttagttctaagagtttttgtgtgaartctttagggttttctacatataagattgcatcatctgcaaacagatcatttaacttttttccaatttggatgcattttatgtctttttcttgcctacttgctctggctagaacttccaatacttacagcctttcacctttgagaatgatttcagtgtgcatttttttcatatatgtattttattatgttgaggtagttctcttctatttcgactttgagagtttttaccaagaaagagcattcaattctgtcaaatgcttttcctgcattag

SEQ ID NO: 862219 - DNA, 587 bp, Homo sapiens
aaagctaattctagaaatggtgatgtcatctgaatattatagtcgatctctgaaaagtagttatgcaatagacctataatgtaggaatacaatagcttttttaatttagccaaatatacacttacatgtgcatattacacgtaaatatatacacacacacacacacacacacacayatatatatatgtactcttagaaatgatcttgaaaccaaatttatcttatagccctagagcactgtagttctaactagtaattaatttttaaagatagctttatgaattaaaacagaattttaaaaattttgtatttgtattgatttaggggtacaagtgtagttatattacatgcatagtggtgaagtccagacttttagtgcacccatcagactaacagtgtacgttgtagccaataggtagtgtttcatccctcaatcctcttcccttccctttcaaagtttctgatgtctgtttatttcactctatatgtccatgtgtgcccattgtttatctcccacttataagtgaggacacatggtttttgactttctgcttctgtattattttacctaggaaaatggtctctag

SEQ ID NO: 862220 - DNA, 587 bp, Homo sapiens
aaagctaattctagaaatggtgatgtcatctgaatattatagtcgatctctgaaaagtagttatgcaatagacctataatgtaggaatacaatagcttttttaatttagccaaatatacacttacatgtgcatattacacgtaaatatatacacacacacacacacacacacacacatatatatatgtactcttagaaatgatcttgaaaccaaatttatcttatagccctagagcactgtagttctaactagtaattaatttttaaagatagctttatgaattaaaacagaattttaaaaattttgtatttgtattgatttaggggtacaagtgtagttatattacatgcatagtggtgaagtccagacttttagtgcacccatcagactaacagtgtacrttgtagccaataggtagtgtttcatccctcaatcctcttcccttccctttcaaagtttctgatgtctgtttatttcactctatatgtccatgtgtgcccattgtttatctcccacttataagtgaggacacatggtttttgactttctgcttctgtattattttacctaggaaaatggtctctag

SEQ ID NO: 862221 - DNA, 712 bp, Homo sapiens
tatgtttaagaacttattgacactttaaaactgtgagctgttttgcatgatttacatgctaaccaatgatatgaacagatgagggaggaggtcattcatacctaagtgtaggagcacatttattttgaatatacattttatttttcctttgagtgggctaatttctttttagagaartgtcaccaaggatggaatgaaaagaaggaaaaagaaaagaaaaacatgtagacagagcaaatatacataagaaaattgaattaattagggaaaaacaaattttatcccttgctgtaggatttaatatgacttggagagtatatcatctccgtgagaccaacttgaaaaataaacgaatggtattctagtttgaatgtaaaaagaagattaagtgtcctgaatataataataaactcagaaaaataatgaaattcactcagatactaatgtgcaaacaccaggagggctctaggaaaaatataacaataaaaatcttgtttcatattaattgcatcatttgacaaactgaacattgagttgcttatgtccagcagcccttacataggcaagatcacagatgtactctgagatgttaaaatgctagaaatccatcttcccaggaggatttttgccaattagtttaggactaaagaatcctgccaggcatgtggctgcccagcaagctagaggatcagaaacaggaaaaaagaaatat

SEQ ID NO: 862222 - DNA, 705 bp, Homo sapiens
ttttttcataactgaccttgtagagatatttgggtctttaaaccatgtgcatgtgtgactgataaaagcataagctaaaagttaagatagtaaaacagattacgtgattttgagattagggtttgtaaagaagatctaatggatggacaagagagttggggtgctactaataaaattattcatgccattaaccatagtctccttgttgataagagtagtctaagaaaataggttttctaaccaagagcaattggaggtttcacggggttggatgcctcagtgaggtaaaagggctaggttaggagaaagtaagagagatgacggatggagcttccagttagagactgtgttgacaatgaaaattccagaggagccatgagagaagtaaagccaagtttccaggttgattacataaaccagttgttcaagtgaagacaagggtcatctcacaattgttagaatgattattatcaaaaagactagagaaataacaaatgttggtgagggtatggacaaaagagaactttgatactctgttrgtggggatataaattggtatagccattaaagcaagcaatgcagaggttcctcaaacaattgaaaatagaactcacatataatttagcaatttcacttctggatgtgtcccaaggaaatgaaataagcacctcactcccatattcattgaaacatcattgatgcatt

SEQ ID NO: 862223 - DNA, 627 bp, Homo sapiens
ttacgttagcaacccccaaaatgatacttgggcataaatctaacaaaatgtacaaaaccttttttgaggaaaactgcaaaactctgaaagacttcaaagaactacataaatggagaggtgtcccatgtttgtggataagaagactcaaagttgtcaagaygtaatttctccccaacgtgatctacaaatttgatgcaatcccaatcaaaatttcagcaagctattttggagtattgacaaacttattctaaagtttatctgaagaggcacaagacctagaatagctaacacaatattgaaagcaaagaataaagttggaggactgacactacctgactttaagagttagtataaagttgcaggaattgtggctgtgtggtgctggcttaaagaatagataaatggatctatggaatgaaataaagaccccagaaacagaatcacataaatgtaatcaattggtctttggcagaaaagcaaaggcaatatacaatatagcaaagatttgctgtcttttcaaccaaatgttgttggaacaactagacaaccacatgccaaaaataaatctaggcacacactttcaacctgtcacaaccattaactcaaaatggatcagacctaaatgta

SEQ ID NO: 862224 - DNA, 627 bp, Homo sapiens
ttacgttagcaacccccaaaatgatacttgggcataaatctaacaaaatgtacaaaaccttttttgaggaaaactgcaaaactctgaaagacttcaaagaactacataaatggagaggtgtcccatgtttgtggataagaagactcaaagttgtcaagatgtaatttctccccaacgtgatctacaaatttgatgcaatcccaatcaaaatttcagcaagctattttggagtattgacaaacttattctaaagtttatctgaagaggcacaagacctagaatagctaacacaatattgaaagcaaagaataaagttggaggactgacactacctgactttaagagttagtataaagttgcaggaattgtggctgtgtggtgctggcttaaagaatagataaatggatctatggaatgaaataaagaccccagaaacrgaatcacataaatgtaatcaattggtctttggcagaaaagcaaaggcaatatacaatatagcaaagatttgctgtcttttcaaccaaatgttgttggaacaactagacaaccacatgccaaaaataaatctaggcacacactttcaacctgtcacaaccattaactcaaaatggatcagacctaaatgta

SEQ ID NO: 862225 - DNA, 681 bp, Homo sapiens
ctttcaacctgtcacaaccattaactcaaaatggatcagacctaaatgtaaaacttaaaatgcaaatgcaaagtgacagtcactttagaagacagtttggcagcatcttacaaaacatactcttaccataagacccaaatgagttatgtccacattaaaaccctgcacgtgaatgtttatagcagctttagtcataattgccaaaactggaaccaacataaatagcttagatgaggggataaacaaactgtggtacatcaagatgatgaaatattattcactcctaaaaagaaattagctataaagtcaccaaaagggaaattaaatgcatattttggtgtgagagaatacaatgtaaaacagctaaatattctatgattacagctatttatttctggaaaagacaaattatggaggcattaaaaggatgagtggttgcaaggggttgtgggggccggaggtatgtatagrtagtacacagataaatttcactgtcgtgtgaaactactctgtacaataactacagtgatggacgtatatcattgtacatttgtgaaaactcatagaatgtataatacaatgcatgggtcgtaattaaactacgggctttgaatgataatgatgtgtcaatgtaggtttattgatgctaatacacataccactatgtttacaaggtttcaa

SEQ ID NO: 862226 - DNA, 434 bp, Homo sapiens
tgaaattattttgggggcaccttacttgttatgacatcaatattttgccatctgccactggccttttaggaatttttttagaagctacttaaaaaataggatagtgtaaaaactaaaactcagaggctaatatcagtctaatatcagtcaagwtgacaggtcatgtatcatttaatgttaaatctaaataatttataatttattcccagtctattttcagggagagacaaaagactagattattatatttgtacaattctgggttgtaaaatgattttgtggttcccctcaatatttttacttcaacctctgaaattttctaggaagtgctttattaataaaacagaagattaagaattctgaaggcttctatttttgttttgatttcattaacctcaaggtagttgttatgtactttgttttctttgagaaaa

SEQ ID NO: 862227 - DNA, 622 bp, Homo sapiens
cacagtcctatttttagccaatgtacctttaggtctcttgacgaatggtactaatattattagctattggcatcactcaatataatatccctcccagcatattttacttactcattcattcattcataggcacttatttaatgggcactgactgtagccataagtacagtaaaaaccagacatggtttcaaccytcaagcagaccacagactagaactattgtataacaatatggtagccaccagccatgtgtagtattgagcatctgaaatgcagatcataccaacttagatgtgcggtaagtgtaaaacaatagattttgaagacttagtacaaaaagaatataaaatatatcattaataattttatattagttatttgctaaaatgataatattctgaatatggtaggttagaaaataagacagtatgaatttatccttttacttttttaacatggctacagcaagatttaattttacgtatgtggttcacctaatattttataaatgtaaaatatatttctggtcaagaagataggagagacaagtagaatcatacagtgagatgattcctaaggtgggtaagtacaaagctctataggggcatgcagaaaggacaaa

SEQ ID NO: 862228 - DNA, 634 bp, Homo sapiens
tagagaaccacaaaagatctttaattcaatagtcaaagtaatctcgagcaataagaacaaggctggaggaatcattatctgacttcaaatctagtacaaagctatagtaatcaaaacaatatggtactggcataaaaacggacacaatgactgaaagaacagaatagagaggccagaaataaactcatatatatggtcaattgatttttgacaaaggtatcatgagcacacaatagagaaagaataatctcttcaataaattggaaaactgaatatccacaagcaaaagaataaaactggacccttttctaaccccatatgaaaaaatcaactcaaatggattaaagaattaaacatgtgacttgaaactgtaaaactacaagaaaaacaaacataggaaaatgcttcatgacattgsgctaggccaagatttcttttgccaaaagtacaggcaacaaaagcaaaaatagaaaaatgggattgcatcaaactaaaagtcttctgcacagcaaagaaagcaactaatagagggaaaagacaatccatggactgagatataatatttgcaaactatatatctgataagaagacaatattcaaaatacatgaagaattcaaataactcaatagcaag

SEQ ID NO: 862229 - DNA, 614 bp, Homo sapiens
attatccacattactgctcctctagaccaatactttcattaaggtaatatccgtgaaggcatttcatttttgaaaagaatgaagcagtataaaatgtatagtacagttaggctttactaatgatgttattaataaaaaagaattaaccacttcagctatttctatacataacatttatggtaggctgtttctgtatataaagttatttaggtaatgggatctgatattctcttctaatctagtttagttttctaataagatctgacagtctttccttttctaatcttgtctcccctggaagtcagtatggcatttattttacgctcgcagccttcctgattactaatccatagcgggttgcagaaaaartagcatacagaatcaccatggttcctaaatagtgtatgggtgtttctcagccaaacattccaccacaatatagctccatatcactctcagatactgaattatgggacaatgcctctggttctaaatgccccaaaattcagaaaactctgggaactaaggaagtaagaaaaatcaatagtcttatttcaagtagttctccagctgtcacattgattctgttcctgggatatgcaaaaagatttaag

SEQ ID NO: 862230 - DNA, 584 bp, Homo sapiens
accagcctgggcaacacaacaagaacctgtctctataaaaaaaaagtttaaaaaactggcttggcacagtggcacatgtctgtagtcctagctactctggaggctgaggtgggagaattgcttgagcccaggagttcaaggttacactgagctatgatcatgccactgcatcccagcctgarctacagagtgacaccctctctctaaataaataaataagcaagcaagcaagccaactccttccccaagagatccttattcaacttgcctggagtagggcccatgcatcatgattttttacaagcaccacaagagtctaacatgtcaccaaagttgagaaccactggtatggtgtcttatgctattagctaatgacagtgtaaagccctcataaccagcaatgttactttaaaacatattaatttcatctgtatctcactctttttcattgctgttctctgaaaattttatatataaatagcaaacaataaattatttgtggattttcataaacacaaatgaattcccctttgaaaattgatatggtatgagatttgtttaggaaaaaaactgaagcccagtat

SEQ ID NO: 862231 - DNA, 584 bp, Homo sapiens
accagcctgggcaacacaacaagaacctgtctctataaaaaaaaagtttaaaaaactggcttggcacagtggcacatgtctgtagtcctagctactctggaggctgaggtgggagaattgcttgagcccaggagttcaaggttacactgagctatgatcatgccactgcatcccagcctgaactacagagtgacaccctctctctaaataaataaataagcaagcaagcaagccaactccttccccaagagatccttattcaacttgcctgsagtagggcccatgcatcatgattttttacaagcaccacaagagtctaacatgtcaccaaagttgagaaccactggtatggtgtcttatgctattagctaatgacagtgtaaagccctcataaccagcaatgttactttaaaacatattaatttcatctgtatctcactctttttcattgctgttctctgaaaattttatatataaatagcaaacaataaattatttgtggattttcataaacacaaatgaattcccctttgaaaattgatatggtatgagatttgtttaggaaaaaaactgaagcccagtat

SEQ ID NO: 862232 - DNA, 655 bp, Homo sapiens
caaaggaccaaagattattattacgaatatctcatccctaaaaagtatttcaattaaaccatgaaaattctagagtactgagtttcgtattcatattgcacaaacttctatatttaagcacagtatttttttcaagtgtgcatagggaaatcaaaagtgtcaagtcaattcattctttgaggaaataaattgcatgtggacaaagcagaactattaaagkgctctgaacaaatattccataccagagtctattaaaataattgaattaccaatggactaaaaaaattggtaagtcacatataagaaattgcttcagagaaagtaaacaaagagtagaaataaacaggtacttccttgagaaatctttcttgtcctctcccaagagtgaccaaatggtatatgccagttgcacaagcataataacaaactgtgtccccttccattcattcgcagactgccctggcttggataataaattatataatcactgtatccttcatcatcttcgggtttcgcctcatccttctatttcagtctccagcaaaacttacttcaatgagatgtacatcctaccatatcccataaataatgctcatcagggtcaccagtgacctcttctgtaaaactcaatgactaattctcagttctcttcttg

SEQ ID NO: 862233 - DNA, 636 bp, Homo sapiens
aaggagcgtcctctgcaattgacagaggaagagagagtttgggcttagttaacagatggttctgcatgataggcaggcaccaacgaaaggcagttgcattacagcctcttactgggacatacttggaacataatgggggagtgaaattcttctagtgggcaaaacttcaagcagggaacctggttgtttactttgcttggaaggataaatgaccagacatatgattatatagcaattcataggctgtagccaatagccatgatgatcaggcaactggaaaaaacatggktagaaaattggtgacaaggaaattcggggaagagatatagataaacctctctgaatgggcaaaaactgtcaagatatttgtattccatgtgaatgcctaccaaagggtgacttcagccaagggagatttgaataatcaagggtacagaatgacttgttctatagataccagtcagcctctttccccagctactcttcttatcacccagtgggcttctgagcaaagtgaccatggtggtgagaatggaagttatgcatgagctcagcaaaatgggcttccactcttcaagggtgcctggccacctccactgttgaatgcccaatctgtcgtcagtggaggccaatgct

SEQ ID NO: 862234 - DNA, 623 bp, Homo sapiens
gacatagaattctctttaaaaagttgtgggttttttttttcagcatttaaaatatgtcattccactatcttctggcttgcaatgtttctgccaaaagtctgctgagtcttattgagaatctcttgtacatgagggggtactgcttttctcttgatgctttcaagatttcctctttgtctttttctacggcttgattataatgtgtctcagtgtcagtctcttttccttcattctacttggagtatatggagcttcrtgagtttgtatatccatgcctttcctcaaatttggaagattttcagctaacatttcttaaattaactgattttgccctttctctacatctttcacttctatgactcccataatgtacatattgacccacttggtggtatcctgtaagtcctttcagctctgttcacttttcattgttttttctttttgcactttagacttaataatttgcaatggcctaccttcaagtatgttggtcattttctctgtccattcacgttttttgttgaaattgtctagtaaacttttattttgatgtggtatttttcagctccagaatttgtgtttgatttattacaataaattctatattttgttggcatcctcat

SEQ ID NO: 862235 - DNA, 669 bp, Homo sapiens
gctgtcttcctgagcaaagggctgttccacatccactgttagggaggccagggcagaaacggtctctgtctcctcttgcaactgagcaccagccagagcacagccccttggcacagccaccatccttactgacttccaatacttgcctaggaaaaacatccatcatacttcataagaattgtaattacagcagtaataatcagaatactcacatacgtccaactcagagcagttgttaagttaaaattccccatgttatacacagttgtaatttggtttcttaactgttatgattgggtctttttctcaatmtaagaatgccaagttgtgaagtgcccatattcccaagctgagtctccctcttgcttacacagcaataaagtgaggaataatccatggcctactgaactcaccctcagactgacagctgtctctgcaactaagtaagcaaactccgggcttcacgctccctgggaaacccacaagagaccaggaggcagcactcttacagagaacatgaatggaatcgtactgttaaacattgctacttgaatcattaactttaagaaaatgaagttggaatattaaagaaaaagaaaagcccagaaatgccagcatgaattgaatggcaactttgccagaacaatcaggtttgttagtcctggatgt

SEQ ID NO: 862236 - DNA, 639 bp, Homo sapiens
gcaggaattacagagtagcttttgggttgttttagtttacaaaactcagtagcaagttcaaatccagctgggaaaggaaagggagctattgactattagataagagctctcaggaaacgagagctatggtttattaatggcctggcttcagcttttctgagagtttgcagaagccattcattaattagtgggcaaagtcataaatgagttctagggaatatagggcttactgctcctggggcatccagctgcagagtgggggaattttatatatcattctgtatttggtacattttgccataggattttttttttttttgagatacagtcttgctctgtcgcctaggctggagtgcaatggcacgatctcagctcactgcaacctccaccaccaaggttcaagagattctcctgcctcagcctcctgagtagctgcgattacagatacctgccaccacaccgggctaatttttgtattattagtagagacgaggtttcaccrtgttggccaggctggtctcaaacccctgacctcaagtaatcctcctggcttggcctcccaaagtgctgggattacaggggtgagccaccgtgcctggcctggaaaatcattttaaagttactgaattcacggtaaat

SEQ ID NO: 862237 - DNA, 617 bp, Homo sapiens
cccttttatgtggctgcatagtattccgtggtgtatatgtgccacattttctttatccagtgtatcactgatgggcatttgggttggttccaagtctttgctattgtgaacagtgctgcagtaaacatatgtgtgcatgtgtctttatagtagaatgatttgtagtcctttgggttataatcccagtaatgggattgctgggtcaaatgsggtatttctggttctggatccttgaggaatcaccacactgtcttccacaatggttgaactaatttacactcccaccaacagtgtaaaagtgttcctatttctccataccctctccagctttgttctttcctttttgatggccattttaactggcgtgagatggtatctcattgcggttttgatttgcatttctctaatgaccagtggtgatgagctttatttcatgtttgtgggccacataaatgtcttttgagaagtgtccgttcatatccttcacccactttttgatggggtttttttttcctgtaaatttgtttaagttctttgtagtttctgaatattagccctttgtcagatagatggatcgcaaaaatttctcccattctgtaggttgcctattcactctg

SEQ ID NO: 862238 - DNA, 582 bp, Homo sapiens
cccattaaaatttgagaagtttgctgttatagactagtggttcctaaattttagtggacatcataatcatctggacagctttttaaaacacagaatgttaggccctatcttcagagttttcaattcagtacatctaggatggaccctgataatttgcacttctagtcaaatttcatggtgatgctgatgctactagtttgggaatcactctttgaaaccaccatgtgtagatactacactgtccaatactgcagccactatgcacatgttatagttatttgaaatgtgctttgcattgagatgtgctataagtaaaaaatatgcatcagatttcaaaaagacagtatgacaaggcagcatatcacatttatgattttttattgattatatgctgaaaggctagtatctyaatattgttgagttaaataaaacatattaaaattagttttactttttaatttttataatctgaatactagaaaatataaaattatatatatggttcacattatatttctgttgattggcaccgttcatcttgatctccatttggctcaggggtccctgaagtgtgtctaaagc

SEQ ID NO: 862239 - DNA, 694 bp, Homo sapiens
ttgtatgacatcaacatctgtattgccatcaggagtgtcatttctactggcaggggcagccacctggaaacctgaaggaatcatctacccagaaaaagtgatagggcatatctgtggtactaatttttgctttatttctrttgttcacagattggcttatacagccatttattcatttagaagttttctctgctaaggcaccttcctctcctatcgcaccactcaaaatttggcccatctttcggaactcagttgaaatgccattttgccattaagttgattgaaatcctctcaaatatttatgatctatcccttttcagaatgctagtaacttttttactcttttgacattctcttatgttgtgtcttgaatgacagttgttcctgtacagatcttagcactcttattagcctaccacgcctggaaagggctgtctgcccctttgtcatccttggcctcatctgacacacgacactatgccctccatgtgatgtcactgcctgtcaccttatgtttctatcctgcgttgtatactcacgttcttccatctcacttccctgctgtctcctgtctttctttagaactacattttcctctggtcctccttctttgagcatgtattatttttaatatgctccccatccatataatcctggctagcctctactcacttcttaaccacaacgctcatca

SEQ ID NO: 862240 - DNA, 621 bp, Homo sapiens
agggtgtctgcctgatgagaatggtataggaatcaagagtaaacataagtaaaatgcttagaagagtgtctggcatatattcaaacctatttgttaaataaaaactagatttcttttgcatttttttaatcacctatactatgctatttttgacaatgaaaacaaaatwgtacttgaaataatcatgaagaaattggccatttgggataataatgtacttttatgctgaaggctgcttttaactaatacaaatgcatccaatatagataaattagtaaaatcttaatgagataaataaatcagtttgcctttgtaaaactttaaatgtatctaaatttagtgacttaatttagtgacttttccaattaatttgttgtctacaccatcttctaaatatactacttaaattcctgttcccatgtcttaacttttgcagttatgcccaaataccttatgcttccgctcctctagtcctcattctactcatgcttcagtacatcagcgtcacagaccactctgccaggcaatattaggttcacgatgaaaagggagaagaagaaatgttggcagattcccgcgatactcagaaaacagtataaaaaggaccaagtggtttgaaac

SEQ ID NO: 862241 - DNA, 601 bp, Homo sapiens
tctccatagcctcgccagcatctgttattttttgactttttattaatagccattctgagtagtgtgagatggtatctcattgttattttgatttgcacttccctgatgattagtgacgatgacaattttttcatgtctgttggccacttgcatgtcttcttttgagaagtatcygtccatgcccttcgcccttttttaatgagttatttggttttttgtttgttgctttaagctccttatggactctggatattagaccttgttgatgcatagtttgtgaatattttctgccattctgtaggttttctgtttactctgctgatagtttctattgttgtgcagaagctcagaaaaagagcttaactaggtcccacttgtcaatatttggttttgttgcaattgcttttggggcttagccaaaaattctttgccatggctgatgtcaagatgggtatttcttagcttttcttctaggattcttatagtttgaggtcttatatttaaatctttaatccatcttgacttaatttttgtatgtggtaaaagatagggctccagtttcattcttctgcatttggctagtcaggtatcccaacaacat

SEQ ID NO: 862242 - DNA, 601 bp, Homo sapiens
tctccatagcctcgccagcatctgttattttttgactttttattaatagccattctgagtagtgtgagatggtatctcattgttattttgatttgcacttccctgatgattagtgacgatgacaattttttcatgtctgttggccacttgcatgtcttcttttgagaagtatccgtccatgcccttcgcccttttttaatgagttatttggttttttgtttgttgctttaagctccttatggactctggatattagaccttgttgatgcatagtttgtgaatattttctgccattctrtaggttttctgtttactctgctgatagtttctattgttgtgcagaagctcagaaaaagagcttaactaggtcccacttgtcaatatttggttttgttgcaattgcttttggggcttagccaaaaattctttgccatggctgatgtcaagatgggtatttcttagcttttcttctaggattcttatagtttgaggtcttatatttaaatctttaatccatcttgacttaatttttgtatgtggtaaaagatagggctccagtttcattcttctgcatttggctagtcaggtatcccaacaacat

SEQ ID NO: 862243 - DNA, 616 bp, Homo sapiens
gggtaagaggcaacagagagtccagtcaaaaaatcttagtgaatcttacttttctactatatccctaaggttctgaaaaaaaaaaaattagctcatgggttaagaaatgcctgaaacttacacacttaccagtacaatttgttaattaatagagttttgagttaaaaggtaagtattgattatcagcaagtctttatacagttatcacctctgatttccaataatgccatggattattaaaccttttatttcttgtcagccccatgtcacgtcttgtacagtttgtataaagacacttgatatcccagacttcctcaaggaatctgtcrctttctctgtatgttcttaaaattttcagtctcctctagtgatagtattggtttgctgtaaacatttcctgattctgtctgacaagagactgttagtctttgaacaacaacaacaaaaatctctgaaaaataatctgagaaatcctattgcaatactatcattagtgtaatggtgatttaaaaatacgtttaaggtattacaattttgtgatgtcttttcacagagatttagtttataaaaaatccaactcatttgtaaatatcataaactatttgttaatatattt

SEQ ID NO: 862244 - DNA, 576 bp, Homo sapiens
acacctgtctactttgtcactggctcaggggattttgatgtgcatgttttgcctcagtgagtcagtttcattgacgttcttgcaaaagttgcatacacagtataaactttcctgagaaagatacttctttgccataaggcttaaaactattcataaaataattctaattttaatctaagtgatctaaatttaagaacaaataccaaagaatcaaatccatagttaattcatgcatgatagataagtaaataattggtatttatatttgaagcaagctcagtgtttcaatgcaaaggttttatgcatctgtctgtaaaattgggattgctgttattgttctctgaattcatgaargtcagtttaactaaaatgcaaaagttgcttatagcattatttacataaggatacaggtggaatgcaaaggaaggctgcatctgccatcatggaaataagttttatgaatctttaaatactacattagttgtctatgtatatttattttcctcattaagaaaaactgataagggataatggacatatctccttagtgtaatctggcataaacatcttaacggc

SEQ ID NO: 862245 - DNA, 579 bp, Homo sapiens
gtagaaaactttcacttccttggttacattaatttctacataattaactttatttctggctattgtaaatgggattactttttaaatttctttttcagtttgtttcatgttggcatataaaaacactactgattgttgtgtattgattttgtatcctgcaactttaccaaatgtgtttatcagttctaaaaattttttggtggattctttagggttttccaaatataagattatactatattaacaggataatttgacttcttcctttccaatttgcatgccttttatttccttctcttgtctrattgctctagctaggacttttagtactatgttgaataatggtggtgacaatgggtatccttgtcatgtcccagatctagaggaaaggttttaacttttccccaattagtatgatactagctgtggttctgtcatatatagcttttattaaattgaggtatgctccttctataactagttttttatggtttttatcattaaaaggatgttgcattttttaaattttattttaagttattggatacatgtgcaggatgtgcagatttgttacacagg

SEQ ID NO: 862246 - DNA, 621 bp, Homo sapiens
gtgtgccccttctcttttctccctcctctttaaggtcaataactcttagattttcccttttggggctattttctagatattgtagacatgcttcattcttttttattcttttttcttttgtctcctctgactgtgtatttccaaatagtctgccttcaaactcactaattattccttctgcttgatcaattctaatattaagagactctgatgtattcttcagtatgtcaattgcatttttcagctccagaatttttacttgattcctttttattacttcaatgtttttaataaatttatctgatagaattcagaatgtcttctctatgttaygttgagtttcttttgagttttcttaaaacagctatttttaattctgcatctgatatgtcacatatctctctttttcttatttggccttatttggttcatttggtgaggtcatgttttcttggataatcttgatactgtggatggttttctgtgtctgggcattgaagagttgggtatttattgtagtcttcacaatctggacttgtctatacatatccttctaggtaagactttccagatatttaggaaatgggtgttatgatctaagctgtatctgcaatagaggcc

SEQ ID NO: 862247 - DNA, 589 bp, Homo sapiens
ccaaattatactttaaaaaggctaagccagtcttttttaaatcaccaaataagtgaatattttaatccatatttgatgtcagactttggtattcgcccgtagtgttaaatggtatataatttttggtatagttgaaatcttctttagtaataggaatgttactttatcaaatgtttattttttaagagaatctagtatatgattaatattctaaattattgtagtatttttgtgtygactgttagtcttttcctatttgattcattcagtttgattttatacattcctaaatggttctctgtcttttaacattgaatatatctttagacatatagacatttcttatattggtgtagtaaaatttattaatttttacagcttatttttaagagaacctgccctattcctagatcagcaacattattctatattttcttcaaaagtttgtaattttcatttcttatgtgtagctcattattgtatctgaattaggtctgtgagctagacatcaaaatttaatccatataaaagtttaacaccatttatttctcccccaacttgtgtaaaataacatctcttcttttaaaag

SEQ ID NO: 862248 - DNA, 645 bp, Homo sapiens
ttcagaaattaatattggtcagttcagggcttccatttcttcttgattcaatcttgggatcttgtgtgtttccaggaatttatccacttcctccagactttctagtttgtgtgcacagaggtgttcataacagtctctaaggatttttttgcatttctgaaggactggttgcaatgtcacttttgtcatttctaattgtggttatttggatcttctctcattttttctttgttaatctaggtagcagttgattgatcttgtttatcctttcaaataaccaatttggggttttgttgattctttatataaatttttgagtcttaatttcatccgttctrctctgattttaggtatttcttttcttctgctagctttgtggttagttttctcttcttttcctatttcctctaggtgtgacttcagattgttaatttgtgatatttctaactttttgaggtagccatttaatgctataaactttccttttaacactgcatcccagatattttggtatgttatgtctctgttttaatttacttcaaagaattttttaatttctccattgaaaatgaaggaagaaataaacatcttaagaagaaatcaatcagagcctctggaattgagaaactcacttaagaaatttca

SEQ ID NO: 862249 - DNA, 640 bp, Homo sapiens
cacttggttttaaagctctatgatgctcaatggtttgacagaagtttaatttgagctcagaaccactgctataaaaaataccacactggatgcacctgtgttcattgtattaaaataaagaccaaaaaaaaaaaaagagggctttttggcatttctgtatttctggccattttctaatgatttatgcagctgctcactgaataggaaaacttatttaaggaagtaacggttaagaattaagggraaaaagagaaatctggaggtagtgatagaagcattattttcaagatcttggtaactttgtcaatgtttttgttgttgttggaccattatggtaccagcttactgaaaattaaataagtaaatgatgtgtgatgctacctggatgaaagccaggctcatatggatgaatgaaatattcaaaatgatatcctgacttttattaaagtaaaatatgttgtggaaaacaattctaagaccatgaaaaccattatctcatgttcagtcactttgcatgattgaaactgatggtgaaatttcacttggaaaaagttacgatcattcgctgtgtttctgttactacccacatataggtggtaggttaccaaaaaaatgtagtacagtttgaacaagaggtaac

SEQ ID NO: 862250 - DNA, 611 bp, Homo sapiens
tctacttatgattcccagcactagctgtgcagtccggaccaacagataaattttctttcaagggaaaaagggtatttacaaaacagaaagaaaccatttgagaatggctgcctcccttactcttccaagaaaagatgggtcaaccccttgattcctgtaacttaaaattataagtcatgtgtatactcaacatttaattattattctgagctcgatttagtattatactcaagcatgagacctggatcacatcagcaaagtcgaaaagcataatgtctatcttattcaagataccagactatggaagaaatatttaagatatactagaaggcacagggttcaaaaatcaggcctggaatctttcatatkactgacatttgtaagaattccctcactgctactctaccagaactaagatcaggatattatcaaaacccaagatggagatctctctgtttacctttcatgactttttcaaatgtcatatggttctccagagaaggaagatttcaatgaacagaaaactggggactctgggaagatgagccctacttatctggcaaagtacttgagaaccccaagatacgctaactttaccaaaagaacaaata

SEQ ID NO: 862251 - DNA, 623 bp, Homo sapiens
ttctacttaaaagtctttcttctttttctttgcaatttgcaagctcttctgttcttttatctatctatcatctatctatctatctatctatctatctatttgtgtgggtacatagtaggtgtatatatttataaggtacatgagatactttgatacaggcaagaaatgtgtagtaatcatgcaatcatgtaataatcatggagaatcgaatattcattccctcaagcatttatcctttgtgttacaaacaatccaattatactcttttagttatttttaaatgtacaattaaatcattgttgactatagtcaacctcttgtgamtagtaggtcttattcattcttttttttttttttagtacccattaaccatttctacctccccccaacccccacactacccttcccagcctctggcaaacattcttctattctctatctctatgagttcaattgttttgattttgagatcctatgtttgttgcagcactgttcacaatatccaatattggggaacaacctaagtgttcattaacagatgaatggataaagaaaatatggtacatacacacaatggagtactattcagccataaaaagaatgagatcctgtcatttgcaaca

SEQ ID NO: 862252 - DNA, 623 bp, Homo sapiens
ttctacttaaaagtctttcttctttttctttgcaatttgcaagctcttctgttcttttatctatctatcatctatctatctatctatctatctatctatttgtgtgggtacatagtaggtgtatatatttataaggtacatgagatactttgatacaggcaagaaatgtgtagtaatcatgcaatcatgtaataatcatggagaatcgaatattcattccctcaagcatttatcctttgtgttacaaacaatccaattatactcttttagttatttttaaatgtacaattaaatcattgttgactatagtcaacctcttgtgactagtaggtcttattcattcttttttttttttttagtacccattaaccatttctacctccccmcaacccccacactacccttcccagcctctggcaaacattcttctattctctatctctatgagttcaattgttttgattttgagatcctatgtttgttgcagcactgttcacaatatccaatattggggaacaacctaagtgttcattaacagatgaatggataaagaaaatatggtacatacacacaatggagtactattcagccataaaaagaatgagatcctgtcatttgcaaca

SEQ ID NO: 862253 - DNA, 637 bp, Homo sapiens
ttgcctagattttcttctagggtttttacggttttgggttttacatttaagtctttaatccatcttgagttaatttttgtataaggtgtaaggaaggggtccagtttcaattttctgtatatggttagccagttttcccaccatcatttattaaataggaaatcctttccccattgcatgtttctgtcaggtatgtcaaagatcagatggttgcagatgtgtgttgttatttctgaggtctctattctgttctgttggtctatatgtctgttttggtaccagtaccaygctgttttgtttactgtagcctcatagtgtagtttgaagtcaggtagcatgatgcctccagctttgttatttttgcttaggattgacttggctcgatgggctcttttttggttccatatacattttaaagtatttttttctaattctgtgaagaatctcagtggtagtttgatgggaatagcactgaatctatacattactttgggcagtgatatggtttggctgtgccttgactcaaatctcaacttgaattgtatctcccggaattcccaagtgttgtaggagggaccgggggggggaggtaattgaatcatgggggccagtctttcccatgctattcttgtgatag

SEQ ID NO: 862254 - DNA, 569 bp, Homo sapiens
tgaggatttttgcatcaatgttcatcaggaatattggcctgaagttttcttcttcttcttttttttttctgcaagttttggtatcaggatgatgttggcctcataaaatgagttaggaaggagtccctcattttcacgtgttcagaatagtttcagaagkgtaccagctcctctttgtgcctctggtaaatttggctatgtatccatttggtcctgggctttttttggttggtaggctattgattaatgcctcaatttcagaaatcgttattggtctattcaaggattcagcttcttcctggtttagttttgggagggtgtatgtgtccaggaatttatccatttcttctagattttctagttatttgcacagaggtgtttatagtattctctgatggtagttggtatttctgtggtgtcagtggtgatatcccctttatcattttttattgtgtctatttgattcttctcttctactttattagtctagcttgtggtctattttattattttttttttcaaaaaaaccagctcctgtattcattgatttttttgaaggttttttgttt

SEQ ID NO: 862255 - DNA, 680 bp, Homo sapiens
tgaggatttttgcatcaatgttcatcaggaatattggcctgaagttttcttcttcttcttttttttttctgcaagttttggtatcaggatgatgttggcctcataaaatgagttaggaaggagtccctcattttcacgtgttcagaatagtttcagaagggtaccagctcctctttgtgcctctggtaaatttggctatgtatccatttggtcctgggctttttttggttggtaggctattgattaatgcctcaatttcagaaatcgttattggtctattcaaggattcagcttcttcctggtttagttttgggagggtgtatgtgtccaggaatttatccatttcttctagattttctagtyatttgcacagaggtgtttatagtattctctgatggtagttggtatttctgtggtgtcagtggtgatatcccctttatcattttttattgtgtctatttgattcttctcttctactttattagtctagcttgtggtctattttattattttttttttcaaaaaaaccagctcctgtattcattgatttttttgaaggttttttgtttgtgtctttctctctttcaattctgctctggtcttagttatttcttgtcttctgctagcttttggatttatttgctcttgcttctctagttcttttagtagtgatgttaggg

SEQ ID NO: 862256 - DNA, 625 bp, Homo sapiens
aaatgccattttctatatgaaattcccatacatacatgagactgtttctgtactctctcttctgttccattgcctatgcttatctcaataccatatagatttaattttatggttttataatatactttgatatagggaaaatcccaccccctttatttcatttataatataaagttcttaaaaaactattcttcattgtttatctgcctgattctcacttcctacttccagatgacagggttccagacgacaaagaggtaaaataaaaattacccataggcaagacaaaggagcatgggaaaatgagggmaaggagacaaaaaaaaaaaaagagaaatgctcttaaggtgggacaatttttcccctacacttcaagaagcaactttatgtatcaatattttgccacattcaaagtaaggtagattttgtgtgtttaggatatttcagccactgtctaaatcaaaggtgtctctgactttcattgctagctagttaccaatggcagaaaccatgtaaacaaaaaaatgtgaatggaagggaatagaaagaaacatgaatcaatcaatgtgagaacatgaacaagaactagagagaatagagacatggtgagacagaataacatact

SEQ ID NO: 862257 - DNA, 597 bp, Homo sapiens
gaattcttgtaacaaccttccccccgtccccaactacttgcctgatattttaggttgacattattttgcaagctttcattgaatttctgttttggtgagcatgtcttttttgagacagagtcttgctctgttgcccaggctggagtgcagtggcgcaatttcagcttacagcagcctcaacctcctgggctcaagcaatcctcccacctcacctcctgagtagctgagacctcaggygtgcaccaccatgtctgtctaatttttgtattttttttttttttgtagagatggggttttaccctgtttcccaggctgcccatgaactcctgagctcaagcaatctggctgccttggcctcccaaagtgctgggattacaggcatgagccaccgcacccggcctgcatgtctgtcattttaagagtttcttctgattttctcacccctaatcattttctcttcttgctttatattacagtatttttatgccttctctaaagtaaaagatttcttttaaaattataaaagtagattgggcagggtggcttacaccttgtaatcgcagcattttaggaggctgaaacaggaggatagcttga

SEQ ID NO: 862258 - DNA, 641 bp, Homo sapiens
taaactattatgattactgtaattataccattattattgttaatatagtaggtgtaatatattagttttctattagtaccacaacaaactactacaaacttagtgggctaaaagaacatgaatttattatctacagttctgtatgttgaaagataataataataatttcaacagattaaaatcaagacattggtaatgttggtaatgcttcattctggaggctctaagggaaaatctatttccttgtttatttaggtggtttccagaatttagttccttggattttaagactgtgatccccattttctctctgactttaagctgaggcccgatcccagcttatagaaaccatsaacttccttggcttatggctacattcctccctcttcaaagccagcaatgacagttgtgtctcatttaccctttgaatccctctcaactcccaccttttctcttcttctgttgcatctctccaacccaaacttctgccttcctcttccacttttaggaacccatgtgattaggtgggacccacctggataattcagaataatatctcatttccagtttatcctttattgctcctgcaaagtttctttctaccctgtaaggtgacatattcacaggttccaaagattagg

SEQ ID NO: 862259 - DNA, 614 bp, Homo sapiens
tatgccagcagcaacatggagaagcacgtgtgcagtggtgaagcagtggatgggaggctgcaggcaagtgcatgctggtagtgcaagagctgtggacatgtggttgccagtgggggccaccagcaagcacttcagctggcagctgaggctgtgctacaagcaggtgtggccaggcaggaaccctgggataaaccagcagtcaaggggtgctcaaatcagcctgggtccatccaataggtaagatagccctgctctgttttggtcagacagctaataaaggctaaagccacctagaagatgatggtgagccttctggaatgagtacttatggccatgctccactgcagctgttcccaggccaagtcccatggcctccatgaaggctggggtkctgtctctgccaactctctaggcagtttctcctgtcggctgaaatttccatggaggtcatagggtctctctcctctacctaggttaccagaggtctgtggcagagtgaaccatatctattccactcaccctttccccagcagccgctcagggtgaggaactagttcttgtgcttgacaacctcgtgcagggttcctagattcatcccctttcatcccagagtc

SEQ ID NO: 862260 - DNA, 616 bp, Homo sapiens
acagacctaaaaccacaaacattatgtaacatttctagatacaaatttttaataaaatttgttatattctcagagagagaaaaaatgatgattatgagagaataagaagtaaaaaaataatgaagaggaactgctagttgtggcttcaacatataaaaagagtggaagtcatcacttctgtacacrtaataagaaaaagcttgacaagctataaatcaaccacttttcttgtacccattagagatctaaggttacagggcaaacatccctccaaaatttggagaggtgaatatataacagagtcatagatgagatatatttacctggagcagaagccactgatatcataaacaggcaggaacatatatatgataattttgacaaatttccagaggtcaagtgtatactaactagcctgactgtgagaaattccagggtgccacagtcttagagaaaccttaacactttttggattctatttgcgggatcaacaccagattgtcaaggtggaaatcctacaaagatccccttatggctctggcagaaggagggaaggattatcattgtaaaatgtacattgagtattttgaactacaaaggcttactctctaaggca

SEQ ID NO: 862261 - DNA, 608 bp, Homo sapiens
cctcacctgttgtcattttaattactttcccttttctttgccaactcctttatcccaggtctgttaattccaatatttgatctcattattctgtaagtttctgcatattgtcatctgttctaacactctcaagccccagtaaaatcaaatatgttcactggtttctcatttaatatttaaggccaatcaaaattcaacaatagatttgttggttggaataaccctgaaaaaaaatctgactttactcaataaaatggaaatcaaatagaccattaatgtccaataagaaaattaccccacttgagtattgtttacaatcatggtaaattcatgcargtgattatttgcaaagctaataaaatagttggagatctaaggagacaatgaagcatcctagacactaggagaaaaaaaaaaaaagagcctcttttacacttaggccagagagacagaggcagtggttcagttggagttggaggtgcaatccccagggaaaatctacacttgcaatcagaaaggtcaaagagttcattagaaaagaaagaggcatatttcccattatctctcccaatcctgcagtttcctaccattggtacccacagtcagaa

SEQ ID NO: 862262 - DNA, 602 bp, Homo sapiens
aaagagtcaagactcaatggtatgctgtcttcaagagacccatctcatgtgcaaaaatacacataggctcaaaataaagggatggaggaaaagttaccaagcaaaaggcaaacataaaagaaccaggggttacaatcctagtttctgacaaaacagactttaaaccaacaaagatttaaaaagacaaagaaggccrttacatactggaaaagggtttaattcaatgacaacaaaaaagctaactattttaaatatatatgcacccaatacaggagcacccagattcacaaagcaagttcttagatacctacaaatagacttagacttccacacaataataatgggggactttaacaccccactgccaatattaggtagattattgagacagaaaattaacaaagatattcaggacttgaactcagctctggatcaagtggacctgttacatatctacagaacactccacccaaaaacgacagaatatacattcttctcatcaccacatggcacttactctaaaattgattgcatagtaggaagtaaaacactcctcagcaaatgcaaaagtactgaaatcaaaataaacaaagcacaattaa

SEQ ID NO: 862263 - DNA, 604 bp, Homo sapiens
aatgggccaagagccccaattaaaagacacagaatggtaaggtgaataaagagtcaagactcaatggtatgctgtcttcaagagacccatctcatgtgcaaaaatacacataggctcaaaataaagggatggaggaaaagttaccaagcaaaaggcaaacataaaagaaccaggggttacaatcctagtttctgacaaaacagactttaaaccaacaaagatttaaaaagacaaagaaggccgttacataytggaaaagggtttaattcaatgacaacaaaaaagctaactattttaaatatatatgcacccaatacaggagcacccagattcacaaagcaagttcttagatacctacaaatagacttagacttccacacaataataatgggggactttaacaccccactgccaatattaggtagattattgagacagaaaattaacaaagatattcaggacttgaactcagctctggatcaagtggacctgttacatatctacagaacactccacccaaaaacgacagaatatacattcttctcatcaccacatggcacttactctaaaattgattgcatagtaggaagtaaaacactcctca

SEQ ID NO: 862264 - DNA, 583 bp, Homo sapiens
ttaaggtgaaaagtactgtcaaggaagttactgcctaatgagacatgcaatttaatacagagccagaaatgtgaattttgctgtttgaccagaattttaagtacatccttattttcaaaaggtagatacaaaaatcttcattgaaaatgggagacatttgatttaaacattgataactgacatttgaatggacgttctattttccataatataacttatacataaaattttcaatgttaggaggataaactgaggcatggtgtgaatagagaatttcattaagacgtggaaaagggctgatacatatcarcttcagctgggcagggtaaaggaggagtgagcagtggctttatatgatatgaacataagaacaatagatatattgtgtccatcattatttcttattgtgtaatatttgttagtaggacagcttctctctcttcacaccctgtcacatcccaaccattaagctttagataaagtggagaggccacagagtagaaagtaaggaaaaaaacctcttctgaaccactacattatgggatgtaaaggaagactggtagaaatgtgtgttccaatctcc

SEQ ID NO: 862265 - DNA, 598 bp, Homo sapiens
atcagtaactgctaaactgaattgaactcttacaatggtgatttcttaagtagagactgttctaagaaaattatcaatatttgtgttgtttgatggcctataatgatcactttttatcttttaatgaattagatcaatagaataaaatagtataaaatagaatatgtatctcatctaataaggatatctatagaggtatatatatatcactctatataaacaaaaaatgtatatagatatagaaacgaaagcttcatatacagatatagctttcacatatgtatctatatataaaagcttcatatataagcaaaagcttcatatatatctctacatatgagatatatatctctmtatatatgatacagtcacatacatgtatgcatattgtcttgatgcaagatatatttattatagattataaacacaattttattaacacagagtttgaaaggggttgatagatatgatccctttcaaaggagttggttatatcataatatataaattatataaataatataaataatacaaataattatatattatatcataagatataaataatataataaaaaatatacaaataatttatagg

SEQ ID NO: 862266 - DNA, 568 bp, Homo sapiens
gaagggaagggctatatacaaggtatatattttaactcttacagatgggtagcaaagtcagcccatgattaattagggatgtaggctacaccagtcggtggacttagcatgaaccatatttggacacagaactcagtcttcctttaagtgtctgtatatgtgtaaacatttaatattttattaaatcatagactccctgaaagcmtcccatgcctagcatgtacttgacacatacggccctgtaaatattagtgttatacccagaagttgctttattggttatccaagtctcataaaggagaagggccttgcctctgtcactcagaaagcacaggaagagcagggctggagcagaggaatttcttctgagcttccagtccagagcctcatgaaccccatatggtccctgcagaccattttcttcctacgaccccacacaggagaaggggccatggttccatggtggctcctgcactgcaccctctaaggtagttttgttctgagttataattcgccccctcaagaaccctcttgtccatccccagacactgattctcaccctgacaga

SEQ ID NO: 862267 - DNA, 636 bp, Homo sapiens
ctttctacccctaaggaatttaacaaatcattacttccaaccccacacagaatcctccctgagagaagagctggtaaatatattttccatggatgtgttagcctactattgacatgttagtgcccttatagtttagtcctccaagcaattgtccagttgttttgtgtttaatctgaccctgctgacagtcattactcaaaatgaagaaggcaatctagagagaaactgtagctgatgctcctcttctctcagtgggtggacagcccatccataaagtcttcttgatgatggtgtccaggagccaggatccaaggagctcaacaacagcagtrggaagaattacaggaaaaggtcatgctcctccaagggagtgggttttcctttgtctcagcaactgtaaaattataaacaaaagattaaaaagctaaatcactgctcaagtaaggatcttggtaaatgcatggtttactcaaagcctgatgacggattcattggcatctaaatgaagtctgtggttttccagacaatggggcagagactacagaaacacacaaattatgcctaaggattctctgttccttcgttaattttgttgtaccaaagaaaaaggaaaaactataattgcaactaaataca

SEQ ID NO: 862268 - DNA, 662 bp, Homo sapiens
atagctgaagattcttttcttaggcatctcgaaaaattcaacatttaggctgggcctcctctggctcacacctgtaatgccagcactttgggaggccaaggcgggcagataacttgaagccaggagttcgagaccagcctggctaacatagcaaaaccttgtatctactaaacatacaaaaattagccgggcatggtggtgtacrcctgtaatcccagctactcggaaggctgaggcatgagaatcactttaacctaggaggcagaggtggcactgagcagagatcatgccactgcactccagccaggtgaaacagcaagactctgtctcaaaaataataataataataataataataatctacatttaacagagcatatactctatgcacttcctgtgctcagagctatgagtaattctagggacaagactcagttcttgccctaaacaagcttgcagtctagtggagtagccttcatattccagtgtgttacaattcacattctctttaaacctttttagaatttagttgacaagggatccttgacagtctgttaagcattgggtaactgccaactgactgatcactagctccaacaagactacaaggggcttgagattcgagactgaatcttcttcatcattatcatcccagtgcccag

SEQ ID NO: 862269 - DNA, 662 bp, Homo sapiens
atagctgaagattcttttcttaggcatctcgaaaaattcaacatttaggctgggcctcctctggctcacacctgtaatgccagcactttgggaggccaaggcgggcagataacttgaagccaggagttcgagaccagcctggctaacatagcaaaaccttgtatctactaaacatacaaaaattagccgggcatggtggtgtacacctgtaatcccagctactcggaaggctgaggcatgagaatcactttaacctaggaggcagaggtggcactgagcagagatcatgccactgcactccagccaggtgaaacagcaagactctgtctcaaaaataataataataataataataataatctacatttaacagagcatatactctatgcacttcctgtgctcagagctatgagtaattctagggacaagactcagttcttgccctaaacaagcttgcagtctagtggagtagccttcatattccagtgtgttacarttcacattctctttaaacctttttagaatttagttgacaagggatccttgacagtctgttaagcattgggtaactgccaactgactgatcactagctccaacaagactacaaggggcttgagattcgagactgaatcttcttcatcattatcatcccagtgcccag

SEQ ID NO: 862270 - DNA, 540 bp, Homo sapiens
gaagcaagagcaaacaaattcgaaagctagcagaaataactaagatcagagcagaattgaagaagatagagacccaaaaaacccttcaaaaaatcaatgaatccaggagttggttttttgaaaagatcaacaaaattgatagaccactagcaagactaataaagaaracaagacagaagaatcaaatagacgcaataaaaaatgataaaagggatatcaccaccaatcccacagaaatcaaagtgctgttttaaccatttctttagttatgaaatggagtccctgcttggtcaaggtggatgaattagcaactcagaggtcagacttgtattccatgcagcttcccattgtattagtctgttatcactctgctgataaacacatacccaagactgggtaatttataaagaaaaagaagtttaatggacttacagctccacgtggctagggaggcctcacaatcatggtggaaggtaaaaggcacgtctcacctggaggcaggcaagaggaaacttgtgcaaggaaacacccctgtataaa

SEQ ID NO: 862271 - DNA, 540 bp, Homo sapiens
gaagcaagagcaaacaaattcgaaagctagcagaaataactaagatcagagcagaattgaagaagatagagacccaaaaaacccttcaaaaaatcaatgaatccaggagttggttttttgaaaagatcaacaaaattgatagaccactagcaagactaataaagaaaamaagacagaagaatcaaatagacgcaataaaaaatgataaaagggatatcaccaccaatcccacagaaatcaaagtgctgttttaaccatttctttagttatgaaatggagtccctgcttggtcaaggtggatgaattagcaactcagaggtcagacttgtattccatgcagcttcccattgtattagtctgttatcactctgctgataaacacatacccaagactgggtaatttataaagaaaaagaagtttaatggacttacagctccacgtggctagggaggcctcacaatcatggtggaaggtaaaaggcacgtctcacctggaggcaggcaagaggaaacttgtgcaaggaaacacccctgtataaa

SEQ ID NO: 862272 - DNA, 711 bp, Homo sapiens
tattcattcattgatatctaacttttcacacattcattcaaccatttaacccaagatttaaaaatattaaattagaaattgaagcaataataaatagcccaccaagcaaacaaagcccaggaccagacagatttacagctgaattctatcagaggtacaaagaggagctggtaccaattcttctgaagctattccaaacaatagaaaaggaggtactcctccctaactcctttaaggccagcatcatcctgataccaaaacctggcagagatgcaacaaaaaggaaaacttccagctgatatccctgataarcatcaatgcaaaaatcctcaataagatactggcaaaccaaatccagcagcacatcaaaaagcttattcaccatgatcaagtaggcttcatccctgggatgcaagactggttcaacatatgcaaatcaataaatgtaattcatcacataagcagaactaaagacaaaacccacatgattatctcaatggattcagaaaaggccttcgataaaattcaacatcccttcatgttaaaaatgctcaataaactaggtattgaaggaacatacctcaaaataataagagccatatatatgataaacccacagccaataccacactgaatgggcaaaacctggaagcattccccttgaaaaccagcacaagacaagtatgccctctttcaccactcctattcagc

SEQ ID NO: 862273 - DNA, 553 bp, Homo sapiens
gggcaaaacctggaagcattccccttgaaaaccagcacaagacaagtatgccctctttcaccactcctattcagcatagtattggaagttctggctatggcaattaggaaagagaaagaaataaagggtattcaaataggaagagaggaaatcaaattatctttgtttgcagatgacatgatcctatatctggaaaaccccattgtctcagcccaaaagcttcttaagctgataagcaacttcagcaaagtctcaggatacaaaatcartgtgcaaaaattgctagcattcctatgcacaaacaacaagcaagtagacagccatattatgaatgaactcccattcacaattgctacaaagagaataaaatacctaggaatacagctaaaaagggaagtgaaggacctcttcaaggagaatgacaaaccactgctcaaggaaatcacagtggacacaaacaaatagaaaaacattccatgctcatggatagacagaatcagtgttatggcaataatgctcaaagtaatttatagattcaatggtattcctatta

SEQ ID NO: 862274 - DNA, 576 bp, Homo sapiens
tctcggcttactgcaacctccgcctttggggctcgagctattctcatgcctcagcctcccatgtagctgggattacagacatgcgccactatgccctattttttgtattttcaaaaagagacggggtttctctgtgttggccaggctggtctcgaactcctggtctcaagtgatctgcccgcctcggcctcccaaagtgtgctgttagctttttattgttgtttctagaaaaaataaggaaagtaattcttcaaattttagtgatagagaattgtgatactttttctttaaatgtgtatttctcggaagaagttacctgacartgtaccactgatagtctggtgttgatgacaaacctacttgtaaatggtaatagtgatgataaagaacaagtaaataaggtgtgatgtgttaagtaaaagtgtttggctttttttttttttttttttttcggataagcacatcatcagaattcttgacaatcagcagctgcgttaaaatatatttttccaagaaatcagaactcataatttttttttttttttttgaaacggagtcttgctctgttgccaggct

SEQ ID NO: 862275 - DNA, 534 bp, Homo sapiens
cccatttgctaaattatcaggaattccagtcttttcccatggtttccctcccctgtataatcataaacaaaaatcccaggcttgtttgctaatgcctgagaattgatgcctttgtctttatggcttgacaatggagtggaaactcagatacactcttgaggctagagggtcacctcaaagatagtctagagaagagttgggtctgtgacagtggctgkgttttctattgctgtgtgacaaattaatataaacttagtgggctgaaacaacatccatttattagttcatactctctgttggtcagaagttcagcacagcatggccaggttctctgctcacggtatcaggctgaaatcaaggtgtttgcaagtcagagttctcatctggaggcctgggggagaatctgctcccaagctctttctgttgttggtagaattcagttccttgagggtataggactgaggttctgtttccttactagctgtcagccaagggccactttctgctcctagagcctacttgcattctttgcca

SEQ ID NO: 862276 - DNA, 563 bp, Homo sapiens
gagtgactggcaatgggtacaaggtttctttttcaagtgatgaaaatgttccggaattagatgatggtgatggttgcgcaactttgtgaatatactaaaaaccactgaattacactttgaaagggtgaatcatatctcaakttttaaaaatacagtgtgtcagagcagggtgatggaacagatcaaacatggcatcatctttgtgaccgggggccatgaacagtttagctgcttcctactcaaatacagtaggccacagattacatacctctttgtggcaaagagtccaaaaaacgcactatcaaattgcaaacaggaaccagaaagctaatataccacctctcatatacaaaactgccagggactcaggtgaaaggctggatgtgctgcaacctctttcatagttgatgtgtcccaagaattcattttaaaaaaacagtttatcaaaaaatatacagtacagagctgaacaaaacatttttcacaagcactccttgctctagccagatccatcttttggcctttaggagcacagggaaaacgtctcagcattactttgtacc

SEQ ID NO: 862277 - DNA, 598 bp, Homo sapiens
aggttgagatgacatatctgacactctgttgttaccctcagaagctactacatgtgaaattctaatgactgcattatcctgccaaatgaaagaggcatgcatgagcaaggacagttaagaggggcgagagcctcatcatgatggggagtcttattttgacatcttggggagaactgtccacagtgtgaagtcatcaacttgttgtcctggtttacagtttgagcatctgttgttatgctgtccaacattttggtgagttctgagtggctcacacttcrggtacaagaattttcccatgaaatttacattgagttgtcctcctcccacttatagggcttctggaacagagtgggtcttggtcttagtgattccatgggagaaaatggaattggaggaactagtagaattcagggtaatgtccagtctacaggtgaataataaaaacacagaaacaatgaacagagctgcaatctcataaccggtatactacagtttttattttccacataatttttctctctatgggcatctctagttttaccaatgataatttcagtagaataagtttgtttgcaaaataagttgagtttcttcaaac

SEQ ID NO: 862278 - DNA, 693 bp, Homo sapiens
aaggaaggtttcaaaaactggagataagtcaagcagtacctctagcagttgttgaggttgtgggaatggagagaatgacacaagtgagagatgttaaaaaaaggatcaagagggtgttataaggtattgaatctgggagacaaatgagcagaggctgaggataatcatttgtaggagacagtggggtacagggagcatgaagaacaggggagaagagacctgcaggaatgartgctgagaagcaggagtttagtgggaggaggaggagatccagtcccagatatgggcaaagaagtcctttccctctcccaagcatggcagtcagccctgcaggaaacaggacaaaaggaaaggccatcatacctgctagtcttcctgaaataaactacaccagggctggtagatcagagccacactggccagtactccaatcatgatgctgacagtggctctacctgaaaggccaggacaacttcctttcactgaagtatctgtcatggaaagaaaagaagagaaggaataaaggtgatgttattttacagtgtggtaccttaggaaccatcactaagtatgaagtagtttctacttgttcctttggggattacattaattttgtgggagggttgctggtagatgattagccaactatattcttgcagattttttctctctcaatgtgtttctaggttagtg

SEQ ID NO: 862279 - DNA, 628 bp, Homo sapiens
gcatgtgctgttttctggactgtacttcttgaacctgtctgcagataatgtcatgagagatctgcatggaagtatatgagggctatcagattagggtgggtgtgttttacatagtgggtttttttttcaccaaacacttttcaaaaaattgtggttgagtgtgtatatagaaacacatacatacttatatttgttagatgtgtatatacgtatatgtgtatatatgtgtgtgtgtgtgtgtgtgtgtgtgtgtgtgtgtatatatatatatataaaatgtgccattttaaccgcttcacttaaggggagagagagagagagagaagagagtttctactaataccaaatctgggttaaataagggtggtcctatttcctggggttggccctcttccttaatgggctgtatcttgagcacagtgattcagttgaagaacagagaccaaattaaaagctacattgctaaaraaacaacaggtgctggagaagatgtggagaaataggaacacttttacactgttggtgggattgtaaactagttcaaccattgtggaagtcagtgtggcgattcctcagggatctagaactagaaataccatttgacccagccatcccattactgggtata

SEQ ID NO: 862280 - DNA, 615 bp, Homo sapiens
tctacacaggcatattgattgatcgattgacttaaggattttttttttttttttttttgagaccgagtcttgctctgtcacccaggctggagtgcagtggcgcgatcttggctcactgcaacctccgcctcccaggttcaagcaattctcctgcctcagcctcccgagtagctgggactacaggcacccgccaccacgcccggctaattttttgtatttttagtagagacagggtttcaccatgttagccaggatggtctcaatctcctaacctcaggatccacctgacttggcctcccaaagtgctgagattacaggcgtgaactgccacgcccarcaggattttttaaaattaataaaactcttagtccactggtttcaaatgagtggcttagaatctaatacttttactaatactaatacttgtaacacaataaacaataaggaagaaagagctctcatttgttgaattctgccacaagcagaccgtgtcacagaagcttccgcacaggagcagttctcattcccagctgcacactggactcgcctggagctttctttttttttttttttttttttgagagagtttacccttgttgcccaagctggagtgca

SEQ ID NO: 862281 - DNA, 618 bp, Homo sapiens
tgatacctaatgttgaagaaacatatcagcaaagagcaccgtgccctggctcctcactcagccttcagcccaatacagaggcagccgctggctctccaagagcaccaaccttcaaaggaaaatcctatgagggagaggaggtgtgaattttggcagcactactgttgtatgtgtatgtgtctgtgttttccaaaacacatggggtaaacaagccagtgtaaaaatagactgcagcaaaggaacgggagtggagctgcctcctgcaggtgtgagtgactgtgctgctgattacttcttggaaagcagtctccaggagggactgatcagacagaggagtggggccaaggaggatgcaaaacggaactggctgyacccttgatcaccaaataaacctgtctgtcccccaacctggggcttaacatcagacagcacagcttggatttcataattccccagtgcagaccacagtctccttttcctcctgtgctgggaggggcaggccccacaggcctttttgatttctggtctagaggccctttgttaaatcagatactacagaacaagcagtggaatgcggcatctttcccaaacagaggtcctgaggggttactacctgga

SEQ ID NO: 862282 - DNA, 472 bp, Homo sapiens
tagagtcttgtagggatctgggtacaactgatggagccagctcatggctttacttacctcacccccacgcctttaaaactcatctattcatgcctgtattaaggatttattcaacactttttgtgttccaggctgtaggaaccaaaccttgtctgcctgcagctcaaacaagagaacaagcaagatgagatcctctgccctcctggtgttttttttgttctcrtggggagaaaatgtattaaaatatgagttactgcatcagacatataaaataataatttcaagaaaatggatctgtgattgtaaatattgggtcaaatttagcatcagagtaaacaaataaatggatattatgtcacaatcagggcggactgtaattaaatgactttctagagtgcggctgcatccccatgaagctcagaccccattgttgcctttttattttattttattttatttatttatttttgag

SEQ ID NO: 862283 - DNA, 510 bp, Homo sapiens
gtggtgacatgtgcttgtggtcccagctacttgggaggctgaggcagggaggattgtttgaacccaagagatcgaggctgcagtgagctgtgattgtgtcactccagcctgggcaacagagcaagacctggtctcaaaaaacaaaacaaaccraaaaaagagtaacacatacttattaaaatatatgggaaactatgaaaattgcaaacaaagtaaaatcataccaccaagagatcaccactcttaacattttggcatatacacattaaaaaaaattcttcagtttcttaacacacatatagaccaatactttgcataagtgtttatgtgttcatgtatatagtaaaaacaaatgttgggtctttatactctgttgtaacctgcttttaattttactgtattatgtcatcagcaatataactttaatggctatatatttcttataaatttgctataatattagctataatttattacatacatatatgtcaggcattatcttaagtgctt

SEQ ID NO: 862284 - DNA, 612 bp, Homo sapiens
atgggagaccagaaagaaaattctaaaaaatcaacataatagttgtttgtcaaaagataatcaaaattgacaagctttgagctagaataactgagaaagagaattcaaataaagaaaatcagacatgaaagagaagacattacaactgatccacaggagtacaaggagaatattatgaaaattaatacaccaacaacttggataacctagaagaaatgaataaatttctagaaacatataccctaaagactgaatcattaaaacaacaacaacaacaaaattgaagactttttttttaaaagagattcattcttgctttgttgtccaggctggggcacagtgacaccatcatagttcatcaaaattctggggtcaaaggatcctcctgcctcagcctctcaagttgctgcaacyacaggcatgcaccgctgcaactagttaattttttatttttttgtagagaccagtcttgctatgttacccagtttggtctccaactcctggtctcaagtgatcctcccaccttggcctcccaaaatgctgggattacacactgtacctggacaagtgaagacatattaatagctgaacagaccaataacaagaaagaag

SEQ ID NO: 862285 - DNA, 661 bp, Homo sapiens
ctattttttaaatgcagtatttgtgtttgctatttttattacaaacactttaagattccttctgtaatgaatacagcttactcaaaatgggcagggggcataaatttttttcaatttattttcttttttggcgggctaactcttttaacacttatcccagtgtaacccatatgctagctgttgagtcaaagaggtgcttttataaacagcaaatatatatctatatatatatatayacacacacacacacacagatatatatatatatatacacacacacacatatatataatcgctattattattaggcagctgctaggtaaaacacatatgatattaacaggctcatttctgaatcctatcagaaatcctcacactttatattgtcatggctcatatgcaaaataagtaactttttaaatgcagatttttgttttgtgccgcttctctcactatttacttactaatgaagatgggcaagttacttaatggtctctgcacttgtgctttttcaactaaaaaatcaaaataataaatctctcttcatagttgctaagatcaactgaaacaaaatatgttccgctacagtgcctctggcacatataaatagcagtaatcgttgctgtttttgttatcactagttctaccacccagcagagtc

SEQ ID NO: 862286 - DNA, 661 bp, Homo sapiens
ctattttttaaatgcagtatttgtgtttgctatttttattacaaacactttaagattccttctgtaatgaatacagcttactcaaaatgggcagggggcataaatttttttcaatttattttcttttttggcgggctaactcttttaacacttatcccagtgtaacccatatgctagctgttgagtcaaagaggtgcttttataaacagcaaatatatatctatatatatatatatacacacacacacacacagatatatatatatatatacacacacacacatatatataatcgctattattattaggcagctgctaggtaaaacacatatgatattaacaggctcatttctgaatcctatcagaaatcctcacactttatattgycatggctcatatgcaaaataagtaactttttaaatgcagatttttgttttgtgccgcttctctcactatttacttactaatgaagatgggcaagttacttaatggtctctgcacttgtgctttttcaactaaaaaatcaaaataataaatctctcttcatagttgctaagatcaactgaaacaaaatatgttccgctacagtgcctctggcacatataaatagcagtaatcgttgctgtttttgttatcactagttctaccacccagcagagtc

SEQ ID NO: 862287 - DNA, 606 bp, Homo sapiens
cccagcactttgggaggctgaggtgggcagatcacctgaggtcaggagttcaagaccagcctggccaacatggtgaaaccctgtttctactaaaaaatacaaaaactagccaggcgtggtggcaggtgcctgtaatctcagctactcaggaggctgaggaagggagaattgtttgagcccgggaggcggaggttgcagtgagccgagatcgtgccactgcactccagtctgggcaacagagtaagactccatctaaaaaaaaaaaaaaaaaaaaaaaattccatcccatttcatgctgtagctggacacatgcttatacagcaatttctgatgatgttattcccctgttcaaatgactctaattgctcccctcttgcttataaaataacctccaaacttttcytgcatggagacaatgcattctagtgaaaagagcaaaagtgagtgaatcagagacacaagggttccaactgctgcttttgccagatgttagatatgtggccttggacaaatttccaaacttctctttgcttcagcttccccaaatagaaataagacttataaacttattgagaattgtcataaaattaaaacagccttcattta

SEQ ID NO: 862288 - DNA, 594 bp, Homo sapiens
agaccatgaagcaagatgaggttgagtggagttaagcaatgggtttgatggacacaaaattcctttgattcaagatcaaaatttttactcatacatgtattttattattatatttgaatattaaattcattagcataaagtgtcctattataccagtgagtgatgtctattaaacacgaaggtattcaaaggctggtctgctgtggttcatttccatcctctctccattcccaycatcctcaaaaagcactgtggataatcacgtgctcttccacatccctcaaccacatcgcaccaaagagaggggcttccctctctccaccacggttacttctctctctaccttccttcatcttccttcctttagcaaaataaaattaggaaactcactcaggacattgtgataatgacatttctataactagtaatgactcctgtaagctgagtggaaatggggtctttataacatggtgcccatgtgactaaagggctgtgccctgctccatggcaatagactgcccacttttccctccaaggcacggcactgacactatgattcccttaacttttaaagtgaactgtgaagaccaagac

SEQ ID NO: 862289 - DNA, 495 bp, Homo sapiens
tctgttgttcccttctttgcgtacataagttctcatcatttagctgacacttataagtgagaacatgtggtatttggctttctcttcctgcgttagtttggtaaggataatggcctgcagattcatccatgttcacacaaaagacacgatctcattcttagaaaaaaacaactttttgtttcattgatcttttgtattgttttatttaatttaaattcatttatttctgctccaatctttatttctrttctctactaactttgggtttggtttgctgttgcttttctagttctttaagatgaatcattaaattgtttatttgaagtttttcttctttttttgatgtaggcatttacagctatatacttcccttaggatttcttttgctgtatgccataggttttcttatgttgtgtttccattaacattagttttaagaaatttttcaattttttttcttaatttgttcattaatccaatggtcattcaggagca

SEQ ID NO: 862290 - DNA, 654 bp, Homo sapiens
cacagatcagttggagaattttgctctgggtcactttgggagccaggatgatggagcagccaccatcaccatggcatagaaagggagagtgtgaagtcttgtgttcttagagcttctgattcaaatgagcacataattccacctgtgtttcattggcaaattcaaatggacagtaaaatacaatcaaactgtgtgctcaaaaagagtgcttgtgaggaaattttatttatttaatgccatccttatgaattctttggaaaaaaaattttttatagctaagaaaatggaagtactccaacttstttttaaccaatatagggtccaattcatcacgttatctgttacataatattttatactgtggacctgtaccaagttcattgggccatttcctaactaatggatatttagatagtttttatcttttcctattagaaacaatgctttgatgaatatccttcatgaactgatgaccttgtttgggcatctctctcagtaaagatacccataggtggagttactgagcagtcagtttttttttttttaaatcaatcagagattccttatttcctacattcttctctgtaaagtgaaagtaataatagaagcaacctcattaattaatatgaagcccttgtcacaatcccgagcaca

SEQ ID NO: 862291 - DNA, 543 bp, Homo sapiens
ggaaatatattgtaatgtcttctttgaaggctgtgagcttctacaaggtggagattgatgtttaaccttttctctttccctagtgtctagcctgttacttgtcctcatgtgttaagaattttagttgcaactgacaacccaactcaaactaactttagtaaaacagttaattttgtatacctacatttccaaagataacagacttcaggtatagttggattcaggaacctggaaatctttcccaggaatatttctagctcctactcttgtctgattttctttgtttgggcttcacttgaatctgtctttgtgggccaagggctggaatacctggattgactgtattttggtcatgtgcttttctgcgaagtctgactgggtgttctgggatcagcgccacccagkccacattcactgatggcaggaatcgggtgatacagagagaaaaaaaatgaaacattgtcactaaagaggaaggaagagggatgctcattagacaaaatcaatgcctgcccaccacacacaaaaaatacctgtactgat

SEQ ID NO: 862292 - DNA, 667 bp, Homo sapiens
tttctgtctttggcatctctaattaagaaccaacactctggaattgtttctgcataattcagggaaatcttggaatgagccagtgtaaacctgcaagcctcccagctccacctgcccagtaaacatggccatgtgcttccttctcttctcttctagaagccttccatctagtcttctccatccaggccctgcttaggtctgaggttaggggattactagagaattggcgtgtgaaagtgtctgggatatcaggcctgatccaatatggctctagggtcctctatttcccagagacatacttattttgtgttaactaggagggaaggggactctcattcatgtttgggtacttggttcrcaatttagactcctgccctgcagctttgatgcttgaaaaaatgtcagcttcatattcaagttcatttggtttcctgaagaaactcaaattaaaaaactttataaattaagtagatcacataattataagatgtagacaacggtatgaatggatctaggtacaaaggcaatgtgtgaggctactgccacctctactatttttctttgtaacagctttatagaggtgtaacagtcagtaaacttcacatattaaagtctgcaatttgattagttttgacgatttcatgagtgtgaaattatcaccaaaatc

SEQ ID NO: 862293 - DNA, 586 bp, Homo sapiens
atggctggagctaagtagaagctctagttatccgaggtgggtgtccacactgggtgggttcctggagtggctcagaacatggggaggcatgtggggagggcctatagagaggtccatggagtagcaggcgaaggccacttcccacccacaatccacacaaagccatcatgtcttgagtgctatgtgcctggcattgcgccartcctctccactccttttctaacttgcttcccagcctatctctgggtggtgcaaccactttttcatctagaaaatgggtaattatttttgaagcccctctctggcttccaaattgcttttctctctggttctcttcctgtctctcagattgccctctcctgattttcttcaccaacttctcttacttccctgtccaatgtggctttgtcatctggcgctcctctctctgtatgcagtgggtgctctctgggagagctcagccccacttatggctccaagtcctttccaggactccccaaatgctccggctccagctcctgagtgcctcatccaagtgccctgtttctgggcttcctcacttaagtgtctctcaggcctctgaagc

SEQ ID NO: 862294 - DNA, 547 bp, Homo sapiens
cactaaaaagaaaaaaaaccaacaagtaagacacacacaaacccaaaaccacctttccaggccttttgatcgctttcattctttcctgcactgcccgatgttagcctaagcccagtagtatctgctctgtagtatctgtagcctgggacaacttgccactatggcgagcagatttcaggctctttccttctgaaactcctccaaccagtgtgcaccacactcctgtgccaaagactaggtctgtcrtcgtctgtctttgaatggcttttctcccatgcagtgttttccagatctctccctcttgatgcctttccatctcctcagctcacagctggaaatcccatttttgttcctttctggcaacttttcacttctttctatttctattgttatttaactgtgaaaagtatttcctcttgcaggaaaaatgcccgtatgctttgtctgagcaggagtcctgctgttcattatttgctgaaagccgtgctgttgtgtttaatgtgcaccctgggatgtcaataccatttcgtatatacagaggcagaaa

SEQ ID NO: 862295 - DNA, 616 bp, Homo sapiens
tttgtagcaagttgcaacaaaattgaaagactgaaatcttgtggagtattttctctgaagacaaattaagagtagaaaactaactagaaaatccccatacagtcagaaataaaaaaacaaaaacaccttctaaataattcatgagtcaaagaagaaatcacagtggaaattagaatgtatttggaacttaatgaacatactacatattaaatctacagccttaaatttgtattttaatagaaatgaagaaagcctaagaactactactctaagcatccaacttaggaaaaaaaaaaaagaagaacaacagagtaaacccagaaagaatggatggaatgaaatattaagtataaaaacagaaatgaataagcaagaagacaaatatgtaagctgactctctgaaaagaataaaagaaaattgaacaatctttggcatgattaataaagaaaaatggaataccagaacagyagtcaaatgaaacagacacaaatacaaataccccaaacattaaaaatagcaggcaggtgaggtgtgatgtctcccatctgtaatcctagcactttgggaggctgaagcagtagtattgcttgagcccagaagtttgagaccagccta

SEQ ID NO: 862296 - DNA, 587 bp, Homo sapiens
cttttaaagggctggttgcccaattttatgatgaccaatttagttcctgaatatggggttccttttatttataatttattacagagcctcatcaagttattactagaaaatactagatggttctattatgataaaaattgtataaaaatttcaaaattcatataatgtaaaaggaggagagtaaacaatcttctagtgattggaaatataactaaagcaacttgattattttttaaggtgtcatttttattttttgaagaagcatttatatttaaaacttggtactgattattaagacaggtacagtttaaattgcccatttaaaaaatcgtatgtcattccyaaactaacctgtccatatgcatagagaaaaatacgtcaagtatgtactcattactttggcctttccttaatctgaataatttatttttatgaaacttaggatttttgtgatgttgcttcatcagctcatttccaaaactgctatatgatcttattcagtgttgcttaatcttaggaccatttttctttcacttatagtcctataagtttttttttttttttggccacagactcttttgtttctg

SEQ ID NO: 862297 - DNA, 682 bp, Homo sapiens
ccaataacactaacataagttatgccacttactttttaacaaactatccttttatgtttcttgtttctctcttccactacaatgtaaactcaatgaggggaggaattattttcctttttgtttttttttttaattgactataaaggctagaacagagtctggcattttagtacactctcagtaaayatttgtttataaatgaatgaatggacaagtgtgagagaagtgccgggaaagaagcttgctgctgaattgcaacatagcaagttggaggaagttggaggacacatttggcatcataattctgcatccagtacctctcctctatacctctgttttccacatttgccagaggtagcttcctgcaggagcccacaggatcccacgggagagatgtggccacgaactcccataaacctggaggcactggacagcactaggcagcttccatctggagactggcgtgtacctaaaacgtgcggttctgtgttttaaaaaaattgtggtaatatatacataacataaatttaccattttaacaatttttaagtgtacagttcagtggcattaagtacattcacactaatgtgcaactatcaccaccaaccatctccaaaatttttcatcttcccaaactaaaaccatacccattaaacaataactcccccttccttttccccca

SEQ ID NO: 862298 - DNA, 568 bp, Homo sapiens
gatatctttctgtgtctggcttgtttcagttaacaaaatgacctccagttccatctacattgctggaaatgacaagattttattattttttaaggctgagtaatattctattgtgtacatgtcccacattttctttatccattcatctgttgatggacacttaggttaattccatgtcttggctattgtgaatagtgctgcaataaacatgagactacagatatatctttgatatacttaaatccttacttttggatatatacccagcaatgggattcctggatcatatagtaattttatttttagtgtttttgaagaacttcaatactgtttttcataatgactgtattactttacattctcaccaacagtgtatgagcatttctctgtatcctctccagcatttrttatgtttttttttcttttgtctttttgctaatagcccttttaattgtggtgagataatagttcattgtggctttgatttgcatttttctgatggttagggatgttgagcattttttcatatgtctgttggccatttgtatgtcttcttttgagaaatgtc

SEQ ID NO: 862299 - DNA, 596 bp, Homo sapiens
cccagccaaggccacgcagatgggggaggtggagtggaggaatgtgaattctgcacattctgcagtcatggccaccccgcccccatcctcattgtccagaagaaatggaggccatggtggacagggcttgcagcagccagcaggagccctggctgcagtgaggtgcctagctagctctccaccggtcaacaaggcaagagaggaggacagtgcaggagtagcccagagttccagtgcgactcaagtgacagcaaccacccagattcctactctatggcaggctggtgagattctccaagttcctctccagaaggaaattgcaatcaggacctgatgccttcagctgattctgaccctgggggtagtggatttatcagggaaggaccccccaggagcagaaggctcaggtcatgatagtgacacagatgaccaagccrtctattctgaatagtagatgaaatgtgtccttacaaatactgcacactggagacatagaacataacagttgtacacatattctccctactccttcacaaccttgggaaatagatattatttctatcactcccattttacacatgaggaatcagaggttt

SEQ ID NO: 862300 - DNA, 682 bp, Homo sapiens
gggtgagccactgtgcctggcctgtatttgcttttaaaaattaaaatatgcatacggttggagtcccttttgtcatcctcttagatcgtattttcgtatgcagaagttatttatctttttagctcatgcacttatattcttcctacaaatatctatatatattttatgtagtattgggtttcaaatttatgtgatattttagtacatactttctataatttgaaaaatgacatgttgatatatgtgtattattattattattttttgaaacacaatcttgctctgtcacccaggctgtagtacagaggcacaatcttggctcactgcaacttccgtctcccaggttcaagtgattctcgagcctcagcctctcgagtagctgggattacaagtgtgagccactgcacttgccttacttcattaattttaatagctgtatagtattcagtcatatgartgaatagtacacaattttagtcctttattgatagttgttttcaacaaatatacaaaggtaaactttttcctcaaattgggtcaagctatatatattgttctaaattagctctttttctcccaataataatagtgtgcaggtttgttacatgggtatattgcatgaggtttggggtacaattgatcacatcacccaggtggtaagcatagcacccactagatagtt

SEQ ID NO: 862301 - DNA, 660 bp, Homo sapiens
aaaaagaagcaatcataggctgcttttaaatggtcagcagtccaaatgcattgaaaaatagcatttggtttacacagaactgttggaacagatctactgtgtaaagcaaaatgaaccaattcttgaaaagtgttccagggccacaggttcttagattgggaagcaagatgacagttctgactagcttagttttccagactgaaagtaatggaattaaaataatgataactgtagaccttctcccytaaggatggtgccctggggctttggggaaaccaggatggaggcagaatcactgcctcacttcttcagctcagggcctacagaaactcactggcattgccagtaacctgttggaagctggcacagccaatctacagcagagagccctgggatgaggatgccccaggaggaaaagaaattggcaccagggaaattatggcctgaagagggagaagagccaggggaggaatgaaaccatagatgggcaactcctgggctcacagtttccctggattctctagagggcctctctcaggcccctagagacctggtagcctagtggtaactagccaggagatagggaggagcctctgagggccagaggcttaagaagacatagccacctcctctctggagtggagacgaggaggctgaagc

SEQ ID NO: 862302 - DNA, 660 bp, Homo sapiens
aaaaagaagcaatcataggctgcttttaaatggtcagcagtccaaatgcattgaaaaatagcatttggtttacacagaactgttggaacagatctactgtgtaaagcaaaatgaaccaattcttgaaaagtgttccagggccacaggttcttagattgggaagcaagatgacagttctgactagcttagttttccagactgaaagtaatggaattaaaataatgataactgtagaccttctcccctaaggatggtgccctggggctttggggaaaccaggatggaggcagaatcactgcctcacttcttcagctyagggcctacagaaactcactggcattgccagtaacctgttggaagctggcacagccaatctacagcagagagccctgggatgaggatgccccaggaggaaaagaaattggcaccagggaaattatggcctgaagagggagaagagccaggggaggaatgaaaccatagatgggcaactcctgggctcacagtttccctggattctctagagggcctctctcaggcccctagagacctggtagcctagtggtaactagccaggagatagggaggagcctctgagggccagaggcttaagaagacatagccacctcctctctggagtggagacgaggaggctgaagc

SEQ ID NO: 862303 - DNA, 641 bp, Homo sapiens
agttgcaactatgacataatagactggaattcttattctgttgggggttacatttacataggaaaaagagatacggacctatgattaccaagatacagaagaaacatatacatcatgctagagagtgataagatttgaggaataaaaacacaacagggaaagaaataggaagtgtcaggaaaggagattgcaattttagatattatggccatgaatggccttactaaaaatgtaacctttgaataaagttctgcatgaggtaaggcactaaaccaataatagctatcagagggaagagcataccagggagaataccaaatgtcaaagctctgatataggagtattgcagttttggtgagaaacatcacacgccaatttaactgcataattaagttaaaaagttgaaagttaatatcttaaactttctaagtggagtgacattaacaagatggcagaatagaagtctccagcactcatttccctcatagaaaatgtcaatttgaaacaccattcattcatggcaatacattcaccagaactacagaatctgagagattatggcacctaggtggagcacagagataagaaaagatgcactraagagggaagaaagaacatcttcctgtcaccccttacatcac

SEQ ID NO: 862304 - DNA, 682 bp, Homo sapiens
tacaaactaccataagagaatactataaatgcctctatgcaaataaactagaaaatctagaagaaatggataaattcccagacacatacaccctcccaagactaaaccaggaagaagttgaatgcctgaatagaccaataataagttctgaaattggggcagtaattgatagcttacaaactaaaaaaagccaaggatcagatggatacatagcggaattctaccagaggtacaaagaggagctggtaccattccttctgaaattattccaagtgatagaaaaagaggggctcctccccaattcattttatgaggccagcatcatcctgataccaaaacctggtggagacacagcaaaaaaagaaaatttcaggccaatatccttgatgaacattgaygcgaaaatcctcaataaaatactggtaaactgaatccagcagcacatcgaaaagcttatccaccaagatcaagtcggcttcatccctaggatgaaaggttggttcaacatatgcaaatcaataaacataatccatcacataaacagaaccaatgacaaaaaccacgcgattttctcaatagatgcagaaaaggcctttgaaaaaatataacaccactttatgctaaaatctctcaaaaaactaggcgctgatggaacatatctcaaaataataagagctattta

SEQ ID NO: 862305 - DNA, 610 bp, Homo sapiens
agacaaattaaaaatattgcctgaagcatttagggggtgatgtgtcataatgtttgcaacatactgtcaattgagtcagatatgtgtgtaagagagacagagtatgtacagataaataccatgcatctttatatagttgaaacaaatgtgatttttcaaaaaggttcataatagtggaatctagatgaagcattctttcaattttcttatacatttgaaaatcttcatatwcagaaattgaaaaaagatcacttcaagtatatttaaagtattttaagtatatttttcaataacacatcctggtattcttcaatattcaatactgtgacattaagggagtaaagtaagatttttggtaacaaagcatatttttgttaagattagctatctttattctcactttgaaaatatctttaccagcctgggcaacataggcagatcttatctctacaaaaattcaaaaattagcctggcatgttggttcacacctgtagtcctagctactcaggagactcagatgggaggactgcttgatatataaatcaaatacatatgaaattgaggatttcattagtaaaatgccaaaaacaacccaaaattcctctttatt

SEQ ID NO: 862306 - DNA, 598 bp, Homo sapiens
gtttctgcattagttggcagctgtatccatgttgcttaaaaggacatgatttcattctttttcgtggctgtgtagtattccatggtgtatacatagcacattttctttatctagtcactgttggtgtctttgtccatttttctattgcattgtaggtctttgctttcttatttgtagaagctcattatatgttagggaagttggtctttggtctataatagagctaggcatatttttgcaatttgtcattttttggctatgtttatggytttttctatgcagaaaattttgatgttgaaagattgaatgtattaatcttttcttgtataattctggatttaatgtcatcattagaaatgccttctccactttaaggtgaataactctcttttagtttcttctaataccatgatgatatcattttatgaatttaaatattaatatctacttggactttatccaggtcaggtgtaaggaataaattcaactttgatatttttctcatttgattgactttcattttacactgttccatgatgatggctgcttcttgctttgtgacactcaaggttttgccaacattctctacagttgtttt

SEQ ID NO: 862307 - DNA, 614 bp, Homo sapiens
ctcaactaagaaaattcttatggtctcaaaggatgagagcaactcctgcattgaataagttcatcatctatatccttactctaaccttacttaagatcttcctccaagttaggaatgaaccaaagcactagaacacacaacatatataaaaaatgggtggtaaggctaggtgcagtggctcacgcctgtaatgctagcactttgggaggccgaggcaggtgggtcacttgaggtcaagagtttgagaccagcctgggcaacatagcgaaaccctgcctctactaaaaatacaaaaaaaaaaaaaaaaaaaaaaaaaaaaaaattagctaggcgtggtggtgggtgctgtaatcccagctattcaggaggctgaggcaggaraactgcttgaacgcaggaggtggagattgcagtgagccaagattgtgccaccacactccagcttgggcgacagagcaaggctctgtctcaaaaaaaacaacaacaacaacaacaaagggtggtaatttttcctcagaggaaaattaatcaccaagaaacgaaaaactggtatgaataaatctgtcgcttctgctgaagttcagcatattgtaaaccacccaagttcaacacca

SEQ ID NO: 862308 - DNA, 577 bp, Homo sapiens
aggaaagcacaaatatacttgttttgtagcatggaaaataatatgtttaaattagactaaaagatagcaaagaaactaaggattttagacagttaaataaaagacaagaagtgcagcagcagaatggcccacacataatgggttcttcatctgaggtcttcaccatgtagtcaaatttcatagttctttaattttcctttgataacaaaggtgtggtatacatgtgatctctragatttgatggattagccaggcatggtagctcacacctgtaatcccagcgatttgggaggcagaggcgggcggatcacctaaggtcaggagttcaagaccagcctgaccaacatggtgaaacccctgtctctactaaaaatacagaattacctgggtatggtggcgcatgcctgtaatcccagctactcaggaaactgaggaataaattgcttgaacctgggaggcggaggttgcagtaagccaagatcacgccattgcactccagcctgggcaacaagagcaaaactccgtctcaaaaaaaaaaaaaaaagatttgatggattcattcctggaaaccagtggc

SEQ ID NO: 862309 - DNA, 580 bp, Homo sapiens
agtcagttccagggggctcagcatcgggatgttgcctgagatggccccagagctgatgtcccatgaaacccattctgctgcatctctcagcctgccctgatgccactacatgagctgcaaagaccatggagattgtgaaaacatcaaaggtgttcctayggtgcagaacagaaaagaattgcatattaaaagatcaatgtgcttctcgttatcagaacgggatttctctccttctacatgaaggtttctcaacctcagcactattgccacttcaggctggataattctttgttgttgaggctattctgtgaaatgtaggatgtttagcagcaaccttggcctctacccactagatgccaatagcaaccccccttcccaagttatgacaactaaaaatgtttccaaacattgcccaatgtcccctgggagatgaactcattcctggttgagaaccccagtgctacatacatgccaccatgcagacagtgtgagaccctttgtcaaatctagttgggatcaagtgatggcatcaaaatggaggagagatcccagaagcaggcagtgtcctggaatcataaag

SEQ ID NO: 862310 - DNA, 568 bp, Homo sapiens
ctttggagaggcagggtgtggatgagatgatctttggacagttcatcttacctttgagttccaggatacaaagattcacgttcatgattaaaccacacatacgggttgcttaatatagatagaaaaatacactgaaccggtgtatttagttccagtgacctgaggatgcatatgacacattcagcaaaatcgggctagggattaatattgctaaggtcagggtggtcattttgggcacacagcgggtaatctttcataagggtttaccactcttccgtatcttagttcatctataatgaactggcagagagagatggttattagaaaataaaatgcacttagagtcccccatgaatcatttatgggagacaccatgcttagcaaagactatgaaaatatggctgttaagggcaactcargcactatttctggatgactttcaagcatgaccactagctacaggactgggcctggacacattagaagaatttaggccttcaggatgaaaaggaaaatgtgtgggcagagactgagtccaaggcagtggccttcacaagtcaccctgtga

SEQ ID NO: 862311 - DNA, 639 bp, Homo sapiens
agaaagagagtatgaatactttagttatttagtataaaatcaaagtccctaaatattttcagtctcttgaaaattaagaaaccagtaggctataaacaaagtttttctactctccattctctgggaagtttcttcatacatctatttagcaaaattttgatcatctctaatatttctgacagtgtaccaggcatataaagataagtcacatgtggacctactcctaaagagctgacagtccaggaaagcagacctgtgaacaagaaattattgtgcaatgtaataaatgctttgataggcatttatacaaaatgtaatagaacacaatggattaaggtggacttattgggtctagagttctctaagaatgtaacattttataacttgagaataaatcataaatcaattgtggaaggaaggaagaaggggatgctattctttcagtatgacatagcactgactatgtgtcaaggagtgasaaagacaaatactgagcaactaattataagaatgatgagtgaagcaaaagagaagtatgataaaagagcatctaacaggacaatctagttagactgggaaatcatagaggactattccatgaaaccttacaagctgccttaaggaggatgagtaggactt

SEQ ID NO: 862312 - DNA, 605 bp, Homo sapiens
acatccataaaaaaaatatagaatatagctcaggtgatagatataatgatgattaaaaggaaggaaaatgacacctgtgagaaaaggtaacagaaattggaattacctactctagagaatgctggcaagtgatattcttctagtacatagagaaatattatacataatggtgactggctgagccccattttaactgccagaaaattttttaaatgggcctgatactcatttctttctctgagctaaacttaaaaagaattaaaytgatggtaagaaaatgttgataaacatatgatctgattagcaaagatgaattgtcatccactaaatgattttttaccaaacgagttaaaaaacaagaactaaactaaactaaaatatatttgcagctcattgtgatgatgtaagttgtgagactattcagtggctgaggccacagggcagttctttgagggaacatgatggtgttgcctgggacacttaacaaaactgattacaaaatgtcatttaattaagcaaagagaactctgaggactttaaagttttctctgcccctagttgcagtcttcaccttgttccccagctccaccctcatactaatatga

SEQ ID NO: 862313 - DNA, 627 bp, Homo sapiens
ccctctcttctactccacccctccgttttcccactccccactgactcggatgcctggatgttctgccaccgggcagtggtccagcgtgcagccgggagggggcaggggcagggggcactgtgacaggaagctgcgcgcacaagttggccatttcgagggcaaaataagttctcccttggatttggaaaggacaaagccagtaagctacctcttttgtgtcggatgaggaggaccaaccatgagccagagcccgggtgcaggctcaccgccgccgctgccaccgcggtcagctccagttcctgccaggagttgtcggtgcgaggtaagggkcccagaggaggacgtgtccctctggagggcgcccagccagggcgcggaagctcgggtgccgcgtggggcaggcgcagccgggaaagttgaggtagagcatggaccagtccctacagtcctgactggagtgggaagggtggagggcagaggcgatgtgggtgtgcatgagtgagagtttgtgtgtgtgcgcccacgtctgtgtctgggaggagggagatttcagggcatagatctgcggccagggtgcgagaggtgaagggacgaactagcactcgcagaccccagagagaccagtct

SEQ ID NO: 862314 - DNA, 627 bp, Homo sapiens
ccctctcttctactccacccctccgttttcccactccccactgactcggatgcctggatgttctgccaccgggcagtggtccagcgtgcagccgggagggggcaggggcagggggcactgtgacaggaagctgcgcgcacaagttggccatttcgagggcaaaataagttctcccttggatttggaaaggacaaagccagtaagctacctcttttgtgtcggatgaggaggaccaaccatgagccagagcccgggtgcaggctcaccgccgccgctgccaccgcggtcagctccagttcctgccaggagttgtcggtgcgaggtaagggtcccagaggaggacgtgtccctctggagggcgcccagccagggcgcggaagctcgggtgccgcgtggggcaggcgcagccgggaaagttgaggyagagcatggaccagtccctacagtcctgactggagtgggaagggtggagggcagaggcgatgtgggtgtgcatgagtgagagtttgtgtgtgtgcgcccacgtctgtgtctgggaggagggagatttcagggcatagatctgcggccagggtgcgagaggtgaagggacgaactagcactcgcagaccccagagagaccagtct

SEQ ID NO: 862315 - DNA, 618 bp, Homo sapiens
ctaatatatttactcattgaatgtatgagtgtaataatacagcttaagtttaaaaaattactttttataaccaagaaaaatgtttctatagggggctacctgtataaagacttataggaatcaatgtctacaaaataatrtaagatgtggctaaaacatttgctggtttttctgactagaattagctcccaacgaataaagatcttgtctgtcgtttttagcagagtctataataatgcatataataatgcatatttaacacatatttaatgagaaaacataaattatcatgttaatatcttccattaatatgttgtactttaggaattgtgataatcttaattttaatccataaatggtgctattcttctgaaggcattttcgatctcaaatagaataactttatataaaagtttaaaaatttagctttaaaaagtgacatcaacctaatgacataaatctttaatgagcatctgctactttcaaggcactgggcaaggtactgaggaggacaaagaaaagaataaaacactttgcctgcccttagaatgtaaaatcttataggagagatgagatatgtgcatgtgtacctacagtaacaagaaaattcaggagctt

SEQ ID NO: 862316 - DNA, 618 bp, Homo sapiens
ctaatatatttactcattgaatgtatgagtgtaataatacagcttaagtttaaaaaattactttttataaccaagaaaaatgtttctatagggggctacctgtataaagacttataggaatcaatgtctacaaaataatataagatgtggctaaaacatttgctggtttytctgactagaattagctcccaacgaataaagatcttgtctgtcgtttttagcagagtctataataatgcatataataatgcatatttaacacatatttaatgagaaaacataaattatcatgttaatatcttccattaatatgttgtactttaggaattgtgataatcttaattttaatccataaatggtgctattcttctgaaggcattttcgatctcaaatagaataactttatataaaagtttaaaaatttagctttaaaaagtgacatcaacctaatgacataaatctttaatgagcatctgctactttcaaggcactgggcaaggtactgaggaggacaaagaaaagaataaaacactttgcctgcccttagaatgtaaaatcttataggagagatgagatatgtgcatgtgtacctacagtaacaagaaaattcaggagctt

SEQ ID NO: 862317 - DNA, 618 bp, Homo sapiens
ctaatatatttactcattgaatgtatgagtgtaataatacagcttaagtttaaaaaattactttttataaccaagaaaaatgtttctatagggggctacctgtataaagacttataggaatcaatgtctacaaaataatataagatgtggctaaaacatttgctggtttttctgactagaattagctcccaacgaataaagatcttgyctgtcgtttttagcagagtctataataatgcatataataatgcatatttaacacatatttaatgagaaaacataaattatcatgttaatatcttccattaatatgttgtactttaggaattgtgataatcttaattttaatccataaatggtgctattcttctgaaggcattttcgatctcaaatagaataactttatataaaagtttaaaaatttagctttaaaaagtgacatcaacctaatgacataaatctttaatgagcatctgctactttcaaggcactgggcaaggtactgaggaggacaaagaaaagaataaaacactttgcctgcccttagaatgtaaaatcttataggagagatgagatatgtgcatgtgtacctacagtaacaagaaaattcaggagctt

SEQ ID NO: 862318 - DNA, 600 bp, Homo sapiens
acatgccaggaaatatctgagagccaagactagacctacatcatcttaagaagtccttttttatttatttatttcgttgtacacatgtaccctaaaacttaaagtaaaataataaaaaaagaagtccttcttaaaattctcattctattaaacagaagatactaagcttacctgagtgtaagtgtgaggccatacaacagaaaatgaaaaggagacaaattccttcctagataatctggggattatctcagtccttcactttactccttgtctgagacatcatagccctgtggatcatcagggttgatcagcctggctggttagtcctgcatctcttcatcccttgctgcatcttctatggacagagtgaacaatgttcttaagccaggctttcctatgtagctgcatatccctgctagatgcccacaacaaccagctctattyaaaatcacagaaaacacagggttatcacattttcaagaatctaagattctaaagtagtgcttcaaagagtatatggcttatattccaatgagattctggaaaagatcagaagtatgagcttaagttcagctctagaatccctaaaagatccaatta

SEQ ID NO: 862319 - DNA, 657 bp, Homo sapiens
aaatacacagaacaaacgtaaaagaaaacaaatcacccatgttgagtcctaggagatgatttcccacaagctgtataaactttcttcagttaaacaaataatcctagaaatgaagttttgttttcatgctttgaggacacatagtaatgattacctgtggtttttctcactggaaaccctgacaatgagacaaaatatgttggggttttttttccagataaatgtcttaaaaagacatttctagaatatgarcatttcttaagtcaatgtttttcatttaaatttaaattttataatcatcatatctgactttattcaaagcacaaatcctagagacaggcaaagtttttattggttaagaaccatttcacaatatcccactcactaagatctcttgcttactacctcaaagaggtgggggaacctccgctgtatgaaatgtagtgtgaaaggttcatggaatttctatatattctgaggactttttttggaagcaaacctttgaaattcaatctcagataagaaagcgcagaaactgagtagacaggagagaagtgtccaagaagaagtagcttgcattcaaaggtaattgaaacacatcagaagagtgtgttagtgtctaagtaagaccttgggcctaaatccatatggatgtgt

SEQ ID NO: 862320 - DNA, 656 bp, Homo sapiens
tgaatgttgagaaaatacctgtaattcaacatgacaaagcagaattcacctcctacaaaacctgtttctacttttgtatgctctttctgttagtggcatcctaatattcagatcttccagaagaaaacctcagaggtagtcttaacttctctctctcctcaaagtctagtcctcaaattcygcttactttacctttgacttgccccttaacctcctcttcactcctgctcttctctataactggtcctaattacttttcatctgaaccactgtagctgtatttgtaagccattcttccttcctcctgtcatcattttcagtactttctgtttgctgccatagtgttctcttcctaaaactcctttagcgttatgtcacttcatcactcctctatttaaaaacctttaatagtttcatttaaaataaagtatatttggggggaggtacatgagataatttaattcattcaaataatgtacaaagatcaaatcagggtaactgtcatatacatcaccttgaatatttgactttatgctagaaacatttaaattattcccttccaggtattttgaaatgtacaatagattattgtaaactatagttaccctatatatctatagaacactaggtcgtatttctttttaaaactgtacatt

SEQ ID NO: 862321 - DNA, 596 bp, Homo sapiens
taagctgtaggtggtaaacacttttagtcttttaaatcagacaatgtctttagtttgcactttcatttgaagaatgatcatgttcaaagttagaagttgacaattagttttccttggcaatttgaagataatattctattattgctgattagaagtctgctactaatttgttattcttttgtgttaatctatcttttttatgtgttagctggaagatgttctctttattattgacgttttgccatttcatagccatgtgcggctgaggttttgtttttatttacccttattcgaattcagtgtaaattgtctgagygatcaggtatttctacaattctaaaccgttcttggtgattatcttatgaaatatttagttcctgttattctctttacttgcttttagtgaaattcctaaaaaatatattgttccctttaaatctatgctttttatcccttaactgttccttaagtaaaataaagtctctatttccctagtacaagttccgggtaaatttttcattgctagcttccagctctctaattctcttttggcctccactttggaatttattctattttttgatttattgtatttt

SEQ ID NO: 862322 - DNA, 596 bp, Homo sapiens
taagctgtaggtggtaaacacttttagtcttttaaatcagacaatgtctttagtttgcactttcatttgaagaatgatcatgttcaaagttagaagttgacaattagttttccttggcaatttgaagataatattctattattgctgattagaagtctgctactaatttgttattcttttgtgttaatctatcttttttatgtgttagctggaagatgttctctttattattgacgttttgccatttcatagccatgtgcggctgaggttttgtttttatttacccttattcgaattcagtgtaaattgtctgagcgatcaggtatttctacaattctaaaccgttcttggtgattatcttatgaaatatttagttcctgttaytctctttacttgcttttagtgaaattcctaaaaaatatattgttccctttaaatctatgctttttatcccttaactgttccttaagtaaaataaagtctctatttccctagtacaagttccgggtaaatttttcattgctagcttccagctctctaattctcttttggcctccactttggaatttattctattttttgatttattgtatttt

SEQ ID NO: 862323 - DNA, 598 bp, Homo sapiens
aacctcctgaagctttcttctttgttcttgagattaagacatggcccacagggtcctgcatgtcatgaacattcccacttctacagaaaagcagtctgaaatttgttcaaagggtcgccttctccctgttcattgctctttagtcattacggctatctcacagagccttcagaggcattaaagcctcccacttcagtgtctcacaagtgcttctcctgtgtccagaacacccctcctatacttctctacctgcctaacaagggtcaggtttcaccttatgtgtcatttgttcaagaaatcttttctaaaaactcagtcctggccataagatcctcttaaggagctataattgccttctaacttatttattcattaatttttgatgctgccaggtttartgttgcacatttgctagactggaagctccatgagggaaagaatgtgtgtgttttgttcactagcgtaaccacggccttacagagtacattgcacatacaggatgctcagtgacaatctcacccctgaatgattgtgaagcagcaaacttgcagtacggtgccatcactaagttcacaggctgctggctcaaattccagca

SEQ ID NO: 862324 - DNA, 601 bp, Homo sapiens
tacaaacaaatgtgctctgttattacttatcctgtcgattatttttaatctgtgtccatcctatctccactgtttccttttcttgtgcttcttgtgcagaaatggcttataatttttaaactttttctcaaacattttgttctgcccatcctttcactgcttttcttcaatactccaagatattgtcccagaagtccctaaggctgtgttcattttcttttcaatcttttcttcctctctgatgttcaggctgaataatttctattaatctatttaaaagttacatgactttttttgggtaatttcttattctgctgtaaagtttatcccatgtttacttttatttcaaatattatattttttcattttagaatttctatttttacaattaatttctatttctctgctgtgatttcatatcagtyaattaattataatcatattttcatttaggtaattgaggagagttataataactaatacctttacccacttattccagtatctaggtcgtcctgagctgctctctgctgattgtcttttctctcttattctttagatgttgagtaattttgtatcatagcttggacattgtgaatgt

SEQ ID NO: 862325 - DNA, 646 bp, Homo sapiens
cttttcttcaatactccaagatattgtcccagaagtccctaaggctgtgttcattttcttttcaatcttttcttcctctctgatgttcaggctgaataatttctattaatctatttaaaagttacatgactttttttgggtaatttcttattctgctgtaaagtttatcccatgtttacttttatttcaaatattatattttttcattttagaatttctatttttacaattaatttctatttctctgctgtgatttcatatcagtcawttaattataatcatattttcatttaggtaattgaggagagttataataactaatacctttacccacttattccagtatctaggtcgtcctgagctgctctctgctgattgtcttttctctcttattctttagatgttgagtaattttgtatcatagcttggacattgtgaatgttatgttgaattttattacatataagaccctgaattttcttatatcccttcaaagacttgacttttgtttagaaggtaaataacttcgttaaattcaacctgcaaactatctcttgtgaagcaactcacatctcaggtctgttctttcagacctggctgaactccttgaagtctgtcctgaacatgtgcttcaagggtcagccag

SEQ ID NO: 862326 - DNA, 729 bp, Homo sapiens
tttccaaatcttgggagagatgtggtctagatccagaaaaaggaaaaatcctcaagtggatcaacccaaaaatgtccttcctgaggcatattatggtcaaattgtcaagtcaaagacaagaaaattctaaaaatagcaagagaaaagtgtcaagtcacatacaagggaataattattagactaacagaagagttatttgcagaaaccttacaagccaggagaaaatgagataatcaaagtgatgaaagaaaaaaaattgtcagccaagaatactgctatacttggcaaagctgtgcttcagaaatgaggaagaaatagtttttcacagacaaaaactgagggaattcatcaccactaaacaggatttacaagaaattctcaagagaatcctacaactagaagcaaaaagatgataatcattaccatgaaaacatgtacaagtataaaactcattgttagagcagttacacaaagagaaaaagaatcaagccatatattactaccatcaagccacattactcctataaarccaccaaaccacaatgatgaacattaagagagaagaaacaaagcatttacaaaacaagcagaaaataattaacaaaatgacagtattaggtcctcacctatcgtaataaccttgaatataaatggataaattccttacttaaaagatatagactggatgaatggatttttaaaaattacccaactatatgctgcctaaaa

SEQ ID NO: 862327 - DNA, 647 bp, Homo sapiens
tgtactccttgtcagtcatattcataatttgatgtacattctcacatgccacatcaagttcttttggctttacttttcatctaaagaggcagtgctttcattgtctcaagtcgattttgtggtagatttagagttagaagcaaattataagaatcatttctcactgaatatatccataaacattatccacaaatttaatccaattacatctagagcagagtttgtcttctgttatccaaaaatcagatgccaggagtgattgtttasttatagatctaacaggaataccatgtgggaccttttttacttctctccagatattacttctctatatatttgaaaatttcccttattatcacaaacattattttcaatttttaattctggtcctcttaagaacccctatgcttgggttatgtatctcattctgtttcatttcgtccttccataccaattattttcaacccattggctagatggcattatatatttatacactatttcttttatattaagattttatacatataattgctttatatgaggttttgctctggttgtgtaaatctttaaggtcttattaacaatctggtggtatgatttatcatgccttctacatagcttaaaactttaattaactttaccat

SEQ ID NO: 862328 - DNA, 570 bp, Homo sapiens
gatgacacctctgtgtggttgggatattatctccaaggtataaatcactcagtgtcaatgagatagtaaatggtggcaggttgattagaaataggttcttttgtttctcaaagacttctcttcaatatttcgtaatgcactctgtcagatttggaggaaattaagtaagatatttgagcctaaattcttcatataccaaaagggcattatcaggctattgagaggatttgatgaaataatatgcatccagtattaactatatagcacatgctgctcaatgaamgctgaattgagttgaattgaagtgaactgaacactgaaatgaaacaaactgttacctttactggtgaatgcataatttccaaatcactgtgcaaaagacaatctttaaaaaaccttaaaaacaagtctcagttaggaccaaacatctcacttggccttatgagccccgaagggtagcattgcattgatcagtgtttgacggaaggtatagtatctggatgctcatttgcatgtgtgctaagggttaagagagagctaaagccagcctgctgcggtcacaacaaaaca

SEQ ID NO: 862329 - DNA, 526 bp, Homo sapiens
ctttgatggataagccagtctcctggtacttgcttagcgtctgtttttctccttgcatctgatcaactctgaatgtctttaaaactgcaaaatgctgaaactgcaaagctgagaacaagaatccagatcacaagaatcctataaatggcacagcctaagaagacagctggcctccttagatgacacttctactcccacataacscaaattctaatggaagggattcgtgtagaaaccacatcattcacagggacttgactgcatgcctatgttcttgatgagctaaactcctctggaaggatggaggctttctccttttgcctcagcccacactatttattgaataccataacaaccctccatttactcagaggaagtgctttgcatttgcaaatcattctgggaagccaagtgaattggcatttctaagttaaaaatgttttgtttttttaaaggatgcttatccatttaaatcctgaaacagatccaaatctttactcatcacattaaaaaagaagagcataac

SEQ ID NO: 862330 - DNA, 602 bp, Homo sapiens
aaaaaaagcctgaatagccaaagcaatcccaaacaaaaataacacagttggaagcatcacattacctgacttcaaattatactacatggctacaatgacctaaatagcatgatattagtataaacacagacacataagtcaatggaacagaatagagaacccagatataraaccacatacctgcagtcgacttatctttgacaaagttaacaaaaacatacattagggaatggacaccctattaaataaagtgtgctggaaaaattggattgccacatgcacaagaatgaaattggactcatctctcaccagatccaaaaattaactcaagatacattaaagacttaaaagtaaggcctgaaactataaaagtactaaaagaaaatctaggaaaaaagctttcctggacattgaccttggcaaataataaatgattaatacctcaaaagcaaatgcaacaaaaacatagacaaatgggacttaattaaactaaaatatctgcacaacaatagaaataatcaaccaagtgaacagacaacctgcagaatggtaaaaatatttgcaaactatgcatccaacaaaagactaatatccaaaatcta

SEQ ID NO: 862331 - DNA, 627 bp, Homo sapiens
ctctagaaatcagttaagagttgtagtatcccagacaatttcaaagacacaaacatccataatgaaatggtcaaatctcagaaaaaaactaagaaggcatatgaagaaatggggcaatatgagctaaacaaaggattaagataaatcttccraaactgaccctaacataaaggaggtatataaattacttgaaaaagaattcaaaatttgatgacttgaggaaacaaaaaagtagtcaacaaaatgaaaacaccaacaaagaggtattatggaacgtattaaaaagcaaagaattctagacatggggaatacaataactgaactgaaaaattcaccagagtggtttaacagcagacttgatcatggagaagaaagaatcagttaacttgaaaacaagtcattcgaaattatcaagtcagggaagaaaaaagcaaaaggaatgagggaagcaaagaaggcctaaaggacttatgggataccatcaagcataccaagtcatgaattatagaaataccagaaggagaagagagagagagagaatggaacagagagtttatttgaagaactaatggccaaaattctcacaaatatgaggaaggaaatgagaattcaattttaaggagttca

SEQ ID NO: 862332 - DNA, 627 bp, Homo sapiens
ctctagaaatcagttaagagttgtagtatcccagacaatttcaaagacacaaacatccataatgaaatggtcaaatctcagaaaaaaactaagaaggcatatgaagaaatggggcaatatgagctaaacaaaggattaagataaatcttccaaaactgaccctaacataaaggaggtatataaattacttgaaaaagmattcaaaatttgatgacttgaggaaacaaaaaagtagtcaacaaaatgaaaacaccaacaaagaggtattatggaacgtattaaaaagcaaagaattctagacatggggaatacaataactgaactgaaaaattcaccagagtggtttaacagcagacttgatcatggagaagaaagaatcagttaacttgaaaacaagtcattcgaaattatcaagtcagggaagaaaaaagcaaaaggaatgagggaagcaaagaaggcctaaaggacttatgggataccatcaagcataccaagtcatgaattatagaaataccagaaggagaagagagagagagagaatggaacagagagtttatttgaagaactaatggccaaaattctcacaaatatgaggaaggaaatgagaattcaattttaaggagttca

SEQ ID NO: 862333 - DNA, 627 bp, Homo sapiens
ctctagaaatcagttaagagttgtagtatcccagacaatttcaaagacacaaacatccataatgaaatggtcaaatctcagaaaaaaactaagaaggcatatgaagaaatggggcaatatgagctaaacaaaggattaagataaatcttccaaaactgaccctaacataaaggaggtatataaattacttgaaaaagaattcaaaatttgatgasttgaggaaacaaaaaagtagtcaacaaaatgaaaacaccaacaaagaggtattatggaacgtattaaaaagcaaagaattctagacatggggaatacaataactgaactgaaaaattcaccagagtggtttaacagcagacttgatcatggagaagaaagaatcagttaacttgaaaacaagtcattcgaaattatcaagtcagggaagaaaaaagcaaaaggaatgagggaagcaaagaaggcctaaaggacttatgggataccatcaagcataccaagtcatgaattatagaaataccagaaggagaagagagagagagagaatggaacagagagtttatttgaagaactaatggccaaaattctcacaaatatgaggaaggaaatgagaattcaattttaaggagttca

SEQ ID NO: 862334 - DNA, 602 bp, Homo sapiens
ttactatattgtgataagcaatcgtacaaataatttactgtctgtattaagaaaaaagatagtgggctacatccacttacttaactgagaaagttacatggaagctgttccaggagccagatacaggttgaggcagtggtaaatgtggactcttcctcactttgattctgaggtgatacagagccagaaagtcaggtggtcagttgtattartctttacttggatggttacagctttaattatctttattatagatctttaatgttaaattgagtcatcttacagagctatttagaatcgttttcttgatattgcctcaagtgtatgtgaatactgattcatatatgatgtggtatatcacgtgcaataataataccatgtgtgctatgaggcagcaggtaataaaagggatggtgggttttgctggataagaggaagatgaccacatgatatgctatgaatagcaggactgaatttaactctgtcttagtgtgggagagagctggctcatctgtctaggcctctgttatctgtaacagtgtaataatacttttcacagaagctaacttcctgacaagctcactgccttttctcagtgaggg

SEQ ID NO: 862335 - DNA, 575 bp, Homo sapiens
cccatgacacataggaattatgggggctacaattcaatatgacatttgagtggggacatggccaaaccatatcagttagcctgcattatctggccatttaatatatatttgtttgttatatgctacttagaggttttacatacaatcttctatgtgggctctagtttataataaaactaaaaatgaaaacctgtatttggttatgaaacataatttggactgayggtaagatgttagtaagaattaaacttttcttagcaaggagtgaatctatactctccacatttgaaaaatgaagaaataggttatttaggatttgaatttccaattgtaatattaagaacatacaaaaccaaaaatataaatagttcactttgggaggctgaggcgggcggatcatgaggtcaggagatcaagaccatcctggcttacacagtgaaaccccatctctactaaaaaaacacacaaaaaattagctgggcgtggtgacgggcacctgtaatcccagctactcgggaggctgaggcaggagaatggcgtgaacccaggaggcggagcttgcagcgagccgagat

SEQ ID NO: 862336 - DNA, 585 bp, Homo sapiens
tcctcatttttctatgtaaatagagtgataagctgaataaaaggaatggatcatctgtaaagtttaagaattaaatttctaagatattgaccctggtcaattaattcatacatgagtcttaatttataatggttgctctattttagttctgttcataggtagaaatacaaaccctgaagaaaggacttccagtgacamcctccctgaacctctccatgcagttccttctactcagcactcagccttattgcagagaccgacacaatacttaagagtccttcagatacctactcatctcatgaaaggaatttgcattgtgaggtctctatacctgggattcacatctctggttcagaaacatctaagttgcttctaccaggttcttgtttctttggtcacatccacccagggctcctctgatgtcagctagtgggactacattttggataaattgttaagaagttatctgttttacacagtattttttgttggtttcaaaggaaaatattcactggattcttagatctggtacttggtgggagcacagactccagagaaatcccatacacctgaccggggtggggc

SEQ ID NO: 862337 - DNA, 667 bp, Homo sapiens
aagaacaggaagtgtattacaatgtcctttgtctccttatagtaaacgataaacatgtgtatgtcaggcagtgggctgtgtttgcagcattttctatgctatctcaaatgcatatccattggttgcataatgagtgggaaggggaacagctacatgaggaagcgtgatgagagtcctccatattgctggcagtagtatggaagttgtcacctagtttggcttcttactcttcttaaagttcttataatcatgtgaagtagatggcatcataattgccactttaaagttatttattctaattgctttcatgaatgatgtgttctcaagcccaaaaacatttttagttttctctgctaatattattttatatgaatccttttgccctcttttccatgtaatgaggatctgttcctacttctctaaaagtagccgagtatcagattgctaacaagctctcaatagcaaaagagtacagtatttgcactcacttataggatcttgargaagagaggaaattaaaccaatgttcaatataaagattttaatagctttttctctgatgagctaatttctatcacttaagaataaaactatatatgagtagctgctttaggtaaaaagcagtgtgttaggtgtgcagaaagtctgcatggaaacttgatttagg

SEQ ID NO: 862338 - DNA, 639 bp, Homo sapiens
ctatattctcagggctacatgatatctgattgaattttggatagcccatgactgtcctctcacagtcactatatataagtttattctattgacaacatcttaacagtgatgacataagggagaggacacattagtgacactgaggactaattttcttaaaagtcagtaaagattctagtgtatactatctttacaatggctcaagctttaatgttacacaaatggttaattttttttttccaagaggtaaaacagcatccctcccaggatatattaaagtagggaacagtgaacagacgtaatccttcctttaaggagagctttgctacagaaacaaggcaaaggatatcagcacttaaaagyaggaaacaggaaagtctctcttccctgcccactgatttgcatttcaacatctgcccctcaggtggacagctgagggaagtaaaacaacgtattcccagggataaaaagcatttgaataggaaatggattccagctcctggcattgaaatcaatttctcctttgttctaatttctccatctaggataagcatgattttatgattttagtggagaaaaacaaactgtgaaatattttaaagaggtttattgtgagccaataggagtcactgtggccca

SEQ ID NO: 862339 - DNA, 603 bp, Homo sapiens
tcaccctcaaataattctgtactcagcagcattcatttcctatttcctgctctgttccagcccctgacagccaggaatctattttctatctctacagatgtccatattctggatatttcatatgaatggaatcatatagtacgtggtcttttgtgtctggcttctttcacttagmataatgtcttcaaggttcatccatgccgtagcatggatcagtgtttcattcctttacatggctgaataatcttctattctatggatagaccacgttttgtttatctgttcatcagttgatggacatttgggttatttccgcttttttggctattatgaataatgttggtatgactatgttttgtatcagtttttgtgggaacataggttttcacttcttttgggtataaccttaggagtggaattgctggcttgtatagtgattctatatttaacctttgaggaactgcctttctattttccaatgtggctacactattttacattcccactagcagtgtatgagggccgcaatttcttcacatccttgccaacatcgttcacatcttttgttattttccatttgctttttttttttttatcatagcc

SEQ ID NO: 862340 - DNA, 676 bp, Homo sapiens
tctttctgttgtgtcttcagcctctcactctttactggtttcttgccattagcattctcatttgttaaagtgtcttcttcatgcatatcctccttctagcttctgctcaaattatcctttcccctaaggagaatttttgagaaaattgtctatgcttgcttatcaccaattcctcacctccaagttaccctcaaccatatattagacttttacccccaatactgctgtgaaactactcttgataaacttaccaacatcattcctattatgagatatatcttagttgttaatgtttcaatagtatttgaagctattgaccattttttcctttctgaaacaatcttttctcttggcttctgtgataccatgcctaactgtttcattgtcctttgcatgctctgtctttgcttaaatattgccactccaaggaattgtaaggctcttatcaatgtagtctagtctccacattctttttggatgatctcatctacacccatggttttatacacccatggctttactttctgtatattgrtgacttctagctgtgagctcactcctaagcttgaaacctatatatttaattccctatctgatatctctttgagtgttttgtaggtacccagctcgaactaggcatgtccaaactgactgatgatagccaaatgatcaaagc

SEQ ID NO: 862341 - DNA, 486 bp, Homo sapiens
ctcagatgagcacatcgcacaacttcagtaaacacactgctcatgtggcccctctcaagtgctgacaggccactgtgtgtttggacagcccccgcaaggaaagaatcaagggagaggaaacacaaaccctggaaccatgccagtgtataaaacccctatttggccaggwgtggtggctcacacctgtaatcccagcactttgggaggctgaagtgggtggatcacaaggtcaagagatcgagaccatcctggccaacatggtgaaaccccatctgtactaaaaatatataagttagctgggcctggtggcatgcgcctgtagtcccagctactcgggaggctgaggcaggagaattgcttgaacctgagaggcagaggtggcagtgagccaagattgcaccactgcactccagcctggtgacagagcgagactccatctcaaaaaaaaaaagaaaagaaaattcaaggattggatggggcacttag

SEQ ID NO: 862342 - DNA, 709 bp, Homo sapiens
agatatatttggtattcacaactccattacagtataagtgtgttctgtgttttattacataactacttttaccggtgagtttgatatttttgtgttgctccttagtgatcttctcctttagcttgaatgacacattttagcattttttttttgtaaagcaggtctagtggtgatgaattcctttagcttttgtgtgtctgagaaagttttatctcccctacatttttgaaggacaggtttgctgggtataatactattggcagttttgttatttttcttttagctctttgaatatattatcccatttacttctggtcttcagggtttctcttggaaaaatctgctagtagtsttatagaagttcctttgtatgtaacaagtcactttcttatgcagatttttcaatattttctctttgttttcactttagaaacaatattttaacttatttataacaatttgattataatgtgtcttattgtgggtctctggattcatcatattaggtgtccaatgaggttcttggatctggatttctaatttcttccctagacttgggcagttttctgtcattatttctttaaatatggtttgtattcctttttcttttctccctctggtactctgataatgcatagtttattcacttgatggtgttccataattcccttaggttatcttcagtctttttcattcttttttcatttag

SEQ ID NO: 862343 - DNA, 607 bp, Homo sapiens
tgaggaaggagaattgcttgaactcatgaggcggaggttgcagagagccaaggttgtgccactgtactccagcctgggcatttagtgctggatatgaggacatctgctcaattgttattggatatagttctaagcaaaattgtaaagtaggcagagcctacatctccacttccagtctagtcgttctataatttcatcttttttggcctcttctcctaatcattcaagaaccttgtctccttatgttctcttctactgtgttcttctacctctttcccctgtcctagccttgagcctgcaccattgtagtctagtcctcaraaaaggagcttatagataatggtaacagtacaacatatgttatattcaactttagagagaaaagactgactatggacagggtaactggatatgtgtttgggatctcattcccacctcttccaccaacagtaccctggtttcccatgaaagagtttgcttcccactcattcttggtcacgtaatttgtgttggatggaaccccattcccagctctagggatgagccataagatcactttttgctatctggagtcaagtgcctatggaaggccagagttttagtggaa

SEQ ID NO: 862344 - DNA, 559 bp, Homo sapiens
actgggagccctgagcttgtttcctacaactggacattctcatctggggatgatgggagatggtggcagatcatcaggcattagattctcataagaagcatgcaacctagatcccttgcacgcgcagttcacaaaagggcttccactcctatgagaatctaatgccaccactgatctgatagcttgggcagtaatgtgagcgataaggagtggctgtaaatacagatgaagctttgctcrctggcctgccaatcacctcctgctgtgcagcccaattcctgacaggccgtggagcagtacaggtgcatggctccaggtgttggggacccctgctgtacataatctttgcaagggcacatgaatatactaaactctcttcaccaagatacactatattctgggccataaaacaagtctcaataaatacaaaggattgaagtcctaccaaggattggaatcatatagagtatgggggttttgtttttgttgttttatagagacagactttcgctttgttgcccaggctggtctcaaactcctggcctcaagtgatccttcc

SEQ ID NO: 862345 - DNA, 628 bp, Homo sapiens
aaaaaaaaaaaaagattaaagatgaaaaaaattaagattccttctgtggtgattgttgacagtaatctatgttatgaaatatctttggggccatttccaaaaacctatatgatgcttttaaaggagaagatattattttcttccctatatagctttacttcaattcttgaactcttcttgtcatttatggatgattggcaatgtatctaattcaaagcaagtttgagaaaaggagacaggtattacaattagttagtggtggagataaagtagaggggaattaggaaaatgaggatcagttaaatttttttagtaatgtgactgaagaattgtgattttrcagaaaatgtgtaactatgaattgccataagatggtcaggggctaagacagtaagtgtcttatttcagatattactgcctcatgtcttaccctttcaataaagtgagaatacgtaggttgacaataatgtgatatcatataataataattgaaatgtattatcttacccgaattgttatttttattttttattttatttatttatttatttattttttgagacagagtctcgccctatcacccaggctggagtgcagtggcaaaatctcagctcactgcaacctcttc

SEQ ID NO: 862346 - DNA, 628 bp, Homo sapiens
aaaaaaaaaaaaagattaaagatgaaaaaaattaagattccttctgtggtgattgttgacagtaatctatgttatgaaatatctttggggccatttccaaaaacctatatgatgcttttaaaggagaagatattattttcttccctatatagctttacttcaattcttgaactcttcttgtcatttatggatgattggcaatgtatctaattcaaagcaagtttgagaaaaggagacaggtattacaattagttagtggtggagataaagtagaggggaattaggaaaatgaggatcagttaaatttttttagtaatgtgactgaagaattgtgattttacagaaaatgtrtaactatgaattgccataagatggtcaggggctaagacagtaagtgtcttatttcagatattactgcctcatgtcttaccctttcaataaagtgagaatacgtaggttgacaataatgtgatatcatataataataattgaaatgtattatcttacccgaattgttatttttattttttattttatttatttatttatttattttttgagacagagtctcgccctatcacccaggctggagtgcagtggcaaaatctcagctcactgcaacctcttc

SEQ ID NO: 862347 - DNA, 634 bp, Homo sapiens
tggatcatatggtaagagtatgtttagttttgtaagaaactgctaaactgtcttccaaagtggatgtatcatttttcatactcaccagtaatgaacaagagttcctgttgctccacatcttctgcagcatttggtgttatcaatgttttggattttggccattgaatgggtgtgtagtggtatctcactgttttaataattccataatgacatatgatgttgagaattttttcatatgcttatttaccacttataatcttctttggtaatgtgtctgttcagawcttttgcccattttaaatcaggtcattcgttttctttattgcttagtttatgagctctttgtatattttgagttacaattctttttcagatgttttttgcaagtatttttcccattctgtgctcatcttcacattctcttgacagtgtattttgcaaagcagaagtttttaatcttaataaagtctagcttatgagttatttctttaatggattgtgcctttggtgttggagacgaaaagtcattgttcccaaggtcacctagatttcttcctatgttattttctgtaagttttatagttttgcatttcacgtttagatctatgatctatgttgagttaattttttgtaa

SEQ ID NO: 862348 - DNA, 636 bp, Homo sapiens
agagtcacactgaccatattcacagatgggcatgtaaccccaaatgccagtatgtaaccatacactgacaactataactatcacttggtcctaaatcctcaagttgacacgaccagcccattttctccctgatactgaagggaagccataacatcatcgggagcatgaagagtgtttggtgagccctgaaccaaggcgaggggtgttggtattacatttcaattgtcaaatcactctaggttgcaattttcttgatttccttgtgcattcatctccaacagagacgcagtccctttagaaattgkagtccatggggtggatctctctacccttaactgtgttagggtaatgctgacaactcacgcctctctgaatgattttcttagggctttcatacttagcctctgctgattcccctagaagttcagttccatttgtcaagtactggtctggtctgaaagccattctttccattacagtaacttcacacatttctgctctaattcaattggaattgagtttacagttggagcagagaaaaaccttattcactattatttgttttccctcatggcaactctcaagtctattgttttaaaataaagcaataaaataagccacccctaaaagtaatag

SEQ ID NO: 862349 - DNA, 655 bp, Homo sapiens
attgatttgtgtagtttaaaaatagcccacaaagaaaactccaggcccaggtagctccattaggaaattctatcaaatatttaaagaagaaattaaaccaattctacacaaactttgccagaaaaatgaagagtaaagaacatgttctaagtcattatgaaagatmagaattattctgatatcaacaccacacatacacattccaaaaaaggaaaattacaatatatttcatgcacataagtagaaaaatcctcaaaattttagcaaattgaaagtaacaaaatataaaaagataacaaatcataaccaatttagggtcaatgcaagtttagtttaaaattagaaaaatcaagcaatgtaattcaccatattattagatagaaagaaaaatccatacggtcatctcattgcaagctgaaaaacatctgacaaaatccagcattgattcctgctaaagattctcagcaaactagcaatagaagggaacttcctcaaccttataaagggcatgtacaaacaacccacagctaacatactgataaaagaccgaatgtttcccctaagaccaggaacaagacaagaattccactctcgccatttctatgcgacatagtatgggaggttctggtcagtgcaaaaaggcaagaaataagag

SEQ ID NO: 862350 - DNA, 612 bp, Homo sapiens
aaaagaaactggggtgaaacaattaaatgctaagtctcaaataaacatttattcatcagaagagatcatctggatttctaaaagatgttttaaatacacaaaacattaagagttaagagtgatgagaaaattagtacttactccacctatctccacctacttatatattgtttgaaaatgttatgtttcgtcctggattaaggcatttgtattcaattcgataaccaaaatgtcccatatgaattatgttctctgtattcaatatactcttccagttattttgttcatttttatattcttattcawctttttgttcatctttcattcatttttactttttattttattcatttttattcatcttttctacatttttattcatcttgtgtgctggatttcatggtacctttttttaggaaaggtacatgggtgatctcttctctgagatttgctcacttgagaatgtctgtctatggccttagtatttgaaagaaacattggctgggtataaggttcctgggtctgccttccttccctggccactggtcagtcacctccagccttgagcacagccccagctcatccacttctgccacttcactcaccttggag

SEQ ID NO: 862351 - DNA, 679 bp, Homo sapiens
tgttttaatatacttaatctttgattgttttgggatgtattttggtataaattgtggagtgcagtttcattcttacttttttccaggtatctacttagttgtccccacgttattttttggattcatctttccccattatttgaagtgtcactcgttatatactaaatttctgcatgcatacagaccaatttctaatctttctactatttttcagctaaatggcttcatattatttatttagctaatcgcctattgcttgtgktttcctattttcattattacaaatgaggctgtaataaatatcttttaatatgtatctcttcttttttaggatgaattcctacaatggaattgctgggtccagggtgtgcacacttaagaaatatttttattattgatattgtcaaacatacccaaagactgagtttcaacagttttcaacattttgctgattgtatttcattgatcactcctgcccccaccattttttttcatggaatattgtgaagcaaaacccatatgtcatatcatttcatttataaaatacatcagtctctctctctagcttaaatcagcatatttctcataattaaatttctctagttatctcaaaaatgtgcatttaagatttgctctgaataaacaaggtctgtatttttgaaggctgttattagttact

SEQ ID NO: 862352 - DNA, 624 bp, Homo sapiens
cccattcctctggtaggtcctgaaatctaatccttctctgcttagcaagatgagaatgcccaaaactcattttgtttaacatgttcctttgttttctttacttcttttgaatgggtagttagttttagaggcttggttatatttaattccccagaaggcacgcaatagctgattatcattctctcgtgatgaaaatagcagtagttctttcatgatctttgcctgggtttattcattaagggttgcaaaataactgtactccaattctgtcatcttctctttgttttaaagaagaataatgataagttaatatatgtaataacagtaaactgtaaaccatgacttaaataggagagttgcaggtaagctttaacagagaggttgtrtgaggtagttgaaagaagatagatctagaaatcaaaagagcagagttctgttcctggctctgttaatttactaagttatatgaccttgtataactcactttttggacaccttatgtcacgtttgaaaagtaaagttttgggatctcacatttttttcagttctaaacttacatgattaaacacatctgcttaggtcatacagtctattcagatggaattgtagtccaaatttatagtt

SEQ ID NO: 862353 - DNA, 641 bp, Homo sapiens
agggaaatgcaaatcaaaaccacaatgagataccatttcaccccatttagaatggttattatcaaaaaggcaaaaaataagggtgttggcgcacctgcagtcccagctacttaggaggctgaggtgggaggatccattgagcccaggagcccagctccttagctcaagctgcggtgagctaagatcatgccactgcactccagcctgggtaacagagggaarccctgtctctaaaaaaaaaaaaaagacaaaaaataaggttgagcgtggtgactcaagcctataatcccagcactttgggaggctgaggcgcgaggattgcttgagcccaggaatttgagagcagcctgggcaacatagagacctcatctctacaaaaagtaaaaaaattagccaggtgtgatagcagacacctgtggttccagctactggggaggctgaggtgggaggatctcttgagtctatgagatcaaggctgtagtgagcagtgatcataccactgcactccagcctgggtgacagagtgagacctcatgtcaaaaaaaattagtatatatacacaatagaatactatttggccataggaaaaaaaaatgaaaatgtcatttgcagcaacataaatagagctagaggtcactatg

SEQ ID NO: 862354 - DNA, 640 bp, Homo sapiens
gaaataatttagtcccaaggtccttttaaagggttgattaagaaaaacttaggagcatgttgaatatggaatatctacaagcaaagtcaaagatgctattagcttttgagttcaaataatttctataaattactgctattattcaaactcaaaaaaagtagaaaaactacattttggctttggcaaaattaaaatattgcagatgtcatcatctcagagccatcatatacacctaaaaatgcacatattcaaatcttgtctcctttttacagggtcacttaaataatgtatgatgggatgatattcttacctgtattataataattataataaaaatagaagtttcattctttaaattttatgtcagaatttgagtcattggacatttgtcttcacagtaatatataacaacattttaaaamcttagattgtcaaaatgtaaaccaggcccaaatttgattgaaaaccaaattaattaattttttttggtaaataaaccaatgtatgataagatttcctatctttaaatttatattaaagggcattaaatgatgggcatctgttatgagatggtttatttgtacatatatatatacacacacacgtatttgtactttactatatactgttattatatcaa

SEQ ID NO: 862355 - DNA, 612 bp, Homo sapiens
aaggaaaacaaaaaggtacataatttctacacaattatgtagaaaaatatgttcaagaacagaatcatgacccagaatttttttatgttttaggttgttggtatgctcaaaatttaaaaaataaaaaagaaaggaaaaaatgataaaataaagagaaaataaaaaatttaaaaattgcttcatgatttgccactttttgtttgtgtatttagttaactccagtccrgaggtagttaagagtctggaaaaaattctttatttttcaatacagactaaagttttatcttatttgtatctacttctattattttgaactataagcattccccacttatcagcaatgctaaatgaaaagaggagaaagctagaaaagatgatggttacagaaaaaggtagaggacgtcacatcaaatattttgttagattttccaaaaaagaagagctaatttcataaaaggtgaatacagaatgtaacttcccttagcctgtatatgtaatatgtatattaggatgagccagcacaaggtaacacaatgggtctctgccaactgtaccaagtggggctgcatagtaattgagaggccattttaagatcctattccatttccatta

SEQ ID NO: 862356 - DNA, 610 bp, Homo sapiens
tctttaggttagttctaaaatctatactgtgaaataatttatgggctttcacagaattgtactaagttatagtggaaaacgcaatgagccaggcaccaggcttagctctggttctctggtcactgtttcatatctctgagcctctggtcctaaaatgtcagcacatgtaaggatatttaacctcacaagttaatttggagggttaaataatttatttaaaacattttaaaagcagcaaaattttaaaaatgctatttatattctattaattatgttagtattaccagtatagcaaaataatatggaaattaacacaggttgttgccattattttcaactttcctaacatagtgtcaaagaaatattacattgagatgtttatatamatcactaaattacaaactttttcacaaatacgaatttatcataggcatttaaatattaaaattatatgaaaagacatattctattcaaaaacttagaagaatcattaaagaaatacccagatatatgtgtattttgatgaaaaattaggaaataggaggagccaagatggccgaataggaacagctccggtctacggctcccagagtgagcgacgcagaagatg

SEQ ID NO: 862357 - DNA, 610 bp, Homo sapiens
tctttaggttagttctaaaatctatactgtgaaataatttatgggctttcacagaattgtactaagttatagtggaaaacgcaatgagccaggcaccaggcttagctctggttctctggtcactgtttcatatctctgagcctctggtcctaaaatgtcagcacatgtaaggatatttaacctcacaagttaatttggagggttaaataatttatttaaaacattttaaaagcagcaaaattttaaaaatgctatttatattctattaattatgttagtattaccagtatagcaaaataatatggaaattaacacaggttgttgccattattttcaactttcctaacatagtgtcaaagaaatattacattgagatgtttatatacatcactaaattacaaactttttcacaaatacgaatttatcataggcatttaaatattaaaattatatgaaargacatattctattcaaaaacttagaagaatcattaaagaaatacccagatatatgtgtattttgatgaaaaattaggaaataggaggagccaagatggccgaataggaacagctccggtctacggctcccagagtgagcgacgcagaagatg

SEQ ID NO: 862358 - DNA, 662 bp, Homo sapiens
ttaatttttacttcttgagggaataactagagtttaaatgtaatgactgcataaaacaagtaaatgtcataatgtggacaaaaatggataattcaaacgtgcattgctatcggtcactcgtttttgtgtgagatgattagtcagtaaaaatttagaattaaagtgtagattcttcttttaaaattcccattggttttatttaatgctttgagtgatgggctagtaatctagaaattaaaactttgtttttgattctgccttatgttttaattatttatgagactcctctataggcaggtctctgttatcagtcagtccactgataagtgctcattaaatacctatgagcggtaagcattgtattatcattagcaaaatgaaaaagaggaggcttctctgtttcatacagttgaaataytaatttttcaggcagtcttgctcaattatttactgtaacacagcacatgtttcagagtgttcttcaaataaccatatttcacatggctacaagaaagcacgtgttttttaaaaaaagaaagcacatgttttctgacatttacaaattatatatactacattttccagtaacaaaacagtggaaaatattcacatatggagaaataaatagtgataaaccactttgtcacccactacctgttgca

SEQ ID NO: 862359 - DNA, 619 bp, Homo sapiens
cctgacctcgtgacccacccaccttggcctcccaaagtgcctgtaataggtatgagccaccacgcccggccatattctttatcttgatcttgggtggtggttgtatgaatgtgtacagatgtaaagatttactgagctgcatgtgcactgaagtcttttgttgttgttgttgttgttgttgttgttgggggatgggggtctcagtacattaccaacccaggctgatcttgaactcctgagtgcaagcaatcctcctgtytcagcctctcaagtagctgggattacagatgtgccatgcaccctaaaaatttgccaatttgttaactgacacagtattttaaaatttgttgtttctgtcttgaatgagattgcctcttgtgttttgtcattgagtatgatgttgactttggccaagagtttgtagtgtaccaggtgctaggaatatagtgtatttgtgctagaaatacagcaatgaacaaaacaaagtccttgctgtcttgtgacttacattctcgaagggaaagagagataaatatcgaatctcacttatcgaatgttttacaaagtgctaggcactgttctaattaattagatgtttggttaactcattgaagtctca

SEQ ID NO: 862360 - DNA, 643 bp, Homo sapiens
ggggtgggtagaggacataaaatatactaaggtagactgaaattgcttgtagtggtaggaattttagtaattctgttatggaatctgttgtcagcatttgctttgaaaggataaacatgtgtttcaggattgcatrccttaagttacatactgtataaatgtcttttcttaaaggatttaaatggaatatgtcaagaaaaatatttattgtgttcttaataatgtatgacttcctagaattacatctttattaatcgtagaggtttttgaccagttatattttatattaaaatttatccagcaggttttttgaatgatagaatcttcccgttaaaataaagaccctagatactatgaaatttctaaagaagcttaattccaattgtttttttattttgtgacatgaattactgttcaaaagtcattgttcaattatttgagtcaaatgaaaaacatagactgtttctattacagtttaatctgtgactaatatcttattttcagtgaaaaacttaaaagaggttttgatttcccaatttacaaaataaattagttcccggacaatcatttgaagaacttttgcgatacaaatcttttgattaactaatgtgcattattttccatgaatcttggtgttttggtg

SEQ ID NO: 862361 - DNA, 567 bp, Homo sapiens
gtcagctgtgtctgtaatactttattttctggaatgagatctgaagcacgtgggaaaatatcaacagatttgttaaatctaggtggtagggactgggtctttttttgttttcagtttttttttaatatttcatattttaaaaagaaaaatagcacaaartaatgaaagatagtgctcagatcaagagcagcagtgctcagtgccattctggtcatcgaaacctgagtaacagaagagtgtgcatgtgccctaagtatgtaaagaacatcacatttgcaagttagaagggagatggggaaggtgatgatagtctgtggttgcgaagataggctgggtaagatgaccttgaaacatagcagtcatccaaaatcatgagtgtgaaggtcaaaaagaggtgaggatgacctgcttacgccaactgctgtggcatctgacttttggccatcagtgtctttataaaaaagacactcatgggaaattgcaagtatgaatttttgagggtgaaatgaatgtgaacaacagcacatttttcatgagtcactgatggagttgctactaggaatccat

SEQ ID NO: 862362 - DNA, 567 bp, Homo sapiens
gtcagctgtgtctgtaatactttattttctggaatgagatctgaagcacgtgggaaaatatcaacagatttgttaaatctaggtggtagggactgggtctttttttgttttcagtttttttttaatatttcatattttaaaaagaaaaatagcacaaaataatgaaagatagtgctcagatcaagagcagcagtgmtcagtgccattctggtcatcgaaacctgagtaacagaagagtgtgcatgtgccctaagtatgtaaagaacatcacatttgcaagttagaagggagatggggaaggtgatgatagtctgtggttgcgaagataggctgggtaagatgaccttgaaacatagcagtcatccaaaatcatgagtgtgaaggtcaaaaagaggtgaggatgacctgcttacgccaactgctgtggcatctgacttttggccatcagtgtctttataaaaaagacactcatgggaaattgcaagtatgaatttttgagggtgaaatgaatgtgaacaacagcacatttttcatgagtcactgatggagttgctactaggaatccat

SEQ ID NO: 862363 - DNA, 681 bp, Homo sapiens
acaatgcatagaaataacagcagtaagttacctggagtggggtgagcattgatggaagaaccgggaaagagaggttttctttggctttatactttgtttgtctgtttgtttgtttgtttataagtcagggtctcactctgtagcccagggtgatcgtgcagtggtacaatcgtggttcactgcaacttcagcctcctgggctcaagtgatcctcccacctcakcctctcaagtagctgggactataggtgtgtgcaaccacacctggctaattttttaagtttttgtagagacaaagtctcatcatgatgcccatgctggtcttgaacctctgggctcaactaatacttttttataagaatatatttatacattacttgaatgactaaaaaaatgtataagaagtgttaaaaggatcatcagcagttatagtttatagttgcagttatcagtttccttcttttagtaaggagattgtatctctttgactctctccttggaagcaaatattccttacggctttgtatcttctaatttgtagttgttccctcagtgttttacttgagtaagaaatgaaactgtcttgacagttcttctaacaacagtttaattccaagttcaccctaacctggaaagaactctgtgttgagtgtcactggttggtgtatttcttaattacatc

SEQ ID NO: 862364 - DNA, 575 bp, Homo sapiens
tgggaccacaggtaccagccaccacgcccagctaactttttattttttgtagagacaagggtctcactatgttgcccaagctggtctcaaactcctgggatcaagagatccacccacctcagcctcccaaagcgctgggattacaggagtgagccaccaagtccggcctggtgtgggcatgtatttattttgagatagagtcttgctctgtcacccagactggagtacagtagtgcaatctcagctcactgcaacctctccctcccaggttcaagccattctcttgcctcagcctcccgagtagctgggattacacatgcgcaccaccacacccggctaattttgtttttagtagagatgggrgtttcaccatgttgcccaggctggtctcgaactcctgacctcaagagatccgcccgcctcggcctcccaaagtgctgggattacaggtgtgagccaccgcacctggcctagtgtgggcatttagaggcttctgagagaggtgacatctggctagatgttgggggcgggagagttctctatgtgagagttctctaggcagagggaagtaggtg

SEQ ID NO: 862365 - DNA, 651 bp, Homo sapiens
aataaaatgtcatgtaatgtcagaaacataagagcatattttaattaaatctttgaagaccttccagagaatttaagtcttctctatctggcattaggctggaaaaggataagaagcagttggatgttttcaactctttcctctatttagtccctaccttccttattccagaatactttattttagtcatttggtactcaggacatatgctattaggctggatttttttttcctttatagagacagggccctgctctgttactctggctggagtgcaatgatgccatcacggctaactgcagcttccaactcctgggctcaagtgatcctcccattttagcttcccaaatacctgagactacaggtgcgtatcaccatgctcagctaattttttaattcttttgtagagacagagtcttactatgttgcctagactggtcttgaactcctggattcaaacgttcttctcacatcagcctccaaaagtgctaagattacagacaygagccaccacacccagccagaattgattcatttctaagaaccgtgacatgtttattctgatacttccctgtatttactctgatgcttcaccctgttggtgggtgaccttttgcatttctctactccataatttaagtgagcacagtt

SEQ ID NO: 862366 - DNA, 621 bp, Homo sapiens
gggtgtggatttgtttctttgttctctattgtcttacattggtctgtgtgtctgtttttatgaaagtacactgtattttggttactacagctgtgtagtataatttgaagtcaaataatgtaattcttccagttttgttcttgttgcttaggatagctttggttattctgggcctttcgtggttgcatataaattttagagttttttttttttctgtttctgttaataatgtcattggtattttgatagggatttcactgaatttgtagattgctttggatagtatggacattttaaaaatattgattcttccaatccatgaaatcggaagctctttccatttttttggtgtcttcttcaatttccgtaattactgttttgtagttgtcattataggggccttttgcttttttcattaygttaattcttacatatttaattgtggctattgtaaatgggatttttatttcttttacagattgttcactgttggcatacagaaatgctactaatttttgtatgttaatcttgtatcctgcaacttttttgactttgttcatcagttccaatagttgtttgtggagtctttaggtttttccaaatataagattataacagctg

SEQ ID NO: 862367 - DNA, 657 bp, Homo sapiens
ttttggttggtaggctattaattactgcctcgatttcagaacttgttattggtctatttagggatttaacttcttcctggtttagtcttgagagggtgtatgtgtccaggaatttatccatttctcctggattttctaacttatttgcatagaggtgtttatagtattctcttacagtagtttgtatttctctgagatcagtggtgatattaacttttatcactttttactgtctatttgattcttctctcttttcttcttcattagtctggctagcagtctatctattttgttgatcttttcaaaaaaccagctcctggattcattgattttgtgaaggctttttcatgtctctatctccgttagttctgctctgatgttagttttttcttgtcttctgctagcttttgaatttgtttgctcttacttctctacttctttttattgtgatgttagggtatcgattttagatctttcctgctktctcctgtgggcatttagtgctataaatttcaatctaaacactgctttagctgtgtctcagagattctggtacattgtgtcttttttctcattggtttgaaataacttatttatttctgccttaattttgttatttacccagtagtcattcaggagcagatggttcagtttcca

SEQ ID NO: 862368 - DNA, 597 bp, Homo sapiens
tctgcagagagatgtgctgttagtctaatgggcttccctttgtgggtaacccaacctttctctctggctgcccttaacattttttccttcatttcaatcttggtgaatctgacaattatgtgtcttggkgttgctcttctagaggagtatctttgtggtgttctctgtatttcctgaatttgaatgtcagcctgtcttgctaggttggggaagttctcctgaataatgtcatgaagagtgttttccaacttggttctcttctcccgccgctttcaggtacaccaatcaaatgtaggtttggtcttttcatatagtcccatatttcttggaggctttgtgcaatccttttcttttttctctaatcttttcttcacactttgttccattaagttgatcttcaatctctgatatcctttcttctgcttgatagattgggctatcgatacttgtgtatgctttactaagttcttgtgctgtgtttttcagctccatcaggtcatttatgttcttctctaaactggttattccagttagaaattcctctaaccctttttctaagcttttttcaaggttcttagcttccttgcattgggttag

SEQ ID NO: 862369 - DNA, 631 bp, Homo sapiens
ttcaggagcttttgtaaggaaggccgggtggtgacaaaatttctcagcatttgcttgtctgtaaagcatttcatttctcctttgcttatgaagcttaagttggctggatatgaaattctgggttgaaaattatttaagaatgttgaatattggccccactctcttctggtttctagggtttctgcagagagatgtgctgttagtctaatgggcttccctttgtgggtaacccaacctttctctctggctgcccttaacattttttccttcatttcaatcttggtgaatctgacaattatgtgtcttggtkttgctcttctagaggagtatctttgtggtgttctctgtatttcctgaatttgaatgtcagcctgtcttgctaggttggggaagttctcctgaataatgtcatgaagagtgttttccaacttggttctcttctcccgccgctttcaggtacaccaatcaaatgtaggtttggtcttttcatatagtcccatatttcttggaggctttgtgcaatccttttcttttttctctaatcttttcttcacactttgttccattaagttgatcttcaatctctgatatcctttcttctgcttgatagattgggctatcgatacttgtg

SEQ ID NO: 862370 - DNA, 597 bp, Homo sapiens
tctgcagagagatgtgctgttagtctaatgggcttccctttgtgggtaacccaacctttctctctggctgcccttaacattttttccttcatttcaatcttggtgaatctgacaattatgtgtcttggtgttgctcttctagaggagtatctttgtggtgttctctgtatttcctgaatttgaatgtcagcctgtcttgctaggttggggaagttctcctgaataatgtcatgaagagtgttttccaacttggttctcttctcccgcygctttcaggtacaccaatcaaatgtaggtttggtcttttcatatagtcccatatttcttggaggctttgtgcaatccttttcttttttctctaatcttttcttcacactttgttccattaagttgatcttcaatctctgatatcctttcttctgcttgatagattgggctatcgatacttgtgtatgctttactaagttcttgtgctgtgtttttcagctccatcaggtcatttatgttcttctctaaactggttattccagttagaaattcctctaaccctttttctaagcttttttcaaggttcttagcttccttgcattgggttag

SEQ ID NO: 862371 - DNA, 644 bp, Homo sapiens
gtaataacttcctgcagaatgagaacctaaatctaaattatttgtctgcattgatgcaaaacatgagcaatcaactggggatctgagccaacatgtttctgagattgaggcctaacccacctccacaaatccatccctcacagggagaaattgagacaggtgagctcataagttggcaactcagtttactttgcttttttctatcccrttgtcttgattctgttctccttttacaggagatggcaaaaaagttctattgaatgagtgaacagtgaaatagggaactggtgatacttttgatttgccttatttactcataaagataggctccaaaatgagaccccctttcaggaaagagataaggaagtttgaaatatctctcactctctaacaaaattagtcttttaaaaagttatcttaaaactagagacatgtttgcaatctttgagaggctttttcctcccattccttttaacattatatatagtacaaattctgtatataattcctctttgaatgtctaggatccacaaagaatatctaataattgtcatcataatattatggtcctgactaagggtatgcagatgcttaattagtgacttttatcctgtctttgcagtttgctgctaatggcctcaagt

SEQ ID NO: 862372 - DNA, 603 bp, Homo sapiens
caatctcgaaaggcttgaatcttgcccgcatatgcatattttaaacttactgaaagtaaaattttgtcacaaactcttctggttatgcacctctttgccttagtacagtgttaaatctggaggaaaacgatcaataaattccccccaaataaagtggcagaatatttatttgtgacaataatttattataaaggttaatgacgttttttactatctggaaggagaaaggtcctgacgaataacatccaaaagaaatgctgtgcagacatttttatttcctacacgttttaaacttgaatttaagttttcctcaaacagtttttagaaaggtccaatttggcatccagcacaaggttatytgagaaataattaagtgaggtggtaaacttgccaaaatatcagtgttcccaagaattttattcctgacttagcaaatagtcttttatttgtgactattcactttttttctctatcttatatctaaatattgtttccaagggagagccagtatgactacaagtaagtaatatgcagattagtgacttctctttcctactcatcaaatctcctactaaaatgagattcaaggattatttttatttt

SEQ ID NO: 862373 - DNA, 493 bp, Homo sapiens
acaatgcatgcctttttattaaatgatgcacgtcaacatgtttagcacatttttatttctaaaattaatcttatttacattctctgtataattttccctggcaaagtgacattggtaatgacggagattatgagggagttaaatatagtctaagacacctctttggaaatacccttgtgctaattatactcgaamctgcttgaacaatttccttctactgctctgcacagaattgcactggcttcaaactcaagatatttagagtataaaaaaggtacctgacaacaatttatatctgtaggctcattcacagttgtcaaagtactttcatataagccacactgctggcctgcatgctgcagtggatgtaagatagcaaaattaatgttaattctgcttaatgtgcatggaatcagagactcggagaagttgcatgaatttcctaagaaaaaggacagagtgaaaattgtaagccaagtcttttttttaatgt

SEQ ID NO: 862374 - DNA, 611 bp, Homo sapiens
aaaaacaaaagtcctgccctgaaggggcccatattttaatggggatgcagatgtgtaagtggattaattttaaaactatatcttaagtgttgtaatggagatactgctgagtcatttggatgccataagggataaagggtttaactcttccagaggaattatagaagaaaaaaattcataaatttcacttcattaaagtcagagtaatggtgcctactaagtatcatacagtagaccataatttttgctcacctgattactatctattcttgtatttgctaggtaggagtattagacaggatcaagtyaggaaagcagaaagcactctaggtatgatagaaaggggagggagggagagagagagggagagaaagaaagagatttcacccaactgcagcagaatacaaattcttttcaggtaacacagctagggaatagagaaagctatatttgactccaagtctttccaaaacctctttctatgaatgaatttaaatagtgagaaggctcagaataaagagttaagtttattggattaagtgagaataaataggctttggaaactctgatccttacttactatatgactttttctcagatcactgctgacc

SEQ ID NO: 862375 - DNA, 611 bp, Homo sapiens
aaaaacaaaagtcctgccctgaaggggcccatattttaatggggatgcagatgtgtaagtggattaattttaaaactatatcttaagtgttgtaatggagatactgctgagtcatttggatgccataagggataaagggtttaactcttccagaggaattatagaagaaaaaaattcataaatttcacttcattaaagtcagagtaatggtgcctactaagtatcatacagtagaccataatttttgctcacctgattactatctattcttgtatttgctaggtaggagtattagacaggatcaagtcaggaaagcagaaagcactctaggtatgatagaaaggggagggagggagagagagagggagagaaagaaagagatttcacccaactgcagcagaatacaaattcttttcaggtaacacagctagggaatagagaaasctatatttgactccaagtctttccaaaacctctttctatgaatgaatttaaatagtgagaaggctcagaataaagagttaagtttattggattaagtgagaataaataggctttggaaactctgatccttacttactatatgactttttctcagatcactgctgacc

SEQ ID NO: 862376 - DNA, 642 bp, Homo sapiens
tggggttgaagagacccgagctccccttccaccttgtgaggatgcagaaagaagatacattctgtgaactggaaagccggccctcactagacaccaaatatgccagtattttgatcttgggcttcccagccttcagaacttacagcagtccagaaagattaagacacccacctgaaatgttaattttgtcctaaaataatcttgcatttaagatctgaaatatgacctaagtattatctgaggagtcaatgctgatttattggtggtggatactgtgattctgtattaagaatggatctgaagccacataagataactgtgattacttagtgctattttcaatggctgtgagaagacaaycttgtgaccagaatttgaaaccctgcataaacaaaactcaacatgttttgaaggcctttacactcttcctctcaggttttagaagtatttcaactgatgacagctttcagataaaatactcttattttattttgaaactaacgtttaccagttttggaaattttagtctggctaggaaggaaaggagtaacattgtgaataggacaccagccttaggctagtccaagtctataatatcaaaaggctagtacattatgttatagtatatgttataatcacgta

SEQ ID NO: 862377 - DNA, 619 bp, Homo sapiens
tccgcgtttctctgaggtggagctctcagagcaactgaaagcccctctgccactgctgctgtagtgggactgcccttgctcctgttggactggggaagaagcaaagacccatagtgctttaaccacacatctagcaaaccacagccaccctaaggagaagaggccagtctatctcacagaagaatcccctgccctccttgcttataaagcaggggcccctggctygggcttacaatgcaatgacggtatcatgggccgattgcactgattggtagcagctctgtatttctctggggtgaagccccaagagacaagtgaaaggccttctgccacagccattgccaaggtctttcattaaagctgggagagaacataaagcctgagcccaccttagggctgcagagtgcagccaaggagtgtcaagtagagatctgcacccagcacttgagtgggagaggagcccacactttcagagcactgtgacggagcatggttgcaattgtgaggaaataggagtcaggtgactgagcaagagcctttaactactggctattacactcgggcaccatctactggattacatccgaaacttcaacaccaaaaatattttgctgatata

SEQ ID NO: 862378 - DNA, 619 bp, Homo sapiens
tccgcgtttctctgaggtggagctctcagagcaactgaaagcccctctgccactgctgctgtagtgggactgcccttgctcctgttggactggggaagaagcaaagacccatagtgctttaaccacacatctagcaaaccacagccaccctaaggagaagaggccagtctatctcacagaagaatcccctgccctccttgcttataaagcaggggcccctggcttgggcttacaatgcaatgacsgtatcatgggccgattgcactgattggtagcagctctgtatttctctggggtgaagccccaagagacaagtgaaaggccttctgccacagccattgccaaggtctttcattaaagctgggagagaacataaagcctgagcccaccttagggctgcagagtgcagccaaggagtgtcaagtagagatctgcacccagcacttgagtgggagaggagcccacactttcagagcactgtgacggagcatggttgcaattgtgaggaaataggagtcaggtgactgagcaagagcctttaactactggctattacactcgggcaccatctactggattacatccgaaacttcaacaccaaaaatattttgctgatata

SEQ ID NO: 862379 - DNA, 640 bp, Homo sapiens
tccacgatcaagtcactggtagatttagtgtctggtgagagtctatttcctgatccaaaggtggtgtcttttagttgtgtcctcacatagtcaaaggggtaaggcttctttctggggcctcttttgttcgaacactaattctattcatgaggaatctaccttcatgacctaactacctcccaaaagacccctacttctcataccatcactttggcgaaaaggtttcaacatatgaattttgggtgaacacaaactacataaatataaagtatttttgtgtgtgtggagcattggtgaagagtgttaaagcaatgcaaaatgatgagtakgactttgcaactgcctttaaatatgttatactgttgcttctgcttagaaccatgagcagaaccacaaagttatattaacttggttcttccggtacaagaattctagaaatagattgtctaaacaatgtcttcaaaatgtcacaaaccttatagaaaatactacatttgattagagaattttattgataagatctcagagttttatggaaaggcattatcttacaaggttttatgatccattattatatgctattttacatgcaaaatgtaaatatttgtctcttgaaaaaaatttccaggtccaaacttgt

SEQ ID NO: 862380 - DNA, 593 bp, Homo sapiens
caagctctctttttcttaggtacttcttttctgcaaatgaataaccacacaaagtttaagtcattaaaatttcagagtaaatttacagaatgatatagattttcagaggtcttaattagagttcatggaactttagaaaattgagaaatgccctctcttgacactttgtctactgagttatttggttttctgatttaaatatgtgtttaattagttattattagtatgcaatagcctacagagaattgaagtgattctgattgtgagacaacttgacacttttcagggagagtgaaattaarggttattgatttacgggctctagcctcttctaaagcgctcacctcccatgataactctctggaaattaccagtctctggaaacactgagatcagacacagcagaaaccacatatcccattcttaggagtttgcagctctgtgacacaccatagatattttgtctagtttcccatatgtaatccacttagtcttacgtgaataaatgggcaggaagttaacatgaggagctgaacgtaaaagctagtgagtgaaccagtacaaaaagtagaggtttctatctgtacatcttt

SEQ ID NO: 862381 - DNA, 593 bp, Homo sapiens
caagctctctttttcttaggtacttcttttctgcaaatgaataaccacacaaagtttaagtcattaaaatttcagagtaaatttacagaatgatatagattttcagaggtcttaattagagttcatggaactttagaaaattgagaaatgccctctcttgacactttgtctactgagttatttggttttctgatttaaatatgtgtttaattagttattattagtatgcaatagcctacagagaattgaagtgattctgattgtgagacaacttgacacttttcagggagagtgaaattaagggttattgatttacgggctctagcctcttctaaagcgctcacctcccatgataactctctggaaattaccagtctctggaaacactgagatcagacacagcagaaaccacatatcccattcttargagtttgcagctctgtgacacaccatagatattttgtctagtttcccatatgtaatccacttagtcttacgtgaataaatgggcaggaagttaacatgaggagctgaacgtaaaagctagtgagtgaaccagtacaaaaagtagaggtttctatctgtacatcttt

SEQ ID NO: 862382 - DNA, 607 bp, Homo sapiens
agtttaaatttaacattaagttgttttgtataatgtctgttccctgtaattttcaaggtacactttctgctgacatatatgtactgctttagttactattaataagttttaagtctgatgactcattagaacccatttcctctcctacccctgctatacaatgagcaaatcaggagggaagatgatttgttctgactgatgtaaatcaggtatagaaaggatggtaaatgaatatataatttgtttagattattctgcytaaatgatttgttcttactgttgtaaatcaggtatagaaaggatggtaaatgaatatataatttgtttagattattcttcctaaatacattatgtaatttagatatgataaccaactagcccattcaatataagggactaaatggaatggacacagtcatgaggttccagttgtgcctggctatctctgtgaatttggcgaagtatgtcactgtattactcaatgaaatgcaaaagtatttacttaatacaactgaacaatagcatttagaaaattttctggttaatagtaggatacttagctattcaaaatctttatgatgtttcatgtttgttgcatgtttgttgt

SEQ ID NO: 862383 - DNA, 662 bp, Homo sapiens
gtgtgtcaaaatcatctaacacatttcctcctccatttatctttataaatgcagacactatttctattttttttatctgccatgaatctaagaagggctctatggctaaaaaccaggaatatttggatatcagttatttyaggtttaaattattttaaaatcaaggcaatgctaaatatagtctgatggattaaaaataattagctgacatacttgtgaatggtatttagcattagagggatattttagtgaaaactttgctctaaacacatcatgataataaatgctacaactaataaaataaaagataggataggacctattatcaagaatttggacactcctctgtccagaatatacttagccctgtagtcagacatcgtaagatatgtttgtacatgattataatttaggtatgaatatattttaggataatcagtttggtttacagtgtaaggtggtttggagtgggcccagggcaaatcagtgagactcataagcaggtgattgtatttcatcagatgggaagtgatgaggcatgtgggcatgtgttaaggcattagcagtgtgaatgaaaactaaggatagatgggaggtatgtaacacaagaatacaagaagctgatatattccaaggaggggcaagaaagagaaaaattaaac

SEQ ID NO: 862384 - DNA, 399 bp, Homo sapiens
tggactgagtggggaagatctgtctttaatgtgggtaggcaccatgcaatctgctaagggccaatttgatagaataaagagggagaaaaggattgtcctctctctctctttcctagagctgggacactctccgcaccctgcccttccacatcaaaactccatgygctctggcctgggaccctgagactgcagcacttacaccagcgccccctggacccccaggttctcaggccttcagacttgaactaaagattaaacattctgcttccctgattctgaggtttttggacttagactgagccacagtgctggcatcccagcaagtctgcagcttgatggcttgttaccatactcctcagcctccataattgtgtgagccaattctcctaacaaatcccc

SEQ ID NO: 862385 - DNA, 616 bp, Homo sapiens
ttatgtaataatgtcctcttgtatatataatgtttatcaataaaccaacatcatgaatctgcctaataaaataaggtttaaacgtaggtttccagttccagatttttcctccaggccttgcttcttccaaatctttccttttgtagtagatttacacatttcatcaagatgagtctagttgacatgtttaaggtaatttgttaactttccaaccatattcttcttcactgcttatcattttaccgctggttgtcatttgcaattttctccttgccctggaatctgaagtaagttggtgaagatgtagaattcctaatgttgcaatgcattatttccaggatttaactggcttccctgatatcaaattgtgtcttgtaaaggccatagtttgtctctctgatgcaaagtaaatataatgcatgttgggtcaagactstcattttggccaataaatgatctaaaatacctgcctagggctggctggcatgtacagaatgcattcaaacaagtaattcttatagttattcaacagcttctgtttttttctgactcccttcacagattaataatccttgaatattttaatgggaacagataaccagacttgggtgagtga

SEQ ID NO: 862386 - DNA, 656 bp, Homo sapiens
gttaaacaaaaggtatgtacaacagagtatttcttagcaataaaaagaaatgtagtattgacatacatgaaaacctaaatgaatcttcatgaaattatgctgagtgaaaaaagccaaccccaaaagggatatactgcatgatttcatttatagatcattcttaaaatgccaaaattatagatatggagaactgatagtgaytaccagaggttatggagaggatggggcaggacagaattgggttgggtgtggctctgaaagaatatcagcattaggttttcttgtggtgatggaaatgttctgtatctttaatatatcaatgccaatatcttggttatgatattttagtatagctttgcaagatgttaccattgatgaaaattggataaagggcacaagggatacttctgtattatttcgtaaaataatgcatgaatccacaatgatctgaaaatacaaagtttaattgacaataaaatttgaagaggtgtagaaatttcatactttcacaaaattaaggattttggatgatcttgattcttttttattttatttttgcaatagccagtaatactccttttaccaacattatgcagatttgcagttttcaatatgtctatgtgatgctactataattggactttaaattgtaccat

SEQ ID NO: 862387 - DNA, 656 bp, Homo sapiens
gttaaacaaaaggtatgtacaacagagtatttcttagcaataaaaagaaatgtagtattgacatacatgaaaacctaaatgaatcttcatgaaattatgctgagtgaaaaaagccaaccccaaaagggatatactgcatgatttcatttatagatcattcttaaaatgccaaaattatagatatggagaactgatagtgactaccagaggttatggagaggatggggcaggacagaattgggttgggtgtggctctgaaagaatatcagcattaggttttcttgtggtgatggaaatrttctgtatctttaatatatcaatgccaatatcttggttatgatattttagtatagctttgcaagatgttaccattgatgaaaattggataaagggcacaagggatacttctgtattatttcgtaaaataatgcatgaatccacaatgatctgaaaatacaaagtttaattgacaataaaatttgaagaggtgtagaaatttcatactttcacaaaattaaggattttggatgatcttgattcttttttattttatttttgcaatagccagtaatactccttttaccaacattatgcagatttgcagttttcaatatgtctatgtgatgctactataattggactttaaattgtaccat

SEQ ID NO: 862388 - DNA, 656 bp, Homo sapiens
gttaaacaaaaggtatgtacaacagagtatttcttagcaataaaaagaaatgtagtattgacatacatgaaaacctaaatgaatcttcatgaaattatgctgagtgaaaaaagccaaccccaaaagggatatactgcatgatttcatttatagatcattcttaaaatgccaaaattatagatatggagaactgatagtgactaccagaggttatggagaggatggggcaggacagaattgggttgggtgtggctctgaaagaatatcagcattaggttttcttgtggtgatggaaatgttctgtatctttaatatatcaatgccaatatcttggttatgatattttagtatagctttgcaagatgttaccattgatgaaaattrgataaagggcacaagggatacttctgtattatttcgtaaaataatgcatgaatccacaatgatctgaaaatacaaagtttaattgacaataaaatttgaagaggtgtagaaatttcatactttcacaaaattaaggattttggatgatcttgattcttttttattttatttttgcaatagccagtaatactccttttaccaacattatgcagatttgcagttttcaatatgtctatgtgatgctactataattggactttaaattgtaccat

SEQ ID NO: 862389 - DNA, 604 bp, Homo sapiens
ccacaatgggcaaatggaaatttctcttggatcccacaagagaactgaactgccattgtcaaggttcttttctcttgggtcttggcagatatgtagggaaagtcttggtactctataaagccctcagaatccaaaggtcttcacagctcagtgtgcctaaaatcactgccrtgttcaccaggaaggtgatgggcaccctagtcccagggtgctggacgaagcagcctcgtgccacatcagatgcagatgtggtcctagtgcctagggctctcctgtcatcttatcctggctttcagcttgaaagcagtggggcaatctgtacccagtcactctttctaggtttagaaagtgggttcctcacatctattcaatacctgaatctttttcttctgcatcttcctattttagaattggtgaaggctttgttttcacatttcatcctatcagaggctgctgtgccaaggtaagtgctccctctcagagcattactttctcactatgcaggcagccctgtttcaggctcctacagcgcagcaacatttaaactctaaaatgtttaatgcctctctgttctatccactctcaattcctagcaatcggtccg

SEQ ID NO: 862390 - DNA, 604 bp, Homo sapiens
ccacaatgggcaaatggaaatttctcttggatcccacaagagaactgaactgccattgtcaaggttcttttctcttgggtcttggcagatatgtagggaaagtcttggtactctataaagccctcagaatccaaaggtcttcacagctcagtgtgcctaaaatcactgccatgttcaccaggaaggtgatgggcaccctagtcccagggtgctggacgaagcagcctcgtgccacatcagatgcagatgtggtcctagtgcctagggctctcctgtcatcttatcctggctttcagcttgaaagcagtggggcaatctgtacccagtcactctttctaggtttagaaagtgggttcctcacatctattcaatacctgaatctttttcttctgcatcttcctattttagaatyggtgaaggctttgttttcacatttcatcctatcagaggctgctgtgccaaggtaagtgctccctctcagagcattactttctcactatgcaggcagccctgtttcaggctcctacagcgcagcaacatttaaactctaaaatgtttaatgcctctctgttctatccactctcaattcctagcaatcggtccg

SEQ ID NO: 862391 - DNA, 593 bp, Homo sapiens
actgaatcctcatctctcaccttatataaaaattaactcaagatggatcgaagactgaaatctaagacctgaaatcctaaaaattctagaggataacatcagaaaaacccttctagacattggcttaggcaaagacttcatgaccaagaacccaaaagcaaatgcaacaaaaacaaagataaatagatgagacctaattaaactaaaaagcttctgtacctcaaaagaagtaatcagcagagtaaacagacaacccaaagagtgggttgtcacccactacagaagttttccatgtaactaaacactacctgttccccaaaaacctactgaaataaaaaaaaaaawtaaaaaaagaaaaaatatctggaaagggctaacagcagattagacactacagaagaaaagattagataacttgaagacagtgatagaaactatccaaaataaaaaacagaggaaaaaaaagctactagaaaagaaaaaagaaaaaaggaaagagcaccaatgagctgtggggcaaagtcaagtggtacaatatgtataatgggaatttccaaaagtgggggttgggagagtgatgaaaatatttgaag

SEQ ID NO: 862392 - DNA, 515 bp, Homo sapiens
atgggagagtcaccgagtgttgggatccagtcatcccagtcactctgtctgcgtggaacctggctgatatccagccctgggtcactctgtgcctttcatgaattcatggactacaacaaaatgatatgatataaatgattcaagggtcaaatttttgagccaggaatatgggatctcttcattaaagagtgtgttttgtgttgagggggaatttctcagaacaatccaaagtgctcatcaacatagaaaacccctaaaactggcaagcagccttcgcgtcagcaggtgaggtgaatggctcctcattggttctctcttctgcttagygcccaagggctgctgcttctgtgggttggctgctgttgatcagaaatcctctgaacaagtgcagaggatttctttgttttgggggatgttctgcaaataaggtgtcatgttgggaccttgaacgtttcccttgggtgtctcctcccatatgtcacttctcctttgttcttctggttctttgtcatttc

SEQ ID NO: 862393 - DNA, 567 bp, Homo sapiens
tcttatgtttttacaatagtttagtacaatttttttatcctgatgatagtaagactgctataacagaactatcagcaaacttcaagaagaagcttatgtttaaagttttcttcagtaaagttcccaagtttcccagacctgcacatagttaggagtgtgaaaagaagctttatggaaagccaagtaggtatcataaaataggtgaactggaacacggttttaattatgccagagtgaggtagtttatagctcacagcttagcaccctaacaatggayatgaagtactgactaattgtaattttgtcagtaataaccttgagacatggataaacaaaagtatggaagcctctacttggatctctgaagggccaagggggttaatctaatttagattaaacaatgagttatataaatttaatacttcatgtgcatcttaatttagaattgccaaagaatgtataaaaacttagcaaaagagtttttttttaatccttaatttaaagataatcatcagattcaagggattttcaaggtacaaaggaataaaagttttcatttagttaaga

SEQ ID NO: 862394 - DNA, 608 bp, Homo sapiens
tgaaaaaagtcagaaaaatatctgctatcatggagcttatgttcttactgcatataattgataaatgaagttgtatttatcacatattgagtaatgtgaaattatatgagtgatgtgaaatctatgcataatcactgtgtattcagactctgatctattacatattgaagaaaatgtgcttaggtttcatgtaattttaggtttttttgtttgtttgtttgtttttgtttttgagacagggtctcactctgtcgcccagtctggagtgcagtggmatgatctcagctcactgcagcctcagtctcctgggctcaagtgacctcaatctcctgggctcagatgactctcccatctcagcctgagaccataggcatgcaccaccatccccagctaatttttgtatttttttgtagagatggggttttgccatgttgcccatgctggtcttgaactcctgagaccaagcaatcctcccgccttggccccctactgtgctgggattacaggtgtgagccaccacacccggacttaattttatacttattttaacaaaatgtactctgtccaaaggcaaggccactggattccctagtggatgatggctatca

SEQ ID NO: 862395 - DNA, 612 bp, Homo sapiens
cagtttcttctcagactaataaaaagtggaaattaatgagagagtgactttagctggggtaggaaaagcaagctacactattctgtatactgctttggctagcctggggtggtgatgaggtagggatatatatacattgaggagagaggattttttttaaagctctattgaaaaactcttagmtacattgctcctccaaagccacataataaaaagctctgagtttttttattaaacaacagagtagacattctgctttagagatttttgtttgtggactcatatacatggtgaccttttccacttccttcttatttttagcatccaattaccgttctctaaatgaatgcttaattcttcagtttggtattacccacagttttattcggctgctgctttaggcaataaaaagtatttgcagttcggtttattaatttgtgtactgtttcctctgctacacacattgtcacttgttcactctttcatatagtattgagcagggtatcttttttcctttggcttatcataacctcagtaaaacacctttacaaggagatcactaagctgctctttatctatagtttttgtctgaaaaaccaagaaggataaaac

SEQ ID NO: 862396 - DNA, 572 bp, Homo sapiens
atttttcttttaaattttgaatttagtttttctaccatttcagatatgtaatattaagagggacagtgtaccttaaaagtacagatttgtagatactaccttttaaaatgcagaaaaaaagctttcaatatgaaatgcctgcattaaataattgactttttttcaaaacaacgatgtaagtttacctctatattaaracaagcaaattcctgtgcttcctagctatatctggaattaattaattattattcaaggtcaacattttgcatctcccttgactgaactgtagtttattccacaaagtaaagacttttttttttttatgtgtatctgctattagttgtttgcttttttgggccagagttacccatcctttcctgtatattaaaccacgtttttggctttttccttcctgtccttccccatctggcgatggtgaggatgggtttttctcttccatgttatcatcaggtggctggagagagatatgtctacaagtttgtgtgtgatccagaagcccttttctccatggcctttccagataatcagcgtccactgctgaagacagacat

SEQ ID NO: 862397 - DNA, 543 bp, Homo sapiens
gctggtagagggtcttgcctcaatgttgatggctgctgattgatcacagtggttacagaaggctaaggtggctgtagcaatttcttcwcataaaacaaccgtgaattttgctgcatcaattgactctttcataaaagatttctctgtagcatgctatgctgtttgatagcattatccccaccgtcaaacttctttcaaaatcggagtcaaatcctgctgctgctttatcaactaagtttgtataatcacctaaatagtttgctgtaacttcaacaatgttcacaatatattcaccaggagcagattccatctcaggagaccactttctttgctcatccataaggagcaagtcctcatacagtcaagttctatcatgaggttgcagcaattcagtcacatcttcaggctccatttctatggctagtctcttatttccatcacatctgccgctacttcctgcactcaagtcttaaacccctcaaagtcatccaagaaggtggaaatcaacttctttcaaacttctgttaatgttgatagtttgac

SEQ ID NO: 862398 - DNA, 650 bp, Homo sapiens
gtctgaaaaagctaacgtgcataccttaattaaaaaataatttattgctgaaaaatgctaacctccatctccggggtcaagggatcctcccatctgagccttcagcaagttataatctttttgctggtagagggtcttgcctcaatgttgatggctgctgattgatcacagtggttacagaaggctaaggtggctgtagcaatttcttctcataaaacaaccgtgaattttgctgcrtcaattgactctttcataaaagatttctctgtagcatgctatgctgtttgatagcattatccccaccgtcaaacttctttcaaaatcggagtcaaatcctgctgctgctttatcaactaagtttgtataatcacctaaatagtttgctgtaacttcaacaatgttcacaatatattcaccaggagcagattccatctcaggagaccactttctttgctcatccataaggagcaagtcctcatacagtcaagttctatcatgaggttgcagcaattcagtcacatcttcaggctccatttctatggctagtctcttatttccatcacatctgccgctacttcctgcactcaagtcttaaacccctcaaagtcatccaagaaggtggaaatcaacttctttcaaacttctgttaa

SEQ ID NO: 862399 - DNA, 608 bp, Homo sapiens
atacttggattattagattttttttaaaaatcataaacttggatgaaaactaaagacaacctttccctataattgcagttttcaaagcagtctccacatgcatgatctgattccatcttcactatgccctgggagatagaagggagagtcacaattactgaggcaggtaaggcctttggatgccgtgagtgcttcccattccaaaacccttctctgcatgcctctggctccttctctccatgcttctcaggctgtttgtaggtcttakgagcctttaaaagaatagaatgtaagagcaatgataccacacagctctggggtcttatggagccttcaaacggcggcaatgacccgggaatttggattacagagaggtggctgttttctttttatttggtttacttttcatgttccttttggatttcaattgcccatgatatttctgctctactgattaaaacaaaacaaacaaaaaacctaagaggtaggtatgtgtcttagggggtattataaaaaagtatgaatatgtcaggggattcataaacctcggggatacaggattttactcatcacccctagaggcaaagacggggatgttctttcagtac

SEQ ID NO: 862400 - DNA, 608 bp, Homo sapiens
atacttggattattagattttttttaaaaatcataaacttggatgaaaactaaagacaacctttccctataattgcagttttcaaagcagtctccacatgcatgatctgattccatcttcactatgccctgggagatagaagggagagtcacaattactgaggcaggtaaggcctttggatgccgtgagtgcttcccattccaaaacccttctctgcatgcctctggctccttctctccatgcttctcaggctgtttgtaggtcttaggagcctttaaaagaatagaatgtaagagcaatgataccacacagctctggggtcttatggagccttcaaacggcggcaatgacccgggaatttggattacagagaggtggctgttttctttttatttggtttacttttcatgttccttttggatttcaattrcccatgatatttctgctctactgattaaaacaaaacaaacaaaaaacctaagaggtaggtatgtgtcttagggggtattataaaaaagtatgaatatgtcaggggattcataaacctcggggatacaggattttactcatcacccctagaggcaaagacggggatgttctttcagtac

SEQ ID NO: 862401 - DNA, 582 bp, Homo sapiens
aacattaatatgagtttgtaatactgagaagatgcttaaatatatatataaataaatgtgtacatttatatatatttaaatatatgaataaatgtatatatagtaaatacatataatgaatatgtatacacacatatatatttaaaaatatatatatacatatttaagccractcatcacaatagacaattaatatattaagaaaactaaaatataaaggtcacaccaaagtgtctttaaactttctggatattgggtttgccatggaaactgaatagcaaaataagaaaaggcttatggaacacaaattacagttgccttgagtttgcagcaattttcaaaacatccttgaaaaatacccatttttttttttttttttggcaacaaagtgcatggggttttagctcttcagtaaggtaatacccccttttctgctgacagccctttatatgggattatgttgcacggcaggtacataacttaaatacatgcacttattcatagaggaaaacagttttgtaagctattaatgttatattccttgctgtgataagagcacttaagatacctgagaaaaaatat

SEQ ID NO: 862402 - DNA, 610 bp, Homo sapiens
atacccccttttctgctgacagccctttatatgggattatgttgcacggcaggtacataacttaaatacatgcacttattcatagaggaaaacagttttgtaagctattaatgttatattccttgctgtgataagagcacttaagatacctgagaaaaaatatatttggaaatgacctggaagagtttcctttgtctgtaatctttgcaggctggcagttactttctgctgactcttagctgttccstcactgcagtcactgcaagcagcctggtgcagtccaaagggagcagagctggaataggagctcaaggtcagaggtctagctccaggtttcccacggatgccttcagtgaccttggtgtggggaggcaatattattactttcagtattctcatctgaatatttgcaagcggaaggacaaagaggggcaggaaaaaaaaccctccaagtttcattttcatttttaatatgtaagattatgtaaaatcagctgactgcagtggctcacacctataatcccagcactttaggaggccaaggcaggaggattacttgagcccagaagtttgagaccagcagcctgggcagtatagtgaaaccccatct

SEQ ID NO: 862403 - DNA, 610 bp, Homo sapiens
atacccccttttctgctgacagccctttatatgggattatgttgcacggcaggtacataacttaaatacatgcacttattcatagaggaaaacagttttgtaagctattaatgttatattccttgctgtgataagagcacttaagatacctgagaaaaaatatatttggaaatgacctggaagagtttcctttgtctgtaatctttgcaggctggcagttactttctgctgactcttagctgttccgtcactgcagtcactgcaagcagcctggtgcagtccaaagggagcagagctggaataggagctcaaggtcagaggtctagctccaggtttcccacggatgccttcagtgaccttggtgtggggaggcaatattattactttcagtattctcatctgaatatttgcaagyggaaggacaaagaggggcaggaaaaaaaaccctccaagtttcattttcatttttaatatgtaagattatgtaaaatcagctgactgcagtggctcacacctataatcccagcactttaggaggccaaggcaggaggattacttgagcccagaagtttgagaccagcagcctgggcagtatagtgaaaccccatct

SEQ ID NO: 862404 - DNA, 614 bp, Homo sapiens
atgctatgagaatatacaataggtattgttgacctattcagatgccaagacttgctcacctgagacagtggattaagcacaggtctgaaatgtaaatatgagtgaactaaacagtgagagggcatcttaccagacttttttcctccaaaagtcaaggtgatgcctgtagcagaagaaaagggccaatgaaggatgactgtggtttctctgaggagaatgtggtggcrgggcaggtgagtagaagggaagacacaaaccaggtgagagagacaattatgcctaggacaattaacaagggcatagatttaatagaggaattcaaaagggttttaggaagagatttttaaaacaatgattcccaaattctggcttccattaatgaatactctttttttaaaaaattcaaggtggcagggtcccctccaaaaaacacaacaggaagattctgaatttattaattcagtcagttcaacaccaagtttaacctttacttctctggaagcagggtgtcagcccccacatggctggccatgttctcagaacctggctgtctgtttatgtcagggttgggactggctgtgatgaacctgggagtaactgaagctttgtgaaca

SEQ ID NO: 862405 - DNA, 614 bp, Homo sapiens
atgctatgagaatatacaataggtattgttgacctattcagatgccaagacttgctcacctgagacagtggattaagcacaggtctgaaatgtaaatatgagtgaactaaacagtgagagggcatcttaccagacttttttcctccaaaagtcaaggtgatgcctgtagcagaagaaaagggccaatgaaggatgactgtggtttctctgaggagaatgtggtggcggggcaggtgagtagaagggaagacacaaaccaggtgagagagacaattatgcytaggacaattaacaagggcatagatttaatagaggaattcaaaagggttttaggaagagatttttaaaacaatgattcccaaattctggcttccattaatgaatactctttttttaaaaaattcaaggtggcagggtcccctccaaaaaacacaacaggaagattctgaatttattaattcagtcagttcaacaccaagtttaacctttacttctctggaagcagggtgtcagcccccacatggctggccatgttctcagaacctggctgtctgtttatgtcagggttgggactggctgtgatgaacctgggagtaactgaagctttgtgaaca

SEQ ID NO: 862406 - DNA, 614 bp, Homo sapiens
atgctatgagaatatacaataggtattgttgacctattcagatgccaagacttgctcacctgagacagtggattaagcacaggtctgaaatgtaaatatgagtgaactaaacagtgagagggcatcttaccagacttttttcctccaaaagtcaaggtgatgcctgtagcagaagaaaagggccaatgaaggatgactgtggtttctctgaggagaatgtggtggcggggcaggtgagtagaagggaagacacaaaccaggtgagagagacaattatgcctaggacaattaacaagggcatagatttaatagaggaattcaaaagggttttaggaagagatttttaaaacaatgattcccaaattctggcttccattaatgaatactctttttttaaaaaattcaaggtggcagggwcccctccaaaaaacacaacaggaagattctgaatttattaattcagtcagttcaacaccaagtttaacctttacttctctggaagcagggtgtcagcccccacatggctggccatgttctcagaacctggctgtctgtttatgtcagggttgggactggctgtgatgaacctgggagtaactgaagctttgtgaaca

SEQ ID NO: 862407 - DNA, 555 bp, Homo sapiens
ctctattacaaatgtatgaaacgatgtgacaaaggcagtgaggaaaaaggtgcccacctacattaactttgaaagtgagtggagactggtaagaccaacagcaaaaagaactgtacataagcacccttattatggttggcgaagtgatttcctacatggctacagttaacaattccaatatttctatactatatactggtattgaattactaattaaatgcatatggaaaatagsaatctgctttctcactttcagcatgaaagtttacagataaaggagaggctaaaatgatccatgtgatgatgtatcagagttcaagagatcatcagtacaaactcatcagtaccaagtcatcagtacaaacttacctgtatagatacacatgattatatatggaaatatttataaataagtttttataaaaaggttgtaggtatatgtcattccttttctagaagctgaggggcctatgatcaatcatactctattaaaaatgagtgcacttaatgaccaggtcttgctttcaaatatcggactccactagacccagggtt

SEQ ID NO: 862408 - DNA, 602 bp, Homo sapiens
ccttggataactggctggttctaggactgaagggaattcacaagatgaatctagagtgtcttgcagtgccagaaaggaagaaattgctcagcaaacacacacatagtgccagtggtaagtcaaagcgacacaagatcgatggcaaagacttctagtagtcaggggggcagaatttaacaacgaaatatataaaatggtaggattataacttaaagtgtaaaacatatccaagagtccatacaggtataaataaatgacccaagtaattaatagttgaaaatagaaaaactccaaatgaagtaagattccaaataacttttgtagctcctcttccctcaatgagatggagcacacctctccactaatgaatgtttgggctgcacatggtaattttcttcaaaaaggaatggtatagaaacaggggaagagaaacyttatagtagaagtaactgacagtgccgtggctaggtggccaaggtcaatgtcaacattgataagtaacatacataatatgtacctttgatttaaagagacaaaagtggcaatttaactctgtgattttcctcccaaatgaccataaccacagtctatgaggaggaaaa

SEQ ID NO: 862409 - DNA, 644 bp, Homo sapiens
ttgcgatatgtatcaatattgataatatcaatatcaaagagttatgtaagattttcagaaattaactgcaagtgcaaaaggcaatccaagtgaagacaccgcttggactatgatttgacaaagctacagtgactgcacaggaacagagcttctcagttaacgactcaagagtggctaagaacgccatgtgggtaccacccaaaggtggaccatccttcaatttcaaacagtaaaggaagtatccagccacaaagatcttctagcactgaagcaagaattacaataagcaactaacatcagaaacaagtgtgatcatgattttcaatgtgaggtttgggtcttcagccaccaaccacactccatgagcctcaartaggaataattccacaagcacagttgaccgggaagaattgctttcaagtatcaatgtcctaaaacttcctgaagctccattaaaacttcaaatgtaactgacacttacgtgcaaagatgtgtgtaacttgtataacaatcctttttcttaaagtttaaggatagaacaattttttaaaaaatcctctacacaagttaacaatataatgatgcaaatgatgagtaagaaagtctggttaccaaaaaagttaagtacagtaattcctgtaaag

SEQ ID NO: 862410 - DNA, 647 bp, Homo sapiens
tgttaagatgatgggttttgtaactgtcaacttcatcttttagcagcctactgaacttcaacaactctgttttgaattctgcagtaagttctcttaatgtcccaatactaattgtggttgaagagtctttggactcaaacctttcagaggcagataattttgttccttgcatttgcaaatcatcacgtatggggctctgatagatgggatgtgattacaagattcgtgtccaagagaatttcatgtgattggctgtttcgttgtcagggctgtgacggragggtaaaataacagcaacgtctgtccccacgtgctggggaagattcggcctatctagggatgttctcttccttcttcagtgttctatacagaactctctggaaagggggtggccttctcatatcgaaaaggacccttcttcattctagggagtctgaattttcatagcaccattgagttatctgttccagttccagaaaattctggtggtataatacaggggatcaagctactaaccacaatgaacaaagagaaaggaactaaaatttactaagtgtgtatgatgtgccaggtacttcacttgggtagtttagagctattctcacatttagtgtcaccaactccactgaagtctgactggggctaat

SEQ ID NO: 862411 - DNA, 647 bp, Homo sapiens
tgttaagatgatgggttttgtaactgtcaacttcatcttttagcagcctactgaacttcaacaactctgttttgaattctgcagtaagttctcttaatgtcccaatactaattgtggttgaagagtctttggactcaaacctttcagaggcagataattttgttccttgcatttgcaaatcatcacgtatggggctctgatagatgggatgtgattacaagattcgtgtccaagagaatttcatgtgattggctgtttcgttgtcagggctgtgacgggagggtaaaataacagcaacgtctgtccccacgtgctggggaagattcggcctatctagggatgttctcttccttcttcagtgttctatacagaactctctggaaagggggtggccttctcatatcgaaaaggacccttcttcattctagggagtctgaattttcatagcaccattgagttatctkttccagttccagaaaattctggtggtataatacaggggatcaagctactaaccacaatgaacaaagagaaaggaactaaaatttactaagtgtgtatgatgtgccaggtacttcacttgggtagtttagagctattctcacatttagtgtcaccaactccactgaagtctgactggggctaat

SEQ ID NO: 862412 - DNA, 673 bp, Homo sapiens
tcattgtttgctagaaaattgactctgaggagcatgcaggtgtttctgtgttctaaactttgttgtgcataaaaaccacttcccatgcaaattaaaagtgtacatttctgggaaccattttgattcagtagagacagaaatgggcccagacacctgcatttttatagtgtccatatggttctgatgtatgtgatctgaggaccatacttgaaaaaacaataaattagtctttaccaaaagcattcaagagtttcacagttttagaggtactttctgagttgaactccaaaatatccttgaggaacttagagagatttttaaaaacaattttattgaagtataatttatctattataaaatttacctattttagtgcacaattcaatatttstaatacatttgttgagttgtgcaactgttgttgcaatgatttttacctcctcttccttgcctggattgaaggaattctgttactccaagggaagaccaaagagtcaaagacccaagtttgagttttggctacatcatccagtgtcctgagacctaggagcaagggacatgggtctttccatgtcttagtcacctcatttataaaatggggatgctattaatatttcctttataggatacttgtgaagattaagtgagaaaagatgtttggagtgcaatttgt

SEQ ID NO: 862413 - DNA, 648 bp, Homo sapiens
tacttgaaaaaacaataaattagtctttaccaaaagcattcaagagtttcacagttttagaggtactttctgagttgaactccaaaatatccttgaggaacttagagagatttttaaaaacaattttattgaagtataatttatctattataaaatttacctattttagtgcacaattcaatatttctaatacatttgttgagttgtgcaactgttgttgcaatgatttttacctcctcttccttgcctggattgaaggaattctgttactccaagggaagaccaaagagtcaaagacccaagtttgagttttggctacatcatccagtgtcctgagacctaggagcaagggacatgggtctttccatgtcttagtcacctcatttataaaatggggatgctattaatatttcctttataggatacttgtgaagattaagtgagaamagatgtttggagtgcaatttgtaagtttattcaactatctagtgaatgaatacctacctttggttgcttacttgctggtctaggaacagactattaatgagtaaagacagataccatctctgctctccctgagcagatagccagtagggacagtgtgtgtttgatgagaaaatacagcaaataaatttgatttgagtggga

SEQ ID NO: 862414 - DNA, 535 bp, Homo sapiens
aattcaatatttctaatacatttgttgagttgtgcaactgttgttgcaatgatttttacctcctcttccttgcctggattgaaggaattctgttactccaagggaagaccaaagagtcaaagacccaagtttgagttttggctacatcatccagtgtcctgagacctaggagcaagggacatgggtctttccatgtcttagtcacctcatttataaaatggggatgctattaatatttcctttataggatacttgtgaagattaagtgagaaaagatgtttggagtgcaatttgtaagtttattcaactatctagtgaatgaatacctacytttggttgcttacttgctggtctaggaacagactattaatgagtaaagacagataccatctctgctctccctgagcagatagccagtagggacagtgtgtgtttgatgagaaaatacagcaaataaatttgatttgagtgggaagacaggatcctgtttaaggaagtcagagaagttttactgaaggaggtgatgtttgagata

SEQ ID NO: 862415 - DNA, 659 bp, Homo sapiens
ttgactttcaagtctcgttgtttaaaaaatacattttataatgctatagctgccattcatagttcctctgttgaatctgggcaaagtaaatagaaaaccttctgaaaaggattcaccattctagatgccacccaagaacagatgtgtttcatgggaggaggttaaaatatcaacatcaataggagtttggaaaaagttgattccaaccctcatggatgactttgaaatgttcaagacttcagtggaggaagccacttcagatgtggtagaaatagcaagaaaactagaagtagaagtagagcctgaagatgtgactgaattgctgcaatctcataataaaattagagcagatgatgacttgcttcttatggatgaacagagaaagtggtttctagagatagaatctacttccagtgaagtgacgatgaacatttttgagatgacaacacaagatttagaatatttcattaaacttagctgataaggcagccscagagtttgagaggactgactccagttttgaaggaagtctaccatgagtaaaaggctatcagctagcattgtgttctatctttcatgaaagagttaatcagtgtgcaaactttgccgttgtcttttttaagaaattgccacagccacaggtatgatctgccacagtc

SEQ ID NO: 862416 - DNA, 684 bp, Homo sapiens
tttctgtcttagggtatcttagatagtttctagctctaggtttgcttggggatgggagagaggaaaggaggtaaggtgggaaaggctgtaggtagggatgtaaacattttaccctagattcaaccagagaagctttgaatttctctattttacctaccatgtttttgagtgagaattctcttgaataaataatttcttggaaaaaattaatgaatacatraaaagtaaccctgttctagacatgggaagataagaggagattttctgtgtgtgtgccgaggagtaacagggcaaatatgttgtgtaagcaaaaatctatgggtagtataaggaactgatccacccatcaagtaaacatctattgggcatctactgtgcagtaggcatcacactaagtgttggaggtacaaagatggataagacctttgtaccactacagtccttaccactatagtgctcatagaagtgagattagtgagaactggaaaactagttgggaactggaaaaccagttataaggtgtctgtccacatgtgagatgatgaagcctcgtccacggtgcaaggaggtggatgcaagagatattccgaaggaaggcttgatgagacaatgtgcctgactggtctatgagatgaacacaaaaataaccagattaattctgaggtgtaaagctacatagaaagt

SEQ ID NO: 862417 - DNA, 646 bp, Homo sapiens
tctatcaaatgggtgctgagagaaatgatacagaaaaagaagtagtaaagctttcttgtttttattaataactattgttttatatatagtaccaaattgggaaatatagagaagtctaaaaatgaagataatcacccacaatatcatcatgcataatagactcatgctaccatttgattatacatctttctgtcttcttggcctttgtctctactccttactctctcacacacatctaattaacacataccaagtacgtatgtttaaacacatttacaaaaaacaggttgatgctctgcaaactacttcgaaatctgcttttatagttgatcattatattgtgaggatccctatatcatatatctgacaaaactttaatagtcgcataytaactctcaaggtttcactcaatctagccctgatcagtcacctttttcttctagttcacttcatcgaggtctatactttttcatgtctcttttttccaacctcacttttatacccctctctccatctctagtacattatccacttcccactggctttttcttccctctcacctggaatttaagaggaacacatcatgaagctgcggccatgctggttggttcttctaagtaccttctcccagggtgagcagaatgaa

SEQ ID NO: 862418 - DNA, 605 bp, Homo sapiens
ggggtgggaagagggtgttgagaacttgttttcctgcagtgtattattctctttgccttttcacctctacattcctagattccttctttagagacccctaaacttcagttgtttaactcttgtgtaaagagatcaagggtgtgaagcctgattcccaatctggcctgtccctcagaggctctatttgaaccctgctgcttggtgtccccagagagaatctcagggactttgtttcctttgaggtttacctttaataggaacctttctgttctataactaaaccataaggttgaactatgtagctctggcctaaaatcaatggataatttgggaaaatttggtattaggtatgtgagggmaaattaggacttgatttacagttgaataataactaaacccatggaatgaagatttctaaataaaaaacaacaatagccatgctgaaaacccaactagagcagaaaagtgatcctctgtgaattgcataaagtggatgtcttcatatgactttcttctctgctaactgcaacaagggaatcgggactgattgctggggaaagtttagtgttcaaaggttttcttctttggtgggaagctcttttttt

SEQ ID NO: 862419 - DNA, 659 bp, Homo sapiens
tgaaaaggaaatcacaatttttaaacataaaagtcatattttaaatgttcattaaaaatcttttgcataccattcctcttcctcattttagtaagagttaagacaagcttactctggtatcagttttcaaaagaaattgccgagtcacaagctgaggttatgttggtctgtggtggttgtttaatctactctgttygttcataggtaagaaaaactaccacctaaaataaacgactgttcaatgtctcacagcggattggtgctcaaactgggatttaaaattaagtcctcaaacatagcccacgcttccctacagtgactgtgtcacccatcctaggagggaaaatatagttcaggggaactttttgccacagatttacaatgaaataccggcttagtgatttgctgttggagtctaagtttattgaagccttctaggagtgcagagtccaaagtataactgcatatgtgcttccactactattttaaggtaaagaacatcctaggaaaaacagcaaagcagcatggctgtggctttagatcatcaagcagttgtaggggagaaaagcaatatcttttcctcatctgtagctaggttcaaggctgaaacccctataacaaaagacagggtagcaagagaaaggcatgcaaatttagta

SEQ ID NO: 862420 - DNA, 654 bp, Homo sapiens
aatgtgccaggaattaggttagctactgatttatagtggtgagtaaaccactgtccctactctcatgaaatcagccatttggtctaagggcagcagggagccagagtaaacaattcagtcatggcagtaggagaactctgtgaagagctcaaactagctgaagttgcttcccatagatattataaaatgttaaaatataatcattcctatgggaagagtagaataagactatgtaaagaaaaaagaaagagacaacaaagtrtctgggcacaatgcctcacacctataatcctagcactttgggagcccaaggtgggaggatagcctgagcccaggagtccagaccaacctgggcaacatagttggacactttctctacaaaaaatataaaaattagccaggaacagtggcctgtgcctttagtcccagctattctggaggctgaaatgggaggattgctttagcccaggaagtcgaggctgcagtgagcaatgatcatgacactgaactccagcatgggtaacagagtgagaccctgtctcaaaaaaaaaaaaaaaaagaaagaaagaaaaaaggtaaaattatttttcattgttaaaaattcattggaatccaatatatccagtcctgggtgtccaagtgaatttgcttaga

SEQ ID NO: 862421 - DNA, 647 bp, Homo sapiens
gctggccctgagtttcagaagtctttgtgggctttctagtgagcctgtgaactcacggaagccatctaaaaacttgacctgtgtaaatgttgtaaaatagtgactaagtgtaataggataaatccaaatttgctgtatatttttccttttatgtgtttaaaaatatttactatttccctgctcttacatggtttccatgtgtggaatacaattccttattctcagtcaaaaataaataacatgtctaaagaaaagataaaataattgtatcaaaagatamttgaaaaaatagtgggtagacgcagaatagtcaatgattcagttagtgcaaatattagaaatataataaatgaatttacaaaataattttttgttcaagtaattgaagtcaacagtgagctttctggcaaagaatttgataccattaaaaaagaaccaaatggaaattctagatttaaaaaaatacaaaatgactgaaattaagaaatcagtgactagcctgggcaagaaagtgagacccagtcttgaaaaaaaactaaaatattagctgggtatggtggtgcacacctgtagtcccagatcatgtcatccaattttcaaaactgtgtttttctgctgatctaaaaaacttgcatgattcccttatt

SEQ ID NO: 862422 - DNA, 622 bp, Homo sapiens
taattcaaattcacatgacttgagtaaatctttggtaaataagattagtttaatatgttgatttaataagaacagtcttttgagttttcagtattatatgtgagtaaacatttttattctacttaggtttagtagtcaaataatgtaaaaataacagagaaacaactcgaaatgatggctagttatgtttattcttatagtatgwcggcctaaaaacagttgccaaaatccttttggtggcttgcagccttagagttatgcaatagatattcattgagaatttctaagtaggataaagtactgaaacacacactactaagcataagtttgagtccatatgcttttagctttttatctttatatgatatagagagatcaaatacatctgagtctgttaatgaaaaattatactatcagaaagcatatgccttcaaaaatagtgaaataatatgttaataaatttgctagcctgctacagaatacttgtatgtgacagacaattcacaatgtatccttcctagttttctctgtaaaaggaggttactaatggttaaaaattataatcaatatttggaaataaagctaccagaaacaataaaggtgaagagaaacaatttggtat

SEQ ID NO: 862423 - DNA, 656 bp, Homo sapiens
atggataactaacacactctcaatctcttgctgtccctctccagatggctttgtctgcactattttatctttgtatgcccactgccttttttccttgtcattccttgtgctctttctgcttttttaggccaccataaaacagaaaaatcatttttggtgtttttttatgtgtttgttcaaaagagtttaagggtctcttaaaattgtaaaaaataagaagttttatttatttatttttgtttctaaaataaaagaaaatgaccaattttccctcctcttctctgggagttatctggactgttttttttcccctgcttatctttgttttctcctgggctatcagtctgagaaaggtaatrgtgaagtcagagaataaaggttcctcaacagttatttaatgaagatggaaacataatcattaaaacagaacactttacgcttaacagcactgaaaatgctcaaacacactgtactgtatgtgattgctgacaaagcctccatctgaacaagaatgaaccacatgtcataatgaatttggcatactggggaaaaaagcattaaaaatattatacattaactatctccgttcctgtccaaaaaccacttatgctgtcttcattcaaataaatggtaaaatatgaccatactgttatact

SEQ ID NO: 862424 - DNA, 604 bp, Homo sapiens
cacctaaatatataaagtaaacattaagagatctgaaaggagacaaagacttcaacacaatattagtagaagatttcaataccccactttaaacattagaaacattagacaggtcatccagacagaaaatcagtaagaaaacactggacttgaactatactttaaagtaccacaaatgaacccaaaagacatatacagaacattctatccaacagcaacagaagacacactcttcttaagtgcacacggaacattctccagaatagatcatatgttaggtsatggaacaagtctaacaaatttaagaagataaaaatcatattaagtacttcaacatagtcctgaaagtcttagccagagcaattaggcaagagaaagaaataaaaagcatccaaacaggaaaggatgaagtgaaattgtatctgtttgttgatgtcatgatcttattaatatacacagaaaatcctaaagaagctaccaaaaaatggtttaaactgataaattcagtaaagttctagggtgcaaaataaaaaatcagtagtttctatatagtaacaacgaaccgtctgaaaaagaagtgaagaaaacaatcccattaataata

SEQ ID NO: 862425 - DNA, 663 bp, Homo sapiens
tcaacagcaattgccatatagatgctattgcctactattttaagaaaaaaaccatgacgcttacaggtgttaataactagccccacatttcaaatgctaattgtcatagttgagacatgaatctaggtctacctgaacttttgctcttacggtacactttttagagcatggtttctattaaaaaaatcagaagcagcataaatgtccaatattcatgggaagtttaggcaccacataactgtagctataagatggaatacttttaaaaagataaaatagatttaatcaaacattttaatrctgtgaaaattcttaggtcataaaattaagcacattaaaacaaactcaaaaatatacgtgccctatgaacatagttttatatgagactgacgacatttgtcaaatattagtaaaaattgcttttggattttgcttcttttttcctgtacatcaaaaaaatcatgcagtgcccttctaataataaatataaacattttaactatttttgtaattgttactgatttcaaaattctttaaccatcaaagagggcccttaaatttgaaactgacagcagaactacgtgcaatgtccctgataagaaagctgaatgtgctccctagtggccactgtgttgttaaagttctctgttgtactactccctg

SEQ ID NO: 862426 - DNA, 663 bp, Homo sapiens
tcaacagcaattgccatatagatgctattgcctactattttaagaaaaaaaccatgacgcttacaggtgttaataactagccccacatttcaaatgctaattgtcatagttgagacatgaatctaggtctacctgaacttttgctcttacggtacactttttagagcatggtttctattaaaaaaatcagaagcagcataaatgtccaatattcatgggaagtttaggcaccacataactgtagctataagatggaatacttttaaaaagataaaatagatttaatcaaacattttaatactgtgaaaattcttaggtcataaaattaagcacattaaaacaaactcaaaaatatacgtgccctatgaacatagttttatatgagactgacgacatttgtcaaatattagtaaaaattgcttttggattttgcttcttttttcctgtacatcaaaaaaatcatgcagtgcccttctaataataaatataaacmttttaactatttttgtaattgttactgatttcaaaattctttaaccatcaaagagggcccttaaatttgaaactgacagcagaactacgtgcaatgtccctgataagaaagctgaatgtgctccctagtggccactgtgttgttaaagttctctgttgtactactccctg

SEQ ID NO: 862427 - DNA, 648 bp, Homo sapiens
ggaacaagacaaggatgcccactctcaccactcctcttcaacatagtactggaagtcctagccagagcaatcagaaaagagaaagaaataaagggcatccaaatcagtaaaaaggaagtctaactgtcactgtttgctgacaatatgatcacttaccttgaaaatcctaaagactcctccagaaagctcctagaactgataaaagaattcagcagagtttccagatacaagactaatgtacacaaatcagtagctcttctatacaccaacagcaaccaagcagagaatcaaatcaagaactccaccccttttaaaatagaatcaatattgtgaaaatgaccatagccaacagcaatctacaaattcaatgcaatccccatcaaaataccaccattattcttaacagacttataaaaaacaattctaaaattcatatagaaccaaaaaaagatcccmcatagccaaagcaagactaagcaaaaataacaaatctggagatatcacactacctgatttcaaactatactggtttggtgactatagtcaccaaaacagcatggtactggtataaaactaggcacatagaataatggaacaaaatagagaactcagaaatcaacccaaatgcttacagccaactgacctttg

SEQ ID NO: 862428 - DNA, 568 bp, Homo sapiens
gctgatggaaagaggagtttatgaaaaaatacattatgcaggcttactgattccagactgtttgagggataagttctccaagatggggcataggttaggaggaatgattggtctcacagtaaagaaggaattataagacagtatcaataaatcaactgagttgattactactttggagaaaaaaattcataatgaatgtccaatttactgatgacatgctatttgttaatcatgtattaaaactactttcataaacataaattttatgtatttatgaatgatatagttagacattgtgtcaccacccaaatcgcatcttgaactgtaatccccgggtgttgaaggagagacctggtgggaggtgactggataatgggaatggtttcccccacactgttaytgtgatcgtgagtgagttcttgctagatctgacgattttataaggggctctttccctttgcttcctacacatgctttctcacctgctgtcatgtaagacatgcctgcttccccttccaccacaattgtaagtttcctgaggcctccctagccatgaggaactgtgagt

SEQ ID NO: 862429 - DNA, 618 bp, Homo sapiens
gatatttaatctccttgcatgtgtgtgtgtatatatatatatacatgctttccacctcaatattgtggcttgatgtgttaaatagaaaataaaacccacatggttttcatttccaagacattatatgaggtaatgtgtaataggaaacacatgaaatgatgaaggcttgagagaataggtattagaatgataagtccaaggataaaatgactttgtggaagaatcaagagagccctgrgataaaagaaacctcagtgagcagattcttttggtggatacttaaaggaaacgtaattaatggtgtgaaatgctaggatacaatttatcaaagaacatgactctgagaaaataggatctttacaattagaaagctactaatagttactgtgaccaacacttatgacttgagttataaatacctgaccctgttgcaattttattatatttaggtaacatcaatcttaccaactcacaaaggatcctcttcaactagaatagagaaaggcattgagatcatataccctggttctcaactgtcttaattcgcagtgcaattcttttgacaaagtattatcctaggtttaagtacataaatatactcaaagatatatgagcaag

SEQ ID NO: 862430 - DNA, 657 bp, Homo sapiens
cagtttactgtacatttaaaaggactggctttggcgtcagaagcctctgggttcagatcctggctttgccattttctagctatgtgatctagggcatgtaacttaacttataggtgccactgtttccttatttgtataaaatagttcctactctgacaatactagtatttctcttttccacatttattttgcctcctactatccaagcattctcttatctcctaacactgctggctstcccttctgcccctggagtaactatacgggctacaaaactgcctccattattccagttgtgttagaagccacagtttactaaacactaagatttatctatgcaagagctatggaggaggttcagactcctccagcacgttcagactcagatgaagagtgctttcgcgtatgtggttcatctcgaagagcagaggctttaatgccctgtggggagaaattagtctagtgacagagaagaggcagaaagagcccacagataaattcctttcccttaatctatccaacgacagttttgaagtattctgtcatgaatggtggaggatatcccccatgactgaacaatcagctggtttccttgtgaatccatgaccagctcagtaataacaactgtaactgtcagctacctttgctgtccctcct

SEQ ID NO: 862431 - DNA, 657 bp, Homo sapiens
cagtttactgtacatttaaaaggactggctttggcgtcagaagcctctgggttcagatcctggctttgccattttctagctatgtgatctagggcatgtaacttaacttataggtgccactgtttccttatttgtataaaatagttcctactctgacaatactagtatttctcttttccacatttattttgcctcctactatccaagcattctcttatctcctaacactgctggctgtcccttctgcccctggagtaactatacgggctacaaaactgcctccattrttccagttgtgttagaagccacagtttactaaacactaagatttatctatgcaagagctatggaggaggttcagactcctccagcacgttcagactcagatgaagagtgctttcgcgtatgtggttcatctcgaagagcagaggctttaatgccctgtggggagaaattagtctagtgacagagaagaggcagaaagagcccacagataaattcctttcccttaatctatccaacgacagttttgaagtattctgtcatgaatggtggaggatatcccccatgactgaacaatcagctggtttccttgtgaatccatgaccagctcagtaataacaactgtaactgtcagctacctttgctgtccctcct

SEQ ID NO: 862432 - DNA, 621 bp, Homo sapiens
ctcacatccaggccacactcattcaagaggtaggctcccatggtcttgggcagctccatccctgtggctttgcagggtacagccaatgcctttcacagactggcactgagtgtctgtggcatttccaggcacacagtgcaagctattcrtggatctaccattctgggatctggaggatggtggccctcttctcacagctccactaggcagtgccccagtggagattcagtttcagggttccaatcctacatttccccttggcattaccctagtagaggttctccatgagggctccactcctgcagctgatttctgcctgaacatccaggcactttcatacatcctctgaaatctaagtggaggttcccaagcctcaatttttttcctctgcacacccgcaggcccaacactacatggaagtcaccaaagttatgtcaggcaccgtatcctgaggctgtacagagaagtggggccctgggcctggcccatgaaaccattatttcctcataggtctccaggcctgtgatgggatgggctgccacaaaggtctttgaaatgtcttagaggcattttccctttgttttggctcctctttagttatgcaaatttttgcaactggct

SEQ ID NO: 862433 - DNA, 629 bp, Homo sapiens
ttatcctctccaggacctcaacagattcgtgttactaaaatacctacaaaaatggtaagtcaaataaagtaatttacagaaaattagctctctgagccatgtatatttccacaagacagaatggagaattctatccatactctttcataatcaaggacatggcttagaaagaatccctaatcaggatcaaggagatgaactgttttgaacaaggataagtatcatgcaaatatmagacagaatcagaaaacaggagtgtgaaagaaattcctgctctacccctttgtgtctagtggagccattgctataaggatacagatgaaaatgctcaggctacaccatggcatgtgctgttctcagaatatggactataacaatagtgcttcaggaacacggaagacacagctagcacctgactctgccaaggctatgtcagggaaggatttggaaaagacaggacaatggaaagatgagtgagagttccttagcaaaggaaagagggtgttttcatccagaaagaaatccatgggcagtgtacaaagaccaccttgggcttttggcatggctcaaactcaggatgttttcgggaagagatgacagatttgactggaaggaaattaagaccaggt

SEQ ID NO: 862434 - DNA, 653 bp, Homo sapiens
ggtcattaattggaggaatgaaagaactcgatgcagtaatttttgtttatttatttttaaactttcacttctattcatttggcagaaacattctcctctccctggttctgtatggttgtgtgagtcaataaattcagagccctttacagaatcgctctctctctctctttctctctcctcatctctgtctctcagtttctctctctctgtctctctctctgtgtatctctagtcacatctaagcattatttctaaagaaatgaaatgaaattagaattagtgagtcatttgctcctatctaatttttgccaaaatttcatgtcaggaaatgtggaaaagctgaagagttaatacatttttacmttggtattgattgacaggcaagttagtgcattaatgtgactctggaataatatcttctaaagcccttcaacctctctgtatttccctctaagacaaaccagcactacactccccacttctgtcaggaagggattagaaaggataaaggggcataaaataagcaacagatgtattgatttatcagcagtagatagaccatgcccagaaaaatgaatgaacttgtggacttctcttactagatcatatagtagaaatgggttagatgcattgagctaggtccatgctatcta

SEQ ID NO: 862435 - DNA, 637 bp, Homo sapiens
acatgttctttttcagaaatataatttgcaaatagttttttccattttgtgggttgttctttcactttcttggtggcatcttttgcagcaaaatagttttcaattggaagtccaatttatctatgttttattccttgtgcttttgctatcatatatttaaaaatcaatgtctaaaccaaggttatgaagatttactcctattatttcctctaaacattctatagttttagatcttacatttttgtctttgatatgtttgagtaatttttacaatgatgtagcgaaggtgtcctattttattcttttgcacgtgcatattcagttgccccaamactatttgctgaaaagattattctttccccttttattttccttgtcacctttgttgaaagtcagttcatcataaatgcaagagattttttttcctgaacccttaattctatcccactgatgatgcaattattcttattctagtgccactctcttttttataactttgtgttgcatattaaatgaaacaaaacaaacaaaagtctgccccctctagtaccactttcctaactactatagctttgtaacaagttttaggactaggaattgtgagtcctccaaatttgttcttctttttaaagattgt

SEQ ID NO: 862436 - DNA, 603 bp, Homo sapiens
cagacacacactagaagctcagtgaattaaagaactgataaatgaatgattgagtaaatgaataaatggccagctcatttgaatggagttcaaaaagttgacaaatgacttctctagctaaatatataattgatgatttttttcttactaaaattactgagactatggaagctgtcatttctaatttttaagctttttgcaccttatgyttacctatgttcattgatatgcatacagttacatcaaagagagattttaattggaatctaatgcacaacatgaaatctaacggatgcaaaatcagaattaaccacacacgatgaagctattgattgaataaaggcttttgttgttttgcatttctcaatatgtaaaactggaaataattatagagcaattcagcaggagtgatggggaaactaggttatttccactataatcagtggagctgttgacagaggcagcccttgtctttcattcctgaggccctcagtttccctgactcagagcctccctgatgctggcatgggactctccttgagatcagtgttttcctctttaccacctactgatctgtccattaagtaaggcacagagtttcca

SEQ ID NO: 862437 - DNA, 647 bp, Homo sapiens
cttacctatgttcattgatatgcatacagttacatcaaagagagattttaattggaatctaatgcacaacatgaaatctaacggatgcaaaatcagaattaaccacacacgatgaagctattgattgaataaaggcttttgttgttttgcatttctcaatatgtaaaactggaaataattatagagcaattcagcaggagtgatggggaaactaggttatttccactataatcagtggagctgttgacagaggcagcccttgtctttcattcctgaggccctcagtttccctgactcagagcctccctgatgctggcatgggactctccttgagatcartgttttcctctttaccacctactgatctgtccattaagtaaggcacagagtttccaagtcaagccatgctcaggttcatagtgactctggatgattaagttagcttaagggccaaataagtgcttgtgggataaccttggaaatattcccacttcctacattgacattgtggggacatgtactactaggggaagaaaacaaaaagcaaacaaaacaatgatgaaaaaacccctttacttggtcacacgtcacatcacaatttgaaatttgaattatatatatttcaagaagtaacataaggtatttac

SEQ ID NO: 862438 - DNA, 640 bp, Homo sapiens
tactatgctgtgcccaccgaccacacttcacagctttgggtgagatacagtataagtgagtagtggatgtaaaacagtgcctcatatgttggatatgtgtctgtgtccgtttgctagggctgctgtgacaaggaaccacaaactgggtggcataagccataggaactgattacttcactgtcctggaggcccagagtctgagagcaaggtgttgtcagggttggcgtcttctgaggcctctctccttggcttgtggatggccatcttctccctgtgtcttttctcatagtcttccctctgtgtgtgtctctgcatcccacagctccaagcccctccacttatggggctatcaccctcagggccagatatcagacaattrgagacagcccttctgccccagagcccggaaattattcggaccagccgatcctgaacctgcctacctggcctctcccatgcatttctgcagaagcgatggtaaaggctcttgcccacatttcctattctccctctgcctcctggcgaccctggtactgccttgtgtggctccccgtggtctgaggatccccactcctctcaagctgtcttttcaaaggcaatcatttcctgatctgttggcttcaccatgcatcacattttc

SEQ ID NO: 862439 - DNA, 532 bp, Homo sapiens
cctacagcttcttctctctcaagcttcttcctcctctcctccctctctaggctcttccttatgtcagttgggtttcagttagggtggggaggatgtttatagatgagactgtttataggtatttgagtttaaaataatatccagtttattagctagcmtacagttttaaaaacagcatttcttattttttagggcatattttactttacatatgaatctagtcaattttgtgttatttgtttaatattcaattacagattgaacccctaaaaatttaccttcatctgcaagcatatgtacttcttcaactttatcaaactgaaattacaacaatgtttctggtcgactcaccacacatctcgaacatggaagccttaacagtcaaacagacaaatgctctctaggttgcagtgctactgaggcaggagaatagggcttggaggtagagaacataaggccgatgcacgctgacttcctagaactaaatcaagtgaaagcccctcagccatgacaggaacgtgaatagctttgt

SEQ ID NO: 862440 - DNA, 532 bp, Homo sapiens
cctacagcttcttctctctcaagcttcttcctcctctcctccctctctaggctcttccttatgtcagttgggtttcagttagggtggggaggatgtttatagatgagactgtttataggtatttgagtttaaaataatatccagtttattagctagcctrcagttttaaaaacagcatttcttattttttagggcatattttactttacatatgaatctagtcaattttgtgttatttgtttaatattcaattacagattgaacccctaaaaatttaccttcatctgcaagcatatgtacttcttcaactttatcaaactgaaattacaacaatgtttctggtcgactcaccacacatctcgaacatggaagccttaacagtcaaacagacaaatgctctctaggttgcagtgctactgaggcaggagaatagggcttggaggtagagaacataaggccgatgcacgctgacttcctagaactaaatcaagtgaaagcccctcagccatgacaggaacgtgaatagctttgt

SEQ ID NO: 862441 - DNA, 587 bp, Homo sapiens
caggaaccctgttggtgcagtggtgaggagtagagatgggcaagcattggaatctataatcctatgactgagtctcagccttttactgtgtccgtgtccctgggctgtgaccttcacagtcttttttgtcttcctagctgagacagcaaggctggagggggctagagtgggagcaatgcccctgctccacctgggatgatgctttagcaaagtttttcaccttggggagcagtctattgttatggagaatgctctggggttatttcacaataattttacagatcactttctcctgtcagagacatgaggagtytttttttctttttaatctttactatgggaacctcatgagatgcttggaggtaaaactcaagaaagcttgaaggagccgtcacgctgcaacatccaggactttaatcactctccagtagtccacaaagcctccagcaatttgtcaaaattgttattgagatattcctaccagttttggctccagcgctttcagtggcttcagagatttcagatcttggccaacaggcctcagccatgattctctggattcccctgtttctttggattttgggggg

SEQ ID NO: 862442 - DNA, 616 bp, Homo sapiens
taaattcaggcagtttaaatcctttggaacatatttataaaagtatccaacaaaatcaattagagaatgaatattttcatgtcctgatctgtaaacagttaaatgtcaaatttttccaaaacaaacaaacaaaaacaaacaaacaaagaaatcgcctttgagtaaaaactgacaatggaaaatttcaaccaaaggaaaattattcataaaattcaagtgtcttcaaattaaagcttatagtggaaactgtttcacaacattaattatattgaccatcctccccaatgtttataatgggttgcaatatgtaaactcaatgagaaaagccaagtacaaaatgtcaggcctaaaaccacataaaggctcttaataatttttctaatttctgttcccctgcaggcttctgttgcaaaacatagaagtcttcygcaagcagctgccacgcccatatctcagagccctagtgagttgtagagaagtttcaagagttagagtatttcctctgtacagtaactaaaataataaaagaccacaatttttattcataaaaattgaatataataaatgcatttttatttgggagctcattagtgccttagtcacagattggatatac

SEQ ID NO: 862443 - DNA, 597 bp, Homo sapiens
ggtaattgcaggatttataaagctactacaatcagctatatgcttcagcatctttccaaacaaaatgaaatacgatacactaaatcacactttcaatgatcctcaaagaaatttatttcaaaaatgaatgtgctgggtggacatggcagagcaggatggccaaatagaggcttccaacaatcatcgccccaacaggaacaccatattgaacaactatacacacacacacacacacacaaaaacccaccttcttaagaaccaaaaatcagataagcaatcacagtacctggtatttacatcaaattaaagaaagaagcacagaagaaggtaagaaagacagccctgaattgcttacacaacccatcccacatttactgacagcaaccatgtgacaggagagaaaatctgtgcacttggggraaggagagtgcagtaattttgggactttgcattggaactcagtgctgccctgtcacagtggaaagcaaaatgaggcagaactcagctagtgcccatgcaagaagcatttagaccagatttatctagaagcaagtcatccatcccagcaatcagacctgagtttcagcaagccctgcc

SEQ ID NO: 862444 - DNA, 631 bp, Homo sapiens
cttgaaagactggcccccacatcagatgctagtcaaaagcatgggttatgatttgtgcttctgactgaccagttgtgaatcaggattcctatgaccctttccttggatttgattaatttgctagagcagcttgcagaactcagggaaacactatgtttgctggcttattataagggatattacaaaggatacagataaatggccagttgaaaaagatgcataatgttgggtatatggcaaacagtgtgaagtttccatggcctmtcaaggcttgccatcctccaggaacctccacctattcagctatctagaagctcctagaacacagtttaaaacaaaattgtggaagcttgactaattaaatctttggccagcagtgatcaacttaaccttcggccgtctttcttctccctggaagttaggtggggtggtggaggtgaaatttctgatcctttaatcctaccttgttttttccagcccccagtctccatcctgaagctatctgggagcccccagccaccagggattttattagcataagaaaatgctgttatctttctgaagattccaagagttttaggaactgtatgccagggaataaggactatcaccaaatttatatttcacaaaa

SEQ ID NO: 862445 - DNA, 613 bp, Homo sapiens
cttctggtgagggtttcagaagcttccactcatggtagaagaggaaggggagctggtgaggtcacatgatgagtggagagagagaggggaggaggtgcgaggctctttttaacagtctgatttcatgggaactaagatggagaactcactgaattccataagaatggcaccaagcctttcgcgtccatgacccaaacacctaccaccaggccccaccttcaatattagggatcacatttcaacatgagatttggaggggacaaaccatatcactcggccccctcccttcttaaactgggatcacttgtgattctcagcatcaggacacactgggcagtctgctccactttatgtgttytgacagtttcccattggaattgtccaataggatctaccactcaagcccagaacaattcaaacctgtaaggcctctgtctcccagatggtcatcctgggtctttgtagctccattggtccaatgatgaacttactgtgtttgccttgatctttgtttgggtgaccaggatggaggaattcgggtgcacagaggtatcacagtcataatacttgacacactccatcactggttcatgcatagccattctttattttt

SEQ ID NO: 862446 - DNA, 584 bp, Homo sapiens
ttccaaaggcacctgctgctgccggttccattgcctcttgagtgtcctctggtatatatcgagttgatttctcagttttgggcattgttagcttgggatcatctgtcacacatctgtcacttggttaaccctctgattctgcgttctagcttcctcaatttcatggctgttgtcttgtcttgcatttcctctggctttggarggttatggtttttgttgttgctgtttgtctattttagaaatccttttactgtagtttttttgtgaattttgactagtggtctctgattcatgagttaaattcatcatcttattctgaaagttttatattcatctttgagaatgtttaatataaattgataaactgtcttccaggtatgtggtaatgtcacatgaagagtatatgaaaggcttttttttctctgtattcttaccaacactgaattttattaatctttgccatctttgttgttctggtgcaggggaaatggcattccatttttaagtgtgcatttaaaaaaatagtattgatgatgaatactttttcatatgtttatatattttttagaggtttgcctattgat

SEQ ID NO: 862447 - DNA, 584 bp, Homo sapiens
ttccaaaggcacctgctgctgccggttccattgcctcttgagtgtcctctggtatatatcgagttgatttctcagttttgggcattgttagcttgggatcatctgtcacacatctgtcacttggttaaccctctgattctgcgttctagcttcctcaatttcatggctgttgtcttgtcttgcatttcctctggctttggagggttatggtttttgttgttgytgtttgtctattttagaaatccttttactgtagtttttttgtgaattttgactagtggtctctgattcatgagttaaattcatcatcttattctgaaagttttatattcatctttgagaatgtttaatataaattgataaactgtcttccaggtatgtggtaatgtcacatgaagagtatatgaaaggcttttttttctctgtattcttaccaacactgaattttattaatctttgccatctttgttgttctggtgcaggggaaatggcattccatttttaagtgtgcatttaaaaaaatagtattgatgatgaatactttttcatatgtttatatattttttagaggtttgcctattgat

SEQ ID NO: 862448 - DNA, 602 bp, Homo sapiens
tcatttgcaaaatagaattaatttagttaattaatgaaattaatctagcaacctcctagggtttctgcaaggataaaattagctcatagaaatgaagcactttgccacctgcttgttgcagaagggagggtattcaatccctggtagcattagttctgcctccaaggtagcatttctactactgagcaaagacttacattgcatcccaaggcacgtactgtaagaacgagtctgtgtgcagatggaaaagcccatatagaatttgataaaccggacaaggattctggccaagtttggaggaagggccactaagaaaaggaatcttgaaggacgtctgccggctcatagcagccgggatataaaagccaggcctggttcccatcccrctgtacggattgcaaactgtcagaagatagctgtcctgggtgaatgcatcagagatgtcttctgactcctagactgatgagattttcttttctgccagaattactaacatgcgattttttttgagatctttgaactccctgaagatctgtgggcattgcagtgggttagatgcaaatttgaaatgacatgtttatagaccttcttgcatttttgtc

SEQ ID NO: 862449 - DNA, 595 bp, Homo sapiens
attcattctaccaacctctctagggcatataccatgtgccaggcactatgctagatactatatacaaaaacatgtctaaaacatagtccttgactttcagaaacttcagtctggagaaggaaagtttcagacacaygattattttaatatattacaatgtgtgctgtttttgaattattttgccagagatcatatctatttgacaagagaagctcattctacacataatgttgcctactgatggacatataatatgccttgacatataaccacatctgaactacattcatctgaactacaatatattctgaattcataaatacttaagttgttactattttaaaagactaatgaagataaaatatttacagatatataaaaatatttcattacctggagataattacacattttatttcatttatatgatagcatgaaagtcactgaattgagcaaacataggcgatcttaataagagatgcagtaacaaatgtgagtacctttgcaaaaataaccttgaatcagactgttatgggattagtaaatattgtaagaagaccttaattttccccgttgactaaactttctgctgaat

SEQ ID NO: 862450 - DNA, 673 bp, Homo sapiens
ttgactttcagaaacttcagtctggagaaggaaagtttcagacacatgattattttaatatattacaatgtgtgctgtttttgaattattttgccagagatcatatctatttgacaagagaagctcattctacacataatgttgcctactgatggacatataatatgccttgacatataaccacatctgaactacattcatctgaactacaatatattctgaattcataaatacttaagttgttactattttaaaagactaatgaagataaaatatttacagatatataaaaatatttcattacctggagataattacacattttatttcatttatatgatagcakgaaagtcactgaattgagcaaacataggcgatcttaataagagatgcagtaacaaatgtgagtacctttgcaaaaataaccttgaatcagactgttatgggattagtaaatattgtaagaagaccttaattttccccgttgactaaactttctgctgaattatagccattttgcaacataataatactttaagtaggtaaatcagcctattgattttttttcttcacctgtatacatagcaggtataacaataaatattggctgatggtgacagtgtatatgtggattacaaactgttagtaataatttggaaaagattaaatattc

SEQ ID NO: 862451 - DNA, 577 bp, Homo sapiens
atcttcaccttctgctatgactgtaagttccctgaggctctagccagaagcagatgctagcacacttcctgtacaacctgcagaaccatgagccaattaaacctcttttctttataagttactctgttctggttacttctttatagcaaggcaagaaggcctgacacgttcaatgtgctctaacctcctgccaagtagtgtgcaaggttcaagagatggaaaattggaagcgaaagtccttggagaagctctcattcaactgaaagcaaatatggtaagagataattttctctacaatgtgattagaactatgatgtgatataaataaaatgttggaagtgttcacagatgacataatatgtttcccttgtttcttctgttgctattactcagtgctacaaacttcattttttttcmtactgtttttaggaacagataagaaggcaagaaaaggatcatcacaaatatagcctgactggatgctgtttagagcagtagctattctatatcctcacattctcaggttctataatctgaaaatagctaaataaaaataatagctgagcccaaaccactg

SEQ ID NO: 862452 - DNA, 602 bp, Homo sapiens
aaaaacaatagcagagagaatatataaattgcatcaaggaatagcgggtactaaaattgttttttaattagtatatataacagattatcaattctacaaataaccaaaatgttctgctgaaaaagataattaaaattctaaagaatcataatgagatgataagcatttatgggataaggataaacatttaaacattttgtcctggccaggaggagaatgacattaccaattattgacttgattgtaaaaatatacagttcatcataaagtataatacattttttaaatataaaatctatagttttcaaatctgtgtaggaaaagagggaatatagaacagaaagcakgaaatgatgggaggaaggggttataaaaatggatgttaacataaaaacaccaagtgaaattatagagataagtaaaagtgtatcagtaatcacagtaaatgtatagagagattaaaatcatgcattaaagaacaaatataatcaaattaaatgaaaaaaattcttatattttttccaagagatatacatataaccatattgaaaggttaaaaataaagttacaaaaggagatatatcagataaatgtcagccaaa

SEQ ID NO: 862453 - DNA, 601 bp, Homo sapiens
acagcgagtgaattctgcatttccaactgtggtgcctggattctctcactgggactgactaggcagttcctgcaaggaaaagcaggatggggcgatggttcacccaggagctgcacaggacaaagggacctccctcccctagmcaagggagatggggaagaattgtgttacctgcctggggaatgcttttcccatgaactttttgcaacccgtggatcaggagattccctcgtgagcccacaccatcagggccttgggtcccatacacaaagctgtgcggacctacagcagccactgagattggtggccgcttggacaggcactgagctcgaggagtttttgcatactcctccagctcctggaactccaatgaggtagatgatctgtctagtcccaagggaagagggctgaagccagggagccaaccagcctccctcagtgcgtcccacccagacagaatcccacaagctaaagacccactggcttgggttcccagctggccagcacaggagcctcgagtctacctaagactattgagttcccaagggaaggggcgatcaccattactgcagatcgaatcagcagttttcccctgccagtg

SEQ ID NO: 862454 - DNA, 596 bp, Homo sapiens
tctcttccaaatgattgcaacacctctccagcaagggcacagaactgggctgaagctgagttggatgaactgacagaagtaggcttcagaaagtgggcaataatgaactttgctgagctaaagggttgtattctaacccaatgcaaagaagctaagaaccatgataaaagattatgggagctgttaattagaataagcagtttagagaggaaaataaatgacttgatggagctgaaaaacacagcatgagaacttcatgatgcaaacaccagtatcaatagctgaactgaccaagcggaagaaagaatatcagaccttgaagactatcttgctgaattaaggcatgcagataagattagagaaaaaagaatgaaaaggaacgaacaaaacctctgagaattatggaatgatgtaaaaagactgaacctaggactgattggagtacctgaaagaratgggaagaatggaatcaagttggaaaacacattccaggatatcatccaggagaacttccccaacctagcaagacaggccaacattcaaattcagaaatccagagaaccccagtaagatactccataagaagatcaacccca

SEQ ID NO: 862455 - DNA, 718 bp, Homo sapiens
actgaaataaagacacagggcacttcaaaaagggggagttttgaaggaaggtgaaggttaaaaaaattacctataaggtacaatgtttactttttgggtgagaggaaccctggaagcccaaacctcaccattacacaatatatccatgtaacaacatatatccatgtaacaaacctgacatgtaccccctgaatctataaaaatgagtaaataataataacaataattaagtctttagatagtttaaacaatagacagattcacctgaaagagatatttgtgaactagaagttagatttgaagctattactctgaaaacagcaaaaaacatgttcttttcccattttctcttttatgtagagaaaaaatgaggaagagatattgaggataaaaggttaagggtgactgtaaatccaggtgtaactcccaatagaaaaaaaaatagagaaaatggartcttgacatatttgaaaaaacagtagatgaagattatttggaaaggacaaaacacttgaatgtacagacatcaaaagcagaatatatttgaaacaaagtaaataaaaatatttccaaaaataaaaacttcagaaaagcaaatataaagaaaaggtatttcaatgtacccaaaagaaaaaaatgtaaaaaataaagactattaggcaatattctcaacagcaacaacagagaccagaagacataaactacacaagagaaaatg

SEQ ID NO: 862456 - DNA, 585 bp, Homo sapiens
aaagaatcaatatcatgaaaatggcctactgcccaaagkaatttatagatttaacgctatacccatcaaactaccattgacattctttacagaattagaaaaaaaattttttaatttatatggaaccaagaaagagcctgaatagccaacacaatcctaagcaagaagtacaaagctggagacataatgctatctgacttcaaactgtactgcaacgctacagtaaccaaaactgcatggtactggtacaaaaacaggcacatagaccagtgaaacagaatagaggactcggaaataaaactacatgtctacaaccatctgatcttcaacaaacctgacaaaaacaagcaatgggggaaaggattccctatttcataaatggtgctgggagaactggctagccacatgcaaaaaaattgaaactgaccctttccttacaccttctacaaaaattaactcaagatagattaaagacttaaatgtaaaacccaaaactataaaatccctaggagaaaatctaggcaataccattctggacataggcatggacaaagattttatgatgaaatcgccaaaagtaattgc

SEQ ID NO: 862457 - DNA, 585 bp, Homo sapiens
aaagaatcaatatcatgaaaatggcctactgcccaaagtaatttatagatttaaygctatacccatcaaactaccattgacattctttacagaattagaaaaaaaattttttaatttatatggaaccaagaaagagcctgaatagccaacacaatcctaagcaagaagtacaaagctggagacataatgctatctgacttcaaactgtactgcaacgctacagtaaccaaaactgcatggtactggtacaaaaacaggcacatagaccagtgaaacagaatagaggactcggaaataaaactacatgtctacaaccatctgatcttcaacaaacctgacaaaaacaagcaatgggggaaaggattccctatttcataaatggtgctgggagaactggctagccacatgcaaaaaaattgaaactgaccctttccttacaccttctacaaaaattaactcaagatagattaaagacttaaatgtaaaacccaaaactataaaatccctaggagaaaatctaggcaataccattctggacataggcatggacaaagattttatgatgaaatcgccaaaagtaattgc

SEQ ID NO: 862458 - DNA, 585 bp, Homo sapiens
aaagaatcaatatcatgaaaatggcctactgcccaaagtaatttatagatttaacgctatacccatcaaactaccattgacattctttacagaattagaaaaaaaawtttttaatttatatggaaccaagaaagagcctgaatagccaacacaatcctaagcaagaagtacaaagctggagacataatgctatctgacttcaaactgtactgcaacgctacagtaaccaaaactgcatggtactggtacaaaaacaggcacatagaccagtgaaacagaatagaggactcggaaataaaactacatgtctacaaccatctgatcttcaacaaacctgacaaaaacaagcaatgggggaaaggattccctatttcataaatggtgctgggagaactggctagccacatgcaaaaaaattgaaactgaccctttccttacaccttctacaaaaattaactcaagatagattaaagacttaaatgtaaaacccaaaactataaaatccctaggagaaaatctaggcaataccattctggacataggcatggacaaagattttatgatgaaatcgccaaaagtaattgc

SEQ ID NO: 862459 - DNA, 585 bp, Homo sapiens
aaagaatcaatatcatgaaaatggcctactgcccaaagtaatttatagatttaacgctatacccatcaaactaccattgacattctttacagaattagaaaaaaaattttttaatttatatggaaccaagaaagagcctgaatagccaacacaatcctaagcaagaagtacaaagctggagacataatgctatctgacttcaaactgtactgcaacgctacagtaaccaaaactgcatggtactggtacaaaaacaggcacatagaccagtgaaacagaatagaggactcggaaataaaactacatgtctacaaccatctgatcttcaacaaacctgacaaaaacaagcaatgggggaaaggattccctatttmataaatggtgctgggagaactggctagccacatgcaaaaaaattgaaactgaccctttccttacaccttctacaaaaattaactcaagatagattaaagacttaaatgtaaaacccaaaactataaaatccctaggagaaaatctaggcaataccattctggacataggcatggacaaagattttatgatgaaatcgccaaaagtaattgc

SEQ ID NO: 862460 - DNA, 630 bp, Homo sapiens
acaaactataaggacagaaatgagatcagtggttgtccagggatgggagtgtggaatgctgactgactacaaggaacactggaaagcaaggaaagtatttaggatgatgtaaatatgttatttcttgtttgtggtagtggttgcatacctacatatgactgtcaaaactcagaatggtacacctataaagagtaaattataactttataaacttgatgttacaagacggcacatgagaktttgtgactaggttgctaagtgtctctgaggtggttgttgtctaaagatagtctccagtaaatgataaccatatgtagacaccctgtgtttatccgcctatattgaatctgggtcaactcagactcattttaacaatgagaatattgaggaaatggggctgtcccagttccagccaatgttttcagcctccaaaggcctcaaagcgttcacttctgtgcctctgggaaccttgagggaacatgcaagagactgggcaccctgcaggagagagagcatggggaggccatgtgaaggggctctgctgacacagggagaccctagaaatacatggataaaacagaggcccatctgtctcagcatctcagctgaactcattttttaaatttatgc

SEQ ID NO: 862461 - DNA, 630 bp, Homo sapiens
acaaactataaggacagaaatgagatcagtggttgtccagggatgggagtgtggaatgctgactgactacaaggaacactggaaagcaaggaaagtatttaggatgatgtaaatatgttatttcttgtttgtggtagtggttgcatacctacatatgactgtcaaaactcagaatggtacacctataaagagtaaattataactttataaacttgatgttacaagacggcacatgagattttgtgactaggttgctaagtgtctctgaggtggttgttgtctaaagatagtctccagtaaatgataaccatatgtagacaccctgtgtttatccgcctatattgaatctgggtcaactcagactcattttaacaatgagaatattgaggaaatggggctgtcccagttccagccaatgttttcagcctccaaaggcctcaaagygttcacttctgtgcctctgggaaccttgagggaacatgcaagagactgggcaccctgcaggagagagagcatggggaggccatgtgaaggggctctgctgacacagggagaccctagaaatacatggataaaacagaggcccatctgtctcagcatctcagctgaactcattttttaaatttatgc

SEQ ID NO: 862462 - DNA, 650 bp, Homo sapiens
gaaaaatgttttataaggtatacttttattttaaggaatattatactacatatgggaacatggtacttttttaattgggcagaattttcatgacagcaccctttgttgttacacagttgaaccatactaatataaaattctcatcattttttaatgtcactttgagaaagttatcaacagctagaaataaactataaccaaatatattacctgaattagagtygcactatcacaaaaatggcagtatattctagtgcaaaatagtgctagtgctaaatgaaaaaatatttttgcctataaaaatatctgctctcctccagcctaataaaacataaccaatttgtattacattttttgaatttgccctgaagtgtgcagatacatcatctaacccacaggagaaatgttaaagcagtactgggaaatcacaaaacataattgctaatcttcacttcttttaaaagaatcttctgcttaatactgattgaaagggattctcaaagggtactaaacttcataaactattgcaaaaaggtaaccgtttatatttattctgaatttagttgaaatttccaatgtgtggtggcatcattttgtaaaagcttactttagatggctgtttattgcattgtcaattaaatttctaccct

SEQ ID NO: 862463 - DNA, 650 bp, Homo sapiens
gaaaaatgttttataaggtatacttttattttaaggaatattatactacatatgggaacatggtacttttttaattgggcagaattttcatgacagcaccctttgttgttacacagttgaaccatactaatataaaattctcatcattttttaatgtcactttgagaaagttatcaacagctagaaataaactataaccaaatatattacctgaattagagttgcactatcacaaaaatggcagtatattctagtgcaaaatagtgctagtgctaaatgaaaaaatatttttgcctataaaaatatctgctctcctccarcctaataaaacataaccaatttgtattacattttttgaatttgccctgaagtgtgcagatacatcatctaacccacaggagaaatgttaaagcagtactgggaaatcacaaaacataattgctaatcttcacttcttttaaaagaatcttctgcttaatactgattgaaagggattctcaaagggtactaaacttcataaactattgcaaaaaggtaaccgtttatatttattctgaatttagttgaaatttccaatgtgtggtggcatcattttgtaaaagcttactttagatggctgtttattgcattgtcaattaaatttctaccct

SEQ ID NO: 862464 - DNA, 517 bp, Homo sapiens
catttagtgaaaatgcctgagaggcagtctctggaaactactcctacatgatatttaatctagtggaaacttgagaacaacttacttacatcctagtaaagtttccagctatttgaaatgtcttttcccaaaattttaagtataaattttattcccagtgatttccctmtatttgaagtgtctttggaacaacagcagtatcaataataataaaatgagatttacttttatttatttatcagtttttattgtagattcggggggtacttgtccaggtttgctacctgggtatattgtgtgatgctaaggtttggcgtatgtattagtccatttttacactgctgtaaagaactacctgagactgggtaatttatgaagaaaagaggtttaattgacttacagtttcacagactgtacgggaagcatggctgggaggcctcaggaaacttacaatcatggtagaagatgaaggggaagcaagcacatcttaccacggtggagcaggagagagagagag

SEQ ID NO: 862465 - DNA, 517 bp, Homo sapiens
catttagtgaaaatgcctgagaggcagtctctggaaactactcctacatgatatttaatctagtggaaacttgagaacaacttacttacatcctagtaaagtttccagctatttgaaatgtcttttcccaaaattttaagtataaattttattcccagtgatttccctatatttgaagtgtctttggaacaacagcagtatcaataataataaaatgagatttacttttatttatttatcartttttattgtagattcggggggtacttgtccaggtttgctacctgggtatattgtgtgatgctaaggtttggcgtatgtattagtccatttttacactgctgtaaagaactacctgagactgggtaatttatgaagaaaagaggtttaattgacttacagtttcacagactgtacgggaagcatggctgggaggcctcaggaaacttacaatcatggtagaagatgaaggggaagcaagcacatcttaccacggtggagcaggagagagagagag

SEQ ID NO: 862466 - DNA, 517 bp, Homo sapiens
catttagtgaaaatgcctgagaggcagtctctggaaactactcctacatgatatttaatctagtggaaacttgagaacaacttacttacatcctagtaaagtttccagctatttgaaatgtcttttcccaaaattttaagtataaattttattcccagtgatttccctatatttgaagtgtctttggaacaacagcagtatcaataataataaaatgagatttacttttatttatttatcagtttttattgtagattcggggggtacttgtccaggtttgctacctgrgtatattgtgtgatgctaaggtttggcgtatgtattagtccatttttacactgctgtaaagaactacctgagactgggtaatttatgaagaaaagaggtttaattgacttacagtttcacagactgtacgggaagcatggctgggaggcctcaggaaacttacaatcatggtagaagatgaaggggaagcaagcacatcttaccacggtggagcaggagagagagagag

SEQ ID NO: 862467 - DNA, 595 bp, Homo sapiens
tttaaacatattattaaaatgttgagttccagttttcaagctgacatagaaagagcttggaagccatcgccactgtcctcaaaacaagaaaaaagctgagcaaactgaaagtcaatctgtcttcttagatccattggagaaacgaggtcatagggcaaactgctgtcctgaaaactcgaaaaacaaacagacagatacaaaaattacagttcactgagaatagaagtcctggagcaaaaacttccaactgaatcctgtattagtaggagtacttcaaactgaaattgacaaattctggatgttcaatatgggctagtttgatagttaaaaactgtgagagaccagtcttagcatctctgccttattcaattttcataagttttacatctaagagccctaccakgttctcactgtgagaagatcagtgaaaaatcacctcatgctctggcagacggaagagaagagtaatcatctagaaatatgcccaaagctctctgtttttcttaaagatggcctgtcctcagtggaaactattttaacgaggtataactgactgtggttttaccaaaccctaacaatctagggaaaggaaaat

SEQ ID NO: 862468 - DNA, 630 bp, Homo sapiens
tagctcccttggtcttattttccataacaaagaaacttctgggttatgggcaccccatttattcttaccaccttgcaggctttgcaggataattgtccagaactagactattgatctagatctttatattacccatctgtctgtttcttctgagatacagccagagatcactggttggttcacggggataaacagggttagtctagaatgtaggcaaaaacctaaaaacaacagatgagaygagaatttaataacaagtatatggtaagcattgaaacataatttttctctctctagtccccatttttgtcaaaaacaaatcatgataggactaagttgcttgtaaaataaaccttagtcttatacttggcctgattatttgcgtaaagtgcagcatgagtaattgtttttcacacaggcctttaaatcggctttaatgacaccctgttccccacggaatctcagataagaccttttacagctgaggccagccatgggttggtagcctcaaatacctatgagttgagtaaattcctcttttcttgaggtctcaagaacatgggtctcctgggcctattagaaagtaacattctttacttaccacaggttaggaaccctaaaggttttgag

SEQ ID NO: 862469 - DNA, 630 bp, Homo sapiens
tagctcccttggtcttattttccataacaaagaaacttctgggttatgggcaccccatttattcttaccaccttgcaggctttgcaggataattgtccagaactagactattgatctagatctttatattacccatctgtctgtttcttctgagatacagccagagatcactggttggttcacggggataaacagggttagtctagaatgtaggcaaaaacctaaaaacaacagatgagacgagaatttaataacaagtatatggtaagcattgaaacataatttttctctctctagtccccatttttgtcaaaaacaaatcatgataggactaagttgcttgtaaaataaaccttagtcttatacttggcctgattatttgcgtaaagtgcagcatgagtaattgtttttcacacaggcytttaaatcggctttaatgacaccctgttccccacggaatctcagataagaccttttacagctgaggccagccatgggttggtagcctcaaatacctatgagttgagtaaattcctcttttcttgaggtctcaagaacatgggtctcctgggcctattagaaagtaacattctttacttaccacaggttaggaaccctaaaggttttgag

SEQ ID NO: 862470 - DNA, 630 bp, Homo sapiens
tagctcccttggtcttattttccataacaaagaaacttctgggttatgggcaccccatttattcttaccaccttgcaggctttgcaggataattgtccagaactagactattgatctagatctttatattacccatctgtctgtttcttctgagatacagccagagatcactggttggttcacggggataaacagggttagtctagaatgtaggcaaaaacctaaaaacaacagatgagacgagaatttaataacaagtatatggtaagcattgaaacataatttttctctctctagtccccatttttgtcaaaaacaaatcatgataggactaagttgcttgtaaaataaaccttagtcttatacttggcctgattatttgcgtaaagtgcagcatgagtaattgtttttcacacaggcctttaaatcggctttaatgacacyctgttccccacggaatctcagataagaccttttacagctgaggccagccatgggttggtagcctcaaatacctatgagttgagtaaattcctcttttcttgaggtctcaagaacatgggtctcctgggcctattagaaagtaacattctttacttaccacaggttaggaaccctaaaggttttgag

SEQ ID NO: 862471 - DNA, 642 bp, Homo sapiens
cataaacagaattaaaaccaacaatcatagatcatctcaatagatgcagaaaagcatttaataaaatccaacgtccctttatgataaaaagaaaatcttcatcaaactggtcattgaaggaacatacatcaaaataataaaagccatatacaacaaayccaaagtaatatcatacttaatgaggaaaagatgaaaagtactggaaaaatacaagtatatccactttcaccactcctgtttaacatagtactggaagtcctagccagagaaatcaggcaagagaaagaaataaaagcctctaaattggaaaaaaaaaatgaaatcaaattatttctgtttgctgatgacatggtattttacaaatagaaaaccctaaagactcttccaaaagactcctagaattgagaaatgactttagtaaagttccagcatacaaaaatcaatgtacaaaaattagtagtatttctatacattctatacagagtgttcaagttgcaaaccaaatgaagaacccaattcaatttacaatgaccacaaaaatataaaaaagaatacatcaaaccaagaaggtgaaaaatttctaagagcagaactacagtagtaataaaagaaattatagatgacacaatcaaatggaaaaac

SEQ ID NO: 862472 - DNA, 626 bp, Homo sapiens
tatattttaaaataattacaatgtgccttaaaatgattatatcactttacataaagtataagacatttaaagtaatatatttccaatttctctttccaatcattgtgctatcactgtcttacatttcaattgcacattgattataaactccacattacattttttttgtttatggtcaatttttttcaaagatatttaaataataagatacatgttttgtattttctggtgttatatcatttcttgtgctcttcatttctttgtggagaactttatttccatctgatgtcacttttcttctgtctgaaaggcttatttayagtacaggtctgctaataataaatgattttagcttttgtaatttcaaaaaagtcattatttcacttatatttttgcaagatatttttactggtctaaaattttcagttaagattttctaattaagcaccttaaggtacttaagtgtatgtaagctcttatggcactttttattaagtatattaatacaatacttaaaacatatctcttctgatgagaaatatgctgccaaacttatctttgttctcatctgtgaaatattctccatgtggctgctttaaaatgttctctttatcactagatgttag

SEQ ID NO: 862473 - DNA, 634 bp, Homo sapiens
agtttcttgaatttgttatcatattcagaaaatgttcagccattgcttcttcaaataatttttagccctatctcctttggggactacaattacatatataagtgggcctctcaaagttgtgctgcagctcatttatgctctatttgttttaattttcttttctctctatgtaactttctgaatartttctattgctatagcatcaagttcactattcttcattctgaaatatgtactctaccactaatcctatgcagtttcttttccatctcatacattgcagttttcatctttagaagtttggaggggtgcatttttaatactactaactttttttaacatatgaaatataaaatgatgattgtttcaatgtccctgtctactaattctaacatatgtgttaagtctgggttggttttaattaatttttcttgtaattatcagtcatgctttcttgcttctttgtatgtttgttaatttttgttgaataccagacattgtgaattccaccttgctgaataatggatattgttatattactataaatattcttgagcattattcttatatgcaggcaagttacttagaaacagtttcttcctttgtgcttttgcttaagttaaaacaacttaaa

SEQ ID NO: 862474 - DNA, 634 bp, Homo sapiens
agtttcttgaatttgttatcatattcagaaaatgttcagccattgcttcttcaaataatttttagccctatctcctttggggactacaattacatatataagtgggcctctcaaagttgtgctgcagctcatttatgctctatttgttttaattttcttttctctctatgtaactttctgaatagtttctattgctatagcatcaagttcactattcttcattctgaaatatgtactctaccactaatcctatgcagtttcttttccatctcatacattgcagttttcatctttagaagtttggaggggtgcatttttaatactactaactttttttaacatatgaaatataaaatgatgattgtttyaatgtccctgtctactaattctaacatatgtgttaagtctgggttggttttaattaatttttcttgtaattatcagtcatgctttcttgcttctttgtatgtttgttaatttttgttgaataccagacattgtgaattccaccttgctgaataatggatattgttatattactataaatattcttgagcattattcttatatgcaggcaagttacttagaaacagtttcttcctttgtgcttttgcttaagttaaaacaacttaaa

SEQ ID NO: 862475 - DNA, 634 bp, Homo sapiens
agtttcttgaatttgttatcatattcagaaaatgttcagccattgcttcttcaaataatttttagccctatctcctttggggactacaattacatatataagtgggcctctcaaagttgtgctgcagctcatttatgctctatttgttttaattttcttttctctctatgtaactttctgaatagtttctattgctatagcatcaagttcactattcttcattctgaaatatgtactctaccactaatcctatgcagtttcttttccatctcatacattgcagttttcatctttagaagtttggaggggtgcatttttaatactactaactttttttaacatatgaaatataaaatgatgattgtttcaatgtccctgyctactaattctaacatatgtgttaagtctgggttggttttaattaatttttcttgtaattatcagtcatgctttcttgcttctttgtatgtttgttaatttttgttgaataccagacattgtgaattccaccttgctgaataatggatattgttatattactataaatattcttgagcattattcttatatgcaggcaagttacttagaaacagtttcttcctttgtgcttttgcttaagttaaaacaacttaaa

SEQ ID NO: 862476 - DNA, 699 bp, Homo sapiens
gcactttggggccattattaagtaaagtacggattactagatcacaaacactgagatacttctgcagtcagtctgatcacccagaaggctgctaagtgagtaataggcgggtagtggatatgctcgacaaaagcatgtttccctagtgtgatggagttggatggagggggattttatgaccttactcagagcagcacataatttaaaacttgtaaattgtttatttttggaatttttcatttaattttttccgattgtgcttgactaagggcgactgaaaccttggaaagccaaactaccaacaaggagggactactccacattaattggttaatcataaatttctcccagaaaygtgtctttaagtaatatatatactgagtgcactgaaactagttttgatactaaaaaattaatatagcaaatggaagtaagcttctatatgccctttagtagggagaactttggaaatgtcacagtttttctgattttgaataatgcagacatagtcattatttcttttgtatgcagggacaagcatctaagaatcatgttgctggtatttgtcacgcaaccatccagttaaaaagacttgaacacttagtatgtacaatctaatttattcctcacctatgaggaaaaaacaacctatgaggaaggtgttttttttttttggttttgttttgtttcctgagacgg

SEQ ID NO: 862477 - DNA, 573 bp, Homo sapiens
tttgagaaaaagaaagtccattgcatttgctactttcttaaagtaggcatgacttctcagaactattggttaaaaaacaggaagtcattgaattgatttcaaatgggacagagtgaaaatgtgtgaaagcatggtcatgtttagtgtttgggtggtaaattaattcagatagaagcacgaagctgatgtgagaattccacatgccttgtagggtagggtcctagtcattgtactcccagcacacagactgcccctagtgcccatggttttccaccattcaataaatatttgaacaaagaaggaaactaaagacaggaagagcaagtagaaggctcatgccattttccatcagagatgactagaattgatatgtgtctagaattgagwgataatagaaatggagagaaaatgacagatatgagagacattttagaggtaaaatcagcaaggctcagcagctgattggtaggctgggagggaggaatggagcatgattttattgtttgtaggttgaatatggatgctggtgccattcgctgcttgtctttacaggcatttatcatatactgcctt

SEQ ID NO: 862478 - DNA, 639 bp, Homo sapiens
agcattctgtctacccctcttcctgctttctttctctccttggcactaatcaccatctgacacatgcattatgtgttttactcattcactcaccattcccttgtactcatagaatgtagggattcttgactgtttggactattgcggctggagtagtgtctgatgtgtagcaggtgctcagtaaacatttgttaatagcagagtgaactcctcctgatggtctctgcgtgtctgagaccctgtcccaggaagctgcaggccctgtgctttctcagactggctgtgtggaagatgccaagtataggattaataacacaggacctcagcgaaaaccgagggtccagaatccctgactcagctatgcccctaatgaacaggtaacgcaaacttctgtccctgcagctttaarataaggggaatgccaagaaaatctacctttcagaattattaggaaattcaaataacatgtaggaagaaccttggaaaagttaaaggcattctccacatgcatgaggatattattctccaagataaagcagtgctctccattttattttccaaaaaccaagtattctcagttacataacaagaaagtctaaccatggttacacgtaagggaaacagcacaacaatccatca

SEQ ID NO: 862479 - DNA, 641 bp, Homo sapiens
tgtaagcttatcttttgctattttgttgtttctgagcttggcaaggaaagtaaacttgtggattcccagtacacatcaagcttggaggccttttaatcacatcatttgacaatcacaaaactctcccaagtcctttaagtatgttaatgatctgagatttaatctatattcttacctagcttgcacaaacctataaataggctcatctcagggttattgctgttataaattaattatggaaatgtcaaccaaatcaggtaygtgccagcagagtaatgggagggcagcgatccactgagcagagggtgattctgatgatgccctctgtgcaaagttcacagcctctggccaggttccatcagcttctagggagtttaaccttgaagaagacactctgggtttgtttcctcctgagtaacggagggagtctggaaaagtgacttccacgactagttctgtgccttcctcttcatagaacctgttgtttctttccctcactgggaactgtaggcaaatttggcaggcctgccttttttcaaacaagatgacggataatctggagcttatctatattgggctaatgttagctacaccactacccctcactgatcccactgttggcaactgaaaaatatggctgg

SEQ ID NO: 862480 - DNA, 642 bp, Homo sapiens
ccttgatcattcatctgtttttcaatattttggacatgctaacttagcatgaaagatcagatagagatatttaaacagtgggaaacagttaaacctttaaatgaacaacagacctgaaccacagattaaatatttcaatgctatttttttgtataatgttccaatatttaatagtttttaaaaagaaacattttcctaaggccgatccattccagatactcaattcccatgtaatctaagattatacacatataaaaatgtaattatacattaaagatactttcatctgcatgcttttacaggacaggaatttcaaggaaataagttcccagtagaagctggccagggacaaaagacaagaaatacacctttcctctcccatcttcatagaaattgaaatacaatgtaratgttttaaattctgcttgactaggagacagaaggaagaggtcaacatgactaagaccagaaaaggaagtctgttggtaatttggcactggtgacaattggccaaaggcaaatttggcagaggctgaattagagtgaaagtgctattatttggaggtttcttggtttctgaatggatcggattctttgcttcatattctggaccttccaagctgcctcaatcttatgcacaca

SEQ ID NO: 862481 - DNA, 642 bp, Homo sapiens
ccttgatcattcatctgtttttcaatattttggacatgctaacttagcatgaaagatcagatagagatatttaaacagtgggaaacagttaaacctttaaatgaacaacagacctgaaccacagattaaatatttcaatgctatttttttgtataatgttccaatatttaatagtttttaaaaagaaacattttcctaaggccgatccattccagatactcaattcccatgtaatctaagattatacacatataaaaatgtaattatacattaaagatactttcatctgcatgcttttacaggacaggaatttcaaggaaataagttcccagtagaagctggccagggacaaaagacaagaaatacacctttcctctcccatcttcatagaaattgaaatacaatgtaaatgttttaaattctgcttgactaggagacagaaggaagaggtcaacatgactaagaccagaaaaggaagtctgttggtaatttggcastggtgacaattggccaaaggcaaatttggcagaggctgaattagagtgaaagtgctattatttggaggtttcttggtttctgaatggatcggattctttgcttcatattctggaccttccaagctgcctcaatcttatgcacaca

SEQ ID NO: 862482 - DNA, 642 bp, Homo sapiens
cttaaagatcccacaaagtaagtctcatctctctttcacttaaaaggcttttaaatcctgcgttgcaaaaagtcactgtattcctcaaatctcttctccatgtcaacatttctcgtcatttcaacagttcattggacaccgctccaaaaatctcttagttgtcatttgcttattcatttgtccattcattcattcattccccaggtaaacacctatagttattccaactgttcttcataacgcatggcttcaggaatatgttattcattatttgttgttagtttattcattcatttgttcagcaaacacmgactgagcctctacctctattaagttccaagtattatcctgggtactctggacacaaagaaataaggggttcctggtgacaatctggtaggaacagtcagacctgtggacatggaatcatgatgccacgtggtaagtgctatcctagaggtatgtaaatgaaacagtggtgacataaatgagcagagattctaagatcacttccaaatactttataatctactggcctatcaatacagaccctgacataagctactattccacctggagtgagttttttcagtaggagtaacgggttgtactgctgtagcagacattgttagttgtcgaccc

SEQ ID NO: 862483 - DNA, 690 bp, Homo sapiens
tcaaatttattgtactaaacaatctctctggaatatatggggcaaagactgaccacataaaatattgatttgaaaaaaaaatactctttgatcctactaccctcatgatcagatgcttcttgggtaaaacatttcctacttggaattccatggagaatatcattacatgtaattttcctactataactgatgacatggaatgcaataagtgctcattttgaaaacatgtgagctattggtcacttggtttccatcagagaatactaattagggtaagcagtacatggcggtcttggcccaaaagacagttagcaatgaattcattagggagaacgaggatcagcaaggctcagctaatttataatattgaccacaacatgaaattaagtcatgttccagaaccagaactcattaaaaatgcagtgggagaagagggagcaaagactgttttacttagaagcttaaagactygtgggaacaaagtatcaggatacccatagcttaggggaaaccagggctgcctgcaaagatttcaaaggagtcaacttcaaggacatggaaagattcttaagggtggtaaggagaggattaaatagaagttataaagtgaaattattgcgacggcaattggagctacacataaggaagcaatttccagccataattttaattaggagcatagaatgatct

SEQ ID NO: 862484 - DNA, 690 bp, Homo sapiens
tcaaatttattgtactaaacaatctctctggaatatatggggcaaagactgaccacataaaatattgatttgaaaaaaaaatactctttgatcctactaccctcatgatcagatgcttcttgggtaaaacatttcctacttggaattccatggagaatatcattacatgtaattttcctactataactgatgacatggaatgcaataagtgctcattttgaaaacatgtgagctattggtcacttggtttccatcagagaatactaattagggtaagcagtacatggcggtcttggcccaaaagacagttagcaatgaattcattagggagaacgaggatcagcaaggctcagctaatttataatattgaccacaacatgaaattaagtcatgttccagaaccagaactcattaaaaatgcagtgggagaagagggagcaaagactgttttacttagaagcttaaagactcgtgggaacaaagtatcaggatacccatagcttaggggaaaccagggctgccygcaaagatttcaaaggagtcaacttcaaggacatggaaagattcttaagggtggtaaggagaggattaaatagaagttataaagtgaaattattgcgacggcaattggagctacacataaggaagcaatttccagccataattttaattaggagcatagaatgatct

SEQ ID NO: 862485 - DNA, 575 bp, Homo sapiens
catactttcaaaaaaaaaaaaggtagttgctgagtatctacaactactctgcctgtcaatctctcctcccttcagcccacaccttcctactttagccaatcagttcagtgtttttacagtatttttgatgcaactcacagtaagacatacattttaaatcataaccagtacacccctccagacamaaacatacgaaagtttcacaaaacattactaaacttcaccatatgtgatgtaccctgataataccattgcttttttttttttttgagacagagtctcgctctgtcgcccaggctggagtgcagtggcacgatctcggctcactgcaacctccgcctcccaggttcaagcaattctcctgcctcagcctcccgagtaggtgggactacaggcgcatgtcaccacgcccagctaagtttttgtatttttagtagagacggggtttcaccgtgttagccaggctggtctcgatctcctgacctcgtgatctgcctgcctcagcctcccaaagtgctgggatcacaggcgtgagccaccacacccacacccggtcaccattgcgttttttaaaa

SEQ ID NO: 862486 - DNA, 590 bp, Homo sapiens
agacaaatgttattgggttccatacccattatctacagattgcctatgcatgatgtttaaaagcattctctaaatactagaataacaaagtcttaaggttagaatataataactatttactaaagattctctaaatagtcaattaagacattatttttgagaatacattaatttgtaacatgacaagtggtgagcaccactctctatttttctttgacatttctggataccacttctcactactgagcaagttacctggcctcttggtgcctcaacaaactccacattacattgtggatgatatctgtacctatcacatagaattgtcatgaggattaaaggggtaactgtcacacaatgtctgtttcttataagcattattttcttcatgaccttaaatatcagtgtttcctagcactccattctrgaactacttcaagcagcacatccttctcaatgtcaacaaatagctttggctcgaaattcacatttacaacttcttatgatgtccccagttgaatattttttaggtatctcaactcatcgtaccccaagctaaattcactcttaatctactcctcattctcaac

SEQ ID NO: 862487 - DNA, 599 bp, Homo sapiens
caagggtttcagggacaggcaatgttcctttttttggcctgtgtggcggtttcatggctgttcacttttaatcagcttataactttgcatagttgcagtttcaatattacatatatagtttttttgtttgtatgttagatktgaaaatgtaaaatattatacaaatgtaaaaaattacttttagcaagaatatacacattattatattcacctaacaagtatgtctacgtgagcagacatagcaagaaatttattaaatgattctcaaaaatatgttctctgcttaattttgacattatattggtctataattatatattatttaaaccattattactatgtacccagtagaccaaaaccataaatctgtatatgttagtaacattaaattagaaacaagaatgtccttaaagatatgaatatttcatttacatatttttgggctggacgcattactttaaatatatcctcaaagaatattagtttgataaattaggtggaaaagactattctcagtgcccgtggaaacagtagtgttgataataaatattcctgcttgttaattactaaacaagctgccctgtttattatatagttta

SEQ ID NO: 862488 - DNA, 586 bp, Homo sapiens
gtgttattgttaggaacatgtgtgccatgattacgtagtagcctaatattaaaaatacctctattgtaattgttaaataaaaataaaatgattatttttttaagagaagcactgatttagaaaatagattgaagacttggttgcctgctttttatactcacactgtgacaaaatttcacagmttacttttttgaaaatgcaactatatttaaggtacacaattattattttaaattaaatttcattcattagtatctcataggtcttttcaagatattctataatgactgaacatcttattttccctaatatatagaattttccttttaataaattgttttagtctttgtaaaagaatctctaattaacagtctctggaaatactttgttgcttcctgcttcctaaacactagaaggaacaaggctcctcaagtgcttatcctttaaagatttgttgatgatgttgtcaacctccactttcttgaaactccagcttctagaatgccatacaatagctttatttttctatctacattcctgactatcatctcttccaaaacctcctcccaaccttttcccctaggcc

SEQ ID NO: 862489 - DNA, 586 bp, Homo sapiens
gtgttattgttaggaacatgtgtgccatgattacgtagtagcctaatattaaaaatacctctattgtaattgttaaataaaaataaaatgattatttttttaagagaagcactgatttagaaaatagattgaagacttggttgcctgctttttatactcacactgtgacaaaatttcacagawtacttttttgaaaatgcaactatatttaaggtacacaattattattttaaattaaatttcattcattagtatctcataggtcttttcaagatattctataatgactgaacatcttattttccctaatatatagaattttccttttaataaattgttttagtctttgtaaaagaatctctaattaacagtctctggaaatactttgttgcttcctgcttcctaaacactagaaggaacaaggctcctcaagtgcttatcctttaaagatttgttgatgatgttgtcaacctccactttcttgaaactccagcttctagaatgccatacaatagctttatttttctatctacattcctgactatcatctcttccaaaacctcctcccaaccttttcccctaggcc

SEQ ID NO: 862490 - DNA, 607 bp, Homo sapiens
cgcccccatgactcatatacctcccaccgggtgcctcctacaacacacgggaattcaagatgacatttgggtagggacacagccaaaccatatcaagtgggaatcttggtcgtacttggcttgggctgcttccatccccagctaagttgtcatgataattctatcagacagggcagggtatgaaaacyagaagctttactgctggaggggatgaaacaagtggcagacttgcaatttatttggggattaaactgggagactgggaattgggacatccataaatagatttaataagttctcaatatatccctgggtaaatgaaggctgagtgcatgtttggcagaaaccagagagagcccaaactgttcacacaaatctaaccaaaagaaggttacacagatgtgcagcacagagagaagtttcagtggaaagtaaaatcatagtcatacttggaaactgtcagactcacaaattgcttgtgcttttaatgtctctccattttatatacaaatttatcaacaaagctttgcaaatctgaatgaagtcaaaataattgaatcataccaaataggttttccaactacaatgaaactaaactaaagatcaa

SEQ ID NO: 862491 - DNA, 597 bp, Homo sapiens
actaaactaaagatcaagagcagaaagagactggaaaaatccccaaacattagggaatgtaaaaacatgtttctaaataaacaataggtaagagaaaaaattacaagggaattaagaaatcttttgaagtgaataaaaatgaaaaaaaatgcatgggatgcagtaaagtagtccttaaaggaaaatacatagttytaaatgtctatgtcacaaaacaagaaagctctccaactaataaactaacttttcaccttaagaatctaggagaaaaaagctaactaactacaaaataaatgaaagaaaagatatagatgatatttagaccagaaatcaataaaatagaaaacaaaaaataatggagaaaaatcaataaaagcaaaaattgggtctttgaaaagattggcaaaactgacaaatcttcaactagctttactaagaaaaaattgaagacactataataaaaattaggaataataaagggcttcactgtgtgacctaagagaaatgaaaaggataaagtatgatgaatacatttgtgacaatagttataaaacataggtgaaatgaatacatttttagaaagactcaaattaccaa

SEQ ID NO: 862492 - DNA, 606 bp, Homo sapiens
aaagatggtttctgagaaggcttgaaggatgaataggagttggcaaatagaaaaggagaaaagccatttcacacccaccagaatggctacaaatataaaagactgacattaccaaatgttgatgaggctgtagagcaactggaactctcatacattgctggtgagagtggaaatggcttaaccaccttgaagaatggtttgccagtttcttataaaattaaacatacatttaccctataactcagcaattatttacctaggtacttatccaaaagaaatgaaaacatgtatccccaaaccaaaaacttgtacaagaatgttcacagcagcctcartcataatccaagtgttcatcaacagaaaatggacaaacaaatctttgcacatccatatcatggactacttcttggcaataagaacaaactattgatatgcacacaatctcacaagcattatgttgtgcaaaggaggctatacacgaaggaatacttatagtatgatgctatctgtatgacatccaagaagagacaaaagcaaatctatggagacagaaatgaaaaggtggtttgaggggttaggaaaaagggtagggaattgactgtcgct

SEQ ID NO: 862493 - DNA, 610 bp, Homo sapiens
ttgcagtatatttgtcagcctttttgcatgctatgcaagtctagattcaaaaatatggctctgctgataaaaaacccttgtgtagttctccatgtcctcagaataaagtccaaaattcccataaggccctctgttctgctccaaattacgcatgtgctgttatctctgacagtcataatgggcttctccctgcagtgaacacactgtactaatgtccatctctttgatttatttataattaccatgaactacaatgcccttatcatcttttctcatcaaaatctgccccatctcaagtgtgatcttcccgtgatcygccagaacttcagcctgctttgatgctttgctttctctgaaatcccgaatctgtcaacacatacttttgcatttacccttatactatttttcagtgttgtttaatttaattcattcattaatgattatcatcactgtgccagaaactgtactgggcactacttaaatactccacgttcatttgcttggtctctccaactaaactgtgacttccttgaggccaggattatattttacatgtttcttctgatctgtatgttgtccagcccaacttattctacatacaagatgttca

SEQ ID NO: 862494 - DNA, 616 bp, Homo sapiens
gtaaaatgtctccagcatggactctccatgattagtactccatctgagctcctactgatttagtatctgtaaggcacactgaaccagaagccaactgagggatggacaagtttgatgtcagaagtttaaaacaaactgcaaatgcacttctaaggatgtggcaaattccataataaatttactagaagactaattaggaaaaagcaaaatttcccctgccatctggggagggatttggatgctstacctaataaccagatatttgctttaccaactttcaagcttgttctctcaagggtgaaattttatgtggatcctaaaatagtgtcttggaaaaaatatgatattagccctaaggatatgtgtgattttcaatttgatgacaaatgattacctccctaagattttgagaataataagtcccatttgtagatagtgcttacatactgagtgggcctacacatctccctctctagttcaagatggaaagtcctctctggaaatcaaaagagtactttcatgcagaaagtattcagacctgcgttggggttgtatggaaatgtaaaagactattaaaagtagtaaagatgtatagattacttaaagttacacctat

SEQ ID NO: 862495 - DNA, 515 bp, Homo sapiens
ttatcaaactattagataaattttatgcattgtatatgtaatgcatgttcaaataattacaatggagcaatatgcaatggttaaaaagaataagacagcaaaatatgtactgatacaatgccaagcaaatcagtaaagtgctacagtaaagtgcacaactgtgtatggagtacataatcattagtggatggagatatagatatttagatataaatataaacacagctatggatatggatatacacacatacattcatatggattttttatataaataagctrtccctaaaaggatacacaagaaatgatcacaatggtgccagagaagatgaaatataatattcacttattacacacatctgtgctttttgaacatgatattatgtgtatgtattacctattcaaaaatgcattaaatgaatctagaaaataaatacctaaaacacagaatatcatccacaaccatatttataattgtcttggtggaaaggatttttgtaaattcacaagggtta

SEQ ID NO: 862496 - DNA, 629 bp, Homo sapiens
aaaccaaatcccatcttgtagcaacataaaaccactttatttcactatgaacctcactcacttggacatctcatgacacatttgacaaaatgctctgttcattttaggaagtcatccacatttctgatggtttccctggcatctttctatggccaataataaaaatagcaatggctaactcgtagtgagcttttactatgtgccaagcactatgctaaatttatattcattttatctcacataataatgactattggccaaacactatccagtcctgtctactctccttctaatagaatcttgagtgcaaaagtccagataaagamtattacctttataacctctatctgtttatttaagaggaacaaaaatcaatatcaatgtaatcaaccataacgtagccaaggagcaattttagaaagagacatttctaaaatatcagaatttcataatattctggtttatttttggatgatacattattcaggatggtaaaattttcaggtttttttttcttacagacttaaataaatcttctacatccctggacttcagcttaaaatacagaaatgattcttaaatcttaaagctctggtcatctgagttgtttctcttttaataatcttttc

SEQ ID NO: 862497 - DNA, 644 bp, Homo sapiens
ttaaaaatccctaaagttttcaccaaacaactgttggaactaataaatgaatttagtaaagttgtagggtacaaaatcacatacaaaaatcagtagtaattccatacactagcagcaaactatctgaaaaagaaatcaagaaaataatcctactaacaataggttataaaataacatatttagaaagaacttcagcaaaggagatgataggcctgtacattgaaaacgataaaacattgattaaacaaattgaagacatgccactgcacccagcctgcattgattctttttaattgtttggttataagatggctttacgcttttaaaaattcccaaggactcraagagattttatgtgggtattcgttgataattattattatattacaaattaaaacatcattttaaagtatttggtttttattcattaaaaataatcccattatatgataatatatataacatttattaaaaatagcttttataaagccaaataaactgaaaagatagcattgtttcacatttttataaaattctttgtctgttttacaaaatgactggatttgtaagttttctgctgcatctgatttttcataatttcaaacatcacataacatttggaataccctgttacaccttcacaa

SEQ ID NO: 862498 - DNA, 630 bp, Homo sapiens
atggagtagtcagtagggttactggaattcaggtaagatcagtaggctggggattgattctgatcacttactctattatcttaagaaaagtcataaactccagtagattggtcagacaggactggaatatcaaaggctttagtggcagagatgaattagcatctgcttatgcctgcaaaaccccatcagtgaagtggcaaatgagttgctgtaccatctctgcaaacccaagccttgcagttctctcactgggtgacwcattggttttaatcatgactcccttgggagtatttgatttcttctaacatattggaatagagaagtgaagagagtccagtgccttttttgatcaaagctatgagagagtagatggcaaaagaagttattaaaaacaactactttgaaggatttcccattctgccatctgtttgtcaactgggcttcacacctctacgctgaagagaatgagggcctttgcctgatttggaagaacttcaaccctctagttacaccttgtgtgttagaatttcaatttggcttctattattttagccattatggcttttgtccttgcaataagggctttccaaaagacattttattaaataaatgtctggccttaaaaatttt

SEQ ID NO: 862499 - DNA, 622 bp, Homo sapiens
gaggagttagaggccctgagctttggtccagactctgccaccaccaattacaggaatctttttaggtcccagaatcctcatcagggccacattatgactttcatgggccccaggcacacttgcccttgtggtccctttcttccacaaaaaaaaattatgaaaatgtgtatttcatgacaatgttggcctcaagagaaaatgtattaatgttaaatattaaaatattttctttgaccccgaagttcatttgtattcttctgatttctaaagaaattttaacatatatgtgtgggcccctcaaaasgtgggttgtgtccaccccacctaatggctaggttggccttggcccttatctgtggggagtggagtggagatggactctaatatctttacctccctctaaaagcctataatttagtacctaacctctcaatctgtgcagtatggtcaggctggtatttccaaaatcctattatttgatctgaaaataaccatgtaggaaaaatatttgcaataaaataaaaataataaacttgtttttgtgattttagaatactaggtgaaaatcctcttacctcaaaagtatattcattttgaggaaaaaaatcttcattttttaaaa

SEQ ID NO: 862500 - DNA, 672 bp, Homo sapiens
aaaatgatgataaaatattacagctaatatttgtctatgtttaatatgtgtcatttactgtgctatgcacttactatgcattattccatatgtttcacaaaacattaaaaaatagatgctgtcattattctcctttgcagatgaagccattgaggcttayagagaaattaagtaacttgttcaagtccccatgggcagtaggagggacttcagagaaagtccgtctgaatctggagcctgtactcttactccctttctccactgcctagttttatatggtttaagtaatattagccactgggtgtggtggcttacacctgcaatcccagcactttgggaggccaaggcaggcagatcgcttgagctcaggagtttgagaccagcctgggcaacattgcgaaatcctgtctctacaaaaaatacaaaaaatcagccaggtacggtggcactggcctgtagttacagcatcttgggaggttgagcctgcgaggttgaggctgcagtgagctgtgattgtaccactgcaccccagcctgggtgacagagtgagactctctctcaaaagaaagaaagaaaaaataatactatcaagagtactcttactataatacatacatttaaaataattttctatgatggtgggtggacaacggtaatgggtttcagacaatc

SEQ ID NO: 862501 - DNA, 572 bp, Homo sapiens
agacaagacagaccgctcattcatcataatttcttccttggccctccattattcctgttttcttacatattggttcatttcttccctgctatacaaaaccctagtcttattagtcagggagataggtttgaagctgaactcccatccccttggctgcagcatcagattaaagccttcttccttggcaatacttgttgtctcagtcattggctttctgtgcagtaaacagcagaacgcagaccaaaccgcaggktgtttcagtaacagtatcagaaacataatagcaagcaagaaatcttgtaatttcactccaaataaaccattccatgaaaataaatatgatttcttagaaacttgaaatatgatttagcaataaatattacctaatatataatataattaagctctaatgtaggtcatgtatgagttcttttataactattttttaaatttttcctgttacactttatttatcatgttctaatatattaagcatttaaaataattttaattaatacttctttaaaattcaatgccatagtcttttaattgtttcatatttcttattgacc

SEQ ID NO: 862502 - DNA, 605 bp, Homo sapiens
catgtactgaaattttttttttttaatgtgggaggcactatgtagggcttcaccaagactacattatttatttatttatttatttatttatatttttatttttttgagagggagtctcgccctgtcgctcaggctggagtgcagtggtgcgatctctgctcactgcaagctccgcctcccgggttcatgccattctcctgcctcagcctcctgagtagctgggactacaggcacccaccaccacgcccggctaatcttttgtatttttagtagagacgkggtttcaccgtgttggacaggatggtctcgatctcctgacctcgtgatccacccgcctcagcctcccaaagtgctgggattacaggtgtaagccaccgtgtccggccgactacattatttattatttaactctcaggaaaacgctttcaggcagacactatttttattctcacttaagatgtaggaaaacaggtacataaggaggctcgctctcttattcaagttcagacaactggtaagcagtgagcctagaatcaatgaagacagtttccctccagaccaagaagcagtaagcctgaaaacacagcttctcttaggaaacagca

SEQ ID NO: 862503 - DNA, 604 bp, Homo sapiens
cttagaaatttcttccactagataccctaaatcatctcgctgaagttccaagtttcacagatctctagggcaggggcaaaatgctgccagtctctttgataaaacataggaagagtcacctttattccagttccccacaagttcctcatctccgtctgagacccccycagcctggactcattgtccatattactatcagcatgttggtcaaagccgttcaacaagtctctaggaagtttcaaactttcccacatcttcctgtctttttttttttgagccctccaaactgttccaacctctgcctgttacccagttcccaagtcgcttccacattttcaggtatctttacagcagcaccccactacctggtattaatatactgtatttgcctgttctcatgttgccataaagaactgcccgagactgggtaatttataaagaaaagaggtttaattgactcacagtttcccatggctggggaggcctcaggaaacttacaatcatggtggtaggcatccttcacagggtgtcggcagagagaataagtgcaaccaggggaaatgctagatgcttataaaaccatcagatcttgtgagacaccctc

SEQ ID NO: 862504 - DNA, 602 bp, Homo sapiens
caatgtcaaatttaatgctttaacttgagaaatccatacttgcattgaagaaattcacccacttaataaatatttgctgagcatctactggagctcagtgctgaggaataagacaagtattttctcagccctcatggagtttatattttatttacactttcacttaattgtctaaataaataaagcatgaatgcaatttttagaaaatcttrccattgataagtcaaaatttacttttaactttggtataaacttcccttgacaacactaactcccacaagaataacaaggcaatagataagtttggcagagcaactatttatgtcctgtcttctgtgttgccagggtgatggtagcaatattgaaaacattggaggtggttgttattggcaaggatcccgactttcatttccaaatggaaggactgtaaaaagcaaaatgtaggctgggatgtgggcagtagactggctatggctatacataaactggatgaatggattattgatgattaaccaaatgtgtatgctattgttgttaatgtagcactcataggcaatatttccttaatgatattcaaaaatctatgaaattttagggattac

SEQ ID NO: 862505 - DNA, 606 bp, Homo sapiens
catctgcaaattcaaatgccatggcttttaaataaaatagaaaaatgcctgtcattttaggtattttctttaacacatagatattgtgaaagaaaggccctgatactttaggaagtatcttctcttgaagaggttaaactcagtagaagaacactgtctgcttaaaagatatcaatcagagattcagctactccttttccccttcctgtcctcagttgagcaactgtcagtttgccagaaaagacctcaacccttgctctgctaggatgtcagggagatacatattcattgaggactcctcgggacagagtgaacttgatggctgcatttcactgtgcttattyttagagaaaatttattttaagatacaaaatttctcccttatattaggatataatcttgacagctaagggggtaaacagtcacaagaggttgctcaatggaaaaatttcagtagcgctaagttcaagaagaatttaaaatgaaaggactgtatacaagcaatgtaattacctttgtcatctccttcaacttttcagtgctggaactttccagtagctaaacacacaactagaaatgaatctattttcatatttcttcatatac

SEQ ID NO: 862506 - DNA, 615 bp, Homo sapiens
gctgggatataaagcattagattttaatggataatgtcaaatgaaccatttagtaaaacttgaaatgcaaaatgactatatacaatttaaaactgcaaatgattaataatctcttctcttttataaaactgccaagtcttytgtgacattagattaaaataattttttttctgcacaattttctttctttccaaaaatgcttcactactatcacatctatttaaaataactaccatcagaattctattcattttattcaatgatcacttttaggacattgcaatttgaaaagctaggataattatgtaacatatttaagtctatagatctatcttggaatgcattggcgctaatacttaacatttgtattattattatttacaaaacacattcagtataaaaatgtcttggaatctgcagcaaggcatgggagggagagatgatgagtcagtcctcgttcagaaacatggtcatggaaagacagccaaaagtctctagcgagacacacaatctccaaaaatctttttgtaaacttcctttctgcctatcttcagctttttctccctaaatacctctgtgcctcaccattgctacttcctgttcaattaacatctt

SEQ ID NO: 862507 - DNA, 616 bp, Homo sapiens
tggatagcatctatcccatttctttttttttctttttttttttttttttttttgagacagagtcttgcactgttgcccaggctggagtgcagtggcaccatctcggctcactgcaacctccgcctcctgggttcaagcaattctcctgcctcagcctctcgagtagctgggattacaggtgcacrccaccaggcccagctaatttttgtatttttaatagagacggggtttcacaatgttggccaggatggtctcgatctcttgagcttgtgatctgcccacctcggcctcccaaagtgctgggattacaggcatgagccgctggcacccagcccatctgtcccttttctaatctgcctgtgggaattggcgtataggcctaaaatgataatactctggtatcagctaatacaatgagtaataaagttcttttttttggacctaggagtctcatgtcttccgttagcaaccaaaaattgtggcaagccaacatgatagcttgcaagtacagtaaaatttcccatccttggcagtacttgacacataaatgtatctcagtgatctaagctaatgaaaacaattatttattttcagcttataatatttagtctccata

SEQ ID NO: 862508 - DNA, 615 bp, Homo sapiens
tctcatcttaactttattacatatggacagacactttttttttttttttcaaataaggttaaatttacaggtacctgagggctaagacttcaacattattttcttaggggacacaattcaacctaaaacaggcaaactagaaraagccagtttccgcttttaaaattcctcctggaaatcttcccagctagattggcaagcttactaggtaccctttctattttctttttattgcaggtaccagtactgccaaacttttcttattctgccacaagaatccccttctctccatcttatactcacattttcaaacctttaccaactgtcttctcaaggttcttccaacttctgcctaccactcagtttcaaagtcaatgccacgtttggtgttttgatacaacagtctctctctctccacacatacgtacatgctcagttgtatatatatatttacacacacacaaatacacatacacagacatacatatatatatatatatatatatatatatatatatatatatatatatacatggtaagacttatttttggacatgaagatactaatgatactgcataaaaatcatccttcagtactttggcaaatgtgatcta

SEQ ID NO: 862509 - DNA, 726 bp, Homo sapiens
cttgaggctgaccatagaggagcaggtttggagacagatttcacattcagatttgttctttttaagttttaaggacttctaaatcacccaggataatttgtccagaagacatatagattttagaaatataggtagtagcacagtaatacttccagacacaaaatgtaacctccttattttttgtaatttctactattatattttttctctccctatcccaaattaacaaataatgcctgttatagttttaaaatatttgatgttatgaagaaatctaccatctaccattttattttcaacacaatcctggcttatagttatcctggctgaatgtatgactctgtggtataatttttaatcaataattaatcaatactttcaaggaatcaagatatatgaacattaaatactagatggagggggacaatcacaacatacaagagaagttatgatttgacaaacgagataatatttagttgggctttgaacaataagttggttctgaaatgggcatactgaagcagaaaaaaaaattaaagcttggaaacttgacatgagaacacaaattttacatraatattacagttctatcactggtctgttcatgttaaaaaggaaaaaaattctgatcaaatattatttctttgtactattaagaatcaccaatctggattaaaggaaaatgtaactgctatagatttaaaattacttctgggccccaaatta

SEQ ID NO: 862510 - DNA, 619 bp, Homo sapiens
ataaatgcccccacccccgctccaaaagacacagaggttagctgcggtggctcatgcctgcaaacccaacactttgggaggccgaggtgggaggatcacttgagctcaggagttcaagaccagcctgagcaaaataatgaatccttatcatctctaccaaaagtttaaaaaagagccaggcatgggagcacatacctgttatcacagctacctggaagactgaggcagaaggattgcttttgcccatgagattgagactacagtgagctatgattgtaccactgcactgaagcctgggtaacatttgacaccctgtttcaaaaaaaaacaaaaaagaaaaccaaaaaacaaaagacacagagtagcaagttggataaaacaacaagactcatccttctgctgtcttcaagagacccatttcacaagtaacaacatctrtagactcaaaataaagggttggagaaagatctgtcacaaaaatggaaataaaaaatgagcaggggtcattattcttaaatcagataaaatagactttaaaccaacaacaatgaaaaaggccaaagaaggatattatacaataataaaggatccaattcaacaagaagacttaactatcata

SEQ ID NO: 862511 - DNA, 582 bp, Homo sapiens
tagtctcagaccacagtggaaaaaaaagtagaaattaataccaaaaagatctctcaaaatccacaattacatggaaattaaacaatttgctcctgaatgacttttgggtaaacaagaaaataaaagcagaaataaaaaattttaaaataaatgaaaacacaaacaacaacaacaacaaaaaacaggtgttgcagagaaaaaggaatgcttatacactgttggctgragtgtaaattagctcaattattgtggaaaacagtgtggagattccccaaaaatctaaaaacagaactaccattcaacccagcaatcccattactggctatatgctcaaaggaatatacattgttccatcataaagacacatgcacatgtatgttcattgcagcactattcacaatagcaaagacatggaataaacttaaatgcccatcaatggtagaatggataaagaaaatgtagtacatagacactatggaatcctatgcagccataaaaaagcacaagatcatgtccttttcaaaaacatggatggaactggagaccattatccttagcatactaacacaggaacagaaaacc

SEQ ID NO: 862512 - DNA, 582 bp, Homo sapiens
tagtctcagaccacagtggaaaaaaaagtagaaattaataccaaaaagatctctcaaaatccacaattacatggaaattaaacaatttgctcctgaatgacttttgggtaaacaagaaaataaaagcagaaataaaaaattttaaaataaatgaaaacacaaacaacaacaacaacaaaaaacaggtgttgcagagaaaaaggaatgcttatacactgttggctggagtgtaaattagctcaattattgtggaaaacagtgtggagattccccaaaaatctaaaaacagaactaccattcaacccagcaatcccatyactggctatatgctcaaaggaatatacattgttccatcataaagacacatgcacatgtatgttcattgcagcactattcacaatagcaaagacatggaataaacttaaatgcccatcaatggtagaatggataaagaaaatgtagtacatagacactatggaatcctatgcagccataaaaaagcacaagatcatgtccttttcaaaaacatggatggaactggagaccattatccttagcatactaacacaggaacagaaaacc

SEQ ID NO: 862513 - DNA, 642 bp, Homo sapiens
ttaactggaatagtaacatttaaagacattctggaagtgggaatgggaggaggactagagggtattaattatgctacataagccgtccaaaatataaaggagatttaattcatcagaaacaatgcaactggagattttttaaaaacaaaatattttctttataatgtttaagatgtcttcacaacttaactcctacattttacccatatatttctctaaaagcrtaacagatctagtacccccaagaactggacaaaagttcagggattagacgtgagaataagagagcaggaggcagaatgaaaaggtagacataatttctttcttcattttagattctagacacaaaggagagaaccaatcttgaaacagtttatattccttggagacgaacaatatgtaaatgaatagcattctactactattaagtttatcggggccaggtacaagttatatatggaaaaagatccaattttattcttagtttagcaagaataagaagctaaaatggggtcatttttagttatttaaatttaaataactttgctaatgctgccctccatttctcacattatgaatattcacagttttgtgcgccatggtgtcaactctagtttcagcaagtatcatttataacttaaa

SEQ ID NO: 862514 - DNA, 594 bp, Homo sapiens
tagatgatccaaccaatttttatgactttaaaaatcatgtatgtgaggccaggcgcggtggctcacgcctataatcccagcactttgggaggctgaggcgggcgcatcacaaggtcaggagactgaaaccatcctggctaacacgatgaaaccccgtctctactaaaaatacaaaaaattagaccggcgtggtggcgggcgcctgtagtcccagatactcgggaggctgaggcaggagaayggcgtgaacccgggaggcggagcttgcagtgagccgagatcgcgccactgcactccagcctgggcgacagagcaagactccgtctcaacaaaaaacaaaaaacaacaacaacaacaacaacaacaaaaatcatgtatgtgctgatggctctggaatttatacttccagcccagatttctctaccaattccagattaatatatacaactgcccacttcatgtctccgcttggaattgtaccatacgtctcaaactgaatatgtacaaaatagaacccctgagactccccactccctacaaatctgaccctccttttttctttccaaatttggtacatggcagctccaatcttct

SEQ ID NO: 862515 - DNA, 594 bp, Homo sapiens
tagatgatccaaccaatttttatgactttaaaaatcatgtatgtgaggccaggcgcggtggctcacgcctataatcccagcactttgggaggctgaggcgggcgcatcacaaggtcaggagactgaaaccatcctggctaacacgatgaaaccccgtctctactaaaaatacaaaaaattagaccggcgtggtggcgggcgcctgtagtcccagatactcgggaggctgaggcaggagaatggcgtgaacccgggaggcggagcttgcagtgagccgagatcgcgccactgcactccagcctgggcgacagagcaagactccgtctcaacaaaaaacaaaaaacaacaacaacaacaacaacaacaaaaatcatgtatgtgctgatggctctsgaatttatacttccagcccagatttctctaccaattccagattaatatatacaactgcccacttcatgtctccgcttggaattgtaccatacgtctcaaactgaatatgtacaaaatagaacccctgagactccccactccctacaaatctgaccctccttttttctttccaaatttggtacatggcagctccaatcttct

SEQ ID NO: 862516 - DNA, 635 bp, Homo sapiens
taccaccacactcagctaatttttctgtttttcttttttgtagcaatgaggccttgctacattgcccaggctgttctcaaactcctgatctcaagcgatccctctgcttcaacctcccaaaatgctgggattacaggcatgagccactgctcctggcttggttttatcttttcacagctgtgatattccccccscagtgtgcttgcctgattttatatacaaataccctaggatctgcagagtggacccctctgaacctggtatctgatgaaaagtgagcaaagaattttgtgttctcctaagttgtggtggctttgactatgaagctctagctgtattgataatagtattggtttttccatccctgtgatgctccggtgagaccgcagggaagcttgtcacaagagaactaaaatttctgagtctcaggggaggaaggttaagacccactccccacctcgaaattcttcttttttgacagaggctgaaatatgaaattgcagaggtgatgacagagatcgacaatctaacttccgtagaggagaggtaacaatttgtggctacacctttaagctatttactcttttctttctacctccatcctgtagtcaaacttgcagaaagtggggtgagag

SEQ ID NO: 862517 - DNA, 639 bp, Homo sapiens
agtttttattatgaaaggatgttgaattttgtcaaatgcttcttctgtgtctgttgaaatgatcatatgattcttatccttcattttgtttatacggtgtaatcacatttgctaatttagatatatcaaaccatccttgcatccagggataaatcccagttgatcttggtgtataattcttggaatatgctgtagaacttggtttgctgctattttcttgaagatttttgcatgtatgctcatcagggatactgacttgtaattttaattgtagtctcctagtctggattcagtatcagggtaatgctggactcataaaatgagtttggaagtgtcagatatttttygatagaacaaaacttggcataaagaatatcatgtactatatatcaggaacattaccaaatgaaaataaagttcttctctcttattgagaattgaaaagaatttaagatgctgtatcccacagagaaagcttctcttatgtagcaagggctttgtatgttccgagtctgatgaacctatctttacagtcatttgagaggtatgtgtatatatttgggggtatgtgtgtgtgtttgtgcattcagacacagttacagtttagttgccccaaattgtatttaatacttaccaagc

SEQ ID NO: 862518 - DNA, 419 bp, Homo sapiens
catgaattgtctctctgggaatctcatcaactagggaagatggatttatatcacaagaagggcggacaccatgcccagattgtgactcagactcgcacctattcttctgagggctgcttgaagacaacttttattaccagagagactttatctgcatgacaaggyaacctttgctcgacatgcatttcctttcctcacctcacataatttgtgtcaccaccacccttagaagcctcaggcccctattcctttctgtagctcaggatgttatataagcttcagtcatcgaacacattttccagtcccatattttgtgggactccatgcatttgcagtaattaaaatttctgtttcatgttaatgtgtctactgtcagttgatttcataggctcaattatcaaaaattcagagggtagaaa

SEQ ID NO: 862519 - DNA, 621 bp, Homo sapiens
tgttagtaaaacacaaccctttatagcatgttacaactaagcaacatgctggtcacgtgaaagtaaccatctcttgcacgtgttttccaaactgactgctttatgttgacatagtttcttttataaacagttggtaaaactacctggatagtcaactcataggctatgtggtttgtaatttacttttaaaatacatcccaaggatggttagatataattgcatgtgtattagacaatatggctctatatccaagggttggtgtaaggctggtcagtcaccctaagcgagaacaaaacccacacttcataggggggttggctagcatttcattaaaagaacagattttagaggtagatactaccccaaacgtataagttgcatttatcatagctcaaaacctgctattttgttacataaatttaattgttagttgcattatggaagttgacttttcaytggtggaagaaattactgatgttcacctatgttgcttagctaaaacattttagtaactcttcactcttgcatcaaaatgatgaaagaatctagtgaactctttaccttttacttttcataatgctgactgaggcctgattcttaaatagatctttttcagtcat

SEQ ID NO: 862520 - DNA, 613 bp, Homo sapiens
tgcattaaggctgtttgacagatagtagatccctaggtctcctaagccttgtggctgattgactactcctctctcactctgggagataactggaggtttattttctaaaagaatccctgcattgagaagaaccaagtattacaaagaatgtggaaactacacagaaaatggagattgcctacacttgtaccaaatactgaatgttcatgctgttagacctctttccccaaatggttccaagattgttggcaaccagatcagaaacctccaggaaagaattttaaaacgtatccttagagaacctgactaataaagagaaaatgaaaaaaataatgctgacaacagatgagagagtcctaaaacrggaacactcagcttcctctgcagtgaggtgatcaaataatttatcatccaaacaaggacactactgagaataaaaggaagagctattcacaaggacatcagggcaatgggagtaaaatgggactgtactgagcaagccaggacataattgttactctaacccacagtaaagctccaagtcaacaagaccctcccactcgtaataataaacacacagctaataataatcacgaatatgaggaaagctgtg

SEQ ID NO: 862521 - DNA, 647 bp, Homo sapiens
tagttaaaaaaaagtatgagattattcctgtggtttttgatttttgattgcaaagaaatgagttgatcttaattgaatttcccaacatgtgtgtgtgtgtgtgtgtgtgtgtgtgtgtgtttcccatcctgtttgaatagttgattactgtagactaggcaagagtttcagattccaagtgccagaggtaatcaaacaacagtccctagccatccacactgtgaagtctttctcggattttgagcagagaaattgcataagaaaggcagtgcttttaaaagcacaaaatcaagcagtgtctataagatattgttttgtcaggttacatgaaaayatttgaaggaagagcatttgcatagagagtacgattttggaaacctcagaagggctgagtgacctgtgatatacctaaagccacttcatcttgatttcacctggggtcttgtaccccctttctgggtcctctcctgtggtgtaggcctcactggatctcatggttttcctctcttttttttttttaatttgaagtttgaaaaccatttgagaacttctatagtattaacctatcactatggctgacacacaatgaagatgagattgcaaagaaagcctggcaggcagaagctctggaatgaggctgaatccag

SEQ ID NO: 862522 - DNA, 647 bp, Homo sapiens
tagttaaaaaaaagtatgagattattcctgtggtttttgatttttgattgcaaagaaatgagttgatcttaattgaatttcccaacatgtgtgtgtgtgtgtgtgtgtgtgtgtgtgtgtttcccatcctgtttgaatagttgattactgtagactaggcaagagtttcagattccaagtgccagaggtaatcaaacaacagtccctagccatccacactgtgaagtctttctcggattttgagcagagaaattgcataagaaaggcagtgcttttaaaagcacaaaatcaagcagtgtctataagatattgttttgtcaggttacatgaaaacatttgaaggaagagcatttgcatagagagtacgattttggaaacctcagaagggctgagtgacctgtgatrtacctaaagccacttcatcttgatttcacctggggtcttgtaccccctttctgggtcctctcctgtggtgtaggcctcactggatctcatggttttcctctcttttttttttttaatttgaagtttgaaaaccatttgagaacttctatagtattaacctatcactatggctgacacacaatgaagatgagattgcaaagaaagcctggcaggcagaagctctggaatgaggctgaatccag

SEQ ID NO: 862523 - DNA, 647 bp, Homo sapiens
tagttaaaaaaaagtatgagattattcctgtggtttttgatttttgattgcaaagaaatgagttgatcttaattgaatttcccaacatgtgtgtgtgtgtgtgtgtgtgtgtgtgtgtgtttcccatcctgtttgaatagttgattactgtagactaggcaagagtttcagattccaagtgccagaggtaatcaaacaacagtccctagccatccacactgtgaagtctttctcggattttgagcagagaaattgcataagaaaggcagtgcttttaaaagcacaaaatcaagcagtgtctataagatattgttttgtcaggttacatgaaaacatttgaaggaagagcatttgcatagagagtacgattttggaaacctcagaagggctgagtgacctgtgatatacctaaagccacttcatcttgatttcacctggggtcttgtaccccctttctgggtcctctcctgtggtgtaggcctcactggatctcatggttttcctctctyttttttttttaatttgaagtttgaaaaccatttgagaacttctatagtattaacctatcactatggctgacacacaatgaagatgagattgcaaagaaagcctggcaggcagaagctctggaatgaggctgaatccag

SEQ ID NO: 862524 - DNA, 642 bp, Homo sapiens
ccaacttatgaatgttaataagccctaatatagaataggagagctctgtgtgtcctcatttctacatgatttcctctctaaaaggggaagaatgagacactacgatcattgttaccgatgatatccagtacaattccattcaatcctgttgcatattcaaacaagattttgttagattcagtttaagactttacaytgaaaaattaactagatgttggggatagagtttaagttattctgaaagctgggctcaaaccttaagggatgataaacctaggtagacaggaaatatacaaattatgtaaagctcttagaaaattatattagagaaaatacttgtagttgaattaagaattaaaaatgaactcatcagatgggaattgaacaatgagaacacatggacacaggaaggggaacatcacacttctggggactgttgtggggtggggggaggggggagggatagcattaggagatatacctaatgctaaatgaggagttaatgggtgcagcacaccaacatggcacatgtatacatatgtaactaacctgcacattgtgcacatgtaccctaaaacttaaagtataataataataaaaaaaagaactaaaaatcatactaattgcctataatggtttata

SEQ ID NO: 862525 - DNA, 642 bp, Homo sapiens
ccaacttatgaatgttaataagccctaatatagaataggagagctctgtgtgtcctcatttctacatgatttcctctctaaaaggggaagaatgagacactacgatcattgttaccgatgatatccagtacaattccattcaatcctgttgcatattcaaacaagattttgttagattcagtttaagactttacattgaaaaattaactagatgttggggatagagtttaagttattctgaaagctgggctcaaaccttaagggatgataaacctaggtagacaggaaatatacaaattatgtaaagctcttagaaaattatattagagaaaatacttgtagttgaattaagaaytaaaaatgaactcatcagatgggaattgaacaatgagaacacatggacacaggaaggggaacatcacacttctggggactgttgtggggtggggggaggggggagggatagcattaggagatatacctaatgctaaatgaggagttaatgggtgcagcacaccaacatggcacatgtatacatatgtaactaacctgcacattgtgcacatgtaccctaaaacttaaagtataataataataaaaaaaagaactaaaaatcatactaattgcctataatggtttata

SEQ ID NO: 862526 - DNA, 642 bp, Homo sapiens
ccaacttatgaatgttaataagccctaatatagaataggagagctctgtgtgtcctcatttctacatgatttcctctctaaaaggggaagaatgagacactacgatcattgttaccgatgatatccagtacaattccattcaatcctgttgcatattcaaacaagattttgttagattcagtttaagactttacattgaaaaattaactagatgttggggatagagtttaagttattctgaaagctgggctcaaaccttaagggatgataaacctaggtagacaggaaatatacaaattatgtaaagctcttagaaaattatattagagaaaatacttgtagttgaattaagaattaaaaatgaactyatcagatgggaattgaacaatgagaacacatggacacaggaaggggaacatcacacttctggggactgttgtggggtggggggaggggggagggatagcattaggagatatacctaatgctaaatgaggagttaatgggtgcagcacaccaacatggcacatgtatacatatgtaactaacctgcacattgtgcacatgtaccctaaaacttaaagtataataataataaaaaaaagaactaaaaatcatactaattgcctataatggtttata

SEQ ID NO: 862527 - DNA, 606 bp, Homo sapiens
cataaggaaatgaatctatcaacacttgaataaacttccaagaagatcccaagtctctggtaaaacccaagccctgggtgacaccttggtctcagcctggcaagactctgagcagttgacccaggtcacctgtgccttgacacacagaaactgtggatactaaatttgtattactgtaaactgctaaggaaaatagtacagtcatgtgtcacttaataacaggcataggttctgagaaatgtgtcattaggtgatttggtcattgtgtaaacctcatagagtgtacttacacaaatctcagtggcataacccattacacacctgggctgtayggtaaagcctattgctcctaggctacaaacctgtacagcatattactgtactgaatactgtggacaattgtaacagaatggtgtctgtgtatataacctatctacacatagaaaaggtgcagtaaacatacaccattataatcttataggaccaccattctagatgtagtctgttgttgactgaaatactatgtggtgcatgactgtactataggatagaaactgttttgctttgtggacacggggagggggaggtggaggtgggtgggtttat

SEQ ID NO: 862528 - DNA, 606 bp, Homo sapiens
cataaggaaatgaatctatcaacacttgaataaacttccaagaagatcccaagtctctggtaaaacccaagccctgggtgacaccttggtctcagcctggcaagactctgagcagttgacccaggtcacctgtgccttgacacacagaaactgtggatactaaatttgtattactgtaaactgctaaggaaaatagtacagtcatgtgtcacttaataacaggcataggttctgagaaatgtgtcattaggtgatttggtcattgtgtaaacctcatagagtgtacttacacaaatctcagtggcataacccattacacacctgggctgtacggtaaagcctattgctcctaggctacaaacctgtacagcatattactgtactgaatactgtggacaaytgtaacagaatggtgtctgtgtatataacctatctacacatagaaaaggtgcagtaaacatacaccattataatcttataggaccaccattctagatgtagtctgttgttgactgaaatactatgtggtgcatgactgtactataggatagaaactgttttgctttgtggacacggggagggggaggtggaggtgggtgggtttat

SEQ ID NO: 862529 - DNA, 618 bp, Homo sapiens
accaaccaaaatgcccatcagtgatagactggataaagaaaatgtggcactatacaccatggaatactacacagccataaaaaggaatgagattatgtccttttcagggacatagatgaagctggaagccatcatccttagcaaactaacacaggaaaagaaaacccaacaccgcatgttctcactcataagtgagagttgaatattgagaacacatggacacggagaggggaacaacacacaccagggcctgttggggtgtgtggggtgcagggagggaacttagaggataggtcaataggtacagcaaaccaccatggcacacgtagacctatgtaacaaacctgcatgttctgcacatgtatcccgttgttgttgtgtgtgtgtgtgtgtgtktttagaagaaataaagacaaaacaaaaaaacaaaaataaaaacaaaaacaaagctcctcatgccagtggaccatcaagcaaagaaaggagttactactgttctggcaaaggtagcttatctgaatgagctgaggagacagcgctgctgccccctagcaggcagggagaagaatgtctggagcccaggggattgaatgtaatacctgttgctgcttctgtgct

SEQ ID NO: 862530 - DNA, 541 bp, Homo sapiens
aaatggcaacagtgatgcagataccaaaccagaaagaactcattccctaagccaggattgaacctgggctgtcattgtaaaatggtggaggctaaaacaaagtactgccacatgattacaggtcacactcccaaatacataaaacaagttggaggcctgcagcaaagtttgctactgattacacagaaagacatgcaaagtacaccagattggctacagcttgagaccaacctcacaaaaacaacatcactgtttacagaggatataaacagtgataattggggtcctggcctagtaaaatgttttctaaatggaaaaaactctcccttaaaagttaactcctgacctgggggagaaaagaaaaaaaagcaaaacaacakttaaagttcagggctgtgttaacagctaactgggtaaaaaaaaaaaaaagaaaaagaaaacaaaacaaaaaaaccgcttaaagtgcagggtttgaaagatgcttggggtgatcacctcttattcttaggcaaatggttttctccaacagggagaaaaacct

SEQ ID NO: 862531 - DNA, 648 bp, Homo sapiens
tgtttcgtattttaaaagttagtttcagacagctgatagctttctgtttcttggagaaaacacagtcatcttacacagtgatattctgtccttttacatgttcacagttcccacagactctgccgtggttcctcacaccaatatggatgcaggggaagacagaagttctggaaggcaatccacccagatcttcccttcatatgagaaaagagccactcctcaagaccaaacaatacaagggcagcaagatccaaacaacttctgggggctaggtggaaattctaccatgtgtgacctggagctggggaaagaaatgagggctgcctggcctgccgctgcatgaggagggctgccagcctaaggacttcaagtcctcctccacagacttccagccsttgacctgctggtaacaggaagatagttcgtgaaacagctcagcgctggtctacatccaccatgtacactggatctttggaaagttgtgatttttagaatctctgaagataatccaattacactttgttcagatgaaaaatgatcactgttctttcatgattattggtcttcatgtagttgttgttattataaataactgaatcactattgaagaaatctgcccacagaataaaattcagattatcactgtaa

SEQ ID NO: 862532 - DNA, 641 bp, Homo sapiens
ggctctacctttatcctgtacttctgctttcctgtaagtagactagtcctacctgtgaagcaccatttttcattctcagtacattgttgactatgcatatcaaagaactatatgataaagtacaccatgattttattactagtatggtttctgattgtgttctagccacacatcattagtcctgctattaagaaaactagtaccattcatttccaagacaaataggtgtccctacctaaggcattgagagataaggccatgcatattcataaggaaaattttctcctcccaaagatttaactgatttttctctttaagcttctatagtaaaaatraccagaagttcagggaataagatcaagcccagaatcacatcattcctgactgtgaaaaacagatctttggtatctatataacccaagaacatggcttggtttcatacgtgaactgagaatattaatatttatatagtagtcataaaaacaaaatgatatcacttgcatataattcgatgatgttcaacactgtatcttgcatatggtaagtgcttagtgcacagttttctttcccctaagatagtgcatctcaagtgatgtttgtttcataaaattggagaagggaatttaagtcattttattgtt

SEQ ID NO: 862533 - DNA, 641 bp, Homo sapiens
ggctctacctttatcctgtacttctgctttcctgtaagtagactagtcctacctgtgaagcaccatttttcattctcagtacattgttgactatgcatatcaaagaactatatgataaagtacaccatgattttattactagtatggtttctgattgtgttctagccacacatcattagtcctgctattaagaaaactagtaccattcatttccaagacaaataggtgtccctacctaaggcattgagagataaggccatgcatattcataaggaaaattttctcctcccaaagatttaactgatttttctctttaagcttctatagtaaaaatgaccagaagttcagggaataagatcaagcccagaatcacatcattcctgactgtgaaaaacagatctttggtatctatataacccaagaacayggcttggtttcatacgtgaactgagaatattaatatttatatagtagtcataaaaacaaaatgatatcacttgcatataattcgatgatgttcaacactgtatcttgcatatggtaagtgcttagtgcacagttttctttcccctaagatagtgcatctcaagtgatgtttgtttcataaaattggagaagggaatttaagtcattttattgtt

SEQ ID NO: 862534 - DNA, 647 bp, Homo sapiens
atattccattaaaatcttaaaggagtttatcataaccaccagaaaaaatatttctaaagaatcatattttcatagataaaacacttagtgccataggaagacctgctcatgatgactagacacttcagaggcaaaggaaacaagccttggtgtagccttgtgccctttcagagtgagcctttccaccctcttctgctggaaaaacttccactcaagcttaacatctaggcttractaaagcttaacttccactcaagcttaactaaagcattacctttcccctgaagacagacaggtggtggctctttcctccgtgtcctcaggatttggactgcttgtagaatatttctgcacccccaacacctagctcagacactagaacacaaaagaaatgtgataagtatgtgaaagaagaaaaaaggtgagatgctgatcactgcaagccttgacaacagtagccatatgccatgacatccatttgtcaacaatttattttcctattattttcttatttaaattcccccccgttaatgagaagcacttcagttaagtgcttaataaacaagcaattactaaatagacattaatggcctgttgtattattgcctgtaacataaagggatagtgagaggtacaaataaaacccc

SEQ ID NO: 862535 - DNA, 611 bp, Homo sapiens
gacaggggggtgggagcaggaggctgcggaggacttcacagataggctctgcattttaagactttagatctcaaataaggtgggaaatcattttgcatggattttcacccagttgaaaagcaaagcataaaacaagctatactatcgcatgcttattattttgctaaaaatagacacagtataataataattgtgtcttcttctcattaggaggaatgggggtccttgagaactcgcctttatgttgcactatcatattgaccratttctgtgtccgtgtgaacacttcaacagatttctgtcttctaagatccttggaattctcaaatgcagtaactttcacctcccaattttttcagcatctcactctcaggtcacagcctgtttcttctcacatgtgaccctggcccacccactgctgatcatttatccctgataatcctgtgttcacctgcatggaagccacaaggacagctcagaggatctcagaaatggcatgggctctggaacagtaggaagacagggaggcatccaagagtgaagatgaaactgccttcacgaggaccggaagtggagggtggcaacaaaccatgtgtccagggacaaaactg

SEQ ID NO: 862536 - DNA, 627 bp, Homo sapiens
cgggctctgggattgactcagccctggactgtactggcacttgtttgtcttaacctgtgctttcattgaaaaaataatactctctcttcaaaacttctaaatcataggctttccatgtccccaggaattcagatttacattactttcatggcacagagaataccaatcctagaaattaacattatgtagtcacacatgggtaagaatgccttagggtaactggcagaaacaaactgtatttggctctgactttctgaaggtttgctccttcaacccatgctttccaggattccagcaaataaaatccagaaaaacatgaaatataagctcacatttgaaaatcaccaagtacacaragaaacaagccaccacgagaaagccagcagaaaccaggatcttcaggtaacagaatcatagagcacaaaaaaaattatttagatttttcaaagaaatacaagatgaaaaagaataatatgctccaaaatatgctaggaagactagaatataaccaaatgtagcggctaaaataaaaaaaaaaagtcattaaaattaaatacctcaccaatgatgtgttcagtggcaggtaagagatacatgaaaaagaatcagtaactagaaaatagacct

SEQ ID NO: 862537 - DNA, 656 bp, Homo sapiens
tcctattgaatttccttgccatccttgtcaaaaatcagtttaccatatatgtttgggtttattctgtactctcaatctatttgattaatctatatgtctatccttatgccagtaccacagtgtcctaattattttaggtttggagtatgtttcaaaattgggaaatctcagttctccaactttgttatttttttcaagacagttttggatattcaagataactagtgtttcaaaatgaattttagaattgatttctccatctctgcaaaaatcacatttggaattttgatagggattacatactgaatctgtagatcaaattgaggatattccaattttaatagtattatgtctttctgtccatgaaattagtatgcctctccatattattaggttttctttggtttctttcaacatgtttagcagtttgcagtgtacaagtcttacactttttttrgttgcatttagtcataactattttattattttgggtgttattttaaaatgatttttttcttaattttaattttagattatttattgctagtatatagaaattggttttcatatatttgtttatcttgcaactttgctgaacttgttttctctctctaatagattttgtgtgtgtgtatgaaggggctatgtgtggatcc

SEQ ID NO: 862538 - DNA, 637 bp, Homo sapiens
aattttagattatttattgctagtatatagaaattggttttcatatatttgtttatcttgcaactttgctgaacttgttttctctctctaatagattttgtgtgtgtgtatgaaggggctatgtgtggatcctttaaggttttctatagaaaagattatgtcatctgcaaatagtgataattttatttttttcaatctgtrtgtgtggaatccttttatttctttgtcttgcctaattgcccatgctggaaactctagtacagcattgaacagaagtggcaagagtagacatcctaagagattagacttttagtcctgatcttagaggaaagttctcagtgtttcaccattaagtatgatgttttcatgggtttttcacacatgtgcttcattaggttgaagaagttcactcctaatcctagtttgtgagtgttgttattatgaaaggttgttggatattatcaaatgttctttctgcatctattgagatgattgtgagtttctttttcccctttatcctgttaatatagtgtatacattgattactttttgtatgttggaacaaacttgcattcatgtaataaaactcacttggtcatgatgtataatccttttaatatgttgctagattttgaat

SEQ ID NO: 862539 - DNA, 630 bp, Homo sapiens
aagattattataagtcctcaataaacagcagtataacttgttgttaagcatcttacacttctcatatttttccaatttttcctctggattttttccaaatgtgtaggccacagaagttagtttagtattcatatccatgtaatggatcttttcacagtaaataattgtccaagattccacagagtggcctccagcctgaaaaggatggtgaaggcctgccatggaggaagagtcgaaggacttggggagtcttacctgcagaagagaaggcccagggagtcatgggttgaagcatatgaaattgatgatattcagccattttgacctaaaaattggtaatttcataagactcaayataatagatgaaaacttttccaggcatcctgcagcctgtcacgggaaacataaactgagtcagtatatacatcaacaaaataaagacctatcaattaattagtgggaacttgcttggaaacagccaatgtaaggaaggatttcagcacagttaaacagtctaaagatgcaataagctattattagagacaccatttcctgtcagtggagatgttcaagaataacctggactaccacatggtaattcaatcctcaaatatcagtttttcactttac

SEQ ID NO: 862540 - DNA, 671 bp, Homo sapiens
ctgttagcatgtatctttttccatccttacaaccaatttgtgtctttacatttaaagtgcatttcttataggcagcctgcagttgggtcttgctttcttgctgagcctgacagtctgtattatagttgaggttcttagacaagtgtcgtttataatgtgactattgatacagttatgtttgtctagtagctgtttgattgctattagtcccaactgttctttgttccccttcttttcctgctttcttttagattagtcaactgttttttacgattcaattttatatatatttttgggtttattagcgataactgttttgctatcttagtgtttaggatttttagtatataattttaacttatcacagttcaccttcagtaatattatacatcatagatggtataaaaattacaatgatacattttcatttttttctgtcccagacacttcctacctgaatctgtgagattatggtttktattaagcattagaatattttgggccattttttctttaattttttttctgtctcttcttttttatttggggagttatctgtgagctgcttgaaagtttcttgcagtttattgtgtcaaatttaggaatttttcctttgttatctctaatttgtgtttatttccatccactatagtttttacttctgacaatgt

SEQ ID NO: 862541 - DNA, 626 bp, Homo sapiens
ctatctgctttggttttcctagcctctcagcttcatcaccccagctctatgtcagattttctccctttttcatggccttgaacctctgttaaaactctgtcaaaagagctgggacatttgtaatgcctgctatatttgttttctgtctttcagtgatcacctaccatcttcattgcctgaagtccactgtgttgaaaatcattgtttaatgtattttgtctgttttgttttttattcatttagataagatgaaaaatcagtatctgttactccatcagagctagtaacagattgcagcagagcttcagcacagcacatgctgcaaaccggccagagtgattttctttcctctttgcttaactgcttctttctcatccttcatttctcagtgtagcatctcttcctcacggaaatcttccctggrtgaagtatagatcaaattatcttatgcaatcatataactatggtttgtgttttttttacaggacccatctgagtttataactgtcatctttttatcttggttcttcgctatactttaagctaaaataatagcagaagtgttgtcttatcttcagagcttattataatatcttccaccttgtaggcactcaatatgtacatac

SEQ ID NO: 862542 - DNA, 589 bp, Homo sapiens
acttcctatggacattagcttttataaacataggatatgttaagtgatggtcttcattcctcgatgtcacattttaaatttatattactttttcttcattttccaaagctccagctcagcatctttgtaagccatatatatatatatatatatatatatatatatatatatatatatattttaaagtctcwgtagactttttaatgtgtcgatttctacaccccagcctcaggtagtataagcttcatgaggacaggaaccagccctgcctgctcacactgtcaccagcatgttcacagggctgacacatgccaggcactcaggtattagttgaataggtaaatggaagactggaaaatgtaggctgaactgagaacttgtggatagacacacctcagtgatttgtgaaaaggaagattggtccaaagcaatgtttgttaaccaaattttcattatcaaagaggaaaaactaaacattccctaacagaaatgaaaaaggaataaaatttttgttagatgatgttgagctttgaaatgccaccaaggacactttcaatatcaaatcttcctcatccccccaactccagaa

SEQ ID NO: 862543 - DNA, 589 bp, Homo sapiens
acttcctatggacattagcttttataaacataggatatgttaagtgatggtcttcattcctcgatgtcacattttaaatttatattactttttcttcattttccaaagctccagctcagcatctttgtaagccatatatatatatatatatatatatatatatatatatatatatatattttaaagtctctgtagactttttaatgtgtcgatttctacaccccagcctcaggtagtataagcttcatgaggacaggaaccagccctgcctgctcacactgtcaccagcatgttcacagggcygacacatgccaggcactcaggtattagttgaataggtaaatggaagactggaaaatgtaggctgaactgagaacttgtggatagacacacctcagtgatttgtgaaaaggaagattggtccaaagcaatgtttgttaaccaaattttcattatcaaagaggaaaaactaaacattccctaacagaaatgaaaaaggaataaaatttttgttagatgatgttgagctttgaaatgccaccaaggacactttcaatatcaaatcttcctcatccccccaactccagaa

SEQ ID NO: 862544 - DNA, 620 bp, Homo sapiens
aaagggaaggagtctctgggtttcaagatgaaatagaagtcaygagaactctataaatttcaattcaagttcactgaagagagctaggagtcagctactgtttgctacagataatattcagtaaggagctaactgctaatgcactggcctggggaagtgtttaatgtcaaatagaaaccaacactagtaaaatacttccaggaggtaagaattttttttttttttttgagacagggtcttgctctggcccacaggctggagtgcagtggcatgatcttggctcactgcaacctccacttcctgagttcaagcaattctcctgcctcagcctccctagtagctgagattacaggcacacaccacgacacccggctgatttttctatttttagtagagtcgcggtttcaccatgttggccaggctggtcttgaactctcgacctcaggtgatcctccccccttggcctctcaaaatactgggattacaggtgtgagccacggcccctggctgctgctcctttttttgtaatggaactgggagatctttaggaatgagggaaatgatcgtttctttgaataaggcagaatactaaagactagccagccctcaggctcatggtg

SEQ ID NO: 862545 - DNA, 639 bp, Homo sapiens
actccagtctggtgacagagcaagcctccatctcaatatatatatatatatatatttatatatacatttatatatactttactatgatagacattttataagcaccatttaccatttgatcacctattaaatgctaaaggctgtacatacatttcactaatccttagaacaactttgttcagtaaaaattattcctggtttacagaggagaaaactgaggctcagaaaggctactcatttatttgaagtctcacagccttcataatgttattcatgcactctttatgccctagatagttggagaaattacaggggagaatctcagaaataactaaaataattgaagatgtaatcaagaaacaaaagtacagtgtttgaatagagaccaactaaagacagctgggactggttcagtctgcctataattgaaaggtaaatcactaggaaagggaaggagtctctgggtttcaagatgaaatagaagtcacgagaaytctataaatttcaattcaagttcactgaagagagctaggagtcagctactgtttgctacagataatattcagtaaggagctaactgctaatgcactggcctggggaagtgtttaatgtcaaatagaaaccaacactagtaaaata

SEQ ID NO: 862546 - DNA, 620 bp, Homo sapiens
aaagggaaggagtctctgggtttcaagatgaaatagaagtcacgagaactctataaatttcaattcaagttcactgaagagagctaggagtcagctactgtttgctacagataatattcagtaaggagctaactgctaatgcactggcctggggaagtgtttaatgtcaaatagaaaccaacactagtaaaatacttccaggaggtaagaattttttttttttttttgagacagggtcttgctctggcccacaggctggagtgcagtggcatgatcttggctcactgcaacctccacttcctgrgttcaagcaattctcctgcctcagcctccctagtagctgagattacaggcacacaccacgacacccggctgatttttctatttttagtagagtcgcggtttcaccatgttggccaggctggtcttgaactctcgacctcaggtgatcctccccccttggcctctcaaaatactgggattacaggtgtgagccacggcccctggctgctgctcctttttttgtaatggaactgggagatctttaggaatgagggaaatgatcgtttctttgaataaggcagaatactaaagactagccagccctcaggctcatggtg

SEQ ID NO: 862547 - DNA, 461 bp, Homo sapiens
gggaaatgatcgtttctttgaataaggcagaatactaaagactagccagccctcaggctcatggtggttgctgctattctgttgaacgtgaaccatagcctttagaaaggagcaagtctttgtggaagacacaggatttgaagtgcaacaaaggggtggaaaccgagctgaccatgataccttcaagtgagtttttccactgaatttgattattttctcatttggcacttctttctgggttttttaagcagcccaaaaactctaggtgattttacttttgtaattgtattctcttgggaatgctcattcctgattcctccttwcaccaaataggtgtgtaaccttcttgtttctgcccataataattctggagtctttaaacaaaacgactgtgacttttcatgatgagtagaagataggttttactcatgctacaatcaatattaattcctcagttcaaa

SEQ ID NO: 862548 - DNA, 646 bp, Homo sapiens
attttccccttatgaatggatttaattatatcctacagtttttaatatgtagaattgatgatgaatttgccttattttatcttcaagctatgggctatttaaaagtatacttttagaaagtttctaaaattgttaccagaaattatgatctctccactttctttgaaattttttacttgttttaacactcgtctatatggttaatttttgaacttgtccgtctatatggttaatttttgaacttgtccacagtttcttgaagggaagtctatttctgcagttaaatctcatgttctgtatgtgtgcattgagtytattttttcataattttaaatcttcatcctccctaattatttttatactttatttactgagagatatattaaatatcctactagaagcatggatttgtctgtctcctcatctgtcaacttttgctttttgaggctgtacttgggtgcatatgattcaaaaaatatatatctttttttaatttgaacttttatcaaaatgaaatgttttccttcatttatgtatgctttcaacattatgtatgatatagctatagtaactggttagactttgcactgtgtatctttcgtgtgtgtgtgtgtgtgtgtgtgtgtgtgtgtttttccactgtgct

SEQ ID NO: 862549 - DNA, 646 bp, Homo sapiens
attttccccttatgaatggatttaattatatcctacagtttttaatatgtagaattgatgatgaatttgccttattttatcttcaagctatgggctatttaaaagtatacttttagaaagtttctaaaattgttaccagaaattatgatctctccactttctttgaaattttttacttgttttaacactcgtctatatggttaatttttgaacttgtccgtctatatggttaatttttgaacttgtccacagtttcttgaagggaagtctatttctgcagttaaatctcatgttctgtatgtgtgcattgagtctattttttcataattttaaatcttcatcytccctaattatttttatactttatttactgagagatatattaaatatcctactagaagcatggatttgtctgtctcctcatctgtcaacttttgctttttgaggctgtacttgggtgcatatgattcaaaaaatatatatctttttttaatttgaacttttatcaaaatgaaatgttttccttcatttatgtatgctttcaacattatgtatgatatagctatagtaactggttagactttgcactgtgtatctttcgtgtgtgtgtgtgtgtgtgtgtgtgtgtgtgtttttccactgtgct

SEQ ID NO: 862550 - DNA, 559 bp, Homo sapiens
gtatctgtaggatctatagtgataactcttcactccttatattctaacttgtgcctagttaggcacaactcttactaattagttatctattgctgcataagaaattacctgaaacttaatgtcttcaaacaacaacaagaatttattatctgtgataggcagacttctaagatgtttcccatgatctcgatgtcttggtgttatgctctgtatgatctcttccttttttagtgtggatgggatcactgcccaaacttttggatgaaatcgagtgagtgtaggtaggatctgtgacttgtttctaactgacataatattgcaaatgtgatgtgttgttactyctgggatatgtgtgtgtgtgtgtgtgcgcacagaagaaaggagagggaagaggagaggaggaggaggagaaagacatacattaggatatgagatagacatatagctggcatgcacacaagattctccttgctgatttgaggaagtgtgtgaccatattgaggaagcccaacagcaggtggtgtctaggacctgagggtggcctccagccaatacccaa

SEQ ID NO: 862551 - DNA, 559 bp, Homo sapiens
gtatctgtaggatctatagtgataactcttcactccttatattctaacttgtgcctagttaggcacaactcttactaattagttatctattgctgcataagaaattacctgaaacttaatgtcttcaaacaacaacaagaatttattatctgtgataggcagacttctaagatgtttcccatgatctcgatgtcttggtgttatgctctgtatgatctcttccttttttagtgtggatgggatcactgcccaaacttttggatgaaatcgagtgagtgtaggtaggatctgtgacttgtttctaactgacataatattgcaaatgtgatgtgttgttacttctgggatatgtgtgtgtgtgtgtgtgygcacagaagaaaggagagggaagaggagaggaggaggaggagaaagacatacattaggatatgagatagacatatagctggcatgcacacaagattctccttgctgatttgaggaagtgtgtgaccatattgaggaagcccaacagcaggtggtgtctaggacctgagggtggcctccagccaatacccaa

SEQ ID NO: 862552 - DNA, 559 bp, Homo sapiens
gtatctgtaggatctatagtgataactcttcactccttatattctaacttgtgcctagttaggcacaactcttactaattagttatctattgctgcataagaaattacctgaaacttaatgtcttcaaacaacaacaagaatttattatctgtgataggcagacttctaagatgtttcccatgatctcgatgtcttggtgttatgctctgtatgatctcttccttttttagtgtggatgggatcactgcccaaacttttggatgaaatcgagtgagtgtaggtaggatctgtgacttgtttctaactgacataatattgcaaatgtgatgtgttgttacttctgggatatgtgtgtgtgtgtgtgtgcgcacagaagaaaggagagggaagaggagaggaggaggaggagaragacatacattaggatatgagatagacatatagctggcatgcacacaagattctccttgctgatttgaggaagtgtgtgaccatattgaggaagcccaacagcaggtggtgtctaggacctgagggtggcctccagccaatacccaa

SEQ ID NO: 862553 - DNA, 544 bp, Homo sapiens
tttctgttccacatttatttcctgtctcatagcactctgctcttcttggatctagtaaggatctcagcattacttatttatacatgcaaaaaattacatcattcttcatttttcatgtcaattactgacatgttttcaagtcttcacaagttatttctgaagatgttggttcattgaggagaggcagtgtcattgtagttaaagaagtttttaaataggttatgttcaataacatttcagagcctgtttctctggamggcatagacatagtggttttatgcgtagttaaacataaaatagctccacaaagtcttttgtacgtgaaagtgttcatatcctggaagattctaatttactactcagtactgtctcctggagaggaaaataggtaagataggctgctgagcctatgataataactcatgatatgaggtgaaagtatagagccaaaatgagagatgatactcaaaccgatgtgagtgaagaacagctgtgaaagtgtctatgggagagagaaggccatggcgctgcttttgtgaagaag

SEQ ID NO: 862554 - DNA, 544 bp, Homo sapiens
tttctgttccacatttatttcctgtctcatagcactctgctcttcttggatctagtaaggatctcagcattacttatttatacatgcaaaaaattacatcattcttcatttttcatgtcaattactgacatgttttcaagtcttcacaagttatttctgaagatgttggttcattgaggagaggcagtgtcattgtagttaaagaagtttttaaataggttatgttcaataacatttcagagcctgtttctctggaasgcatagacatagtggttttatgcgtagttaaacataaaatagctccacaaagtcttttgtacgtgaaagtgttcatatcctggaagattctaatttactactcagtactgtctcctggagaggaaaataggtaagataggctgctgagcctatgataataactcatgatatgaggtgaaagtatagagccaaaatgagagatgatactcaaaccgatgtgagtgaagaacagctgtgaaagtgtctatgggagagagaaggccatggcgctgcttttgtgaagaag

SEQ ID NO: 862555 - DNA, 593 bp, Homo sapiens
cctctttgttactattgggcatcagagatatatgttttgttggtattagctattcaaataggataatcatgaatatgcatacattggctttgtttttcaaggaactaacttttggataaaatagcaatttaatgaaaatactttagagaataacacgatccttcaaaccagactattttagaaacaaaataatgttgaattcattaattgactcctaaagtggttattttcaatgaatatcagagcaatttccaaatggaaaagcttattcatatctaatgtttttagtaactttattttgtatcagtatgccaaatktgatgttttattatactttttgatgaggtttatatattataccttcttgccatgagtggatgaagaaactttctgaaggctaaactagaggatacgagaaatgcaggcacattatgacaccacaggggtgtgagaaataaggaatattatatgctgggattcaccaaacatatatttaagctgatcaattagggacacttccacagaacacttgagaagtgtacattcagctaaagtgccattgtcattgtgtacctgctcaattgtcagtcaag

SEQ ID NO: 862556 - DNA, 593 bp, Homo sapiens
cctctttgttactattgggcatcagagatatatgttttgttggtattagctattcaaataggataatcatgaatatgcatacattggctttgtttttcaaggaactaacttttggataaaatagcaatttaatgaaaatactttagagaataacacgatccttcaaaccagactattttagaaacaaaataatgttgaattcattaattgactcctaaagtggttattttcaatgaatatcagagcaatttccaaatggaaaagcttattcatatctaatgtttttagtaactttattttgtatcagtatgccaaatttgatgttttattatactttttgatgaggtttatatattataccttcttgccatgagtggatgaagaaactttctgaaggctaaactagaggatacgagaaatgcaggcacattatgacaccacagkggtgtgagaaataaggaatattatatgctgggattcaccaaacatatatttaagctgatcaattagggacacttccacagaacacttgagaagtgtacattcagctaaagtgccattgtcattgtgtacctgctcaattgtcagtcaag

SEQ ID NO: 862557 - DNA, 658 bp, Homo sapiens
agaaataggtaactgaaatgttttctaaaacggaagccatatcttaattataccaagaaatattatttaatatgcagataactgattttcctcagactttgttttgccatttttttggaggcgacacacatgtatagactgacggtttttgttttctttgaagaaatgaacgtgctcatttttgttgtatctttttgctctgtaggagtctctacagaccggayactgttgcacagcctgtgacagaggatgagtttgctttggaatctgcggtagagtactctcttgtgaaattaattttctcactctgaatctcagtttttatattattttcttctaaaacttaacagttgtctacctatcattgttttatgttagtattaaaacttttattagagataaccattttaaagaaatgggaggggttaattttatttttttttttactttggcaaataataaatagttgataaattctttgagaggtgtgatctgaaaaaaaattgctggaaaatacacagtgacagaaaaatgatgtttgggaatgctttcccacaagagaggagatacaaattttggtctaggcttatttgagtgtttttactttgagttgtatatcatatgagtatgactaataatacctctgtttaaatgaatc

SEQ ID NO: 862558 - DNA, 620 bp, Homo sapiens
aatcagagaaatgagaattgcactcaggtttcttagttcaaaacccagtcttcttttacatcattctgtcattgagtgattttagttttagaaagagggagtggctctggtgaacacagtggaaaaggatgagaatggaatgagctgttgaacccaatgaaagtggataagaatggaatttgcaggggacagacaaatttgaagatgtagattggagattgtcattgatccctgcagaagagggatccagaagggggagcccataggaaggtatttagatagtgatgaatgaaatgaagctgtaagtactcaggagggagacttttccagcagtctctctcttgagtatctgagtgtttrtgaaggttcttaagcttgctggtttttgtggacctgaataaggcaggatctatatagtgacaataattggattttataatttttaatgttttaatcttctgtgaggaatattcccagagtacatttgtactttgacttttttacactcagctttcaaacacttgcagtgtttcagggggctccctgtagagttctagagtaaagagaatcaatgggcaatctaagtagcttacatgctgaagatccaagactcccatttt

SEQ ID NO: 862559 - DNA, 602 bp, Homo sapiens
tagaaataatgaattgtgtctttctgcttttgtttgtttttataaatttcttttttcacttgataaataaataaaattggtattttattcatattatcagattttccagtatagatcttatgaatttatagacacggaaaatgtttcttgaattactgactgattaagtagtaaatatgacattttctgaagatttcttttttttttttttaataggaaagaaaagcactaccagcaactggacaaaaagcaaatggtattggtattataaaaagtgctccatgagagmaatcaaataatgataatgttgtattttgtgtacaataaaagatggtgaggtagtgaatatagctgaataattttctatgctttaataatataatttttgaaaataaatataactaatttaaatataatttaaaataaatttaaaattaaattaattgttaaattacattaaattataagcctaattttaattaaattatagttataatttattaattttaatagtaaatataatttaatttaaacatactttttcttaaaactttggtgaacacttaaacttgtagatcaaaatataatattcattgttgaga

SEQ ID NO: 862560 - DNA, 655 bp, Homo sapiens
tgtttcccccttaaagcatgtctgtttgacatgtcctaactctgagaaaatccagtgtgtgcttttcagagaatagcagtaaggagtggaaatggccaatggtcaaagtgttacttgtcctcttggctccccttcatgaatgttaaactctaaactactcaggtcacaatttagaacccctttgttgatccctatagagtgttcccagatatcaaatgacaaataggtctttgatgaagaaacaccctgtaaagccatattgctctggtttttgtgtgtgagtgtgtgtgtgtgtatgtgtgtgtattttcttctcttttgaaaactgtaaatagaggaattttcattacaaatgaaaatgtttctgttccatatktatttcctgtctaatgtactttgctcttcctggatctagtaaggatctcagcttgtcttttttatacctgcaaaaaattacatcaagcttcatttttcatgtcaattactgacatattttcaagccttcacaagttatttctgaagatttggtgcatcaaggagagactgtcattgtagttaaagaagtttttaaataggttatattcaataaaatttcagagcttgtttctctggaaagcatagacatagtggtgttatgggtagttaaacataaaat

SEQ ID NO: 862561 - DNA, 574 bp, Homo sapiens
tgacacatttaacattttaataaagctaaaccttatcttcagatgtgtcagaatgggattgtacagatgtcacattacagtggtggtgaaaataatgaagaaacgaatgtaagggtcaaagaatcaagtccaccaatatggatattagatttatgaatgaaaaagagtgtatgtcaaattgggcaggtgtaaacaaagaaagcagctagctaggtaatttggaggtttctgatgaggagatttgtgggaagtcacttaatggaaagcagaggttagaaggatgagggtgacccacaggatctcatttcttctccctagaagttttgcacatcaatgatacatgcttcrttcacatcagtttttcttttttggaaagctgtgtttgctggtgtagttattttgtaaaagaacctgagagacccctatggtatatcatgtgaaactagatttagaaaaaaggaatcaaataatgcatttttagagtactaaacagataactgccaataatggtgacaatcatgacatatgtatatatatgtattatgtcgtattggttggttatttataagaaaag

SEQ ID NO: 862562 - DNA, 618 bp, Homo sapiens
atttaaccagactattttagaagtgaaaataatgttgaattcattacttgactcccaaatggttattttcaaggaatattggcgtgatttccagatgtaaaagcttattcatatctaatgcttgtagcaattttattttgtataagtatgtcaaatttggtaatttattatactttttgatgaagtttatacattataccttgttgccatgagtggatgaagatttcggaaggctaaactagaagatgcaagagatgtaggcacattattacaccatatgggtatgagaaataatgaacattacatactataattcaccaaacatatatccaagctgattaarttaggacacttccactgaagtgatgtgaagtgtacattcaactaaagtgtcattataattgtgtaccttctcactgattggtcaagttaaagaacatgatgaatgtttgcagtaaaatgttccaaatcattctgatatcttgcatgaaagacacgcgggtgcatgtatcacctgctttgacgttgattcccaggtgtatgagttgaactctgattttagatcacatttgtcctcaacactcagcatatccacattgatattgacatggctttatt

SEQ ID NO: 862563 - DNA, 603 bp, Homo sapiens
gggtatgagaaataatgaacattacatactataattcaccaaacatatatccaagctgattaaattaggacacttccactgaagtgatgtgaagtgtacattcaactaaagtgtcattataattgtgtaccttctcactgattggtcaagttaaagaacatgatgaatgtttgcagtaaaatgttccaaatcattctgatatcttgcatgaaagacacgcgggtgcatgtatcacctgctttgacgttgattcccaggtgtatgagttgaactctgattttagatcacatttgtcctcaacactcagcatatccacattgataktgacatggctttattttagttctagacatatggagaaagttatatcacatttgaaattgtcagtatatatttcttgaagcctgtattactattttcttcagtgtatttccttcatgtttagtcccaagaaacaaagtataaaatatcaaagcctacagtaatacaggcaggagtataaaacttgatgctaacatgctatccatgcattaatgtatggataacattatcatatttacatatgattgattatgtaacccttttgcttttcagtgtcttctc

SEQ ID NO: 862564 - DNA, 670 bp, Homo sapiens
aagagaactgaacttctctcctgtctcataaaaattctttttcaaataaactttgttttaaagcataatacattattttagataaatatgcagatacaatgaggaaagagataaatttggccagaaataaataacacttgcaattatttccattatacaaaagaagaaaaataaaaaacaggaaagctttcatttgtctttcctgtgccccagctaaatgaacaaatacatggaagtcagaacagctgtagttataagtgaatcgtgtcaaaaacagttaggtcagtagctgtgatgaaatctggtcatgagacgttctttaacaatggggaacaaacgttaatttgattatcttcttgtggttggttttacatcatgttttcagtagactctcatagatgatsatctttccttaattgtattctgcctgctgtattcatccatgtttctgggacaggactagtaaagggaatgttgctttagcacttacattttcttctgaagctctctaatcctttcatgtgtttcaattcttgtgaataaacacaatgctctagttcttacatatgcttttctatgaaaagttattgctaacccaatgacttccagctctacagaagtcaatcaagaagttaatttttgaaactttttaaaccctttaaaaatcact

SEQ ID NO: 862565 - DNA, 611 bp, Homo sapiens
tcagctctgaggaatgttcaatggggcagaaggaaaaataaaaataatacgggccttagacataaaatgtgagatggagcgctgttcttcacatatgagataaacaagtattctgtacctacattttctgtactgtaaaataacaacacagattaaatatcctcaacctgaaaatccaaaatttgaaatgttccaaaatcccaamatgtttagtgctgacatgacactgcaagtgaaaaatttcacacataagtacttaatacaaacttttctttatgcacaaaattattaaaaatatcatataaaattatcttcatgctatctgtataaggtatatatgaaacaaattaattccatatttagacttgggtcccatccccaagatatctcattatgtatatgcagatattccaaaattttaaaaatctgaaatctgaaagacttctggtcccaagcatttcagataagggatactcaatctgtattaacaatcacatcattgagatgctgtaaggattaatgagattacacatgaaaaggggtagtacagagactggatttcctagttaggagcttcctcctttgtcttcccactattaattttatccata

SEQ ID NO: 862566 - DNA, 605 bp, Homo sapiens
actcatgaatgcttcataacctttctcatctaccactccttccctggtctcgtcctgactgctttctgttgtagtagttgttgctgttgttattactgttagactttttaagtggtttcatcatcaaaaaaataagtgtggaagccagaaccagcttcygccagacttcatgccaagtttaaaaaatgaaaacaatgaataactctaaccacaaataaaaatgcttaaggaatacatgcattattttagtaataaaggcaatcaggtctagataaggttcagtcaaatgagaagcacagatatttgttagtgccaggaggcgttctccctgttgtgttctgacttgagtagtttccagctctcatggaatctaatcacacctgaattaatcatttccacaaatggattattgttttctataaaagtcagcaaagtgaatatataaaaagaagacttatttcaaggaagtaacaagcagaaagtcatgagattcatcacaataaatgttcaagttagaacaggtaagtctaaaaatgcagacgcttaatgggaaatacccaaatcctctcaacaattgattgatggagaagggtaggacagaaaaa

SEQ ID NO: 862567 - DNA, 602 bp, Homo sapiens
catcctgggaaattaactctaaaatctatgttcatacacattttttgttggtggctgtgactgtttctcagcaggaatataatatcttgttcagcacacacccagattaaataaaattacataatgaagagaggayttttttatttcaatatttattttaagttctggggtacatgtacagaatgtgcaggtttgttacataggtaaacatgtgccattgtggtttgctgcacctatcaacccattacttaagtattaagcctagcatgcattagctatttttcctaatgctctccctcctcctaactcacccccccacagaccccaatgttgttgttcccctccctgtgtccatgtgttctcatttttcagctcccacttataagtgagaacatgtggtgtttgattttctgttactgagttagtttgctaaggataatggtttccagctccatcatgtccctgcaaaagacatgatctcattccttttcatggctgcatagtattccatggtgtatatgtaacacattttcttaatccagtctatcattgatgggcatttgagttgattccttgtctttgctactgtgaatagtgctgca

SEQ ID NO: 862568 - DNA, 621 bp, Homo sapiens
ttttctcagccatttaataatatacgcagagagttcaccttcacttttcttttacataaatccatgaaccagattcttcactaagttttcagtaatacacaaactccttcagagatttacttcatatagctttcattttcagtcataacaatattactgaggcacccaaacaaaatcatactatggctaaaataattgtatcacctggctatagtagctacctaacacttgaaattaatattttcataagcaatcaaaaaaagctgattttaattatcttaaaatatatctatattttttctgaattcagaattaaatattttaaagtttacartataatagtggaacttctgtgacttgtagattattcagcacctccttaaagtttcattaaattttactttttctattgacttgagatcaaagaaagaagtgacacaactatgccatagatcaaaacaaagacctggaaaaagtcttctaagtcttgggcactgccctcagccttctcagtaacatgaaaaaatttgagaggtactcaatagatacctgtcagttgaatatgtgaataaagaatgagcaaataaatcatcaaaaggcagaaattcaagatcagagttt

SEQ ID NO: 862569 - DNA, 602 bp, Homo sapiens
gcaggcattttgatagtcctgaggagataattccctgtgccctggggattcatattctgcagagattgtacaaataaacagggaattgcgatgctatataagagggctgactggagtattagggaacatgatgtggggtcaagagaaagtgatatttgggataaatctcaaaaaatgaatgaaagataaagatgtgggggtagtgaagagcatttggtgaacgtgcagaggatgaagaattaaaagtatatactttgctcctgggtctgagtatagtcctacattagaaatgattaaagattcaatagaacatgataaatagggagactgcacaaatcatcagacatctatcaggtgatgaattttaaagaaacttttgcaaagttttttgaccaagaaacatgtttttagtgtagcaccttaygtgacaacattttactaaagtaaaatgttggggaaaaaactatcctagattataaaagtaaaaatagtttttattattcatccatatgtattatcagattgcattgggcccattagtttgtgtatgtctttaaatggtatacaatgccatgagaaaattgactctaagtagcttagtg

SEQ ID NO: 862570 - DNA, 582 bp, Homo sapiens
tgtgtccatcaacagaggaatggataaacaaaatatggtctatgcatacaatggcatattattcagccttaaaaaggaaggaaattctgatacatgttacaacatagatgaaactggagtgaaataagccagacacaaaaagataaaaactatatgattctacttacatgaagtacctagagtagtaaaattcaaagagatagaagtagaatggtggttgttggggctgggagaggagaaaatggggagttttttttaacaggtatggagttttggattgggaagatgaaaaagttatggaaataratgatggtgatggttgcacaacaatatcaatgtacttgatgccacttaaaattgttaaagtggtaaattttatgttatgtatatttataccattaaaaaataattttttttttctggagatggagtttggctctgtcacccaggttgcagtgcagtggtgtgatctcggctcactgcaacctctgcctcctgagttcaagcgattctcctgccttaggctcctgagtagctgggactactggcatacaccaccatgcctggctaatttttgaattt

SEQ ID NO: 862571 - DNA, 675 bp, Homo sapiens
gagctgattgtcatagggtggcaaagctatctttctgaagcctcattcttgggaattccttttatgatggtgatctatgtcattccatcagatgcccctgccatcaccccagataatatttgctcctcccagaaatagcttggagcaaggcccaattttttctgatttaatcttacctgccttctttataatgactcaaaaatgtgttgctacaggacaaaaccaaagttctaagtttatgtgacactcaccctggaaaaacaacagctttatgcatagccagtttcttgagcataaatttggtaccaagyattacaatatccttaagcagataaataacaaatggggaaataatttagtcatttcaattggaacaaattcccaaaatatcttcttgttatcactttgatgaatcagactccagagttcttagggaacatatcacaataactaattaaagcttttaagatgatggaaaggaattaatattaaatgggttggaccaaaagagggaactgtaacacttagtggaaagggcagaagagaaaaggaagaaatcctggctaaactaagaaatgattgtgaaatggactcacccctgagacaaatgtcaaaagcagggaagaaatcacatcttctaccaaattctgccttaaactaaggatctgtaattta

SEQ ID NO: 862572 - DNA, 675 bp, Homo sapiens
gagctgattgtcatagggtggcaaagctatctttctgaagcctcattcttgggaattccttttatgatggtgatctatgtcattccatcagatgcccctgccatcaccccagataatatttgctcctcccagaaatagcttggagcaaggcccaattttttctgatttaatcttacctgccttctttataatgactcaaaaatgtgttgctacaggacaaaaccaaagttctaagtttatgtgacactcaccctggaaaaacaacagctttatgcatagccagtttcttgagcataaatttggtaccaagcattacaatatccttaagcagataaataacaaatggggaaataatttagtcatttcaattggaacaaattcccaaaatatcttcttgttatcactttgatgaatcagactccagagttcttagggaacatatcacaayaactaattaaagcttttaagatgatggaaaggaattaatattaaatgggttggaccaaaagagggaactgtaacacttagtggaaagggcagaagagaaaaggaagaaatcctggctaaactaagaaatgattgtgaaatggactcacccctgagacaaatgtcaaaagcagggaagaaatcacatcttctaccaaattctgccttaaactaaggatctgtaattta

SEQ ID NO: 862573 - DNA, 673 bp, Homo sapiens
caaaaaaataaaagattaacactctcctcctggatgtcatcgtcttctgcccactttgcataacaaaacaacagcaaaggagggttgaacattcagcacctgactgactgcagcatttaggatacaccaacaaagaatcgccctatgaagcgaaacacacttctcattgaatatatattgatgccaaagtttgggaaagctgaaaccccttaagtgatgtaattgttgccgttctgattctcttattttacagagatcagcagagacttgggagatgccaggcagaggttatggccaggctgaggcgctgtccatggtcatgaaataatgacacagattcttcaggaggaagaaaggagcccgcagttttctgctgagcaggaaaggcaccaaacactgctccttgggaagctgtactagtcgggttccccagagaaacagaactaataggataaaaatatgtgtgtgtatgtgtgcgcgtgcgtgtgygtgtatagatagatatagatatgcatatatatcaagctttttgttttcccccatttacagtgctattctttacttctacagggtaaccctccttctattgtgcagaaattttctgtgcaatattctgtggggttttatttatctacctgtctacttggaggctatatatatatatagcctacta

SEQ ID NO: 862574 - DNA, 675 bp, Homo sapiens
actaactataaattgaactaacaattaaactaatctagatatttatcattttatggcaaacattcagatagttaattgcgtatttcaaattaaatgtatattttctctgaacacacttttaggtttattttaaagtttattaagtggccatttcagacttttggagtttatttttcctgtttaaaaattagaataaatgaagcatactacagtaggaattctcctggaaacatatagttcaaagaaatttctggagacgtcgttgtagccctgcagagcctttctttgttgcctacaaggtttcccccaattaaatattctatcagtgctgtgggcataccagtatttttatagcttctgatatccgggatctggtatctgcttctgtcatagttctatttatttcttctgtatgccttgccacttaggaagaaaacatattttatgaaaaatacttttcttctacccttgggagccccagagaaagaagcacaaggttgggatgrcctgtaacatattgtttatggctgtatccaacaagcaacattttgtatgtctacatatggtgcaagtcttattttaattcggcccttgggacttcaatccaataatgctgccaaaatatactcttctaagttcagtgataatagagtctgaggacagcacacttccaag

SEQ ID NO: 862575 - DNA, 525 bp, Homo sapiens
attcagcctaatacaggatgtattttctgttaagttggaaaaatgataacaggctacatgtataaaccaagactctcaggcgataccatatgactaaaacatggtaaaacactttcgtgtaagaaatacactaccatgtaaatatataaaatatgtacttaaaatgctacttcctgaccattatcttatgaatatagttattaaaatggagttttattgtttgtgtgtgtgtgtttatactctactaggagagtataaaccaggaatatattctgtggggcatgcctgtaatgagaatgttgttttctgagaattgcctatagytgtgtcataatgacaaacatgataaatgggagagaagcagttgttccttagagagaaagaatgaacagatgaccaatgtgacaagattgtaggttttacatccaccaagatgtatctgggagtctttaaaccattaagaaaaaaaaaaaattaaagtccgatggtgggagagtcaatcctaaaactgatctgcctttcact

SEQ ID NO: 862576 - DNA, 653 bp, Homo sapiens
aataagtatggaattaagtggcatttggtagaagataaactaacttcaagaaaatcacagcctttcaacaaagagtagtttgagaaattttacatatttaaaattataaagtaataagacttcagttttgactcaatttgatactgtttctcttaaatgttttttgtttaatacaaakaatttatattctcaaatataatgaaagaaaatgggtataattttatgattataataatgttttacatttatgtaaaagagaaatgtcactgactctagtatagaaaaaattgagaaaaactgaatttgtttttttaaataaaataaattcctactattattatataataaatatacattgtagaaaataaattcagcaacaaaattaatattttcccaatcaaaagcataactagtatattgaatttcagatctttttatatataagtatttatattttattctttttctgatcttatcttacattctcttgtgacctgtttttttttcaccagcatctattttcatttctctatttctgtaaaattataactttttaatacataatttacatttaaattatcttaatggactccaaaatgttcaaatcagtggctagttccagacaaaatattgtttctgcttttaatgtttct

SEQ ID NO: 862577 - DNA, 626 bp, Homo sapiens
ttgtataccgaatatctattcctaaatggtaaattagtagactcaatttcattcaacatatatttagtgttcattaatgaaatattattcttttgaatttttagtggcgcttttaaattctaatcaatagcattggcaataacatagtaaatgaagctaaaatattctgagactgttcaacccagggcccttcctaaaaaaacagttggagtcagtctttaaacactgatgatcatagttgcaggaatttacaaggtgttatttgtccattacactgcctccctatagaacagcccaagtacccaccacattcacatttttcccttaaggcatgctaacctcatgtgtggcctatatatggcattattgttgtggccacaactgcggttagatgcctgcatcctcttatagcctcttcccactgttaaagatggtgctgcataactagtatyctgagttttggtagaaaatccctgcttttcttatgtgaaaccttatttatttcaaaaagttacatgatagactcaaaattctagtttttttttttttttggagtgtagtctcaaactttcttagtctagtctcatctgaaagtacccttggaatgtttaattaacaaatctaat

SEQ ID NO: 862578 - DNA, 690 bp, Homo sapiens
taattataataatatggactgttaaaaataaaatgaaatctctctttaaaatgaatatcctgtgtttatacgggaaaggataaacctataatattaaaaataaaagatataagtttttttgtcataaatattttgtttttattttcttcacaaagaatctccatcatagtgatgtctgtcttgagaagaatgtttttcactagagagacataccacatatgtaggttctaggaaattatattttaaatgaaatattacaaagaggtgttttccagctatgtttcttcrtatatacacacacacacacacacacacacacacacacatatatatatgtactccccacagataagaagaaaattcaattgccattctatctttcaaaaaacaaatacccagatagtcctattgaataactgaggccttaaagtctttgaaagtggttgacagctcattttttttttcactgctttgcaggcgggaatgtgtttaggtgattctcattgaaagactattgtgattagagtgatctctgtttgtcagtcagccagacatcgctgggttggaaataccctgaggagacaaactttccagagtcccactattaacaggtgtggacatgtgaaatgagtgagagttgaagggtcagctcttcctcacatgtcagaaatataactgcaactccttctt

SEQ ID NO: 862579 - DNA, 690 bp, Homo sapiens
taattataataatatggactgttaaaaataaaatgaaatctctctttaaaatgaatatcctgtgtttatacgggaaaggataaacctataatattaaaaataaaagatataagtttttttgtcataaatattttgtttttattttcttcacaaagaatctccatcatagtgatgtctgtcttgagaagaatgtttttcactagagagacataccacatatgtaggttctaggaaattatattttaaatgaaatattacaaagaggtgttttccagctatgtttcttcgtatayacacacacacacacacacacacacacacacacatatatatatgtactccccacagataagaagaaaattcaattgccattctatctttcaaaaaacaaatacccagatagtcctattgaataactgaggccttaaagtctttgaaagtggttgacagctcattttttttttcactgctttgcaggcgggaatgtgtttaggtgattctcattgaaagactattgtgattagagtgatctctgtttgtcagtcagccagacatcgctgggttggaaataccctgaggagacaaactttccagagtcccactattaacaggtgtggacatgtgaaatgagtgagagttgaagggtcagctcttcctcacatgtcagaaatataactgcaactccttctt

SEQ ID NO: 862580 - DNA, 645 bp, Homo sapiens
agaattctcactcttccccatgtcagacagtctccatgaagaataatttttatccagcacagaatcaaatgattatcattgatttattttataagaaaataaaaaataaactcctattcatatggataattataatttagaagtggatactctaacttcatgtgcccaaactggtagtagaaatatagtctagtctactgataaaagtgtagactcgtgatagagggacccatcaagttaagaagtacctaagcacttatatttttaaaatagtttattagaacttttttataatgaaaatctcttgagcaaatgtttctttaatatccctaattcctttgtagcaaacttgaagaaataagtacaggattaaacattaaaaattatcaatcaattttccatgtttccataagttgtccaaaattaattcattgtttgattaaaaatttgtatyatccttttcagattttaccatttctctgtaaataattactttattctaacagaagcttattttactcatcagtaaaataatataattcagcagactaaaaagaaaaaacctcatttcactcctggaaacaaaaaagacaagaaaataattattttaaaaactatgttaaacttcaataaaaactgtattta

SEQ ID NO: 862581 - DNA, 595 bp, Homo sapiens
acattttctcatgcttactgctatttaagtgcctcagtttctatacaatctttcacaattacgaagccctaaatggcttcccatcctgcaatgatttcataaggagcctatgccacctgtcatgtaaggctttttccatgcctaataaatatgttttggagggatttcaccagtgtttctgctaagatacatgcataaaatggccacagaggttgtgagaaatctctgcagtttctctttgtctatacacatgaaagtatwgaagaccagcacttggattagttaagataatgttttaattcatcactgtctcctcctccccttggtaccagcttttatgttcattgcattccccacccctttaagtactcagtacctcctgcatggtaacctattctgatatttgatattatcatgcttaatttgactgaatccatttggatattttatctttaagaaatttgtagttttatacttttaatttatgataaaattagattaatatcaaacattaacaagtgacttttaggaaggtatatgagctttcttattgacttcaaactataaagtacaaactgtgacactagaaatttag

SEQ ID NO: 862582 - DNA, 514 bp, Homo sapiens
cttcccagaacctgacctttgtacctgttctttattcctggagtatttttcccctgacaaattacttatcatctatcataattcaggttaaatggcactaactcagggaaggcttccctaactgcctcccttctccaaccaaattaggaacaattatatggccacayagtatcgaatcaagtttataattttaaaataattggaagattttgttgtttaacacttgttttcactataagactgtaattacatgcaagtaagaaccatgcctgtttgttcactcctgccacagtcagagtagtgcctggaatatgcagtaagggctgaacaaacactaaataaatgaacaagtgaataaatggatattgtctcatttttagaacagagtactgaatggatcatgaacactatctggtatgtcacgtaggtaatttacaagggctacaatttcagctcagatttaccttttcctggatacaggtcttgataggtctcttgatgtcatttcacttca

SEQ ID NO: 862583 - DNA, 565 bp, Homo sapiens
cctgacaaattacttatcatctatcataattcaggttaaatggcactaactcagggaaggcttccctaactgcctcccttctccaaccaaattaggaacaattatatggccacacagtatcgaatcaagtttataattttaaaataattggaagattttgttgtttaacacttgttttcactataagactgtaattacatgcaagtaagaaccatgcctgtttgttcactcctgccacagtcagartagtgcctggaatatgcagtaagggctgaacaaacactaaataaatgaacaagtgaataaatggatattgtctcatttttagaacagagtactgaatggatcatgaacactatctggtatgtcacgtaggtaatttacaagggctacaatttcagctcagatttaccttttcctggatacaggtcttgataggtctcttgatgtcatttcacttcagattcttctttagaaaacttggacaacagcatttgctgtcttgtccaaattgttactaagaatcaagagagatatctgacatgaaatgacattggaaaacatt

SEQ ID NO: 862584 - DNA, 626 bp, Homo sapiens
ctcctccatggacctcctctgacatattaaacattgcagtccattataagctgcaagaggacagggatttttgcctgttttattccctactgtatcaccaggggctacagcaatatctgacaaacagtgggcatgtaatgaatatttgttaagtgaagtaataaattcaatcaaatcacatcacctgtttaaagcacttcattggcttcacattgcacttagaataaagagaaattctttttatacaatatacaatatattttatacaatataagttcctgcagaatgcagacactttctacttctccagcctcttttygactcctctcctactagcttctgtatttaagccacattagacctttcttcagttttttatatagactttgtcgcatcacacctcagagattctgtacatgttcttcctcctgcctagaaaggatcgtccctccactttcgccaactaatccctgctcaacttttcatctcagcaggaagcccattctctttggcaatcctctggcctccagcccatttattatatgctcacatgtcaacatgtacttcgtacagcatgtaacacaattgcacttttatattttaacaaattatatttcccatattga

SEQ ID NO: 862585 - DNA, 614 bp, Homo sapiens
tcaagcgtcaatctaaatttaaaactatgcaactgttaaaagctctgctggcttctctttcctacagcaaagttcccctatctaaaccaaactattctcacctcacaccagtattttctaaatgccaccaggaaagaaaacagctggaggtctagagattgtagctctcctaggaaagtctctttcatttctggaattctatttcacctagtcttcactcacatagagtactctgatattctcaaaattctgattttagaaattatctattattttcatctgctgtggcagatgcgttggcctaccacaacgtgttacatctgtcccagaagccacctttttcattttaagtgatattttaaaatatattttacaatgtagttcraaccctaaagtagaagtacaagtttattctttattgccaaaattaatacactatactgggggaacatactttaaaaattgttttacagatatgggtataatagtgtttggtcatcacaattcatgaaaattatactcttagacttctccaaaggccacccatatttgatttcttagcatgttcacaaatcgacttcagatgaattcaagtccttcaatggtatttgctg

SEQ ID NO: 862586 - DNA, 528 bp, Homo sapiens
ctccagcctggacaacagagtgagactttatctcaaaaaaaagaaaaaaagaaaaaagatagcaaaaatccacctgcagattacgtttgtacttttgtaatagcctgctaaaggttggtatgtgttgaaatagatagctagactagccatcaatatcagcacaaactttcttgttacttttatactaactttacaagtcctttgcctctctaattttcagctatctgtattttatggtatacacctgctaaatcaagtctgagtcctcttcaggtcaattctcctccataggcataattatctgaggagttttttatttactctgctaatgcatttkacatcacatcaacattaggctattttttaaatgttttaactgtgatgaaaaagctgtaataaagagagtaaaaataaagtaaacaattatttgtatataagatattataacagatgggacatacagcaggaaatcttctatgatcatatgccagctcctttttttttaatcttcatcatcacaattaatgg

SEQ ID NO: 862587 - DNA, 658 bp, Homo sapiens
tccctgtttcccctttttttcccttttcacccagtaagttttatttttctcaccctttaaagtgtctgcgagcctaatatttcatggccgtgtgacaagaacccatctcttagctgaactaaggagaaaggcctacaacaccttcttgctgaaatactttcttcttttggcatttataataccatgtccacctgaatttccttcagattcactgatctctcctgtttggtattcttttctgacttgtcttttactcgacttcaaaaggtttatattccctggaytcccctctgccccatttctctttatcatttgtttgtttgtttttgagatggagtctcactctgtcgcccaggctggagtgcagtggcgcaatctcgggtcactacagcctctgtctcctgggttccagctattctcctgcctaaactactgggtagctgggattacatgcacgtgccaccattcccagctaaatttttttttgtattttagtaaagacagggtttcaccatgttggccaggctggtctcgaactcctgacctcaggtgatctgccctcctgacctcggcctcccaaggtgctgggattacaggagtgagccaccacaccctgagccaccacgcctggcacccatttccgtttctcttatctgta

SEQ ID NO: 862588 - DNA, 658 bp, Homo sapiens
tccctgtttcccctttttttcccttttcacccagtaagttttatttttctcaccctttaaagtgtctgcgagcctaatatttcatggccgtgtgacaagaacccatctcttagctgaactaaggagaaaggcctacaacaccttcttgctgaaatactttcttcttttggcatttataataccatgtccacctgaatttccttcagattcactgatctctcctgtttggtattcttttctgacttgtcttttactcgacttcaaaaggtttatattccctggactcccctctgccccatttctctttatcatttgtttgtttgtttttgagatggagtctcactctgtcgcccaggctggagtgcagtggcgcaatctcgggtcactacagcctctgtctcctgggttccagctattctcctgcctaaactactgsgtagctgggattacatgcacgtgccaccattcccagctaaatttttttttgtattttagtaaagacagggtttcaccatgttggccaggctggtctcgaactcctgacctcaggtgatctgccctcctgacctcggcctcccaaggtgctgggattacaggagtgagccaccacaccctgagccaccacgcctggcacccatttccgtttctcttatctgta

SEQ ID NO: 862589 - DNA, 644 bp, Homo sapiens
atttcgaagtgcttaaaacttctaaatgtgatgcaggccaaactattagcacttggaacctattaggtctctataatgatgttgcattgcctttgagcagaaataatattcttttgaattcagtttgttaaactgacttcaacagagctcattatttaattgatggctattatttaatattattaaactagctttacttattgagaaaaattaagttcagaattaagaactttatcatgatctcagctaaccttttgaaaaaatgaaattgagatagtcaaaatatgtctgatcattctttacatacgagttatctaagactgaataaactaaaaagttgtcagatggcattatagaatatatatttaataatcagaatttgaagttkgaaaattagtaagatattaggaaaagagcaaaacacatgatgtttaatattaagaatgttactatgttaatgtttattacaaagtaatgtaaggtaactagtatttgatttctgttttactgatataatggctaagacagcagaagaaattctaagatacctctggctgtacagaaattaaagaagtgaatgaaatgcagcacactgtatagaaatgcacaaagtataaccatttcaaggcccttgagatgattat

SEQ ID NO: 862590 - DNA, 427 bp, Homo sapiens
tcctaataatatattttgtagaatccagagacatgagaaggggacctttagacagttgaatcatactcactgactctagcattatgtaaagaagataacagataattaccaagtgaggctaccccaggagtaaaagagtatcagcacaggacaatttataaacttcatttatatactaacagtttaaaggaggaagtaaaaaaaaaaaaaacagacaaggtaatcttatactggtrcagaaaactgctagaacattcagaaaccatgatgaaaactagcagcaaacttgaaatggaagagaactctctcacctttcaagggtatctatttaaaaaacaaaacttacagcaaacatctgattcaataataaaagcttgggaactattattaagtagactagcgtgcctacaatctagtggcctgatgg

SEQ ID NO: 862591 - DNA, 643 bp, Homo sapiens
gctctggaactttgaatctgggttggtcttgtggcctgctttgagcatcacagcagaagtgatattagaggaatttcaagcagaaaccttgagaagacttatcacttccactctcgctttcttggaacctgagacatccttgtgaagaagcctgaactagcytccttgtgtagagaccagctctgctgtcagcccttagcaaccttcagccacttataggaggcactcagtcccagtcgaacaaccagatgactacagttgcatgaatgaccccagatgagactagcagaagagccactcagctgagctaagctcaaattgctgaccaccagaagcatgaacagataaaatgattgttgttcgaagccacaaagttttggtgtgctttgttacccagcaataaataataagtacagcaaactgcccattccccttacccaatctcttagagtttctttccctatgaaattatggtacctaacacagaatacactactctcatttgaggtctgactaaaacaaaatagatcaaaattcgccttttttacataatttatttccactgtaaaagttttaaacttgctctaaatttcaggtatcacattctcagatatgtaatacaactattctctctatataaaaa

SEQ ID NO: 862592 - DNA, 643 bp, Homo sapiens
gctctggaactttgaatctgggttggtcttgtggcctgctttgagcatcacagcagaagtgatattagaggaatttcaagcagaaaccttgagaagacttatcacttccactctcgctttcttggaacctgagacatccttgtgaagaagcctgaactagcttccttgtgtagagaccagctctgctgtcagcccttagcaaccttcagccacttataggaggcactcagycccagtcgaacaaccagatgactacagttgcatgaatgaccccagatgagactagcagaagagccactcagctgagctaagctcaaattgctgaccaccagaagcatgaacagataaaatgattgttgttcgaagccacaaagttttggtgtgctttgttacccagcaataaataataagtacagcaaactgcccattccccttacccaatctcttagagtttctttccctatgaaattatggtacctaacacagaatacactactctcatttgaggtctgactaaaacaaaatagatcaaaattcgccttttttacataatttatttccactgtaaaagttttaaacttgctctaaatttcaggtatcacattctcagatatgtaatacaactattctctctatataaaaa

SEQ ID NO: 862593 - DNA, 663 bp, Homo sapiens
gtaaaatttttccagaacaaaaatttttcaagttctaggcttttaaaaaacatactgaaattatttttaaaaaatattccttcttagcatctgatactttcactaccaattgtaatattcaaagattatagttgatatttaagtagaaaacatgatttcataataaatgagctatgactgttttataggagatagtaaattaatgragaagaaatattttaaataaatgtcctattcaatctttttaaaaaatccatttatttgtatacaatgtaatggtcaggaaaacgtagtgctgctgttgaagatcttgtcattgcttgctgaattgaaattgattatttaatatttatgaagcatctataaagttcattggaaacccacaaagcctgatagttctctcagggagtgtatagtaacataaccaaccttcgtaaggaggtactaatgaaagatctagtagaacaaagacaaacattttaccaaaatggcattctaataatatttttattttttagactttctcatttcctatcactgttctatcaaaacagattattaatgtacattgtttttatagttacaattcagggccatatctctggttttgcttctacaataatggcttattttacccatatcttttcatactaagttttgcac

SEQ ID NO: 862594 - DNA, 608 bp, Homo sapiens
tgtaatcccagcactttgggaggctgaggcaggtggatggtctgaggtcgagtttgagaccagcctggccaacatggtgaaaccccatctctactaaaagtacaaaaatcagctgggtgtggtgggatgagcctgcaattccagttactcaggaggctgaggcaggagaatcacttgaacccaggaggtggaggttgcagtaagccaagatcataccactgcactccagcctgggcaacagagtgagactctgtctcaaaacaaaacaaaacaaaacaaaaaccttgaatccctagcagacacacacacaagcgctggacatggggaggaacacaccagcagaagaacatrcagatgccaacaggccatcaacagtggaaccacgtggacactgagggaaattcagccaagggcagtcagaggagagcccagctgctgggcgaccaactccagggaaagaccactttcccactccatcccccttctagctccccatccatctgctgagagctacttccaccattcaataaaactttgcattcatcttccaagcccacctgtgatccgatttttctggtacactagggcaagaaccctgggatacagaa

SEQ ID NO: 862595 - DNA, 645 bp, Homo sapiens
acaaaaattagcctggtgtggtggcaggcatctgtaaccccagctactcgagaggcaggagaattacttgaacccgggaggcggaggttgcggtgagttgagatcatgccactgcactccagcctaggtgacagagcaagactctgtctctaaaataaataaataaataaataaataaataaataaaaagtaaataaacatttatttgatgaaagccacaatatggagcattttgtcaatatttgttaattgggcaatatgtgcctcaacttggcctttgcttccagagtttttacacagagggtgaatcagagatgctgtcaggcagctccactgagcaactgcttctctagctcagctctgagcaatgcctgagggctgcaaccaggtgctctggtgcccaggtgcagcgtttacaggaagaaggaggagcagagaaggggatcatgaaccacacayaaaaaagcagctccaggcaagaaacctttgtttctcacttaccagaagatcatggtgcccattattaggactcagaataagcatcagacttggggagtaagattcgagtgtaagcacccttaggaggctaatgccaaggagcatacggagggcccttcgggaggggtcatggacatggctcttaca

SEQ ID NO: 862596 - DNA, 645 bp, Homo sapiens
acaaaaattagcctggtgtggtggcaggcatctgtaaccccagctactcgagaggcaggagaattacttgaacccgggaggcggaggttgcggtgagttgagatcatgccactgcactccagcctaggtgacagagcaagactctgtctctaaaataaataaataaataaataaataaataaataaaaagtaaataaacatttatttgatgaaagccacaatatggagcattttgtcaatatttgttaattgggcaatatgtgcctcaacttggcctttgcttccagagtttttacacagagggtgaatcagagatgctgtcaggcagctccactgagcaactgcttctctagctcagctctgagcaatgcctgagggctgcaaccaggtgctctggtgcccaggtgcagcgtttacaggaagaaggaggagcagagaaggggatcatgaaccacacacawaaaagcagctccaggcaagaaacctttgtttctcacttaccagaagatcatggtgcccattattaggactcagaataagcatcagacttggggagtaagattcgagtgtaagcacccttaggaggctaatgccaaggagcatacggagggcccttcgggaggggtcatggacatggctcttaca

SEQ ID NO: 862597 - DNA, 531 bp, Homo sapiens
acaaaagacccagaatagccaaagctattctgggcaaaaagaacaaaactggaagaatcacattgcctgacttcaaattacattacagagctataataacccaaacagcatagttctggcataaaaacagacaaatagaccaatggaacagaatagaaaatgcagatacaaattcacacacctacaataaactcacttttgataaaggtgccaagaacatacactggaaaaaaagacatttttttcaataagtagtgctgggaaaactggatatttatatacagaatgaaatgtatctcccacmatatgcaaaaatcaaaatagactaaagaattaaacctaaaacctcaaactgtgaaattaccacaagaaaacatttggaaaaatctctaggacattgccttgggcaaagattttttgagtaataccacataagcagaggcaaccaaagcaaaaatggataaataggatcatatcaagttaaaaagcctatgcacagcaaaggaaacaatcaacaaaatgaagagaaaa

SEQ ID NO: 862598 - DNA, 599 bp, Homo sapiens
gaaaacatgacatatgtacacagtagaacactatttggccattaaaaaaaccatgaaatcatatattttgtagcaacatggatggaactggaggccattatcttaagtgaaacaagtcagacaccaaagacacatactgcatgttctcacttacaaatgggagctaaataatgtgttcacatggacatagagtgtggaataatagacagtggagactcagaagggtcagtagataggagtgagtgggtgacattatttaatgggtactatgtacattattggggtaatatataccctaaatgtccgacttcaccaatacacaatctatgcatgtaacaaaattrcacttgtacctcataaatttatataaatttttaaataggtaagtaagcctcttaccaggtttacaacctaggactgtctttctcaaagacttgggaaccatatctaaaataaaatcatcaaggaagatagcagccctatctcttagtttccatggaaggataggaacctatttttggcagcctctctccaagttgcaaaactttcttccatcataaaagcacgaaaagtttactttttttataaagccaattaac

SEQ ID NO: 862599 - DNA, 661 bp, Homo sapiens
tctcacttacaaatgggagctaaataatgtgttcacatggacatagagtgtggaataatagacagtggagactcagaagggtcagtagataggagtgagtgggtgacattatttaatgggtactatgtacattattggggtaatatataccctaaatgtccgacttcaccaatacacaatctatgcatgtaacaaaattacacttgtacctcataaatttatataaatttttaaataggtaagtaagcctcttaccaggtttacaacctaggactgtctttctcaaagacttgggaaccatatctaaaataaaatcatcaaggaagrtagcagccctatctcttagtttccatggaaggataggaacctatttttggcagcctctctccaagttgcaaaactttcttccatcataaaagcacgaaaagtttactttttttataaagccaattaactaacacagatggtcacctaaattaccaaatacatttataataaacagatagtgctgttaactcctcttatttgagaactagttattgtttatcatgagaagacatatacaattgacacttctgcttggttacataaaagagtatgatttatatttatctttgtaacttctcaagcagattgcctgtaatatgcgtctcattctgtt

SEQ ID NO: 862600 - DNA, 528 bp, Homo sapiens
gtgtagttttaatagtattctaagtattgatttctatttttattgtactgccgtccaagagtgtgcttgatatggttttgattttttaaatttattaagatttgctttacagcaaagcatgtggttgagcatagaatatgttgatgtatggatgagaagactgcatattttgttgctgttggatacagtattttgcagatatgtattagggtctgagtggtcaagtgtcaagtttaaacccagaatttgttagttttctgcctcaatgatctgtctaayactgacagtggggtgttaaagtcccccctattattgtatggctgtctaagtcttttcataggtaaagaaaaacttgttttataaatctgggtggtgctatgttgggtgcatatatatttagaatagttaagtcttctggttgaattgaaccctttatcattatgtagtacccttctttgtccttcccaattgttgttcatttaaaatctattttatctgataaaataataacaactcctgctctttttg

SEQ ID NO: 862601 - DNA, 686 bp, Homo sapiens
tggagaattgacttacacaattgtggagactaagaagttccacagtctgccatcagcaagctagagaaccgggaaagcaagtggcatacttcagtctgaatccaaaagcatgagaaccaggggaggcaatgccgtctcagtctgagggcaggagaagaccaacttcccagctcaaacaggcagataggagtgatgaattccctgttcctctgccttttgttctattcagacacttcacggattggataatgctcttccacagtggggacggtggtctaccttatggagtgcaccaatttaaataccaatctcatctggaaatactctcaaagaaataatgtttatctatatatctgggtaccccatgaaccagtcaagtggatacatagagttaaccatcatacacgtatctaccgtttctgacaactttcatttctttatatggatccatatttccatctaatataattttccttatgctgaacaactttcttccacatttcttytagagtaggtttaatgatagttaatcctttcagcttttgtatgagtaaaaagtccttacttcagctttatttttgaatgatgatttagtgcctttgctttgttttagtctcttttctttttgtgtttctgtttagatacttgctattcctgacatacgcttcatactctttttttgtctg

SEQ ID NO: 862602 - DNA, 674 bp, Homo sapiens
gcattttttgaaagattttcataatccccacatatgtgatatgcctcccttttataagaagtttcctgactccagacctgtatctacctattcccatatctaaagttttctcttgtataccttattggaaaccatttcagcaggtaacatcagtggaagtgatttgttagtattcatgataaggtttaaaagaaaaaaacaaaaaacagcatgcyttaataaatcaattaccaattaccttacatggaaagctgctcattcataattttgcccactgaagaaaccaagaatatatggtgtgaacgtacagttaccagcctgggaggtcagtggtctactagctttgctgggtaagcctttgcctcaggccaatgggtgtggaatttgaggataatggaacttctctcatagccctccaactcagttttcatgaggagtttactctgtgatgctcacagccttcactcatttagtaattcagttgctcaaaaatgtttcttgagaatttgctatgtgataggcactgcactgagtacagaagatataacattgttcaatacttatttaactgacctcaaaaagcttaatattcagccccactgttttacatatgaaaggcaagaccattcaacagcttgatatttatgcaatattttgcataaatatatttttta

SEQ ID NO: 862603 - DNA, 674 bp, Homo sapiens
gcattttttgaaagattttcataatccccacatatgtgatatgcctcccttttataagaagtttcctgactccagacctgtatctacctattcccatatctaaagttttctcttgtataccttattggaaaccatttcagcaggtaacatcagtggaagtgatttgttagtattcatgataaggtttaaaagaaaaaaacaaaaaacagcatgccttaataaatcaattaccaattaccttacatggaaagctgctcattcataattttgcccactgaagaaaccaagaatatatggtgtgaacgtacagttaccagcytgggaggtcagtggtctactagctttgctgggtaagcctttgcctcaggccaatgggtgtggaatttgaggataatggaacttctctcatagccctccaactcagttttcatgaggagtttactctgtgatgctcacagccttcactcatttagtaattcagttgctcaaaaatgtttcttgagaatttgctatgtgataggcactgcactgagtacagaagatataacattgttcaatacttatttaactgacctcaaaaagcttaatattcagccccactgttttacatatgaaaggcaagaccattcaacagcttgatatttatgcaatattttgcataaatatatttttta

SEQ ID NO: 862604 - DNA, 652 bp, Homo sapiens
aaattagtttaaccattgtggaagacagtgtggtgattcctcaatgatctagaacaagaaataccatttgacccagcaatcccattactgggtatatacccaaaggattataaatcattctactataaagacacatgcacacatatgtttattgaagcacttttcacaatagcaaaaacttggaaccaagccaaatgcccatcaatgatagactgaataaagaaaatttggcacatatacaccatggaatactatgcagccataaaaaggatgagttcatgtcctttgcagggacatggatgaagctggaaatgtcattctcagcaaactaacacaggaacagaaaaccaaacacaacatattctcacttgtaagtgggagttgaacaatgagaatasatggacacagggaggggaacatcacacactggggcctgtcagggagtggggcactaggggagggatagcataaggagaaatacctaatgtaaatgacgggctgatgggtccagcaaaccacatggcacgtgtatacctatgtaacaaacctgcacgttctgcacatgtatcccagaacttaaagtacaattgaaaaataataatactaaatacttacacttcatgctttttatttcttggatgtgttaaaataa

SEQ ID NO: 862605 - DNA, 584 bp, Homo sapiens
atatgctaatttgcttaggtaagtaattgaagttactgaagtggagaaagtctagaaactacaaaaatatggcaatataactctttggttttacctaactttataatcacagatcctcatactttaatacctggttgtatatgatgcaaatttttattttattaaggtcaatctggtgtgcactgaactgaaaaatataaactttggtttctaactacattgcttagctttaaaaatttactctttattttagaactgtatatacacattcagaaattagactagacgtaatgagtgagattctataattatgtagatatcaatttgggggtataagaagtgacattcataatgaagaraatttcatttttgagacaaaagaattcacaaattttggtgaatacaaagattgtcgtatgctagatccatcaaaattataatggagttgatctgaataactttcctcaatattacttgtaattccttcaatgattcaagtagactgagagcttattttctgtggataccattttgagaattaagcgacagtcttgaagtgaattattttgtagtattccagttga

SEQ ID NO: 862606 - DNA, 584 bp, Homo sapiens
atatgctaatttgcttaggtaagtaattgaagttactgaagtggagaaagtctagaaactacaaaaatatggcaatataactctttggttttacctaactttataatcacagatcctcatactttaatacctggttgtatatgatgcaaatttttattttattaaggtcaatctggtgtgcactgaactgaaaaatataaactttggtttctaactacattgcttagctttaaaaatttactctttattttagaactgtatatacacattcagaaattagactagacgtaatgagtgagattctataattatgtagatatcaatttgggggtataagaagtgacattcataatgaagagaatttcatttttgagacaaaaraattcacaaattttggtgaatacaaagattgtcgtatgctagatccatcaaaattataatggagttgatctgaataactttcctcaatattacttgtaattccttcaatgattcaagtagactgagagcttattttctgtggataccattttgagaattaagcgacagtcttgaagtgaattattttgtagtattccagttga

SEQ ID NO: 862607 - DNA, 586 bp, Homo sapiens
caaaataagaaactgtaagtgaaactaagcaggcacaaaaatagtaaaattatacttgaagtttaaaatccaaagactataaaaatacctttggccaaaattattaaaaatagaaagtaagttttaaagtgacatatgaaaagaaaagggcattgtgaaaatagaatggatatataatgaaaaagaaaaaatatataattcttatgaacaaaatatagagccattacaatttttttaaatactccagtgaatgagttaagctgcatattaaacatttgaaaagagactaactatgcaacaatataaggaaattatacagaatgcactgggrgaaaacagttccaaaaaaagaaagaatgtaaaaattaaagaggaagaaaaaataatttaagaaaatgtcccgtaaatgtagggtatgcacatctacatagaaagggtaaacagctccaataagattatcatacatgaaaaagtctgatatcaccctgagtgagtgaactatataaatcaatatagttattttggaggtcaatctgtaagttctaggaagattggcaatgtgagggttaaacaagttaattaatgc

SEQ ID NO: 862608 - DNA, 597 bp, Homo sapiens
tgtctctttaggcaaattatgtgacctttccaagtttcagttctctaactttaaaaataagaatagtaaaataaatttatgatattactatgagcattaaatcagaaaatgcattttaaagagtttcacacagaggggacactcaactaatataattgttccttttcctttttctttccacctttttcttatttaacttcacagggagagaagcagtatacatagccattagaacaaagattctcaagccaatatgcctggatttggttattattctgcgatttaatatctacatgacttttggtagctctatgcctaatttttctctgcagtaaaatagaaatcaaaaggacctaatttttagggatattgtgaaaaataattaatatataaaaatcatttaaacatgccygacacattataagcactaaatgagtgttaactattatttttacaaatagaagggaaaacaataaattctaagatattacaggcttctattgaaaatatcctgggttgttatacttaatccacacatattcctctaacgcctacacaaattgcacttgaaacatagtaatcatgattgcagtcaag

SEQ ID NO: 862609 - DNA, 604 bp, Homo sapiens
acacaactgatttttgtatgttgattttgtattatgcaaattgcttgaatttgttttttagttctaagagttttttgtttagtcattagagttttccacatataagatcaggtcttgtgcaaacaagtaattttattttattcctggtttatatgtcttttatttctttttcttgcttcattgttctgataaggtcttccagaaccatgttgaataaaagtggtgatagtgggcatccttgtctaactcctgatcttagagaaaaatatttyagtttttcactattgaggatgatgttagctgtgggcttgtcatatatggccattattatgttaaagtaaattccttctagacctggtttgttgagtcgttttattatggaggtgttgatttttgtcaaattctttttttgcatattttgagatgatcatgtgatttttatcctcttaatgtggtttattacattatttgatttgtttatattaaaccattcttgcattccagagataaattccacttggtcatggggtatgatcctcttaaggtactgctgggttcattttgtcagtattttgttgaggagttttgcatctgtatcagagtg

SEQ ID NO: 862610 - DNA, 604 bp, Homo sapiens
acacaactgatttttgtatgttgattttgtattatgcaaattgcttgaatttgttttttagttctaagagttttttgtttagtcattagagttttccacatataagatcaggtcttgtgcaaacaagtaattttattttattcctggtttatatgtcttttatttctttttcttgcttcattgttctgataaggtcttccagaaccatgttgaataaaagtggtgatagtgggcatccttgtctaactcctgatcttagagaaaaatattttagtttttcactattgaggatgatgttagctgtgggcttgtcatatatggccattattatgttaaagtaaattccttctagacctggtttgttgagtcgttttattatggaggtgttgatttttgtcaaattctttttttgcatattttgagatgatcatgtgatttttatcctcttaatgtggtttattacattatttgatttgtttatattaaaccattcttgcattccagagataaattccacttggtcatggggtaygatcctcttaaggtactgctgggttcattttgtcagtattttgttgaggagttttgcatctgtatcagagtg

SEQ ID NO: 862611 - DNA, 582 bp, Homo sapiens
aacagtcttaaatggctaaatctacccctgccctatcccctggcagtgggggtgtggtgcagagagtgattctgtgtgttggagagagggagagtgcagcaactgtgaggcattaaactcagtgctgctttgttatagcagaaaggaaaactggaccaaactcagctgatgcccactcacggagggaacatttacaacagcactagccagaagggaatcacagatcccagtgcatgcctcaccactgcaggctaaaggtctctggggtttcaaatgaacttgaaagatagttaaggccacaagtactgcaactcctargtgaaatgagtcctagtgctgaactgggcccagagacagtgggcttgtggggcacaggggaggaactgggaatagatttactgagaactggccaggacagctgagggaatgctggcatcacccctctcctaaccccaggcttcatagctcatggctccaaaagagaccccttcctaacacttgagaagaagagagagaagagtggagaggactttgtcttgaatcttggataccacctcagccacagcaggatagtaaaccagt

SEQ ID NO: 862612 - DNA, 644 bp, Homo sapiens
cttaaagcaaaagctttcagtctttcaccattgggcatgttcactgtagatttttcatatatggcttttattatgttaagggagtttccttctattcctagtttattgagaattttttttatcatgaaaaggtgttcaattttgtcaaatgctttttctgcatcaattgagatgatcatgtgtttttttcccttcatcctattaatgcaatatattgcattaactgatttttatatattgaataatctttgccatgcaggaataaatcctacttggtcatggtatataatccttttaatatactactggatttgatttgctagtattttattgagaatttctgcatcagtgtttataagggatattggtctacrgttttcttgtgtctttgctggctttggtatcaggataatgctggtctcatagaatagataaaaagcgttccctcctcttcaattttttggaaagcttttagagggattgggttagttctttgaacgtttggcagaattcaccagtgaagccatgaagcccagagctcttcttttttgggagatatttgattaatggttaaatgtccttactagttataagtctattcagattttctatttctttttttttgtgggtacatagtaggtgta

SEQ ID NO: 862613 - DNA, 644 bp, Homo sapiens
cttaaagcaaaagctttcagtctttcaccattgggcatgttcactgtagatttttcatatatggcttttattatgttaagggagtttccttctattcctagtttattgagaattttttttatcatgaaaaggtgttcaattttgtcaaatgctttttctgcatcaattgagatgatcatgtgtttttttcccttcatcctattaatgcaatatattgcattaactgatttttatatattgaataatctttgccatgcaggaataaatcctacttggtcatggtatataatccttttaatatactactggatttgatttgctagtattttattgagaatttctgcatcagtgtttataagggatattggtctacggttttcttgtgtctttgctggctttggtatcaggataatgctggtctcatagaatagataaaaagygttccctcctcttcaattttttggaaagcttttagagggattgggttagttctttgaacgtttggcagaattcaccagtgaagccatgaagcccagagctcttcttttttgggagatatttgattaatggttaaatgtccttactagttataagtctattcagattttctatttctttttttttgtgggtacatagtaggtgta

SEQ ID NO: 862614 - DNA, 588 bp, Homo sapiens
agtgtgccttctaagcctcccttcagttcattggtctgtaggcaggccctggtgcagagccttgtgcccctccactggacagctggtttaggtagccgcagaatcattcatcatcactgtttttggatcttgggctatctgtgcatgaacctaagtaaatactcagccaggcaccgctttactgatgagtcagctggggaagactttgtcaaatgatttgyagaaacagaaatgtgatttacctcatctacctatctggaagtccactcaaaaaagaaaaataagtatgactatcctgatttattcttagtatctctgtgttgatgcttcatgactactgtatgcttttctaaattctcacaaaccatcgatttaataatccatcagtacaaaagggtgtgccaatgggtcacttaaaatggtctctaggccccaacttccaagaagtctcagtctacccttaacattggaaaagtcagtacagtctaagccacatttttataactagctttactggctatcttccttcgattatcttaataagtttagtggtacaactgaatcctagtttaataaaatcccataaac

SEQ ID NO: 862615 - DNA, 575 bp, Homo sapiens
tttgcaaatttatcctactttcattgcagatgaattttgtggttgtattccgtgacatccttgttaatttgttaagatttttttttcacagatgaggtgggaagcagtatctcttttccatgacattgaaaccagaagcttggacaggaattaaaaaatttatttttctattttttatgaagcatctcttgtcattttggcattctttcttgtcaaatcattgtgaggtgggaattcaaaaattacttcaaaataaagatacattgttaaaaattaatatagacaactataattyttaaagaaatatcaaagatggtggaggatttagggcctatttttaattaatttgaaatatatttgaggataaaaataacactaatataatcctttggttatataccaaaggattataccaaatatatacccaaatatatatatttgggtatatatcaaatataacccaaagaataatattagtgttatttttatcctatattaataattgtctatattaatttttaacaacatatctttactttataaatcatgctgctataaagacacatgcgtacata

SEQ ID NO: 862616 - DNA, 642 bp, Homo sapiens
ttttgagatgattctgtggttagtcctctgtagtctaatataggaaaagatattgactgatttttcaatgtttgaataatggaattcctggaagatattccatttagtaatgtgggttatcctttctatatgtatttctatttgctttgctaaaattttgttatataaatgttggtcagtaattacatttctttgtaatatcttttaggatttctgtttgttttattgttgtactgattttgatattggggtaacactagccttgtagaattcgttgggaagtattttctccttttcaattttctggaagggattgtgtggaacagatgttatatcctccttaagtgcttgctagaattcaccagtgagracatctggtccttaagttttatttattctgggatgttttacatttaatataatttgttattatatatgcaactattcaggttacctatttctttcttcctttattctccttctcctctttttgttagccaaactaaaatccttatttggaattcatgtgaccatcaatttcctttgttctgttccagtagcagtccagagtattatttgccacatctgcttaatctcctccaatctctgccagtttcttagtctttccttgtttcacaggac

SEQ ID NO: 862617 - DNA, 599 bp, Homo sapiens
caataactaattgatcaacagatgaaaaaattagtaactatatagaaaatgtaaaacaaatttagacaaattgcagctgctcctggatagattaggttatgtctggataaacctatcataagttgaaaatattttaattattaacttcagtagtcaattgtagtaacaattaaaagcagaatcaatatcaatcctacacaatttttaaaatacagaaaaaaggaatataacctgacttaattttacaaagctagcataaatgtgttattaatgtcctgaaagatattataagaaaaataattctgaaggatgtagttcaaaaagcctcaatgaaaattccagataaaaccctaaattctataaatatgtaatacatcttcatcaagtcaggtttatcttaggatggtaagtttattwcatgtcaggaaattatttatattttttacccacttaataagaaaaattataagatagatacagttgatgtatacactaagcctttgataaaattcaacacacccattcaagtttgaaaatctcagaaaattggatttagaaggtgtggcagtcatgctgtaaaatgatccccaatgattcct

SEQ ID NO: 862618 - DNA, 599 bp, Homo sapiens
caataactaattgatcaacagatgaaaaaattagtaactatatagaaaatgtaaaacaaatttagacaaattgcagctgctcctggatagattaggttatgtctggataaacctatcataagttgaaaatattttaattattaacttcagtagtcaattgtagtaacaattaaaagcagaatcaatatcaatcctacacaatttttaaaatacagaaaaaaggaatataacctgacttaattttacaaagctagcataaatgtgttattaatgtcctgaaagatattataagaaaaataattctgaaggatgtagttcaaaaagcctcaatgaaaattccagataaaaccctaaattctataaatatgtaatacatcttcatcaagtcaggtttatcttaggatggtaagtttatttcaygtcaggaaattatttatattttttacccacttaataagaaaaattataagatagatacagttgatgtatacactaagcctttgataaaattcaacacacccattcaagtttgaaaatctcagaaaattggatttagaaggtgtggcagtcatgctgtaaaatgatccccaatgattcct

SEQ ID NO: 862619 - DNA, 640 bp, Homo sapiens
aaatcatgtagattcattcaagctaaggtgaagggttggaacattattccaaatgtcattaaaagccttgggggatttgggatataagaatgtgatgagatggtcatcacattacatcagaaatggtcaatgtaaattctctataaagaataaactgcagcatgctactcataaaatgaatgtgaaagtgtcctattcacctaattttggggggaagaaattaagaaggattggcattacttctttaaatgttcatcaccagtgaaggcaactggccctggactttcctttgttgggaggttttcaattactcatttaatattcttgctagttatgggtacagtcagattttctatttctttataatttcatcttggaaggttgtgtgtttctaagaagttatttcatctakattatctaattttttgccatataattgttcatagtagccttgtaggattctttttcaattctgtggatgagtggcaatgttttctctttcacttcctattttatttattcgagttttctcttttttacttaatctagctcattacttatcaatttattatatttcaattttatattttgtttctttgattattttctattttttattcttcattttgtttatttctgt

SEQ ID NO: 862620 - DNA, 632 bp, Homo sapiens
aatgaccaaaggcacttggataatcaagaattccacactgggccatatggtataaacactataaaagcgtaaagaagggtcagtattctgtgtgtctcgcctgtttgattcctgtggtcttcagctgtcaaagacctagaactgcaaacatataatgagtggcaaaaaggttaaaaaaaatgttgggacaaaaaaatcaactaaaaatcaactaattttcattatgtttgtaaaactgrtgaatattagtctagacatttcttgttatccaacaacaaaaacaaaaaggaaatagatttcgcccaaagtaaccttaaccagttatttgataccaagaaatgcctccacccctcttgatcattaatagttctaagaattctaatgggtattctgtttatcattttagtgataatgtttacacacatccatctctcctatgcaactcccattttaaaatacattatccttgtaaaatacattacaaggataatgtattttaaaatactttaacgcataatattcctagatttgtatgttagaccaggacagggggccaaatcatctccagtcggattccagtgactcctgtaaccaaaaccagttcttcacaatttattcattttttttaatca

SEQ ID NO: 862621 - DNA, 562 bp, Homo sapiens
ttaactttgtatttttagtagagacagggtttcaccatgttggtcaggctggtctcgaacttctgacctcaggtgatctgccttcctcggcttccctaagtgctgggattacagacgtgagccactgcacccggcccaaggtttgaacacttcagatgtagagctgtgatcacagtaaagaaaatggaggaggaaagaaatggaggaggaaagaagagacctggattttwtttttttattttattttattttttgagatggagtcttgctctgtcgcccaggctggagtgcagtggcacgatctcggctcactgcaacctctgtctctcaggttcaagcaattctctgcctcaggctcttgagtagctgggattagccaccatgcctggctaatttttgtagttttagtagttacggggtttcaccatcttggccaggatggtcttgaactcctgacctcgtgattcacctgcctcagcctcccaaagtgctgggattacaggcatgagccacagcgcctggagagacctgaattttattgtatacagtccatacacaaaac

SEQ ID NO: 862622 - DNA, 620 bp, Homo sapiens
catgtatcagaaatctttttattttcctacacaaacaatatttgccattgtgctgccgaattggagtgacagagaatcgcactgtgtttgtttagacttaaaagcctagagggcttgtggagctatgctaaaaatggcatggagtgagtacaaacaacttcttcactccgtgcacattgatttctcccttgagatcttttctgtgtctctgttgaatttgtagaartgtcaaagtcaaactttaaagtcaaactttaagaaaatcacctttttttccccctggtagaatagctaatacaatagttagcatatttatattttcagaaagttcagacatgtctgcttttgcaaatcatagaattgtgataattgggaaaaatgatatccattagaaacccgttaggccctcttatatgttgctggtgagagtgcaaagtaatatacagtgatctttgaattcagaagccacttgtgttttaaatgtgatgcttttctgtaaatgcagaattcttataatctgaaatttgtctcccttgtatctactgttgtttccagggctgttcaaagacttcccttttcacatttgcatttcttgagtatcctgtggttttcataataaa

SEQ ID NO: 862623 - DNA, 658 bp, Homo sapiens
ggaatctaaaacacatacatgtacaccagagagtgggctccacaccagctcaataaaatcagaatatcctgggtatggcttggggcatcagtgttcttttaaaagctcccttaatgattttaagacagccagagttgagaaccactagtttaatgggataaaaatgtgtcatttattgtaatctgcgtttgttggagaattttttctcttagtattatagtaatctgaaaatagatacgcttttgcaagtaaattggatttagcaagatttcttgtgaaggagttcttatcttagccgaaaccttttaactgtacttttgcgacratctctcctcgcatacttataatcttgaaagaaaaaaaatacttctcaaaatattgacacattgcattccagaagttttgagtcgtgtacaggatgaacaaactcactgaaattctctttagatgtctacaatatctgcctttcaaaggacttttgagtaattacccattttctcattgtaagcttgatacagaacactcagtccattgttctgtttacctttttctaggtttgagttcagtctacgccaccttttcactgtatattggtcaagtatcattatctcattgaaaagtatagtaggcctggaataccttatacaatgcagatgag

SEQ ID NO: 862624 - DNA, 658 bp, Homo sapiens
ggaatctaaaacacatacatgtacaccagagagtgggctccacaccagctcaataaaatcagaatatcctgggtatggcttggggcatcagtgttcttttaaaagctcccttaatgattttaagacagccagagttgagaaccactagtttaatgggataaaaatgtgtcatttattgtaatctgcgtttgttggagaattttttctcttagtattatagtaatctgaaaatagatacgcttttgcaagtaaattggatttagcaagatttcttgtgaaggagttcttatcttagccgaaaccttttaactgtacttttgcgacgatctctcctcgcatacttataatcttgaaagaaaaaaaatacttctcaaaatattgacacattgcattccagaagttttgagtcrtgtacaggatgaacaaactcactgaaattctctttagatgtctacaatatctgcctttcaaaggacttttgagtaattacccattttctcattgtaagcttgatacagaacactcagtccattgttctgtttacctttttctaggtttgagttcagtctacgccaccttttcactgtatattggtcaagtatcattatctcattgaaaagtatagtaggcctggaataccttatacaatgcagatgag

SEQ ID NO: 862625 - DNA, 711 bp, Homo sapiens
tctaaagtgcagcttaaatctaatgtttctttgttgattttatgtctagatgaactgtccaatgctgacagtaggatattgaagttctcaactatcattgtattggactctatctctccctgtagatttaataatatttgctatgtgtgtctggatgcacttgtgttggttgcatgcatatttagaattgttatattttgttgctgaatttatccctttattaygatataatgaccttctttgtcctttttacagtttttgacttaaagtctgttttatctgatgcaagtttagctactcctgattacttttgatttctgtttgcgtggcatatctttttcagtcccttcactttcagtctgtgtgtgtctttacaagtgaagtgagtttcttgtagacattgttgggtcattttttatccattaagcctgtctctatcttttaggtaggtaatttaacacatattcaaagttattattgataggtgaggacttattcctgtcattttgttcattgttttctggttattttgtatatccttttgatttgatttgcctgtgtccccactcagatctcatcttgaattcccatgtgttgtgggagggacccagtgggaagtagttgaatcatgggggcaggtattttccatgctattcttttgatagtgagtaagtctcatgagatctgatggttttgaaaggaggagtttcc

SEQ ID NO: 862626 - DNA, 590 bp, Homo sapiens
tgtgggatctgcaggagaattcaaacaaggtgcccttgtcttcttgtagatccctgtaataggtctttggaaaatttctcaagaggacacctgagctaggttttggctgctgagcagaacagcaactgtgattccatagtgtctctcctgatatttagtcactttataaatcaaggaacaattgagcatgtcatgtggaaaagattctatcctattacctgagtaactaaaggtaaayaggtcacagcctcagaccttacagaatcaggcagggatgacatggatgggaaggaataaaataaatacatagacaactatgatataagctggggcttgttaggtgcctcaggaagatgtgaagttctgcgatactttggaatagagggaatgcttatagggttagaagagagcatgaaaggctttatgagataactggatgagtgggcttttagaaggagctgatgaaagatggtgtgaggagtggacacttcaggaggagagagctaatttataaaggaatagaagaagaaatcagtgggtgtgattgaagaataaacagcccagtttgacttctgtgctacgtgtgcata

SEQ ID NO: 862627 - DNA, 663 bp, Homo sapiens
cccttcccactccctgccctctcatattatgtgttcattagcagagggtacaacaacttcctccccactacatttatatctggtactgacttgaactgaaaaatgtttggcaggaagctgaattcctccaagaaacatttctattcaaggcattttctctaacccttctccattattttgaaatagatggacttttttcagtcttcaaggattctttaagatgacagaatatggtctctttttgataatttccatacatcttgcattttagtatactcttcaattattttytgttggcttgactttttatattctccatctagacagcaaagttctattatatctaattacagataacctttctcataagaaaaaaggagagaaaaacacattcaaagtttctacaatttcacagtcatgttttatgagtgctgcctccctctctctagggagtagaaaaatatatattttctttgtcctgtggatgtaactgaagggtatttactgaaacccagttttgctttgctacttatgttgtcagctttgaaattcaaaatcattcaacctagggcctatataatacactggaattatattactttaaagcacgaagtgattttaaggtctcgtagtattacccagctttttcctttatatatatag

SEQ ID NO: 862628 - DNA, 480 bp, Homo sapiens
attttaaggtctcgtagtattacccagctttttcctttatatatatagaattgattctttgagaagttaacacaacgtcacaaaatttgattttagttgaatattgatttagcataaaaattatgagaatagaatatctccttctgaagcttataaataactctttcctaygtaaccagtacattcacagcaatctgtaaaatactatcttgacttaggtaacacatagtaggtatgtttagactataaaattagcagtgtgaacagccttcagatcataaaattagcagttcagcattaaccaaatgatgtacatatccatgaccgtataaatggtatatgttctagttgaaccggctgcttcaattgaatctttaaacttctctatcccagagttattaagtctcagtatccttcaggactttgcccatttatttcattttcctaatcactgaatgaatgcatttaacagctatatgt

SEQ ID NO: 862629 - DNA, 566 bp, Homo sapiens
ggcaatatagcgaaactctgtctctattaagaaaataatagtaacaaaaaattagccaggcatggtggtatgtatttgtagtctctgctgcttgggaggttgaggtgggaggatcacttgaggcagaggtttgcagtgagccacgatcatgccactgcaagacaaaaaaaaaaaaaaaaaaaaaaaagaattgcaaaggcagacatttaagccttgaatctattgcccaggaagatgtatttttaatattctcttaraagaatatgtttgtttttagttaaatgtttgcgaaaaattcagtactattttgatttatcaacaataaagtaaaacttaccactaaattcagtatcaattatacagaaaacataaatatcaagcctcccaagtggaataaatttttatttttatttatttattttcaacttttatttttaagtccaggagtacatgtgctggtttattgtacagataaatttgtgttatgggggtttgctatacagatgatttcatcattaagatattaagcctagtacctattaattgtttttcctgatcttcttcct

SEQ ID NO: 862630 - DNA, 566 bp, Homo sapiens
ggcaatatagcgaaactctgtctctattaagaaaataatagtaacaaaaaattagccaggcatggtggtatgtatttgtagtctctgctgcttgggaggttgaggtgggaggatcacttgaggcagaggtttgcagtgagccacgatcatgccactgcaagacaaaaaaaaaaaaaaaaaaaaaaaagaattgcaaaggcagacatttaagccttgaatctattgcccaggaagatgtatttttaatattctcttagaaraatatgtttgtttttagttaaatgtttgcgaaaaattcagtactattttgatttatcaacaataaagtaaaacttaccactaaattcagtatcaattatacagaaaacataaatatcaagcctcccaagtggaataaatttttatttttatttatttattttcaacttttatttttaagtccaggagtacatgtgctggtttattgtacagataaatttgtgttatgggggtttgctatacagatgatttcatcattaagatattaagcctagtacctattaattgtttttcctgatcttcttcct

SEQ ID NO: 862631 - DNA, 652 bp, Homo sapiens
aatctattgcccaggaagatgtatttttaatattctcttagaagaatatgtttgtttttagttaaatgtttgcgaaaaattcagtactattttgatttatcaacaataaagtaaaacttaccactaaattcagtatcaattatacagaaaacataaatatcaagcctcccaagtggaataaatttttatttttatttmtttattttcaacttttatttttaagtccaggagtacatgtgctggtttattgtacagataaatttgtgttatgggggtttgctatacagatgatttcatcattaagatattaagcctagtacctattaattgtttttcctgatcttcttcctcccacacctcaccttcaggtaggccccagtgtctgttgttcctctatatgtgtccatgtgttttcatcatttagccttcacttataactgacaacatgtagtatttggttttctgttcctgtgttagtttgctaaggatgatggcctccagctccatccatgttcctgcaaaggacatgatcatgttcttttttatggctgcatagtattccacagtgcataggtatcacattttctttatccagtctactgttgatgggcatttaggctgatttcatgtctttgctattatgaataatggt

SEQ ID NO: 862632 - DNA, 618 bp, Homo sapiens
aatctgtggatatagcaaaagcagttctaagacgaaagtttacagcctggaagcatacaacatagcaagactgaatcaggaaggaatagaaaatctgaacagactaatcacaagtaacaagattaaatcaacaataaaaagrccctcaacaaagaaaggcctaggacttgatggattcacagttgaatttaaccaaacatacaaaaaagaactaatagcaatccttctgaaactgaaaaatcaaagaggagagaattctccctagctcattttatgaggccagcataactctgttactaaaaccagacaaggacacattaaaaaaaaataggccaatattcctgttgaaatagacacaaaaatcctcaacaaaatatcagcaaaccaaatccaacatcaaaaatgtaatacaaaccattaagtgggatttatcccacggatgcaaggatggttcaacgtacccaaatcaataaatataatacatcacatcagcagaatgaaaaacaaaaatcatatgattacctcaatagatgaaaaaagcatctgataaaattcaaatcccttcatgataaaaactctcaacaaaatagagaggaaatgtactcataataataaagg

SEQ ID NO: 862633 - DNA, 518 bp, Homo sapiens
acccttccagataattaatgaaggagtcaggattagaacccaggccttttctcaatattgtaatatttatgggtacctgattaaaatatagtcattatgatctaagcgaacagtatgctgtaatggtctgaggagatgttttctttccaaatatatttcttcgattaaaatggcaggtttytaacattctttaagtgtatttcccagtaacaatttaaaattataggaatttctgtataaacaattacgggatagcaataaacgacctcaaaaaaaaaaaaaacaaaactctggattgcttttgaaaaatggcacatgaagtaaaaagaatttcagaacttgttagaaataaaaatatcttgtgtcatgttgccccaaagccctgcatataatgttgaagcttaattttagattatacaacttaaagttaagaaccgccttggctcagtttgctttgtcaggcaccctgcccagtgccacatgaagatggcacatattagatgctttttgattgactg

SEQ ID NO: 862634 - DNA, 663 bp, Homo sapiens
ccaaagtcattgttgtcatgtaacttactgaccgggttaatttctcatcggggtataaagtagctgtcttaagttggacagcataggtgctgaaccaaaatttgggactcacgatctcataaatacatgtttaacagagggacaaaatatttgaaagctgaggtatatttatggttctcataactaccaagttgggtttctctaaattcagtcttgccagtggtgataagggactagatgaggacccgtatcatttccatgcaggtgactgtatttgtactccttcattatcctaaccaaactacctrttttttgttggtttctttctgtaacaaaatttaaaaggtaactcaagaagccactcacaaaaacttccattatattttcaaaatcctccatactttataggttttttttttccactttgtggtagactttcatagtgtatcatatcagcatccacaattaggggagaaatacatattaccttgctccttattaagaaaactgaggcaaggagaaaatgagaactaatctgtcagagtactgaatgtcgcttgaatattgaacatctggaatgtcacttgaaatatctggatcattaaattgagccaattgcatcttaactgtaattaggaataaacctttttagatgacttcaaa

SEQ ID NO: 862635 - DNA, 630 bp, Homo sapiens
ctgcaatgtggaagagtgaggatattctcttctaattgcttctctttccttggtgaaaaatggagcaaaattattgaattggaatgaagatgagagaggtattgagggcctgaggagtgaaggaatcagaattgtctggaagaggaagacaattactgagtagagaaatgtagtgggattgccagacagcataaactatctcatggatgctctagtcacagctctctgtttttctcttaccacattcmgttccatggaaactcatttggcctaaatgacactttgcatcaaaacaaaacaaaacaaaaaatggcttacagttttcttgacaaagctaggaggggcaaggaattaagggaatgtgcaagggatgattatgattgactgtgaactttaaaatgagggaaaaaagaaagtgagaatatgaacctatatatagtctgctatgttttactttggggccatttcacgtttctgttccattgactgcttatatttaattgactctggattcaattttcttttctttaaatatgtatttattttcttgaacactggatattgtagaactctggatcctactctctttctttgagtgtcttgattcttcttaaagtggcttttatctac

SEQ ID NO: 862636 - DNA, 645 bp, Homo sapiens
gcactgcctaatggagctgtgacaaaaaggctaccatcctccagatcccagaatcgtagattcaccaacagcttgcattgtgcacctggaaaagacacaggcaccccactccagcctgcaaaagtagccgggaatggggctgtaccttgcaaagtcaaagggacaaaactacccaaagccatgggacaccaccttgtgaatcagcatgccctggatgtaagacatgaagtcaaaggagatcattttggaaatttaaggtttaatgactgccctattggattttggacttgcatgggacctgtagcctctttgttttgaccaatttctcccatttggaatggsagcatttacccaacgcctgtactcccattgtctaggaagtaactaacttgcttttgattttgcaggctcataggcataagggacttgccttgtctcagatgagaatttggacatggcttttgggttaatgttggaatgagttaagtcttggaggactgttgggaaggcatgattgtgttttgaaatgtgaggacatgagatttgggaggggccagggattgaatggtatggtttgtctctgtgtccttacgcaaatctcatcctgaattataataataatacccatgtctcaagatcaggacc

SEQ ID NO: 862637 - DNA, 629 bp, Homo sapiens
ttattctactttctttttggtctctgtcatgctttatggtcctgcaatctttgccactgttatcacctctgcagccctgtgatacttatgtgttactttgtatagacatttgacttgtgctttctcttcttgctcttctcccctgctcccttccttctgtctttttttcccatccatctgagaaatattaggcattcattatggcattgaaaataaaatagacagtcagagctctaagtcacacacagactgtgtggctcaaggtccagaagataagagagacaggaaataatagatatattttgtattttatgatacctcttcttaccacagacagtagcctgtgctgcagtacacagttctagtgagaccagactcacctggtgctgacactgaccccattcatatactgagcttcttgtcactctttttcccyagtgccttcttcaataccattataactatattggcctctgtccacatgcttaccaaaagttttggtgattgaggcccctttaggcaactctcagacagtagaagaaagcagcagggagataaatggcccagcctttcatagatcaggcaaacaatactggaagccatttccccaagagctgctagtagaattg

SEQ ID NO: 862638 - DNA, 494 bp, Homo sapiens
actaaattaagctgaaatagccacaggtggctagtggctactgtattggacacagcaaccctaaaaatctgcctctgggaattgaacagaacgacagttggtttgcaaagtttcataaaagacattactcataacctaccctagctgtagataaaccttcagcgatgctcttgaaggcctctcaggagaggtgagaatccaggaaactcctgtcaggcacttgaataaactggtctgctaaatgaaactatttagtattgaccaagtacattttgtagaatgcctgccaaacgcaacagttgtggctttgacatatctggggttgggccatgctggtattggataactrtgaggaccaaatgcttcccgaagccattcctaattcctatataatccatggtcataaaacaccatcaagcacacaagcggccactctcttgctaattgctatggcaggagggcacacggagagttcattgaaatgtggtaattaa

SEQ ID NO: 862639 - DNA, 637 bp, Homo sapiens
ctctccagcacctgttgtttcttgactttttaatgatcaccattttaactggtgtgagatggtatctcattgtggttttgatttgcatttctctgatggccagtgatgatgagcattttttcatgtgtctgttggttgcataaatgtcttcttttgagaagtgtctgttcatattctttgcccactttttgatggggttgtttgattttttcttgtaaatttgtttcagttctttgtagattgtggatattagtcctttgtcagatgrgtagattgcaaaaattttctcccattctgtaggttgcctgttcactctgatggtagtttcttttgctgtgcagaagctctttagtttaattagatcccatttgtcaattttggcttttgttgctaaaacatactcctgtcctattccctcttgccctctccctttaaaaccaaagctgggcccgattatcttcaatgtgaactccaatagagtagctggcagtggagagagatctggggtcacaacttgtgcagaccaacattgggtagaattcttcagaagtttatttttaagcttcttgattttacattcatgagcctccaatagttctcatctcactaatctggaatgtatgggatcagagtagag

SEQ ID NO: 862640 - DNA, 596 bp, Homo sapiens
cctccttctcaccttttctcttacccttgcctgccacaattccttgagtgtggctttaagggctcaaccgtggctccgttacttgtaattttgttctgctaagagtaccaggcctgaatagaacaccaaagaaagaggggagctgctcataattgccatatgacaaaccttgagaccagagcagaggttctcaatcttggcagcccattggaaccaccttttaaaatcagcttttaaagaagcatggatgcccaggccctgccctggagtttctgatctacttgtccaacattaaaaaaaaaaaagctctctaggtgagtctcacgtgcaaccatgaaggaagatgctacaggacccaggrggcttgtattcaaacagatatagaagccatttcccactgaccaaaggcagcctgtgctcatcactattactgccagcgtatattttgtggagctcctcgttctgttttgtgctgggaaatgagaaggtaaaatcaagttagacgcttacagattggctggggatctgatatggtctgaggtccaggaccagcctgtctcattcatcatacatccttactacctgctcggttgtag

SEQ ID NO: 862641 - DNA, 583 bp, Homo sapiens
atttacctaaaaatttggggtcgggccgggcgcggtggctcatgcctgttatcccagcattttgagaggccaaagcgggcagatcacttgaggccaggagttcgagaccagcctggccgacatggcaaaaccctgtctctactaaaaataccaaaaattagccaggtgtggtgggaggcacctgtagtcccagctgctggggaggctgaggcaggagaatcacttgaacccaggaggtggaggttgcagtgagctgagatcgtgccactgcgytccagcctggggaaccaagcgagactctgtctcaaaaaataataataacaaaaataaataaataaaataaaataaagtaaaaatttggggtcagcagaaaagaatgctagctctggcctgtgggtaagacctcctccaggctccttaggaagaaactcagaacaaagaatgggtgggggtggggtggggggatggggggtgcggaggggtcaggtttcggttctcattttccccttatctgagttctgtgtgccaggggatccactcggtggggtccacgtttctgaaaaacaactcagggacatatgtt

SEQ ID NO: 862642 - DNA, 583 bp, Homo sapiens
atttacctaaaaatttggggtcgggccgggcgcggtggctcatgcctgttatcccagcattttgagaggccaaagcgggcagatcacttgaggccaggagttcgagaccagcctggccgacatggcaaaaccctgtctctactaaaaataccaaaaattagccaggtgtggtgggaggcacctgtagtcccagctgctggggaggctgaggcaggagaatcacttgaacccaggaggtggaggttgcagtgagctgagatcgtgccactgcgttccagcctggggaaccaagcgagactctgtctcaaaaaataataataacaaaaataaataaataaaataaaataaagtaaaaatttggrgtcagcagaaaagaatgctagctctggcctgtgggtaagacctcctccaggctccttaggaagaaactcagaacaaagaatgggtgggggtggggtggggggatggggggtgcggaggggtcaggtttcggttctcattttccccttatctgagttctgtgtgccaggggatccactcggtggggtccacgtttctgaaaaacaactcagggacatatgtt

SEQ ID NO: 862643 - DNA, 644 bp, Homo sapiens
atctccttcattcgtacagatggaccattaaataagatgacaagatgaatttaatagcatgacataatcaaatatagagacagatataaaatacatagagtatgaaactatgaaacaattttggaaataaaagtgtatattaatgtgcaaatatatgtatagaatatgagactgaaaacaccaaaatgttgatactgtttatttctgggtagttggatgacaagtgaatttagtttttctgattgtgcttttctttatctttaaggaacatgttttcttttaatcagaaagaaataattacatatatatgtaattaacatatattgtataatatatatcacatatattccacatatatggaatatatattgtgttttaaagtttaaaatgtgaggagaccacgtcaatgaggaacttggaaccaagtaaaacatggatggataygtgacaatattgtggaatagagtgaaaattcagctcagaaatagtgaagcttattttaaatggaaactaaaataagatcatgtggattaaattagagatatttccaggagaagatatgtttgagcataactttcctctcctccctatctgaggaaaattctggaagagacttcatacgtatctatatttgtatctatgtc

SEQ ID NO: 862644 - DNA, 604 bp, Homo sapiens
tctggaggttgggaagtccaagatcaaggtgctggccaattctgttcctgcctctcttttctggcttatatatttctgcctttttgccgtgtccttgcaaggcagagaaatatcttctcctactccaattcttccttctactccttctttttcttcataagccactaatcctatcatgacagccctattctcattayctcattcaaccttaattatctcccaaagggcccacatccaaataccgtcatattgagggttaaggcttcaacatctgagttttgggggagacacaatttggtccagagcaaccatcattttgctaatgccatctggcttgtgaaatattaatagcaagtctaagacttttctcaatattcaaagaggaaggctcaaagagattttgatagtttttggttgtttgtgaatatatacaagctgaatagaagtttcagtgtaaggatggtatcacaccctttctcaccacctactcccaaattttgaaagccattacttgagaaatagacatcctcttggtgttgtcaatgttcctgaatacacaataattgttaatacattttgcaaagagaatatgcaccgttgaaag

SEQ ID NO: 862645 - DNA, 632 bp, Homo sapiens
ctgtaccctcattgtatcttggaggtaactaacttgattttgactttacttgatttctcccatttggaatggaaacatttacccattggctgtaccctcattgtatcttggaggtaactaacttgattttgactttacaggctcataggcagaagggacttgacttgtctcagataagagtttggacttggacttttgagttaataayggaatgagttaagactttggggaactgttgagaaggcattattgatttttaaatgtgaaaaggacatgagattttggaggggccaggggcagaatgatatggtttggctctgtgtccccacccaaatctcatctcaaattgtaatccccacatgttgagagagggaactggtgggaggtgattggatgatggaggcagttttcctcatgatgttcccatgatagtgagggtgttctgacaagatctggttgttcaataaatgtctagcatttcccctgcactctctgtctctcctccaccatgtaaaatgtaccttgcttcccatttaccttctgccatgattgtaattttcctgtggcctcctcagccatatggaaatgtgagtcaataaaccctcctttctctataaattaccgaatctcag

SEQ ID NO: 862646 - DNA, 518 bp, Homo sapiens
tgagcggtcagaaggaatttacaaaggaactgagaagaagagccaatgagaaagggaacttcttttttttcacagtgagtgcttgtgaactttaaaggaatgtgtgatgaggagactttttttttaaataactggaattatatctttcttttctaatggtctagtaggaaaaactgtttcctttaggggagagggcaattgctggagtaatatccttaagtaatatcacaatttatttatagtaacaggagagaatgtcaggtattcaggtgcrtaggcagatagattggtacatgtggttgtgggagcatgaggaacttctctcttctttctttttaattctcactgacgcaggaagtagactccttgctggcatgactatgaaggcagaagattaaaggtttttttctttttttaatttaaaatttttaatttttgtgagtacatggaagattaaaatttgaagaagacagcttagaaatctgggaaaatagaccatcctggctaacacagtgaaa

SEQ ID NO: 862647 - DNA, 530 bp, Homo sapiens
tttgaaagccgctgttaccccaaagagggctgctttttggggaaatttctgcctcctaaaaaacaaaatctgtatatatttccttcagtaggaaaaatagacactagcattatgaaacattatgaaataagttgtttttgatactttgagctgaagttttattatatagatgtgttgactgaaatggcctttatagtrtaattcttcaaaatccaggaaacattgtgaaatttcaatatactgaaatttgttcaatatatattggacactggcctaaataatgaattctgtttgcattccagaagatctaaaaataaagaaaaataagcctcacattgaaggaacttaatttttctggtaggttaaaaaaaacagtaacagtaactaaggaatcatatttcttgatgatttaattaatagaatttctcagttaatgttatctctgtcaatattgtattaacatgtatttttttttccttgagttggttattctgaggaaaattctacaaaagacttcataaatccaggaa

SEQ ID NO: 862648 - DNA, 600 bp, Homo sapiens
ttttaagtttcttttctgtgatatggttggtcttggtgaagtcatctttttaaaaagtgagataatctggtttgaggtggtatttgaaataaaaagcaaaaagtgagatcgttgggcttaaattttaagttttctttctttgttttgcaagcaatcwgaattgaatctctcaaaacaaagtagaatactcaagtatcctgaagaaattttgatgcatcaattacaaacaaaagcattttcaataatctagttagtaaaagataatcacttccctttgtcactggataattttagatttggtggcctgtaaaattttgagataaatagctataactccatgtgttttcttcttttagagttgttgttgccattgagatgcactgtgttctctatctctgacagttagattccaatataacttatctctgtcaagccagcttccctgagatggcagccaggaaatcgctatgcaccactgatgatgaggtgagatgcagcagaaagtatgggttgcagctgaagatatctatggcattgcagcacattcttcctcaaactttggatttttgtcacttaagaaacaatttgcagtcaatgcct

SEQ ID NO: 862649 - DNA, 600 bp, Homo sapiens
ttttaagtttcttttctgtgatatggttggtcttggtgaagtcatctttttaaaaagtgagataatctggtttgaggtggtatttgaaataaaaagcaaaaagtgagatcgttgggcttaaattttaagttttctttctttgttttgcaagcaatcagaattgaatctctcaaaacaaagtagaatactcaagtatcctgaakaaattttgatgcatcaattacaaacaaaagcattttcaataatctagttagtaaaagataatcacttccctttgtcactggataattttagatttggtggcctgtaaaattttgagataaatagctataactccatgtgttttcttcttttagagttgttgttgccattgagatgcactgtgttctctatctctgacagttagattccaatataacttatctctgtcaagccagcttccctgagatggcagccaggaaatcgctatgcaccactgatgatgaggtgagatgcagcagaaagtatgggttgcagctgaagatatctatggcattgcagcacattcttcctcaaactttggatttttgtcacttaagaaacaatttgcagtcaatgcct

SEQ ID NO: 862650 - DNA, 626 bp, Homo sapiens
ggatactcatggagataaaatgaacgtcaaccactatctcacatcatatacaaaaattaaattgtgatggatcatagacttaaacacaaaagctataacaataatgtttctatcagaaatacaataatatatattcacaacttagggatagacctagcttttatgctgttcttttttcttttgacattcagcgtacatactggagatgttttatgttttatctaggcaatcagcataaaaaaataaattcagcaacccaaaacttttgttcattataaacaacaccattataaaatgcataaacagaccacaggctggaagactatatttgccaaacacataagactgcagctttctatttgacttycagctttttagttgcacagactgaggaaagccctcactcaagtgaaaagctaataaatgtgtgtcagtcagcgcaattttcctctttcaagggtgactcccttcaagtttctgcctgctttaggccctggtccagtggattcaaatacttcttttaaatttagggtacagaagcttataattgttatttgttagagggctaatccaaccaagctactccacaatttcttaaggtgattcttataaactctaaagtttaa

SEQ ID NO: 862651 - DNA, 611 bp, Homo sapiens
tttttaaaatttatttttatttcaataggtttttagggaacaggtggtatttgattacatgaataagttctttagtggtgacttctgagattctggtgcacctatcactcaagtagtgtacattgtacccaatgtgtattcttttctccctcaccacccttccaccctttcccccgagtgcccaaagtccattgtatcattcttatgcctttgcatcctcatagcttagcgcccacttatgaatgagaacctatgatgtttcattttccattcctgagttactttacttagaataatagtctccaatttcatccaagttgytgtgaattccattattttattcctttttatggctgagtagtattccattatatataaacacacatgtatatacacatatatatacacaccacattttctttatccattcattgactgatgggcattttgtagatcaactagtagtgggattgacgcatcaaatggtagctctacttttagttctttaagaaatctccacactgttttccatagtggttgtactagttcacattttcaccagcagtattaaaaatgttcccttttcaccacatccacaccaacatctattt

SEQ ID NO: 862652 - DNA, 401 bp, Homo sapiens
ctgaagttttttcttcttattatttgattctattgttgagactttccagtgcattttgcattggacatctctaagtgtgtcsttaatttccagaagttgtgattgttttttatttatgctatctgtttcactgaagattttttcttttttatcctaaatcatgttttttttatttctttgagttggagttcacttttctctggtgtctccttgattagcttaataatcaaccttctgaattctttttctggcaattcagaggtttcaccttggtttggctccattgctggtgaactggtgtgatctttgggggtgttaaagaaccttgttttgtcatgttaccagaattatttttctggtttcttctcatttgggtagactatgtcagagaaaagatctgg

SEQ ID NO: 862653 - DNA, 676 bp, Homo sapiens
ctagatacaggattatatcatcttcaaactaagataattttacttcctcacttcctaactgaataccctttatttctttctcttgcataatttccttggccagaagttccaatactattttgaataggagtggtgagagaggacatccttgccttgtgctggttttcaaggggaatgcttccagcttttgcccattcagtatgatattggctgtgggtttgtcatatatggctcattattttgaggtatgttccttcaatacctagttcattgagagttcttaacatgaagggatgttgaattttatcartggtcttttctgcatctattgagataatcatgaggtttttgtcttagttctgtttatgtgatgaatcacatttgttgatttgcatattttgaaccaacatggcattctggggatgaagcctacttgattgcaatggataagcttttgatgtgtttctggatttggtttgccagtatttagttgaggatttttgcactgatattcatcaaggatattcacctgaggttttctttttttattgtatctctgccaggttttagtgtcaggatgatgctcgcctcatagaatgagttagggaggagtccctcctactgaaatttttggaaccgtttcagtaggaatgctatcagctcttctttgtacctc

SEQ ID NO: 862654 - DNA, 639 bp, Homo sapiens
aaggctggctggcttcaccacctgctgattgtagagccccagagccttgagtgaacatagagggtagccaggtagtggttacaacagggcatgggggacatccagtgctgtgctggcttcaggtttgacacagtgtagtcatagtggtagtggccacaagggagcttgtgtcaccccttccccaccttcaggcagctcaacacagggacagagactccatttgggggtgaaagtaagggaagagaacaagagtctctgactggtaatccagatagttcttccatatcttatctaagaccaccatgggcaatacttctatgagtctgcaagagccacagtgtaactggacttggggtgtccactagtgtggatatggctgcagtgaccaaaaacttagatcacaacactcaagtcyttcaaataccgggaaattcttcctgataaagatgtgtacaaacaagcccagtgtgcaaagactacaataaatacttaacttctcaatgcccagccaccaatgaacatttgcaaacatcaagaccatccaggaaaacaagacctgaccaaaaaaactgaataaaacaccagtgactagtccaggagagacagagatatgtgactgttcagacaaaaaattcaaaa

SEQ ID NO: 862655 - DNA, 639 bp, Homo sapiens
aaggctggctggcttcaccacctgctgattgtagagccccagagccttgagtgaacatagagggtagccaggtagtggttacaacagggcatgggggacatccagtgctgtgctggcttcaggtttgacacagtgtagtcatagtggtagtggccacaagggagcttgtgtcaccccttccccaccttcaggcagctcaacacagggacagagactccatttgggggtgaaagtaagggaagagaacaagagtctctgactggtaatccagatagttcttccatatcttatctaagaccaccatgggcaatacttctatgagtctgcaagagccacagtgtaactggacttggggtgtccactagtgtggatatggctgcagtgaccaaaaacttagatcacaacactcaagtccttcaaataccgggaaattcttcytgataaagatgtgtacaaacaagcccagtgtgcaaagactacaataaatacttaacttctcaatgcccagccaccaatgaacatttgcaaacatcaagaccatccaggaaaacaagacctgaccaaaaaaactgaataaaacaccagtgactagtccaggagagacagagatatgtgactgttcagacaaaaaattcaaaa

SEQ ID NO: 862656 - DNA, 561 bp, Homo sapiens
tggcactttcccctttgcactctctcctgccaccatataaaatgtgccttgcttcccagtcaacttttgccatgactgtaattttcctgaggcccccccagtctcctttctttataaattagtgatttataaagaactgtgattcaattaagcctctttctttataaattagtcagtctcagatagtatttttatagcagtataataatgaattaatacagacaattggtaccaagatagtggggcattgctataatgataacctgaaaatgtggaagcaactttgaaactggayaacagtcagtggttggaatagtttggagggctcagaagaagacaggaagatgagggaaagtttggaacttcctagagccttgttgaacggttttgaccaaaatgctgatagtgatatggacaatgaagtccaggctgaggtggtctcagatggagataaggaacttattgggaactggaacaaaggtcattattgctatgctttagcaaagagactggtagcattttgcccctgccctagagatctgttgaattttgaacttgaga

SEQ ID NO: 862657 - DNA, 653 bp, Homo sapiens
tgccatttaggaactctacatttacatgctcctctctcaagaaaaaaaatagttgcctttcacttaaaatttctctaaaatttttgtaaaattcctctaaaagaggaatatccaataccttctgtcttaggatgttcttagtatctcaatctaacaatcaggaatttyttttaattcctcatgtttaacttaagtacataattaggttgccttaggaacctacaatggctcttaattctttctactcaaagcccctattacagtgtttggtatatagtaggtgttcagcatatatttaatgagagaaaaaaatgaacagagggaggaaaggaagaaagtgagaggaaggaaaaaagaaaagaagggagggaaggagagaacaaataaacactaaaaggaatcaaacatgaatccactactaaggaaattaacaacagagtagcaagaatgttaaatggacataaataactacaatataaagtagaaagtattaaagggccacagacacaatgttggaggaaatccgaagagaggtatgaaatttctagctaggagaaatcagaagcaagtcaacagaggaggtaagacttgaggtgggatttgaagaacaggtagatttcagacaagtgatcagaggggataagtgtcccaag

SEQ ID NO: 862658 - DNA, 658 bp, Homo sapiens
ggcacatggggcaaagctggctgcagcttatagttttagatgaaatgctggtaatccatcctctggtctgccatcttctcttatccctcagtagcaaccacagaagacattcactgtcgatctcagaacatcaagaacatacctcggtccattctgctgagacaagagaattccaactgaaccactgatttggccatattaagacagtcttcaccattgcacacctattacaacggccaaaatacaaaaccctggcaacaccaaatgctgtagaggatgtggagcaataggaactctccctcattgctggtaggaatgcaaaatggtacagccactttaaaagacagtttggcagattccttcaaaactaaacacactcttaacatcagatctgggaatcatatattccttggaatttactcagataaaatgaaaactcaggtccacaaaaaatggcagctttattcataattgccaaaacttggaagcaaccaagatgtccttttataggtgaatggytaaacaaactgtggtacatctagacagtggaaaataatccagcactaaaaattaaaaaaaagagaacatcaagctatgaaaagacatagagaaaacatgaatacatattgctgagtggaagaaccaaatctgaaaaggc

SEQ ID NO: 862659 - DNA, 610 bp, Homo sapiens
atcagttatttatgttgtcactatcgttactattatccccaacatctagcactgaggtccctttaaggatgtgcctttttaaatgtaaatgtgcaatcatgcagctaaactatgagatgagacataaggtcttcaaaaaaagaagaagtgaggaaggggacaatgagaaagtctagaagcaaatgttgagaaccagcattaggaaccatccccaggaagcagaagagacccagttccagcccacgtctgttatttacagtcatttagccttgggcaaatcttgtgcatcaggcttcttaatctatcacatgaagctagtaacatctgctctgaccatctcacctaggtcagagtggcagacaaggagaaaatggccataaaatgtatgttgtcccaatatcccaaasttcttcatatgtgtgtcaatttttgtagactctgaagacccttaaaagagtttcaataggctcagcactggaggggattagaggagaggaagtgttaaggaaagaaaatccatctccttgtagcatatccgggaagtacaatgtttcccagttgaccttagttccacaccagcatttccattacagtcactgtacccaggaag

SEQ ID NO: 862660 - DNA, 669 bp, Homo sapiens
ggaggcagttggaaaagaagaatgcccctagcctctactcagaagcccaactaatcctatcagcagacagcatcttcagaggtcagaagaagacagcccttgctattggtttccacagaattctcccaatacttgccaaagaaatctataaaggcactgctgggagttctgaaagaatcaaagatgaacaaaaataagaaaagcttcattttcagcacctactagcaataagcacttaatatactttgctaatcctcataactctgtaggatcccctctctgaaagagcgcaaattctaaaaaggaagttaagacatgcacctaaagtgttattttaacaacaaatacaagggatgctttgtgaaagaggtagtcttgattgmtgggtgaaatgtcagcaggaagaaatatggaagtatacagcaagcagaaacagagggcatgcctcatggtctcaaaccagtccagcaagcagggactataaagtgaggtagcaggaaataaggctggcaagtgctaaggacagagttaagtgggaagagtaataaaatttatattttagaaaagatgatacccagggggagtgtcacctcttgtgggaagccgcattacacaccctcttctgtgctcccacagcatgctgaaacctctctgacaccgttctccgtg

SEQ ID NO: 862661 - DNA, 624 bp, Homo sapiens
ttttcaaaacttacttgatcaaaaatctttcattgattttaaaagtcacaaaaaaaaggttgaagattgcttttccagaatggaaaaattggatactcccaattttccttatcttggaacacttgaaccacaaagaaagcaggtgctaatctcagttctgctaagaggagaatgagctgaaacactgcccagcttttcccatgcataaggggccgtgtgcctgcctgtacaccctgccacccaccccagcaatgtcccacttaacctagcagagccacacactccccttaaatgtcaaagctgagccattgcccaaaaggcaggagaaaagaaagtaaaactggatagttatgaactggatatcacaataatccttggaaatatctaaaattatctttcaaaraaagtcctttttatcaataactccctaaaaactgagcccagtgacttgcttacacacatccttaagcagtctcaggaagttgtaactcaatgcggagatctcatgtgctatggctagaattattgattaacccatactcatttagctcttaagtaaattaaaagaccactagtcttaatgtctgtttatgtccggaatgtttcaatggaactgtggattac

SEQ ID NO: 862662 - DNA, 594 bp, Homo sapiens
cagaatgtctagagaatatgcttggagaaaagccatatttttaaaccacactagatatctgatgccaaatgactgatgaaagtagtatctagtagtaatggaaggtgtctttgggacctgcccagtgactgaggagcaagctgtgaatatacagctatccctcaagctcctgactggagtgaccagcagttcaytgatgatgaaatatttttacagaaaataccatgtattttcaggtcacctctcctcagtacccaaaaacagacagaacccaatgaagtgaatgaaattcagagatctccatccatcagggcaactagaattctggccactctatttcattgttcaaatattgcaagaaaaccccaatatcgtttctgccccccctttctccacaagagcctttccttctagtaaacatttctccaccaaaaagaaccccaggaaatatcagaagttcgactgggctaaggagagggaaaaaagaaatgtagcagccagaatgcatgttgaattttaactgttggtaagttcttggaccacctgcccaagtgtatgcaagcagtttgcagagaaaaattcttccttcaatta

SEQ ID NO: 862663 - DNA, 562 bp, Homo sapiens
cttctcagacaagtactgtgaaatttatttcatttatggcacaaagttagtgattcctagcacatacattatactcaaagagcaaacctcagacatggacacaaacttgagtgttctactagacctgaagatgtggagctactcagggaaacgcaaaaagcactgaccagagttacctttcagtgcataaagggttaattttcaattatctgattarctgcacctttcagctatctggcggagaattactgttccttgcaccctccagataagtgaaatgttacttttcatgtgactcagcacacaaggggaatgagggatattaactactcctgacagtgttttcaaaattgtccttggggacatctaaatggtccatgctggtccctgtgattctcagaagtgaaaggattttaatactcaggagaataaaagaatataaaagaataacatatctatgaatgccttccacccacatgcttttaacagattcttgctaataaaaaagaccctgaaggcactgtgactcggcccataatccttcactcttagactgacagac

SEQ ID NO: 862664 - DNA, 631 bp, Homo sapiens
aatgatgagaacacatggacacagagaggggaatgccacacactggcacctacttgagggtggatggtggaaggagagaagatcagaaaaaatacatatgcatagtacgtggctgatgaaataatctgtacaccaagcctacatgacatgagcttacctatatgacaaacctgcatatgtacccctgaacctaaaataaaaacaaaaaaaaaaagaaaacatagaaaagatgattctctacagagtatcacttgtrgtaatttatccttcaaaaatattcctataattgcatgaagacacatgtatgtggagattcatgatagcggttttttaattcctcacagcaaacactggagaccatcaaaatatccattggcagggaattggttaaaaccaggctttctctcttaccctggaggggttgaggagaaggtgaagatgcagagaagcagaggatgctcagggaactctatatcttggtcttctcagtcaggtagaaaacaggtcatccaaagagaataaaggaggtagggtgggaatcattacttgggaagaagggcaaagcgtgaaccaggcatggtgggaaacggagaaaaggtgaattagaaaggaacagaattattgcttatta

SEQ ID NO: 862665 - DNA, 649 bp, Homo sapiens
tcccagcaatgtggacattagaaggttacggactgtgtggcattttcacagaaagagcaaagggaaccaatttagaaggtaagaaaattttgctatgccagtggatagtactgatttcctttttgtagtatcaaaagtggaggagttgtaactgcttggggggtgctgcttacatggcatcagcatctttccatttgaaatcagccacaatttgctctccaggtaatgacaaccaagcatccctttactcgactaccacagtgccaggaaacactgtgccaccgaaaatcagagtcttctgaaaaactctatttcacagcaccgcactgtgcctttggttttggaaaacratataacaaatctactgaaataacaccctctgtcaatgccactgtgtctatgaaatcagctagtccttctgtccttattaagtgagcatgaattttgggctattctccttcaggctaaggttagcagatggctattcagacgcatcctcaactcaaacccatggctccttgttcttattttcttctgtaacagttttgattactttctctttcaccttactccgacctatttggctttttggggggttctgcttccaacttgcttaaaactgcttcaagcattttgtgttttctcattt

SEQ ID NO: 862666 - DNA, 587 bp, Homo sapiens
ataaatcagcaatctattctgcaaattttcttcttgtcccatctgttgtatgtccccgtgtgcctcatatggatgataatccattatttgaacgtcacttttttattttcagtgactctttttggaagctgaagtttatcttccactcggagcttcctaaagtaactatcagaaattacagaaaactgttatctttgatcctgcacccaatgttagaataaaacttcctaatatctgaattcacagatgttctaattcacyttcagcaccaccattgatttcttgggtatggtaatatacaacagacactcagaagaattttattacttgcaagcatcttttacacattagttcttctccgcatatttagggaagcagagaatctgaaaaatcatggtgctcttcatagggcaccatgaaatatttgcttctgttatacagagcaaaaataatttgtcaatagaacgtgtttaatggtatacatatgaaatatcaggtcatatgtacaaacactcatgaaaaatatattttatcaagcatggccaactatttacatatttttctgtgaaaatgaagttgatattatt

SEQ ID NO: 862667 - DNA, 587 bp, Homo sapiens
ataaatcagcaatctattctgcaaattttcttcttgtcccatctgttgtatgtccccgtgtgcctcatatggatgataatccattatttgaacgtcacttttttattttcagtgactctttttggaagctgaagtttatcttccactcggagcttcctaaagtaactatcagaaattacagaaaactgttatctttgatcctgcacccaatgttagaataaaacttcctaatatctgaattcacagatgttctaattcaccttcagcaccaccattgatttcttgggtatggtaatatacaacagacactcaraagaattttattacttgcaagcatcttttacacattagttcttctccgcatatttagggaagcagagaatctgaaaaatcatggtgctcttcatagggcaccatgaaatatttgcttctgttatacagagcaaaaataatttgtcaatagaacgtgtttaatggtatacatatgaaatatcaggtcatatgtacaaacactcatgaaaaatatattttatcaagcatggccaactatttacatatttttctgtgaaaatgaagttgatattatt

SEQ ID NO: 862668 - DNA, 576 bp, Homo sapiens
aaaccctctagtggagtacctcaatcaagcgaaagctgcgtccttatgactcagggccctacacatgctggtcctttttcctttttgctttcatttcttactactctctctgtggcttcctccattgcagccatccaggtcccattgccttttcttgctcatggtaagcrgacacctacctgcaccattttctttgcactttctctgcttttctagtgaaaggctcttttcccaggaattaactgattttacttcctcaggaatttggggccttcattcaatgttaccttctcggtagaatctttctgcccattctagttaaaattgtaaccatctgccctcaatgccattgtctttccctgctttttctctacagtgcttaccactcgcagatgtgctatgcactgttaattattttctgtgttcattgtgtagctctcatctctagaacggaaactacataagaaaagggatttttgcttgcttcttttctctgctctactgcagtgcctgtaatactgcatgatacacatatatatgctcaatatgtatttgtcgagtgtccagagagtaaag

SEQ ID NO: 862669 - DNA, 576 bp, Homo sapiens
aaaccctctagtggagtacctcaatcaagcgaaagctgcgtccttatgactcagggccctacacatgctggtcctttttcctttttgctttcatttcttactactctctctgtggcttcctccattgcagccatccaggtcccattgccttttcttgctcatggtaagcggacacctacctgcaccattttctttgcactttctctgcttttctagtgaaaggctcttttcccaggaattaactgattttacttcctcargaatttggggccttcattcaatgttaccttctcggtagaatctttctgcccattctagttaaaattgtaaccatctgccctcaatgccattgtctttccctgctttttctctacagtgcttaccactcgcagatgtgctatgcactgttaattattttctgtgttcattgtgtagctctcatctctagaacggaaactacataagaaaagggatttttgcttgcttcttttctctgctctactgcagtgcctgtaatactgcatgatacacatatatatgctcaatatgtatttgtcgagtgtccagagagtaaag

SEQ ID NO: 862670 - DNA, 616 bp, Homo sapiens
attcatgaaagcaacatcttcaggatttttatcatacaatagtaactatagaagcaattagaagcaacgcaaaagataaaacaggagaaagagccaatgggaagctgctgtaagtctgaattaaacctctcatagattggcataycccagctctacatgatatttgtttttaaagaatatagtaccattgcctagtgaactaaattatttatatatttattatgaaccgaattgaaaaatgagaatacccaaatattcttcaactaaaggcaattaattcaatttctttattcaattatcttctattgaaataaaacacaaattaagaaactatgttttaaatagctgtcgtttattttgaaaaataaagaccttcctactaaatgtttcatagaactatttattttattttgttttgttgattttttttaaatgttgtgaaccagcagttgagaattaaaaaaaaaacaaccaaacaaacaaaaaaccctccctagaatgctggagatacggttctggaatctgatattattctctggagactcagtgcaccaggaaaatcctaagtgtcattgtgttctttggatggtatacgaagttttcttttaggttttgg

SEQ ID NO: 862671 - DNA, 616 bp, Homo sapiens
attcatgaaagcaacatcttcaggatttttatcatacaatagtaactatagaagcaattagaagcaacgcaaaagataaaacaggagaaagagccaatgggaagctgctgtaagtctgaattaaacctctcatagattggcataccccagctctacatgatatttgtttttaaagaatatagtaccattgcctagtgaactaaattatttatatatttattatgaaccgaattgaaaaatgagaatacccaaatattcttcaactaaaggcaattaattcaatttctttattcaattatcttctattgaaataaaacacaaattaagaaactatgttttaaatagctgtcgtttattttgaaraataaagaccttcctactaaatgtttcatagaactatttattttattttgttttgttgattttttttaaatgttgtgaaccagcagttgagaattaaaaaaaaaacaaccaaacaaacaaaaaaccctccctagaatgctggagatacggttctggaatctgatattattctctggagactcagtgcaccaggaaaatcctaagtgtcattgtgttctttggatggtatacgaagttttcttttaggttttgg

SEQ ID NO: 862672 - DNA, 632 bp, Homo sapiens
ttttttttttctaatcaaacctcaatgctatcttgatgttggacagttctatatcccaggcatctccctccagtgctaagtgggggtgtgagtaaggtaggatgaagagttgatatttgttatattccccaaatacrtaaattccttccctcttgctagtgattattttgagcatcgtcatgtggtctgctgattaatgcgctctactgaacagacttctagcaacattttcttccctcttaaacagtgacccagtacaggcactggactcttcctgcctttggacattgtctgtgaggacatagttttgagacttctgtggccaaccatgagggcaaggacaagagaactgaggagaagccccctttgaatccttagcttctgagctcaccaactctggaaacaacccgcctccagacatcttgccatgtgagataaatcccatttcatttaagtcataagtaattgaatattctatgactgccaaatatattccaattaaatatgacatctaaactatgattttagaatctctggactggtatagaaagtggtaggaccacttgatgtgaaattgtccattcagtggcaaaacttgagttttcaccttttatagttaagagcctagtgag

SEQ ID NO: 862673 - DNA, 613 bp, Homo sapiens
ccagactgtgaccttatttggaaaaagggttcttgcacatacaactagttaggatgaagttgtaccagagtattaaacctgtagtggtcccctaatccaacatgagtgaggtccctactagaagcagaaacttggacatagacacagagttgcatagaagaaagacaatatgaagagacaccgggtgaacatggcaatctgtaagccagggagggaagcctggaacagattcttmttttatagccctcagagggaactaactctgtagagaacttgattgtgaacttcttgtctccaaaactggaagacaataattttctgacattttatcaaaccagtttgtgctaatttgttagggcagccctattaaactaataaaatatataaaaatcaatataatttctatctactagcaagaaactatttgaaatttaaattaaatacacagaaccatttaagtagcaccagtaagatataatgcttataaatccaaatatgcatttagatatatgccagatgtgcatagtgaaaatgacacaagactgataaaagaaataaaaaaagacctgaatcaatagatatttcgtgttcatgtatttgaagacttaagttg

SEQ ID NO: 862674 - DNA, 613 bp, Homo sapiens
ccagactgtgaccttatttggaaaaagggttcttgcacatacaactagttaggatgaagttgtaccagagtattaaacctgtagtggtcccctaatccaacatgagtgaggtccctactagaagcagaaacttggacatagacacagagttgcatagaagaaagacaatatgaagagacaccgggtgaacatggcaatctgtaagccagggagggaagcctggaacagattcttattttatagccctcagagggaactaactctgtagagaacttgattgtgaacttctwgtctccaaaactggaagacaataattttctgacattttatcaaaccagtttgtgctaatttgttagggcagccctattaaactaataaaatatataaaaatcaatataatttctatctactagcaagaaactatttgaaatttaaattaaatacacagaaccatttaagtagcaccagtaagatataatgcttataaatccaaatatgcatttagatatatgccagatgtgcatagtgaaaatgacacaagactgataaaagaaataaaaaaagacctgaatcaatagatatttcgtgttcatgtatttgaagacttaagttg

SEQ ID NO: 862675 - DNA, 613 bp, Homo sapiens
ccagactgtgaccttatttggaaaaagggttcttgcacatacaactagttaggatgaagttgtaccagagtattaaacctgtagtggtcccctaatccaacatgagtgaggtccctactagaagcagaaacttggacatagacacagagttgcatagaagaaagacaatatgaagagacaccgggtgaacatggcaatctgtaagccagggagggaagcctggaacagattcttattttatagccctcagagggaactaactctgtagagaacttgattgtgaacttcttgtctccaaaactggaagacaataattttctgacattttatcaaaccagtttgtgctaatttgttagggcagccctaytaaactaataaaatatataaaaatcaatataatttctatctactagcaagaaactatttgaaatttaaattaaatacacagaaccatttaagtagcaccagtaagatataatgcttataaatccaaatatgcatttagatatatgccagatgtgcatagtgaaaatgacacaagactgataaaagaaataaaaaaagacctgaatcaatagatatttcgtgttcatgtatttgaagacttaagttg

SEQ ID NO: 862676 - DNA, 637 bp, Homo sapiens
gcagggatgtgctccttgaggtcagagactgtgggaaatggaaggaagcatatattatccagttcaacccactcattttaacaagtgacattttaccaaatattacagaatggtcatttgtgtaccatctgctaaatccattaaaaaaatctcaatacacaaagtaggattaatttgttaaaagayaaaaggaacaaggcctttaaggaatgtactaggtgaggaagatttggggataaagaatagtttgatgtatgggaggattctcagctcatttaactcattcacttatttattcatctgagatttaccagaaatccaacttttctaggactttgtgcccaggtcttgttgaccacagaatattagatctgaagcactgtattgcactgcttctcatgaataagacctcctatgcagtaataaaagtagacattgatgtgaatcatacaatataaagtagaatgttctataatagtatagcaaagcactaagtgttatcataaaggaatgaataatgaatgttgcttttaggaacttaggaagactttgaagagggaatgataaatgagtttcatcttaaatgaggagcaggaatttaacagataaaatagagggcaaagccaattctgtcaga

SEQ ID NO: 862677 - DNA, 637 bp, Homo sapiens
gcagggatgtgctccttgaggtcagagactgtgggaaatggaaggaagcatatattatccagttcaacccactcattttaacaagtgacattttaccaaatattacagaatggtcatttgtgtaccatctgctaaatccattaaaaaaatctcaatacacaaagtaggattaatttgttaaaagacaaaaggaacaaggcctttaaggaatgtactaggtgaggaagatttggggataaagaatagtttgatgtatgggaggattctcagctcatttaactcattcacttatttattcatctgagatttaccagaaatccaacttttctaggactttgtgcccaggtcttgttgaccacagaatattagatctgaagcactgtattgcactgcttctcatgaataagacctcctatgcagtaataaaagtagacattgatgtgaatcatacaawataaagtagaatgttctataatagtatagcaaagcactaagtgttatcataaaggaatgaataatgaatgttgcttttaggaacttaggaagactttgaagagggaatgataaatgagtttcatcttaaatgaggagcaggaatttaacagataaaatagagggcaaagccaattctgtcaga

SEQ ID NO: 862678 - DNA, 635 bp, Homo sapiens
gaatattagatctgaagcactgtattgcactgcttctcatgaataagacctcctatgcagtaataaaagtagacattgatgtgaatcatacaatataaagtagaatgttctataatagtatagcaaagcactaagtgttatcataaaggaatgaataatgaatgttgcttttagkaacttaggaagactttgaagagggaatgataaatgagtttcatcttaaatgaggagcaggaatttaacagataaaatagagggcaaagccaattctgtcagaagtagtaacttttttaaaacataaattattattacaaagcctagcatgcctgcatgctgcaaggatttgtgtggagagcatttagtctgaagctagaatataaaggacaaaacttgccatactgaaattgagtgctgcttatagaaaataaaaaattggtgaaggcttttaaatctagaaagttatgtgatcagaattgtgttttagaatgacagttctggggagagcatgagggtggcttaaaggcacaacatgagttacaaatcagtaagactgaaggttttaaaaaaattgtttaaacaggtggttgtagatgtatggcattatttctgaggactctgttctgttccattggtct

SEQ ID NO: 862679 - DNA, 624 bp, Homo sapiens
caatcatgtcatctgcaaacggagacgatttgacttcctctcttcctatttgaaaacctttcatttctttctcctgcttattgccatggccagaacttccaatactatgttaaataggagtggtgagagaggacatccttgtcttrtgccagttttcaaagggaatgattccagcttttgcctattcagtatgataatggctgtgggtttgtcataaatagctcttattcttttgagatacgtccatcaatacctagtttattgagagtttttagcctgaagcggtgttgaattttatcgaaggcctttctgcgtctattgagataatcatgtggtttttttcattggttctgtttatgtgatggattatgtttattgatttgcatatgttgaaccagccttgcatcccagggatgaagccaacttgattgtgttgattaagctttttgatgtgctgctggatttggttcgccagtttttaatggaggattttctcatcgatgttcatcaacctgacaaaaacaagcaactgggaaaggattccctatttaataaatggtgttgggaaaattggctagccatatgcagaaacctgaaactggaccccttcctaacatcttattc

SEQ ID NO: 862680 - DNA, 624 bp, Homo sapiens
caatcatgtcatctgcaaacggagacgatttgacttcctctcttcctatttgaaaacctttcatttctttctcctgcttattgccatggccagaacttccaatactatgttaaataggagtggtgagagaggacatccttgtcttatgccagttttcaaagggaatgattccagcttttgcctattcagtatgataatggctgtgggtttgtcataaayagctcttattcttttgagatacgtccatcaatacctagtttattgagagtttttagcctgaagcggtgttgaattttatcgaaggcctttctgcgtctattgagataatcatgtggtttttttcattggttctgtttatgtgatggattatgtttattgatttgcatatgttgaaccagccttgcatcccagggatgaagccaacttgattgtgttgattaagctttttgatgtgctgctggatttggttcgccagtttttaatggaggattttctcatcgatgttcatcaacctgacaaaaacaagcaactgggaaaggattccctatttaataaatggtgttgggaaaattggctagccatatgcagaaacctgaaactggaccccttcctaacatcttattc

SEQ ID NO: 862681 - DNA, 624 bp, Homo sapiens
caatcatgtcatctgcaaacggagacgatttgacttcctctcttcctatttgaaaacctttcatttctttctcctgcttattgccatggccagaacttccaatactatgttaaataggagtggtgagagaggacatccttgtcttatgccagttttcaaagggaatgattccagcttttgcctattcagtatgataatggctgtgggtttgtcataaatagctcttattcttttgagatacgtccatcaatacctagtttattgagagtttttagcctgaagsggtgttgaattttatcgaaggcctttctgcgtctattgagataatcatgtggtttttttcattggttctgtttatgtgatggattatgtttattgatttgcatatgttgaaccagccttgcatcccagggatgaagccaacttgattgtgttgattaagctttttgatgtgctgctggatttggttcgccagtttttaatggaggattttctcatcgatgttcatcaacctgacaaaaacaagcaactgggaaaggattccctatttaataaatggtgttgggaaaattggctagccatatgcagaaacctgaaactggaccccttcctaacatcttattc

SEQ ID NO: 862682 - DNA, 642 bp, Homo sapiens
catctgttgaaaacatgagataactaagattacatatttattcagccagtatgattatacttcaggcatttgcatagcattttcacaatttttgttaaatctcaccatcagtactataacttgcttaatatttatctttaaattgattcacatttttacttacatttattttaaaaagaaaaccttctacctgtatcattaattaaaacgaacaccatcaattgtcccatatgaaaataaatattaaaataatgcaattaaaccataaagtgtaaaaaattaattataagcacaattttaaatgattttagtaatttatccaaaatattttatgcctgaaaatttttttctcagtaagaataaaacyctttaaggagtgatatttaactttgtctttcttggtttaaaatgaagatgaggctctatgctcacataataattctactacttagttcagaaagtcatgacactgagaaaatgtatccatggtaagaaagggtgacattattagtcagatcgtaatttcagtttttactaagtactgggaactctttgaacagtcatgaaggaggctagaagcaacctggtgcctgtcttcattttctccccaggaaaagagatttcaagaaacttaatgaatta

SEQ ID NO: 862683 - DNA, 642 bp, Homo sapiens
catctgttgaaaacatgagataactaagattacatatttattcagccagtatgattatacttcaggcatttgcatagcattttcacaatttttgttaaatctcaccatcagtactataacttgcttaatatttatctttaaattgattcacatttttacttacatttattttaaaaagaaaaccttctacctgtatcattaattaaaacgaacaccatcaattgtcccatatgaaaataaatattaaaataatgcaattaaaccataaagtgtaaaaaattaattataagcacaattttaaatgattttagtaatttatccaaaatattttatgcctgaaaatttttttctcagtaagaataaaactctttaaggagtgatatttaactttgtctttcttggtttaaaatgaagatgaggctctatgctcacataataattctactacttmgttcagaaagtcatgacactgagaaaatgtatccatggtaagaaagggtgacattattagtcagatcgtaatttcagtttttactaagtactgggaactctttgaacagtcatgaaggaggctagaagcaacctggtgcctgtcttcattttctccccaggaaaagagatttcaagaaacttaatgaatta

SEQ ID NO: 862684 - DNA, 642 bp, Homo sapiens
catctgttgaaaacatgagataactaagattacatatttattcagccagtatgattatacttcaggcatttgcatagcattttcacaatttttgttaaatctcaccatcagtactataacttgcttaatatttatctttaaattgattcacatttttacttacatttattttaaaaagaaaaccttctacctgtatcattaattaaaacgaacaccatcaattgtcccatatgaaaataaatattaaaataatgcaattaaaccataaagtgtaaaaaattaattataagcacaattttaaatgattttagtaatttatccaaaatattttatgcctgaaaatttttttctcagtaagaataaaactctttaaggagtgatatttaactttgtctttcttggtttaaaatgaagatgaggctctatgctcacataataattctactacttagttcagaaagtcatgacackgagaaaatgtatccatggtaagaaagggtgacattattagtcagatcgtaatttcagtttttactaagtactgggaactctttgaacagtcatgaaggaggctagaagcaacctggtgcctgtcttcattttctccccaggaaaagagatttcaagaaacttaatgaatta

SEQ ID NO: 862685 - DNA, 660 bp, Homo sapiens
atgaggtcagagattcaaactcatggcccaagggctgcataaatgatcagtaacctttcatgtgtgctctaaaagaaatgcttatgtcctgtagactcaggaattagattgctaaaaatcaagcatagattctcgtcctagaactggctggattataatgcaaattgaactcctagccttgcagaatgtttactgctaaaatgagggcattgtttagaaaagaatggaatcctgtatgttgrgatgaggatgtgggtgtagaccatgatgaagctgaccacactgaacttcgaaattctgatcagtcttctttgccagtgtatgtgacctctctattctaggcagaattgcgttcctcgttctagtggaagagactctctacccctagctgtgtagctcctctattctcagtagttgcagcctcttcacctgaattctgagagaaatcattctgtattgtgtgaggaagttgtggtgacctcttctgaggcagtttccttggaagggaatgctgattcatttcaggatccacccgcaccacacttctttatgtctagacctataactagactcaagtcccagtagggccccagaggtgaagtacaaagtgtgaggaagtgagctaaacaccaaaaaaacacttgagttctataatttatt

SEQ ID NO: 862686 - DNA, 620 bp, Homo sapiens
gaagtttcctatgcagttgacagacaaatagaagccttgggcctggtttataaatctgcataatatgcaggcatcccctgaaaatggacagctatagtactacagtcccttcctgggacatcctaaaggatagtggtgaagggaactcctcccagtgaatataaatttaagcagttcccttgttacacactttacttagaaggagaaatatccagacttatgattatatgcaaattcatggactgtgtttaattgtttggctggatggtcagggcttagaagggatataatagaaaaactgatgacaaagaaaattgggaaacaaattgggggacgaggtaagtagatacatctctttaaatggaaaacaacatgaagatatttgtatcccatgtgaatactcaccaaagggtgatttcagatgaagaggatttcagtaatsaagcagataggattacctattctgtggataccagacagcatgtttccccagctactcctgtcgttgcccggtgtgttcatgaacaaagtggctatggaagcaggaatagagattatgcatgagctcagcaacattgacagtcacgcaccaatgccaaatttcctatggttacctttga

SEQ ID NO: 862687 - DNA, 620 bp, Homo sapiens
gaagtttcctatgcagttgacagacaaatagaagccttgggcctggtttataaatctgcataatatgcaggcatcccctgaaaatggacagctatagtactacagtcccttcctgggacatcctaaaggatagtggtgaagggaactcctcccagtgaatataaatttaagcagttcccttgttacacactttacttagaaggagaaatatccagacttatgattatatgcaaattcatggactgtgtttaattgtttggctggatggtcagggcttagaagggatataatagaaaaactgatgacaaagaaaattgggaaacaaattgggggacgaggtaagtagatacatctctttaaatggaaaacaacatgaagatatttgtatcccatgtgaatactcaccaaagggtgatttcagatgaagaggatttcagtaatcaagyagataggattacctattctgtggataccagacagcatgtttccccagctactcctgtcgttgcccggtgtgttcatgaacaaagtggctatggaagcaggaatagagattatgcatgagctcagcaacattgacagtcacgcaccaatgccaaatttcctatggttacctttga

SEQ ID NO: 862688 - DNA, 614 bp, Homo sapiens
ttaagcatcctttcagctgcactctcttaatccaaatgtataagcaagcacttattccatttaatctgatctttcattgaggatacaatatctctgaaggtaaggcagacaatttctatctggagaaaaaaaatcttaaagcacattttacattaaaaaccactgaagcataatgggctaagctgcacatggacccaatttcaacatctgccaaaattatcagtaaatttaagacttgttctaattttctcagtcattattttaaactccagtagyaccaggacctgatttaatcagtgagtgaggcatatagcattcaggtcaagtagacacgcatacaaatattttttgattcctttcattctcatcccttgaaggccctttgtcaccaagggtaacagtgcttgggttctaaaattatttctccttccaaaccatgccatcataaagtgctttaagatggtaagaaaacgaatgaaactactgaagaactaaatatggaaacacaaaagtaatttatgtccatcagtagccttatttttttcatctttaccccttgatttttattccatttcttccccagcccctgcatgtaacataatgccttagcatct

SEQ ID NO: 862689 - DNA, 614 bp, Homo sapiens
ttaagcatcctttcagctgcactctcttaatccaaatgtataagcaagcacttattccatttaatctgatctttcattgaggatacaatatctctgaaggtaaggcagacaatttctatctggagaaaaaaaatcttaaagcacattttacattaaaaaccactgaagcataatgggctaagctgcacatggacccaatttcaacatctgccaaaattatcagtaaatttaagacttgttctaattttctcagtcattattttaaactccagtagtaccaggacctgatttaatcagtgagtgaggcatatagcattcaggtcaagtagacacgcatacaaatattttttgattcctttcattctcatcccttgaaggccctttgtcaccaagrgtaacagtgcttgggttctaaaattatttctccttccaaaccatgccatcataaagtgctttaagatggtaagaaaacgaatgaaactactgaagaactaaatatggaaacacaaaagtaatttatgtccatcagtagccttatttttttcatctttaccccttgatttttattccatttcttccccagcccctgcatgtaacataatgccttagcatct

SEQ ID NO: 862690 - DNA, 614 bp, Homo sapiens
ttaagcatcctttcagctgcactctcttaatccaaatgtataagcaagcacttattccatttaatctgatctttcattgaggatacaatatctctgaaggtaaggcagacaatttctatctggagaaaaaaaatcttaaagcacattttacattaaaaaccactgaagcataatgggctaagctgcacatggacccaatttcaacatctgccaaaattatcagtaaatttaagacttgttctaattttctcagtcattattttaaactccagtagtaccaggacctgatttaatcagtgagtgaggcatatagcattcaggtcaagtagacacgcatacaaatattttttgattcctttcattctcatcccttgaaggccctttgtcaccaaggstaacagtgcttgggttctaaaattatttctccttccaaaccatgccatcataaagtgctttaagatggtaagaaaacgaatgaaactactgaagaactaaatatggaaacacaaaagtaatttatgtccatcagtagccttatttttttcatctttaccccttgatttttattccatttcttccccagcccctgcatgtaacataatgccttagcatct

SEQ ID NO: 862691 - DNA, 645 bp, Homo sapiens
actgcagatgtcttgtgttgaaaaacacagatgctgatcatactaagttgaaaatatagtcagaaattggatactaaatgtgaagaagttttaagtttatcatcaatttctttcagttgcaatttctttttatgagtatgcacaagagtgatgtatgattaaaatctgagtctaaattagtttcaaagatctctttcattaaatataaaatggaattttgtatgataagagagaattttgttagtaaaattggccgtactttttcattagcggtattagctgtgtactgatttataacaacatcaggaattacagagtttctttgctgggcagtttcggcttgtgttctttcatgagattgcaatcaaaatgtttccgggtactatagttatctgaaagcttgactggagttaaatgatttgcttactaggtggttcacttacatggctggcaagttggtgatgactgttggcaggaagcctcacttctttcctgcatgggcytctgcataggcttcatgaatatacctggtggctgacttccctcagaggaagcaactcgagaggtttggactcattgccaattctgccaaattctattagttagtagtcatcaagactgacctgcattcaagaggattgaatt

SEQ ID NO: 862692 - DNA, 609 bp, Homo sapiens
atcccaataaacttccttcttaggactgcttttgatgcatcccattagttttggtctattgtgttctcatttttatcttcttttttagtttttggttttagttgtttctctttttttttaattttctttttgatttcttcatgacagtgattgktcaagaagatgttgtttactttccagatatttgcgaattttccaatctttcttctatgactgatttctaggtttattctattgtagtgagaaaagatattttgttaaatactattttttccaaagttgttaatacttattttgtgacctaacatgtaagctactctggagaatattctatgtgttcttgagaaggatgtgtattttgatgttttgagtagaatgttctgtgtagtttactaggtccatttggtctatagtgttgttgaagttctctttttcctcactgatcttcagtctgcatgttctgtctattactgaaagtggtattttgaagttttctactattattgttgctatagtctgaatgtttctgttccctaaaattcatgtttaaagcctggcccttaagtaatattattaggaggcactgtgtttgagaggtgattagaatac

SEQ ID NO: 862693 - DNA, 609 bp, Homo sapiens
atcccaataaacttccttcttaggactgcttttgatgcatcccattagttttggtctattgtgttctcatttttatcttcttttttagtttttggttttagttgtttctctttttttttaattttctttttgatttcttcatgacagtgattggtcaagaagatgttgtttactttccagatatttgcgaattttccaatctttcttctatgactgatttctaggtttattctattgtagtgagaaaagatattttgttaaatactattttttccaaagttgttaatacttattttgtgacctaacatgtaagctacyctggagaatattctatgtgttcttgagaaggatgtgtattttgatgttttgagtagaatgttctgtgtagtttactaggtccatttggtctatagtgttgttgaagttctctttttcctcactgatcttcagtctgcatgttctgtctattactgaaagtggtattttgaagttttctactattattgttgctatagtctgaatgtttctgttccctaaaattcatgtttaaagcctggcccttaagtaatattattaggaggcactgtgtttgagaggtgattagaatac

SEQ ID NO: 862694 - DNA, 592 bp, Homo sapiens
cagcatatttaatgctcagagttcattagagaaacacaaaacccaactttttttcaattttacattttataaatatagaaagctctcaacttaaatttgtaattacctctttttttattttctggaataacttaccttctttatatttttctagccaacaacattcttgatgaatttctttatccttctattttgtcacttcctaaatacaaaataatrtggtgacagattttctttttttttttttttaagaaacagggtctcatgtgttgcgtaggctggagttcagtgttacaaacacagctcactgttcctcacattcctgggaccataggcttctgtcaccatgcccagctaagtttttaaaacatttttgtagagttgggggggggggggtctcagtttgtagcccagtttggtcttgaactcctagggtggtgacaagtttaaactctgtaaaagcattaaaagaaaagcttaaaaatgaaatggatcattggaattattaagcatgggttggactactatttggcaggtatctatgagaactgaggaaagaaaggtggttgaacagacacatttaaattccttt

SEQ ID NO: 862695 - DNA, 623 bp, Homo sapiens
gtaaaatttgcctcagttggttattcgaatctgataatctgatcatcatgtctttaacagctttcagctctgacctacaagtcatgtctggattcttttatagcttttgaatccaaacaagctcctgaccttgctaactatagcccagcaccaggagatttctgacagtataaaattcaaggcctaatcttaagactatgtaatgaaattgataaccataaattccaagatgggctcaggacaacaggacttggcatttctggccattacttccaaagcaaatcatatctgtatatgaaatacaacaaagtctgctagtctgaaagcatgttaaatatggcttgttatgttcagcctttccacactgctcttataaacaggagttggactgtttccatcagactctgaccaagtaaacttaaatgtaatgatgttacagtctgagtctttttgttttttaagaaaagcaacrtaagcaacaaaagcttccctgcctttttcccgcggttgctcccactccatctctcgcttccattttctttcagaacactctgaaactctcaagcattttctataagagaacttgcagttctccatagggatcaggagaggcatagatgatt

SEQ ID NO: 862696 - DNA, 602 bp, Homo sapiens
atgattggaatgggctataagatattgtgctgaagagaaaacagttgttctgttcactgctttcattgagaaaatgtggaatgtctcttgactaattgacaaagtgtaatgaaatgacaagctggttgaagctggtaatcaatgcatggccatatttattcattttccacacacttgaccatctactttgtataacacattctgctaaggcccagggatacaatggcaaacaagatagatgtagttccttcccttgyggcatgtcataagagaaacagatgtgcatatacacacaataaataagaaaattaataattgtattaagtggtatgaaaaaaagggggaggattgttcactcactgttacctgtgttagtatctgcaaatgcatgaatggttgaactcccatgtcagcatttttgttgccatttatttagtaccagacatagtgctggtctcacagcttaatatttggtaatgaataaattctgctagtggtatatgttgatctgaacttacaatgatgggatatagaattggcagagtggcagatgttcacaattgtctacaagtagatgtgctagacaatggaaggatgcaggc

SEQ ID NO: 862697 - DNA, 449 bp, Homo sapiens
tgtattccagcctagatgacagggtgagactctcagttacatgcaacattatgtgtgaattttccaaatgtaatattctgaatttcagggtggttgtgaattttcgaggagtaccatttgttatgggttgaactgtgtcctcgcaatggatgtgttgaagtcctaacttctcctcacattgcatacttgtgaatgtgatcttatttggaaatagggtctttgcaaatrtaatcaaattaagatgaggtcattagggtgggccttaatccaatattgctggtgttcttataagaagagaagaagaggcagagacagacacacacagaggagcacaccatgtgaagacacagacacaagaacgtcacgtgggaacagaggcagagcctggagtgatgcttctacagccaaagaacagcaaggattgccagcaacactgggagctgagaaaa

SEQ ID NO: 862698 - DNA, 643 bp, Homo sapiens
gcacaggagacatactaacagaggttttcagccctcatcctagggcagggcaacagttctacctgtcccagggcctcaaaccagcaggttggcccagctggagttgctggggctggacactaagtctaggttccccagaaacaaagcttgaacaaacaagggcttctgtgttgggaccagagacccctcctctgcaggtcaatcccaggccctgaatgggcaactttccctgaggtaggctcacctgcagtgtgtctgcttgctggcccttctgtgtgcctatgctccccacctggatatccatcaagccaccaaagttactcccccacctttcaaaaatactttttattttatagaaaactacatagaataatttaagaatcaccaatatacttaacacccagaagtggtaactgctatcatgttagaactggcccatcattttaaggtagtgaaacatcaccaacacagctatgtmccctgcaacatcctccttcccaatccactcccattcctcccctccctaaagacaactattatcatgaatttaggctgcatccttccactttccacttggtttttatttttcaactttttgagataactgaagtacttttcagctaattttctccaataatataat

SEQ ID NO: 862699 - DNA, 632 bp, Homo sapiens
aatggtatttctagttctagatccctgaggaatcgccacaccgacttccacaatggttgaactagtttacagtcccaccaacagtgtaaaagtgttcctatttctccacatcctctccagcacctgttgtttcctgacgttttaatgatcgccattctaactggtgtgagatggtatctcattgtggttttgatttgcatttctctgatggccagtgatgatgagcattttttcatgtgttttttggctgcataaatgtcttcttttgagaagtgtctgttcatatccttcacccacttgttgatggggttgtttgtttttttcttgtaaatttgtttgagttcattgtagattctggatattagccctttgtcagatgagtaggttgcaaaaattttctcccattstgtaggttgcctgttcactctgatggtggttgcttttgctgtgcagaagctctttagtttaattagatcccatttgtcaattttggcttttgttgccattgcttttggtgttttagacatgaatataatagctggtcaacttcctcctccttcatcatctaccaggtgatgatgtctgatttccctggcctgtcttcagcaagaatcctgttaggccagtttagc

SEQ ID NO: 862700 - DNA, 692 bp, Homo sapiens
gtcacagaacaggggaaagggatggagaaagcctcacagtttagcatgtaggcttctccttagtcctctctagaatgggcagggactttgtcttgtctggcactgtagctgtgttactgtgccatgtacactgtatccattcaacaaatgctttctgaatggatgagtgaattccactatttctcattgagcaaccatcacagatactcctaagtctggacttcctctggatcagcctctcaaggggtaaacctctctctcatctggattactccatggcagaaaggatttggagtctttctgctttggaaacagaatttcaactggggcttctgtttccagctccatgacaaaggtccacctgctgggctctagtgcctccaattcctgagcccttctggggttagsgtcaccttgggaggcagattgcttctctgggttctgtcactgaagatatttagctttcagcatcctcaggtctgtgaaatcagtcatccctcccgaactgggatgacatttttctgttaatttaattccgattctctttgtcctttcagtaaaaatctcctctaacacagtaaaacacatcagttaatcttctgattttgtttttcttgaagatatacctctcggaatagcctgtatccctactctgaaaatgacataaagattttttctgagcaaagaaaaac

SEQ ID NO: 862701 - DNA, 614 bp, Homo sapiens
tgtgcaggggatctcctctttttaaaactatcagatctcataagacttattcactatcatgagaacagtatgggaaagatctgccctcatgattcagttacctcccacatggtgcctcccatagggtccctctcataacaggtgggaattcaaggtgagatttgcgtaaggacacatccaaaccacataatgcacctaacaatggagtactcagatatataaagcaaatattcatagatataaaaggatagatagactccagcaagatagtagttgaggattccaaaactccactccttggaatagattgattagacagaaaatcagcaaacattggattcaaactgcattagcctaaatggatctaaacagacatttacagaccatttcatccaacagatgcaggaatacacattcttctcatcagcatatgataaataccccaagagatatcatatgttagacaagawaagtctcaagaatttttttaaaaatcgaaatcctctcagatatcttctcagaccacaatagcatacaacaagaaatcagcaacatgtgaaactttgaaaactccgcaaatacatggaaattaagcaacatgctcttgaacaatc

SEQ ID NO: 862702 - DNA, 640 bp, Homo sapiens
tttataatttcaaggtcattacattttacataagtggtattatgactaaggtagagtaatctttaataaaagaatattataaggcctgaaacaaatctaataaatatgtacaaagatgggtagcttgaggagagattaaaattgaatgttaaattaattaacaacacaaaagaaagtggagatagaagaacagaaggaaaaaggcagatgaagaaaacaaataccaagattatagacataaatcaaaacacaccaataattgcattgaatataaatggatctgtcatttcaattagaagacagaagttttcagaataggtacatacaaaagaaacaagttctaagtatattctgtccacagtagacactttaagtagaaagacacaaactagatgtaaggtattgaaattatttcatgcagatagaaataattctamtattgttcactaatatgaaacaaactagaattcaaagcaaatataagcaaatataaggtattgaaattatttcatggagatagaaataattctactattgttctattaatatgaaacaaactagacttaaaatataagcagaatgaagaggaatataacgataaaaattaaagggagaaatgcaaaaatctacaaacatagtt

SEQ ID NO: 862703 - DNA, 640 bp, Homo sapiens
tttataatttcaaggtcattacattttacataagtggtattatgactaaggtagagtaatctttaataaaagaatattataaggcctgaaacaaatctaataaatatgtacaaagatgggtagcttgaggagagattaaaattgaatgttaaattaattaacaacacaaaagaaagtggagatagaagaacagaaggaaaaaggcagatgaagaaaacaaataccaagattatagacataaatcaaaacacaccaataattgcattgaatataaatggatctgtcatttcaattagaagacagaagttttcagaataggtacatacaaaagaaacaagttctaagtatattctgtccacagtagacactttaagtagaaagacacaaactagatgtaaggtattgaaattatttcatgcagatagaaataattctactattgttcaytaatatgaaacaaactagaattcaaagcaaatataagcaaatataaggtattgaaattatttcatggagatagaaataattctactattgttctattaatatgaaacaaactagacttaaaatataagcagaatgaagaggaatataacgataaaaattaaagggagaaatgcaaaaatctacaaacatagtt

SEQ ID NO: 862704 - DNA, 646 bp, Homo sapiens
ccaagcttatgtgcagtgagatttaaaggagaagtggccatatgggttaagagattggcaattcccttgagagactgataaattgacatatgttaaaggtaagagcagcaggaacctggtgctgttctataaggtgttaatttagagaatggctatggagtttagtggtttgggtttcaaaactaggaacatcctttgtctgttgtatgatgttggagatgtcattagctccatgaggttgctgtgagaattcttggatattatctctttctaaattacttctcatacattttctctctattgcttccatagcttccrttacatgcatttaatccatctcacaccagttagaatagcagtcattaaaaagtcaggaaacaacaggtgctggagaggatgtggagaaataggaacacttttacactgttggtgggactgtaaactagttcaaccattgaggaagtcagtgtggcgattcctcagggatctagaactagaaataccatttgacccagccatcccattactgggtatatacccaaaggactaaatcatgctgctataaagacacatgcacacgtatgttaattgcggcactgttcacaatagcaaagacttggaaccaacccaaatgtccaacaatgat

SEQ ID NO: 862705 - DNA, 694 bp, Homo sapiens
tacacacattatatatagatagactatctgtgtatgtctatatatatacgcattccttctccagcttccacatcttgtccagctgccctctcatttctctgtgtgtctctataggaacttctcttttatgtctttacaggaccctacaaactccaatccttctcttcctgctatcsttggcaccaatgccaggtatccactcacctccactttccacttaattatctctagtggtaaatttaatggtctagtctcaaaactcactttactagtcagcccatcagcaacatttgaaaaagtcgaatgcttcttgtttgaaacatttcctgcaatcgcacatacaaaaatcctgctacagtaaattaaaacacataactgtgctcaaaatctttgaacaagttctcatttcactctgagtacaaagaagaggtcctatggtagcctgtgaggcccctgatgaaatggctcttcttcctcatgcactttattgcccaggtatctccccctggctcatttggttacaaacacactaggctctttgctgctccttgaacacactaagcagactcccatctctggtcactgtcttgtcagcccaaattgcctcatttctccccaaatgcttacaggacttcctctgtcccatcctctaggtctctattcattgcgacattttttagcaaggccgtcctgg

SEQ ID NO: 862706 - DNA, 694 bp, Homo sapiens
tacacacattatatatagatagactatctgtgtatgtctatatatatacgcattccttctccagcttccacatcttgtccagctgccctctcatttctctgtgtgtctctataggaacttctcttttatgtctttacaggaccctacaaactccaatccttctcttcctgctatccttggcaccaatgccaggtatccactcacctccactttccacttaattatctctagtggtaaatttaatggtctagtctcaaaactcactttactagtcagcccatcagcaacatttgaaaaagtcgaatgcttcttgtttgaaacatttcctgcaatcgcacatacaaaaatcctgctacagtaaattaaaacacataactgtgctcaaaatctttgaacaasttctcatttcactctgagtacaaagaagaggtcctatggtagcctgtgaggcccctgatgaaatggctcttcttcctcatgcactttattgcccaggtatctccccctggctcatttggttacaaacacactaggctctttgctgctccttgaacacactaagcagactcccatctctggtcactgtcttgtcagcccaaattgcctcatttctccccaaatgcttacaggacttcctctgtcccatcctctaggtctctattcattgcgacattttttagcaaggccgtcctgg

SEQ ID NO: 862707 - DNA, 548 bp, Homo sapiens
tcagtcttctgcaccttcttacaatttatgtgaactttgaaattttcttcgtggtgtgtccataaaatatacatctaattgttgaattagagggacaatggatggctcactcaatatccatttcctccttctttttacttgtaaacccttaattctgtccctgtgyccaccctcccaacacagatgtatacacagcaaggatgatgctgtgtccagtttcagggtgattcaataagccaatcatgggagtcccatgactgttgtcagccatgtagttaggagggacccagtgatttcgaggggtcatactggaatattcttccttgttcttgaaagagagacaatgatgtatcagtcttcttttctggacatttttgtgtctgccatcctcagagctgtggttattctttgacactggggaggtagactgaggagaggctctagggtgaacataatagagcaaaaaatagaatctggaggtttgattcttcatgacaccatggagtctctgtgttcatcagcctgggaactgctggacatgtgatctg

SEQ ID NO: 862708 - DNA, 585 bp, Homo sapiens
ctaacatggtgggtttggttttgtttttagacgtttcatgtgtatttgagaaggtggcatattctcttttatctgaaaataaagttggatatatatgaataagatttactgaattgatttggtaatgcacactgcccatattcatacttatttttagttattttgacctgtgctggattgrgggtgatgtgttaatctctttaatgtgggtcttttgatgtttcatttcttgttgcatgttctgcagtttctgttttatgatggtggtttctatattatttggtgcatagatgtttttcaacattgtatctttattgtgaattaggaccttttaaataaagtattctttattttaatttttactcatttaaagatttttggctttttaccttgtcttttgcaaccatgctttctaattatttgcacttgctctgtaatacccgtgcccattcattaacttttgttttttccaaatctctttgcctttagttgcatctcttctctacagtaccgtagttagacttctccatgcaaaacaaacttaaaaaaagttcactttttcatttacatttatttatagatcat

SEQ ID NO: 862709 - DNA, 585 bp, Homo sapiens
ctaacatggtgggtttggttttgtttttagacgtttcatgtgtatttgagaaggtggcatattctcttttatctgaaaataaagttggatatatatgaataagatttactgaattgatttggtaatgcacactgcccatattcatacttatttttagttattttgacctgtgctggattgagggtgatgtgttaatctctttaatgtgggtcttttgatgtttcatttcttgttgcatgttctgcagtttctgttttatgatggtggtttctatattatttggtgcatagatgtttttcaacattgtatctttattgtgaattaggaccttttaaataaagtattctttattttaatttttactcatttaaagatttttggctttttaccttgtcttttgcaaccatgctttctaattatttgcayttgctctgtaatacccgtgcccattcattaacttttgttttttccaaatctctttgcctttagttgcatctcttctctacagtaccgtagttagacttctccatgcaaaacaaacttaaaaaaagttcactttttcatttacatttatttatagatcat

SEQ ID NO: 862710 - DNA, 631 bp, Homo sapiens
gtgggaagaacacacatgataagtctagaaaagaaagctgtgggagagagaagtagaatttttaagaaagtaagggccatttaagttaaaaagaaaggacattctacctagggataagattttctgtcaaaaatatatatgaagaattcggccagggcattgtgtatatttagattatattctctaatttgccacctatccagatttttagtaatgtgtctgtatcagagtgtcctccaaacataaagttttatttatatgcctcaatagagctaacacattacgaacatttcagctttattgaagtataattgacaaatagaaattgtatacggtcatcccctcttatctgcaggggtacattccaaggcacccactggacgtcagtaaccatggataatactgaaccccatrtattctgtttttctgtacatacagacccatgataaggtttaatgtataaattagacatagtaagagattagcaacaacaataataaaatactacaattataactgtactgtaataaaacaattataactatactgtaataaaaaactatactgtaaaataaaacagcactgtgaatgtgctgtttttcaaattatctgatggtgctatattgagttc

SEQ ID NO: 862711 - DNA, 631 bp, Homo sapiens
aattaaaaaaaagttgagtattctgttattttaataagatatctagtgcccatattctaattctgccccttatttttaatataattttattgttgatttaaaatgacaacagtttcaattcccagaaagtgaaaggaaacaaaggaataatattataggcttaatttttatcagtgaacttgtaggtgaagaaaagatttggggaaggaaatgaacatattatattgcaaaatagtaaggaacaatcagatgtgttttctagtctctggaaaagcatgtttcaagaaattcaatgaaaagttcatcatgcttgcttagattgttgagaagcaaaaayactgatgaacatttggaagcaatgagaatgtaattctaatcatactcttttaataatgttgcaaaactctccaaacactactctgtgtggatgtctttcagaatatgatgaatactagtagtcttattctgcccttttctctctatcacaatatatacattctatattgcatacacatattttccaaatattacatataatttcatgtaatttatagacctattaaggcccaaccattttcttggataggggattctttagaagtccagcttaaataaagcccgtatagaaagt

SEQ ID NO: 862712 - DNA, 557 bp, Homo sapiens
cctacactccaatctctccaaactgctactctacctctgaaatcggtgttcatctcttagcctcctagaagttggtctttgctatccctcccagagcctcattctatggatactcatccatggaagcttagcttagaagttggccaagaactggagagaaaaaagttatataaacctcttgggcaacctttgctagattagttcctaggcaattggtagtttttgttgttatcataaagtggatctgttttccgtttcwttttttttttttagttacttattgcattgaagagaacttgttgaatatacttaaagaatgatttattgagctggaagataaggttgaaaaagtctttcaaaaagcattagcaggaaataaagagatagaaagaataaaaaagaagtcaaaagatatggagaataataatagaaattgcagtgcccatctaggatgaaaggcaaggtatacatgtagagaaaatatttaaagaaaaaaattaatgataagttgttaaaattaatgaaagatgtaagacttaatactaaaagggcacatc

SEQ ID NO: 862713 - DNA, 622 bp, Homo sapiens
tgagctacagatacgtcttcctttaggaaaacaaaaacaaaaaaaaaacttggtttgaaaaagctgatttatagtcttaaaaaatcaatattgtaaaacattaaaattccacgctcctacccctggtcaggattttttatcctccttctctaacaaatttcgcagtttttttttttgttttttgttttttgtttgttttttttttttgagacagagtctcgctctgtcttgctctgtcgccacgctgcagtgcagtggcgtgagctcggctcactgcaacctcygcgtcccgggttcaagctattctctgcctcagccccccaagtagctgggactaaagggggcgtcactatacccagctaatttttgtatttttaatagagacagggtttcatcttgttcgccaggatgctaccaatctcttgacctcgatttcacatattttaaatatgggttttaaacaaaaactcagatcacttggaaccgtttaaaaatgtagccggccattctatataaatgatataaatatgagaaaatagacacagtaaagtctagatcagtgttgctcagtggaaataatgttaaccataaatgtgagccacatatgtaacttaaatttttc

SEQ ID NO: 862714 - DNA, 622 bp, Homo sapiens
tgagctacagatacgtcttcctttaggaaaacaaaaacaaaaaaaaaacttggtttgaaaaagctgatttatagtcttaaaaaatcaatattgtaaaacattaaaattccacgctcctacccctggtcaggattttttatcctccttctctaacaaatttcgcagtttttttttttgttttttgttttttgtttgttttttttttttgagacagagtctcgctctgtcttgctctgtcgccacgctgcagtgcagtggcgtgagctcggctcactgcaacctctgcgtcccgggttcaagctattctctgcctcagccccccaagtagctgggactaaagggggcgtcactatacccagctaatttttgtatttttaatagagacagggtttcatcttgttcrccaggatgctaccaatctcttgacctcgatttcacatattttaaatatgggttttaaacaaaaactcagatcacttggaaccgtttaaaaatgtagccggccattctatataaatgatataaatatgagaaaatagacacagtaaagtctagatcagtgttgctcagtggaaataatgttaaccataaatgtgagccacatatgtaacttaaatttttc

SEQ ID NO: 862715 - DNA, 601 bp, Homo sapiens
gtttggcttatgcagatgatcagattgtatgacttttttttttctttttaaataagctttcacaggttgaaagattgtatgactattgttgagataagaactacctattgggtcaggctcactacttgggtaacaggatcattaccctgaacatgcttcagcatcacacaatatactcaagaaatttgcacatgtaacccctgaatctaaaataaaagttgagattgtttttctaaaaagaaacactggagggatcagcttttgagataagaacctcagtattccatacgtcacattctgaatattcctgcsatggttttagttacattaagcctctgctaggaaatgtgattgcaaaatgatcgttggcttttattggcttttacagtgaccaggagaaaaaataaggagaaaaatattgtaccaggataaaaataaaaaaaaaatcttctatgatgactccctttcacaactaggattcaaaactatatgaatgagaaaataatttacaatttatttggtgtgaaatcttttagaaatgagtaaaatctatgttaaaagctcagtaatatgaagcttaatgctatgatttatttgtact

SEQ ID NO: 862716 - DNA, 590 bp, Homo sapiens
taagtactattgattagctatagccttctccctaagtagctgccaggtattaaaatgtaaagcaaaacaaaaattcaaataaatcggattctgagtacattcttccttctttggaaagggctagtgcctcctcattaaatgattaacacacttgaaaaaatatatttaagtaaatgagataataaacctaaagatattttcagtttcacatttcctagaaatttatttctggaaataaatttattcctaggggctctcttggcaactcaaattaattctaaaatctcacttttcatttcaccttacttcatttattcccccaataaacttcaagctacctaagataagagactatggcttatttatcttttaatccatgatgwttagctcaatgcctgctataaattaagggttcaataaatatttattgaattattaaacctgtccctcctcctgggttgccaacttagtctctcaggctttgaagttctgtatgatctctgtctcctaaattctatcagttcccaaattgtatagactcccaaacaaataacagctttcaaatacaactttttctatattcccactac

SEQ ID NO: 862717 - DNA, 621 bp, Homo sapiens
taatctgtgctcttaactgccacatcctactgacccttttcatgaagaatattacatgtttctgcttatggtattaatagaaagttttatttttccccattggttctcagggaaatttagaattaactttagagccaattattttgactttataatcctaattctatcacttaccctctctgtgaccttgggctaggtgcttacactaagattctctttcctcatctgtgaaataagaatactcgccaccctcacagttaaactaaagatgcacagtctttagttaaagtcttgagttaaaactaaagatgcacagtctagcaggcattcagccaattttgttttctttcctaatktttaagtacagaggctgatgctgaggccagaacttgaaattaagaccacatagtaggcatttttaggattcacattcctagtaactcagatgacacttaaaatcagaccactgctgaactgtgaggagtcatgaaataaaattaaaaagcgaaaagcctgcatgttcctttagggtgtacccagtgctccaaagcctcagaggccggattttctggaaatttgttcatttcaatctttaacctcagggacacgcaaatagtcaag

SEQ ID NO: 862718 - DNA, 609 bp, Homo sapiens
acataagttatgataaagccattcaaaagagtagcacatgaatatttatttaatggtttgggggtaaacaatgcatttaaaagagaaacccaatgtattcacctaacattatatatgaagattacagatacattaaaagaaaattatcaaaacaaaacatcaaaactcatggcaagagaaaaccaaaggtgaatatttatgcaaatacaggctaagaaaatcatttctataaaatataaaagaaagaaatgatgttagagaggtgttgataaatatgaccatataaagcttatggttacaaagatggattgaagtgaccaatttgcttcttggaaaatatgaaaactggaatgcttcttgaaagcacyagaagaaagtctgttctgtgaactatttttttaaatgaactcctaggataaatgggatatacttttataaaagtataaaaacaatatattaagtcaaataacttagatcatttgctatataactttttccattaattttctttgaaaatgtaagcaatttgttataaaatagcttaaatatgagaattcagtaaaatttccagggtattaagaatagataacatactatggttttctcatt

SEQ ID NO: 862719 - DNA, 667 bp, Homo sapiens
agacataagtatgtgaaaataagagtgaagggttaggcagccttttgtcccaattactcccactgattgtgccgattcctgtttactcccattggttgtcatatccaggtgggatgtccttgcatactgtaaaactggtaacctgttatttctgacaattttacacaaatgtggcataccatgaataaaatcctgccccaagatacataattacagtagagagagcaaacagttctcattgtacaatgaaattataaattaggtgtttcaaagagctgactagaatgtctcatatatgcagccaaccccaggcatggccttcttcctaaggctgtgccatgcttcttttcttcattctacaaacagtaatcatgttgttcctgttgaaatagactgcttaaaatgacactatttgtttttaatgacattayttgttttaatgtttttaatgtttcactatataatttcaaagcaagtctttctcacttgctattgattttatccttctagaatgaaagcaaatggaatttctaggtctccagataaaaattaaaacataaaaattctttcagactataaatatcagtcctttgaagaacaaatgtgctctgaacaatttacgcctttagattttgcacttcaattttctgaatagatacagaaatat

SEQ ID NO: 862720 - DNA, 642 bp, Homo sapiens
ggtatgacgaacattgctatgagcttgtattttgtgagaattttggtcagttgtaaggcctttcccaatcaaaacttagttttgttaagaaaagcaaattctgtccagacctacaaatatgaccataaatgtgtcataagatatgaacttcaaatagacctaaaatccaaacatatttcttgtgagagcaatatattctgagttagttttgaaaaaaaaarcatttgacacaatacctacaattttgggttttcatttatacatagcataaggattgtacatacaaatctgtttctatattgacatattttatattattaagcctttaaattcatatgtgccaccctaaccatagatagtagactaaaatgtacttttgtaacacttagccctcaaatgatatttgtacaattaaactttataagttttcccatgtaacttatttactttggtacagcttctctgagatagctaatattatgccccgttttaaatgctataaatagaaatagtctagcttggaaagcttgattttactacagctaaattttattactgctaaatgttttgtgtactgttagaattaagacaacagaaactattcatgtgctttctccctatttttttcataatatgttttct

SEQ ID NO: 862721 - DNA, 630 bp, Homo sapiens
aaggaagtacaaataaatagaaacacatataggaattcaggagttattatattatcaaaataatattaaagtgttaattttctactactactactactagctctatgtaatgcttactctgtacaggcgacattctaagtgttttccatagtttttccagagtgttttccaccaattttgatgaaatttagtgttcatttaaattagaatgtatttatacttagtgaaagctgaaaatctggtaaggctaaattatagaagctatgattttcagaatctgaatcctaattatttttgaatccggggctatgtttggcaggtgagggataatttaggagtgggaagaaattgaaaagataaaaggtaaaatgggcatttatatccatccaacagtgtgtttcacattatgtgtacattgtggatgcttaatccacacaaatawtgagaagccacatggtgtttcactgccaaagaattctctctcttgagtaaagaatgacatgggtggaagtacataaggaacagggatgccaaggaggagagccacctgctcaacagttggcatgactaatctcaatgatttgtcatgaaaacctgtgtaaaggaaacaattaattgactagctttcta

SEQ ID NO: 862722 - DNA, 631 bp, Homo sapiens
gatgtttttgccattggtgatacaaaggctataaaatatatggcttataatcaaggaaacccagggagagaaatcctgtgtgagaatgcattatgatagaacaagtaaagtattccaggacatcagaggagagaatggctatcactactccaacagttggcaaaggcattggtaggatactacatgatacactgccttaaataatttatggtacaaatttcaaataaacaatcaccktgtcttaaaggtcattatatcttctgtatgatgccttgcaaataatgaataaattgtaggcattcaataaacacacatatttcactgatggatcatgttcttatggcagaggtacaggctggctttggttgcacttgaccttcctctctcaagttgtcctttcttctttgatctctcttttttcttcaagtacctattttgtttttactgcttggcagagggttcatctctactaaggtgggttataaagacagtaactggtgaattccatttatttagttcagactgtacacaatttggtcaaagttagagttcataaatgtgacccgtgctggtgtcagttttacagtcatacatgatcagaggtggcatttctgaaaccttccagccattt

SEQ ID NO: 862723 - DNA, 571 bp, Homo sapiens
gactagattagactattcgacagcaagaaaaaagagtctatttgctaatacctaataatgagtagaaaactaggaggaaaactaaactgtatggaagaatgagtccatagagcttgcttcaaggggtaacaatgagaaagaatcaagttgctaagtgtttatatcctactgagcctaatttgttcaataactggttacatcaccaatattacamgccaaattttctgactcaaagcccactgtctactgcattcccaggtaaataaaactagaaatattaatctgttctaaaagtgagggagggtaaaagagatgttaggaacatatacaaatgcaatttctgacttgttttcatcttgattcatgaggaaggagggagagaaggtaggaaagaaaggagagaagaggagagagagagaaggaaggggggaagaaaggaaaaaacatttacaaaacatctttaagataatcagggaaatttgaatatggaccaaggatgtgaaattaagaaattactagtaatttttaggtgataatgacaagcttatgttaaaaatgcacttctatgtga

SEQ ID NO: 862724 - DNA, 582 bp, Homo sapiens
aatgacaagcttatgttaaaaatgcacttctatgtgagtgctgtgtaccgaaatatatatggggaaatgatatgatgtctgagatttgctttaaagtactctagagatcagagaaaatgtggtgaagacagataaaataaattggaaaaatacagataattgttgaaagtaggacacagggtacacagaggtccattgtttcttttttcttttcttttctttttctttttctttttttttttttgaggtggagtcttgctctgttatccaggcttccaggctggagtgcagtggcrcaatctcagctcactgcaacctccacctcctatgttcaagcgattatcctgccttagcctcccaagtagctgggactacaggcacccgccaccatgcctgaaaaatttttgtattttagtagagacggagtttcaccgtattggctaggctggtctcttactccggatcttgtgatctgcccacctcagcctcccaaagtgctggaattacaggcatgagccaccatgcccggcctgttctttctacttgtgcatgtgattaaatgttctataataaaaaagttaa

SEQ ID NO: 862725 - DNA, 613 bp, Homo sapiens
taagagaggtgccctggtccccaaagaaactccctccaaattcctttcaaattccctctaaatcaagtagggcatttacccaaaaagccttttaaatgctcacctcggtgtgcctcacaatggtaatattagagggtttgtttttgwatgatctacagaaaatcagggtgccttaaaggcatttgatagcttactcatggggagaagggcacagaggagctccaggatactccaactcctaagccgctccttagtgagtagctgggtttctgactggctttttcccctggacccaataggtgtaagcccccttctcctacctctgttgggatcactatctttcatggtgcttccctttctctccttctctacctgaggaataccacagggcattggcccacatgccagagtcttgcccttttacccaaagcagcctggccttcagggctgcatgggagaaaagtgccttccatacctctcactgtgggtgatactcatttcctctttaaccaggacttcgttcctgccactaacccattcagattcttccccctctcactctcctgcccaagatctgtcctctggttccccaggcagcataaaagaagacata

SEQ ID NO: 862726 - DNA, 665 bp, Homo sapiens
ctatcttgcattgttcttaaaatatttttattaataaaataatgaaggaattaaacttacaaaaggtactgcttaatgtatctgacaggagcatttattttattatcagcagtgtcatactgctccttttctgcctatcacattgtctacttttataagtggccctatctcrttgcaatacagctaccttcactaacctggtgggctatcatctgaagaatatgatataaaagaaagttacagccattactctgaaaagaatatccttggagacattcacaacacagactgcaacatttatgtagttttaatggctatacacttgagtgcccgaagataaaactaacaactgttttcacatctaatcagtatgcatatgtcatttataaattttcaatatgctgatttatcatttctagtctctataccagggtcctcatattcttgtatttctttttatctgaactcatgcagctttcactgagattcaaacaaaggaggatgtttcattgttctaaggcctggtccatttgtttcattgcaatacgcaagccagctgtgctcaaatgcagcatctgaagaatgatattgaaataaagtaggcagcctggcaggaccaatcacactaaagaaaatgactttggtcaattctgaaatggtaacac

SEQ ID NO: 862727 - DNA, 665 bp, Homo sapiens
ctatcttgcattgttcttaaaatatttttattaataaaataatgaaggaattaaacttacaaaaggtactgcttaatgtatctgacaggagcatttattttattatcagcagtgtcatactgctccttttctgcctatcacattgtctacttttataagtggccctatctcattgcaatacagctaccttcactaacctggtgggcyatcatctgaagaatatgatataaaagaaagttacagccattactctgaaaagaatatccttggagacattcacaacacagactgcaacatttatgtagttttaatggctatacacttgagtgcccgaagataaaactaacaactgttttcacatctaatcagtatgcatatgtcatttataaattttcaatatgctgatttatcatttctagtctctataccagggtcctcatattcttgtatttctttttatctgaactcatgcagctttcactgagattcaaacaaaggaggatgtttcattgttctaaggcctggtccatttgtttcattgcaatacgcaagccagctgtgctcaaatgcagcatctgaagaatgatattgaaataaagtaggcagcctggcaggaccaatcacactaaagaaaatgactttggtcaattctgaaatggtaacac

SEQ ID NO: 862728 - DNA, 599 bp, Homo sapiens
tccacattctcatgctgattctaagtgcaaaaatctacatcatgacctttgtattaacagacacaatatatctttaaaaatagagcattctagctgtatgtgccaaggccctagtagattcaaatctaagcagacattactacagaaaagcttcagtcttgagaagagcagctttcacacaagtgaatgagaatttaaagaaaaaaaaaagaacaaaaaaagaagaaagaatactgggcttaaaatacattgtcagagtagcagcatccaaaatacagtgaaaatatatgcctcaacttaagcagtttttgtctgtcactcatttcatggtttataatcacactcaagggaataatatcaaggcgatactyctgtttcctcagaatccatttctcccaggtgctctactctatctccatgagtaatcttctgcttggcactaaagggagactgagtctgctactcacactggcttgtgctggctcctagatgttgtcaaatcagtgacttaatgtacattctctctgcttatgttcactcttcacactcttctaagaccacagaacaagataaataaccaccaacatatttggagtaag

SEQ ID NO: 862729 - DNA, 580 bp, Homo sapiens
catggtcaaaaaataatatttaagtatagttaagtgaaaggaagtttaaaggaagtatgtcatccaagtagacatcttggagggttgtgctctggataactttcttctcaaattatttgagttattatgatggaaacttcttccttttggggatttctgggaaaaatatttctggctctcctttgactatgcaaggaaggatttttctgatcagtggaatgacaaggatctcacagctattgatactctttcctctgttattaaagttagaggtgctgaaggtgactgtctcagtatagttttctctttttcacttcaaggctaagcttacagaaacatagcagtcttcaaygattctaggtaccataaaataaacacatctgtgtccaggccagggtctgccttttagaagcaagtttgaattaaagcctactttatcagcactttgaggacaaaatgaatataaaacagtgctttttcttgggctgcttgagaaaatgtccaaactgcagaccaaatctctgtgcatcgatctcagatgtggattttctaaaaagtagcacaaatgtttatttttgct

SEQ ID NO: 862730 - DNA, 658 bp, Homo sapiens
ttattttattttatattttaatttaattttattttattttattttattttttggggaggagacagagtcttggtctgtcacccaggctggaatgcagtggcactatctcagctcactgcaacctctgcctccagtttcaagggattctcgtacctcagmctcttaagtagctaggattacaggtatgtgccaccacgcccagctaatttttgtactgttagtagagacgggggttttgccatgttgcccgggctggtctcgaactcctggcctcaagtgatccgcccaccttggtcctccaaagtgctgagattacaatcgtgagccactgagcccggcctcaagttacctttctaaagatagcaggctgaggcctgctatattagtttttgttttttgtttttgctttttttgcacaggaagtaatcctctaaagaatctgtttctgattcctggaaagttagctgctggtgttcagtgctcccagacttaaatatttcataggattttctgctttggagtgcaatagccaatatatttagccttctctcccatattactcctgaatatcttttacacagaacttggaaaatataactcacttgggaaaagtctcttgaaaggatcataaagtcctatttctacttgatttagtatt

SEQ ID NO: 862731 - DNA, 631 bp, Homo sapiens
gatgctaaactcaacttgtcctatgatacatctttgattaataggcaattgcaagtgactgcatgaccgtgtgctcctgggttattttcagcgagccaggggctcgcagctatcacccagctccaccagcagtttgtttggcagtttgtccctctttcgtattcatccttttgcaatcagcttttccatttcagccgtgcttgctagctgcaagctgctttgtgacgtaagttatgatgactttgtgctataaaataaaacagcaatcctcacagctgttttgattccatttaatgaaatggtggtgacatctgaatgtcacaattgcagagaggcggatgggttgttgcagttgctgataggagaaggatcagtgttattccctgggctaatatctcatatgacaattctgcagttaccatcgctctgtgtcaggcgatggtgactgctaggcgccaatggacctctggtttttyttcacttcctataaatacaatggggcagtggggtggagaggatgaagacggcattgtgaagattgggagaaatattttgggggaaagaagcacacacctaacagttgctgccattcaagaacttgaaaaatacaccgttttgggataaccaatag

SEQ ID NO: 862732 - DNA, 636 bp, Homo sapiens
tctgaatatatgtttttggggatacacatgcacacacacatatttgtttgattctctaaacaaatcgcttctggcttgggatttaaaaaacattttttgcggggacaggatcttgctttgtcgcccaggttggagtggtgtgaccacagctcactgcagccttgaactcctgggctcaagcaatcctcctgcctcagtatcccatggcttgggcttttttgggaggtggtggtgtttgatgagctcagctcacctctcaccccatctggctactttttcctctggtttgcatygtacacaatggctacagtaggcttcttgtagattctccaggacttggcacaatctgtcctaccttccatcttctggctgaaaggatcatgctttgtagagttaattaagaagccagcttccagaggcagaaaaacctgagtttaaatctcattcctgcccctccatacctcagattctttgcctgtaaaataggctgggaatagcaccttcttcctggtaaaacaatgaaatacatgtaaatacatatacattcttgtgaagagcttagcacagagaccgggacattggaaacagtcaaaaatggtagaaggaaccaaaaggcaaaagacggaaaacaaacaa

SEQ ID NO: 862733 - DNA, 636 bp, Homo sapiens
tctgaatatatgtttttggggatacacatgcacacacacatatttgtttgattctctaaacaaatcgcttctggcttgggatttaaaaaacattttttgcggggacaggatcttgctttgtcgcccaggttggagtggtgtgaccacagctcactgcagccttgaactcctgggctcaagcaatcctcctgcctcagtatcccatggcttgggcttttttgggaggtggtggtgtttgatgagctcagctcacctctcaccccatctggctactttttcctctggtttgcattgtacacaatggctacagtaggcttcttgtagattctccaggacttggcacaatctgtcctaccttccatcttctggctgaaaggatcatgctttgtagagttaattaagaagccagcttccagaggcagaaaaacctgagtttaaatctcattcctgcccctccatacctcagattctttgyctgtaaaataggctgggaatagcaccttcttcctggtaaaacaatgaaatacatgtaaatacatatacattcttgtgaagagcttagcacagagaccgggacattggaaacagtcaaaaatggtagaaggaaccaaaaggcaaaagacggaaaacaaacaa

SEQ ID NO: 862734 - DNA, 581 bp, Homo sapiens
aaggcatgggtaatttgagaagaagatgccctggttcttaaatggggtacattataatcttctggggatttgattaaaaaatagatacctgaacctttctctaaacctcctggatctatagaagtgtgtttcagtctgttccccagctgaagagaaagcacacaaaaacctaagaagcactggtgcaataagagggtgctattggcaagcacacaccttcctacactggaataagaaactttatcaggttgaacctttttttaacctcaagagaaagacaaaaggaaatagctaatttgctaattatytcagaagattattaatcttgcaaggtgtcaccacacagacttcaaacatgagcaaaatcatagggattgtacccttttagcatttagtaaaagaaaattgtatttccctatttagaaaaaaaatctgtatgcattagggaactgttggagaccagccctaaagttctgaggagctgtccaagaaactgaggatgaaagatttcacagactcagtgcttctccattacccagctctgagtccaattcagctcaaatgttagtgggacatatatt

SEQ ID NO: 862735 - DNA, 644 bp, Homo sapiens
tttccataaaaattaatctccaacaaacaaaagcgtttgttcctctcatttgcatgctgtgtggttcactcctcgtgtgtgtgtgtgtgtgtgtgtgtgtgttttaagaaccaagccggtcatctgttgaaaacttttactccagcagatgacgcagttattcttttattgctttaagtaaaagggcttaaaagagcccattactttctcacacaccagcgcagcttccttagtcctcccccacagatgggtgaatgcggagcatgtccgtggtgcccctgaagccccgcatcataagtgggactgagggttcaaatctctgtcctcacgttgtatcccagtgaaattctaccacatacagggaaggaggtggatttattctaaattaattcactgaaagtctgtaatgatacagagtaggtttcaaaatggccttcttccaaaacacccatgcatgaggtacgcctgatcctctgtctggaagtccygagtctctcagtcctctgagttgccttgtttccctgtaatagaaaagcatcattaaaatatactgttagaatttaaattgcttggcatctcacagcctgttccattgagtattattattttataaaagtggctttgttttgttttattagtttaat

SEQ ID NO: 862736 - DNA, 532 bp, Homo sapiens
atttctctgggacccctctctgctgcagagagctcttctctttatttcacctattaaacttccactcctaacctcactctctgtgtgtccacatccttgatttcctagacatgagatgatgaacctcaagtaccaccccagacaacaaggctgcttcatcaggacacaaacctgcctgtaccaggacctctgacctgtgtgcaggtatgtgaatgtatagataaatgcatttttgctttaagaaattggtgtgctacatggcaagatatatgtaagttttggtggaaaataatcatttcaatatataatggtaaggaaatacaacatattataaagagaagatttagtcagatatatgatcatgaagactttgacaaatcagatttcrtaatttaagagaaaatgtaactatgttacttttatgggatgaataatgttccccccaaacctatatgttgagggtctaacttctagtacctcaaaaactgactgtatttggtgataaatcttttaaaggaaattaagttaaaac

SEQ ID NO: 862737 - DNA, 534 bp, Homo sapiens
atgcattcccctgccccctaccaccacccagtctactgtctatgttcccagcccagaattagaacttgtttaggaattacagtccttgtagcctagactgcccttcaagtttacttagggcccgagaataatccagcccttggtggcaaggcttcctggaaatsaagctccagcaattggggtggatgattcccctctggctagggccagtccaaatgctcccgcggtgggcggacgtcagctcaatacagcctggtcctgctttctgctatgtcagggcagcactgagttcaatgcaaagcctcacaattgctgtgctcttcctctcccaagtgcccagattctttgaggtgcccagtctcaccctggggattggggaaggatagagttggtgattcaatgtctctttcagtgatgtgaagttaaaaccaggtactgtgattgctcaagtgatttttggttcttgtgatggtgctttttgtttgtagttgttaaaatttggtgttcctggccgggtgcggtggctcacgcctg

SEQ ID NO: 862738 - DNA, 534 bp, Homo sapiens
atgcattcccctgccccctaccaccacccagtctactgtctatgttcccagcccagaattagaacttgtttaggaattacagtccttgtagcctagactgcccttcaagtttacttagggcccgagaataatccagcccttggtggcaaggcttcctggaaatcaagctccagcaattggggtggatgattcccctctggctagggccagtccaaatgctcccgcggtgggcggacgtcagctcaatacagcctggtcctgctttctgctatgtcagggcagcactgagttcaatgcaaagcctcacaattgctgtgctcttcctctcccaagtgcccagattctttgaggtgcccagtctcascctggggattggggaaggatagagttggtgattcaatgtctctttcagtgatgtgaagttaaaaccaggtactgtgattgctcaagtgatttttggttcttgtgatggtgctttttgtttgtagttgttaaaatttggtgttcctggccgggtgcggtggctcacgcctg

SEQ ID NO: 862739 - DNA, 599 bp, Homo sapiens
ataattagtttgataaataaacactgaactgaattaactgtataactgaatttcattatatttatctgagctctgctgtgctgtataaatcacatagaaagttaatgtatcagatatgttttctgtttcatagttcttgtttctgtttcttgacagtcaaaacttgtaaaaagtaattgaaacagtagtagccttttactagagataattctaatttgtagctattaactcttacttgagaatttttaaggccaaamagtgtttccaaatataaaatttattcctgtgacaatgttttctttgttaaattatttcctggtacatctaagttttacaacaattagtaaatactttcattatttaagagtattggcttgtttggggaaaatattagtattgtgtttcttaggaaagaatagttctctcaactcaatagagaacagcttcaaaagtgttctatatctcctataccaacactgaaagctaattatgattcttttcctagggcaagtggtatcttacctaattttctactatcttctaagtttatgaaaagttagattctattttaatttgttggtatgtctctttcaaaaatt

SEQ ID NO: 862740 - DNA, 708 bp, Homo sapiens
atattagttagtaataactactatggaggaaaatgaagcagaataataaaagaaggatcgtttggaagtatgtgagtgcgtgtgtgtgggaagttttagatacacttgtctcctaaaaattttctaataaagtgacattggattagacctaattctgaaagaagaaaggaaaagagatttaaagatatgcagaatgctccaggctaaggaattagcaggtatgtattccctaaaatagaaacatgttcagtgygttcaagcaacagctggagtacagaataagggtgtttgttgtattctctgtcagacagggggccattcattccgtggttgtcatgtgattttcacagaaattctaagcaatagcagtcttatagcagtaacactctttaaagattaaacatatactttatgtaggttgtaattatttcctgataattgatttatcaatattcatctagcatatagcactatgctgagttttaagattttgtctctgttcataaagaactcacaatataattccgaagataacttttttggtttgctccttatttcttcaaaccactttcccatttcttttctaaaatgattcacttggagtacgtgtgtgtgtgtgtgtgtgtgtgtgtgtgtgtgtgtttaaatgcctgaaggcttttcttctttctgtatctttatacacctcttgatgctcccccaattctc

SEQ ID NO: 862741 - DNA, 661 bp, Homo sapiens
taaatgatcaatgaatcagagaaaaaattagaagagaaattaaaaaatattttgagacaaatcaatatgggaatacaacataccaaaactttttaggatacagcaaaatcagttataaaagatatgtttatagcaatgcctacatcaaaaaagaaagatttcaaacaatcaaaaattacacctcaaggaaatagagaaagaaaackaagctcaaagttagtagaaggaaggaagtaataaaaatcagaacataaataaattaagtagaaaatggaaaaacaatagaaaagataaatgaaactaagagttggttttctgtaaagataaaatcaacgaagctttagctagattaagtaaaaaagagaagactcagaaaagaaggaggaaacattaaaactgataacagaaatacaaagtatcccaagacaatactatgaacaattgtacacaaacacactgaataacctagaagaaatggatgaattccttgaatgtacagcctacccaaactgaataagtaaacaacatgaacagaaaaataatgagtaaggagattgaatcagtaataaaaagtctcccaaccatgaaaagcccaagaccttatagcttcactgtgaaattctgccaaatattcaaataattaataccaatttttctcaaa

SEQ ID NO: 862742 - DNA, 662 bp, Homo sapiens
ctgaggaatcggcacactgtcttccacaatggttgaaccagtttacagtcccaccaacagtgtaaaagtgttcctatttctccacatcctctccagcacctgttgtttcctgactttttaatgatcgccattctaactggtgtgagatgctatctcattgtggtttygatttgcatttctctgatggccagtcatgatgagcattttttcatgtgtctattggctgcataaatgtcttcttttgagaagtgtctgttcatatcctttgcctgcttgttgatggggttgtttgtttttttcttgtaaatttgtttgagttctttgtagattctgggtattagccctttgtcagatgagtagattgcaaaaattttctcccattttgtaggttgcctgttcactctgatggtagtttcttttgctgtgcagaagctctttagtttaattagatcccatttgtcaattttgacttctgttgccattgcttttggtgttttagacatgaagtccttgcccatacctatgccctgaatggtattgcttaggttttcttctagggtttttatggttttaggtctaacgtttaagtctttaatccatcttgaattaatttttgtataaggtgtaaggaagggatccagtttcagctttctacatatggc

SEQ ID NO: 862743 - DNA, 689 bp, Homo sapiens
ccagtgaaatgctcctgtttgtccccaatgaaatgctgctgttctaccttgcttttgcccttcttgcagggtgaagacttctttctctcatgctccaaagacacagagagttccagtaagtggattcaggcctttcctttaggccctaagtcctgcttctgaacacttaccccaaagacagacaaagggaggagtcttgccaagacttctaggcagtgttaaactgactgtggtttttggagccttgattccaatacaatccaccaggtctgctttatgttcgtgtaaccatcagacagacctcctagaaagagagagcgtattatcttgaagatacattctagtctccatgtttcctaaacagaaaatatctggaagctttgtttcacagttaactctcaaggtaatgtatgtttttctattctctccgtccccttccttctmtgaagtctaagcaatgaaatagttttctctgagcctgggatctgggaggcattctgttcttggagaataacgaggaggagaatatcattcacttcaaatgatgattggctcttgttaagagcacactatcacatttaactctttccttaatgtatggaaaaactgagtgccagggagtttctaaactctggcatacatggatttggaaaaaccttcaatttttctttatatatctcttttttaag

SEQ ID NO: 862744 - DNA, 568 bp, Homo sapiens
atttttttaaaagttaacattttttgctcagttttcaccactgtaacaattaaggctctttggttgcaagtgacagaaactgactttgactaatgtagacaatatttatcagaataacatagggtatttcacaatattaaagaaaaatctgaagaaccagcctttgaaaaaaatatgaatcaggcagggtgatatggtttggctgtgtcccaaaccaaatctcatcttgaattgtagctcccataattcccatatgtcatgggagggacccagaggaagataattgaatcacaggggtgrgtctttcccatgctgttctcttgatagtgaataagtctcacgagatctgatggttttgtaatacacacgctctcttgcctgccaccatgtaagacgtgacttttctcctcatttgcattctgcagtgattgttcagcctccccagccagtggaattgtgagtcaattaaacctctttcctttataaaattacccagtctcaggtatgtctttattagcagtgtgagaacagactagaacacagggcatcttcacagatcaaagtagac

SEQ ID NO: 862745 - DNA, 620 bp, Homo sapiens
ttgatattattaaagacagtaggtattctgaataaagacaccaatgttaagtctctcagcaggatgaaaagaaaggcatggagactagatcacttatattttgttggaaaacaaactaccatgattcagtgttttaaaataatgagtatttatttaattcacagtcctgcaggtttgcaattgatctgtgctcagctaggcagttctggtttcagctgggcccagtcataagtctgcagtcagctgccagatcctttggaggctgacttactgggactgtccattaactctttgtggtctctcatgccctagcagtctagcccacgattgttcatgttagggctggacagagytcaagagaggaggcagaagtgcacaaagtttcttttttctgtatagcgtttttgaggtatgactgacaaataacaattgtatatatttaaagcattcaacatgagatttcgatacacatgttttgaaatgattaccacaatataattaacatattacctaatactgtagttacctttttgtgtgtgtgtggtgagaacacttaagatctactctcttagcaaatttttagtatgcaatatgttattattaactgtggtcgtcatgct

SEQ ID NO: 862746 - DNA, 604 bp, Homo sapiens
ctgaactgctgcagactagggctggaatagagtctcagggatacttcaaggttggtccacagtcaattcatagactgacctcagggtccacagccaagaggaggtaggtgtgtatgctaccagggacacagatggtcattgctgggtcttgaggtgggcaggagtaagaatagggtgagatgggccacaggaccacttcaggatccgtagttgggcctgaggttatcattagcaggcctgtacccaggggctctcatcacraccctgtacaggaaggaatgactctggactggtggtagagcagagctggagctgggtcacaaggctgtttcgggattcacagtggtgtccatggctgaaagatgtgcacagtgtttcttgggggtagtctttggacaaatacatcatatttctttggctaaaaaagtcacaaggcttgaatgaagttaagagataggagatagattttctctcttcttgggaggagctgcagtcacattgatcatagcattgatataggaagaatgtgcaaacacactatcacaaaaattgaaaaaagacattccaataaaagggcaaataagtcaatctataagaaaactca

SEQ ID NO: 862747 - DNA, 604 bp, Homo sapiens
ctgaactgctgcagactagggctggaatagagtctcagggatacttcaaggttggtccacagtcaattcatagactgacctcagggtccacagccaagaggaggtaggtgtgtatgctaccagggacacagatggtcattgctgggtcttgaggtgggcaggagtaagaatagggtgagatgggccacaggaccacttcaggatccgtagttgggcctgaggttatcattagcaggcctgtacccaggggctctcatcacgaccctgtacaggaaggaatgactctggactggtggtagagcagagctggagctgggtcacaaggctgtttcgggattcacagtggtgtccatggctgaaagatgtgcacagtgtttcttgggggtagtctttggacaaatacatcatatttctttggctaaaaaagtcacaaggctkgaatgaagttaagagataggagatagattttctctcttcttgggaggagctgcagtcacattgatcatagcattgatataggaagaatgtgcaaacacactatcacaaaaattgaaaaaagacattccaataaaagggcaaataagtcaatctataagaaaactca

SEQ ID NO: 862748 - DNA, 663 bp, Homo sapiens
cccatcaagactaacagtggacctctcagcagaaactccacaagccagaagagatctggggccaatattcaacattcttaaagaaaagaattttcaacccagaatctcatatccagccaaactcagcttcataagtgaaggagaaataaattcctttccagacaaccaaatgctgagggattttgttaccgccaggtctgccctgcaagagctcctaaaagaagaagtaaatagggaaaggaaaaaccagaaccagccaccrcaaaaacacaccaaaatgtaaagaccaataacactacaaagaaactgcatcaactagtatgcaaaataatcaaatagcatcatgagacaggatcaaattcacacaatactaaccttaaatgtaaatgggctaaatgttccattaaaagacacagactggcaaattggataaggagtcaaaactcattgctgtcttcaggagaccattcttacatgcaaacacccacaggctcaaaataaagagatggaggaaaatttaccaagcaaatggaaagtgaaaaaatcaggggttgaaatcctagtctctgacaaaacagactttaaacaaacaaagatcaaaaaagacaaagaaggccattacataatggtaaagggaacaattcaacaagaagttaactattc

SEQ ID NO: 862749 - DNA, 592 bp, Homo sapiens
cagcctgaaaaatcaagcttcaagcatagataagcaagctcaaagcgtgcataggtaaatgccaacagctgtgccaatagaaaagggacacctggaagctaggtatattcaacatggaggttccttcttcccttttctttgttgccacatgtgtagtaaaaaagcaggcaacatggcattggccaagtagagaccccatctgcataacaaaagattagggtgggatggccagcttcttcgcacactatgcaaatgggacacctggtctgaccagtctctcatgtcctatgtaaatcagacactgcctcctcaagctcgtctataaaaccccatgcatttcaccatgaagcccaaagaccctactygggagtccctctccctctgcagaagagagagcttttctctgcctttcacttattaaacctctgctcttaaactcattccttgtgtgtgtttgtgtattcagtttccctggtgtgaggcaatgaacctcgggtattttccccagacaaaccatgccccttcacaatctttattatttcctttcttcaacttgttttaggtttagtttagacttctttttcaagttaca

SEQ ID NO: 862750 - DNA, 571 bp, Homo sapiens
acaaattctggggctgcatttccagaatgttctatgtgaagtgggaaaaggattctttcttttctctcctcctctgggccagtgtcatcatgggagttctgagtacagttgcaagcctgctctgggagagaaacagatacatggaaggagaaattccaggagctcgggagacagcaaggacccagacccacattgtctgagcctggctgatgttcttcagtcagcagagcttctcggacctcaagtttagagagttagattcatcatgaattttggttcatggaacacccgatcattgacccatagctggccctttttwtctccatctggttgattaattgattgattggctgatacaatgaacatccatgaacaccacccaactcagggactagaatgtcaccaataacttatgtcacttgtgccttctgatatagtttggctgtgtcccccgccaaatctcatcttgaattgtagctctcacaattcccacgtgtcatgggagggacctggtgggaggtcattgaatcatgggggtgggtctttttcatgctgctgttctcatgatagt

SEQ ID NO: 862751 - DNA, 600 bp, Homo sapiens
gttaaaaatgtaagtgaaaaactttaaagtttttatttttttagggatagggcctcagcctatcacccaggctggagtgcagtggagccatcataattcactgtaaccttgaactcctgagctcaagtgatcctcctgcctcagcctcccaggtagctaggactacaggtgtgtgccaacacacctggctatttattttctttttttatagacatgaggtcttggtatgttgcctargctggtctctaactcttggccccaaatgatcctcctgccttggtctcccaaattgctgggattacagcatgagcctttgcacctagcctaaaaaaacatttaaatttgagatttgggattttttttcccaatgtctagagcaaaaagtaaaattacttcatattcaactcatatatatgtaagaaatgtaaaaggatgcacaagtgagaactgataaacagtctgattaaaatactgaatagaacaaatattttttttttacatgggaatatagagaggtcatattttcagaccctcaattaggtaatttgaatgaaaaaaatataaatatcactaataactttcttacaatttgttattttc

SEQ ID NO: 862752 - DNA, 580 bp, Homo sapiens
tcctacttgtgcaatttagttagtaaagtcagttaagagatcacactggagatgctacctgaagcagcaaatgcctactgcacctcaggggcctcagtgaaaagaagagcatatatactgtcagaggagggatattcagtcccaccaatacaatatgaacagcccatttatctctctasactctggaattcagtgaatattttagaagtcttcaaaaactaggaataagatattacagattaatcttttgctgacttgactaatgtcagtaacgacaagtgttcagtagcgagtgaattaagtaattaatatttaaatgagtatataatctttcaatataagaggcactaggtatatgtcatatagcatctctgtaccgctgcctgaccactagcaaggaaatccaggaggctccctggagatagcctactagaataattcagaaattcttttcacagttaatgatctaagctgtatgggagaaaggcaggcatttttctcatattcttcacttttaagatgaaaacacaagcctattgtttcttcccaaggaggaggagaaagtttatcatatacagag

SEQ ID NO: 862753 - DNA, 606 bp, Homo sapiens
agtgaattaagtaattaatatttaaatgagtatataatctttcaatataagaggcactaggtatatgtcatatagcatctctgtaccgctgcctgaccactagcaaggaaatccaggaggctccctggagatagcctactagaataattcagaaattcttttcacagttaatgatctaagctgtatgggagaaaggcaggcatttttctcatattcttcacttttaagatgaaaacacaagcctattgtttcttcccaaggaggaggagaaagtttatcatatacagagcgtgagttaaattatataaaaatatgttcagaaaaaaaatgtccagagatttgcccttttcctctccccttcattctccattactatttctgggaatgacatgttcttaactagagcyggaaaggaagggatcattaggattaaagaggagaaaaggcagagagagagagagagagagagagagagagaaggagacaaggtacaagggtagtaagaggtgtggaatattttctagttgatttcctactgccttgtgccccaatggggtaatattgaatccctctctcttctaactgaatatctcactgcacactaat

SEQ ID NO: 862754 - DNA, 680 bp, Homo sapiens
atgaagatttagattattttcttggttttaatagacagggccataagttagtagtttctagtgtaacatatgacactttgtaatactctgtaccttatacaaaggatgatggttattttgatattttttttcacagtaaagccttaaataacattggaggcataagagaaaacatcagtgttattattaattccttagtcttaagtgagcattattctttgcactcatgataggaatgatagtgacaagactggatattttatagtctggatattctggactaggaatgaacaggacatgtccataccacatttacaccaagtgttkcagtctctgatattaagagaacatttttggtcaaaaacagtgatgacttcaagaaaagacatctctgcagaattgatatctttccttcatatggccctatggtggccaagacaactgattactcgagaagttttcagccctagttctaacacctatttcaggatattctaaccatagggctcctttgccttggtaaccttacctccacaactggtatgaaaaaataaaagagaaatctattgtcatgcctgatttctgggacttagaaatgtgtttcactaccatccttggtacctaaactctcagccatcactgtgctatgctcaaggatttagtttgtagctttggcatag

SEQ ID NO: 862755 - DNA, 680 bp, Homo sapiens
atgaagatttagattattttcttggttttaatagacagggccataagttagtagtttctagtgtaacatatgacactttgtaatactctgtaccttatacaaaggatgatggttattttgatattttttttcacagtaaagccttaaataacattggaggcataagagaaaacatcagtgttattattaattccttagtcttaagtgagcattattctttgcactcatgataggaatgatagtgacaagactggatattttatagtctggatattctggactaggaatgaacaggacatgtccataccacatttacaccaagtgttgcaktctctgatattaagagaacatttttggtcaaaaacagtgatgacttcaagaaaagacatctctgcagaattgatatctttccttcatatggccctatggtggccaagacaactgattactcgagaagttttcagccctagttctaacacctatttcaggatattctaaccatagggctcctttgccttggtaaccttacctccacaactggtatgaaaaaataaaagagaaatctattgtcatgcctgatttctgggacttagaaatgtgtttcactaccatccttggtacctaaactctcagccatcactgtgctatgctcaaggatttagtttgtagctttggcatag

SEQ ID NO: 862756 - DNA, 582 bp, Homo sapiens
tgtgtggaggtttttgtgtggacatagtgatatggtttggctgtgtccccacccaaatcttatcttgaactgtagcttccatgattcccaaatgttgtgggagggacccggtgggagatcattgaatcatgggggtggtttccccatactgttctcatggtagtgaataaktctcatgagagctgatggttttataaggggaaacccctttcacttggctctcattctctcttgtctgccaccatgtaagacaggacttttgccctctgccatgattgcgaggcctcagccatgtggaactgtgagtccattatacttcattttctttataaattacctaatctcaggtatgtctttatcagcagtgtcaaaatggactaatacacatagttttcaactttgttgagtaaatattatactaaggagcatgactgttgggtcttctgtttagatttgtgagaaactgccaaattgccttccaaagtgtctataccactttgcatttccactagcaatgaatcagaatttttattgctccctatcttcattagcatttggtggtatcagtgttttcgattttgg

SEQ ID NO: 862757 - DNA, 599 bp, Homo sapiens
tagactttcctcaacttactaaattataatgttctgaatgtatatagatttttaaaaataattttcccatcgctcttgttttactcttatagaaatgaatcagaactggggaataaaattaaggactggctttgctcagatgtagaaataaatgcaccacaagaatttaaactattttgttatttaacattttttccttgactaaagttgtttttgtgttttgtttaagcaaatatctgaagaaccaacttttgtcgaaacttgaattatttgatcagacgagaccactttcactggtagaagcctatacgtgccccatatcatccccaaatgaaaagatccaccaactaaaacagacaaaagctgtcattytgagacaagttctcttgtttctgagtttagagacatctaaaaattacacttaaatgtgagaaactaactttaattaggtcagggccccagtataggtgttaggcctggaacaatgcaatgttacctgaaacctgtattattccacacagggaagtaatgaatagaaaaacaaattccaaaatataagggtttataagagggaggaggtggtaattaactgggttgcc

SEQ ID NO: 862758 - DNA, 651 bp, Homo sapiens
ctaagagattattttgaacagtatggaaaaattgaagtgattgaaatcatgactgaccgaggcagtggcaagaaaaggggctttgcctttgtaacctttgacgaccatgactctgtggataagattgtcattcagaaataccatactgtgaatggccacatctgtgaagttaggaaagccctgycaaagcaagagatggcgagtacttcatccagccaaagaggtcaaagtggttctggaaactttagtggtggtcgtggaggtggtttcagtgggaatgacaactttggtcatggaggaaacttcagtggtcgtggtggctttggtggcagccgtggtgctggtggatatggtggcagtggggatggctataatggatttggtaatgatggaagcaattttggaggtggtggaagctacaatgattttggcaattacaacaatcagtcttcaaattttagacccatgaagggaggaaattttggaggcagaagctctggcccctatggcggtggaggcaatactttgcaaaaccaaggtggctatggcagttccagcagcagcagtagctatggcagtggcagaagattttaattaggaaacaaagcttagcaggagaggagagccagagaagtgacagggaagctacag

SEQ ID NO: 862759 - DNA, 571 bp, Homo sapiens
tctgccataatcttaggacttatagaagtcaggaatgatgacgaatctagttttattggcgaaatttgacttaacaaagcatgaaattattcctttatttttgtattaagtatgtaaagagttaacatttagaaaaagttattcttgtagctgtcagatgaagagaattatattaaattcttcatgtaacagtagagctatatctttaaattaatttcttatgataaaatttgatttttttacttgaaggtttcttaacctctcagcagcattcacgtttggagtgagatttttcttttactgkgagggactgtgcattgtaggatttttagaatcatctctgacctctacccagtacacaccaggggcacccacttggccacccacccacccagctgtgatgttcaaaaatgtctccagacatcgcccaatattggcactctggaaacaaaattactggaggttgagatccactgttatgtactaatgtttgacttaattacatgtactattttaaatgtttatagacttttcaataaggctgatattttagagaaatttgatttattta

SEQ ID NO: 862760 - DNA, 601 bp, Homo sapiens
gtttttcagttagtagctgaagatgaagggagctcttaaattgtcagcagttctttactgtgctaacttattcagtgaaaaatgagaacaaatgaactataacagcaagaacaacaaaacctgagtatttccaaatatgttctgtgggaatatgctggtggaacaaatagaataaaggactctcatgttactaaaaaatctttgtaaaactcagtgaagcatacacagtttactcttagtttcctctaacatgatctgttgcttcttagatctttacttgtatctactgaactcaattttgtttcatagcatagatgtgcattctgttattayttgtcaaaagaaaaaaacagtattataatgacgctggggggaagaaacaacagaaaggaataataagtttcaaataatgtcaaaataatcttttttatgtgaaaataagattacagcaacaatgatgctgaggtctttttttgttattgctaaagttgttattgttttgtaggccatcttgtcatattttaaataaagattttaagtcatttttcatgttgtcagtgaaatctccacttgaaaatgttcactttttgccacaacttaa

SEQ ID NO: 862761 - DNA, 601 bp, Homo sapiens
gtttttcagttagtagctgaagatgaagggagctcttaaattgtcagcagttctttactgtgctaacttattcagtgaaaaatgagaacaaatgaactataacagcaagaacaacaaaacctgagtatttccaaatatgttctgtgggaatatgctggtggaacaaatagaataaaggactctcatgttactaaaaaatctttgtaaaactcagtgaagcatacacagtttactcttagtttcctctaacatgatctgttgcttcttagatctttacttgtatctactgaactcaattttgtttcatagcatagatgtgcattctgttattacttgtcaaaagaaaaaaacagtattataatgacgytggggggaagaaacaacagaaaggaataataagtttcaaataatgtcaaaataatcttttttatgtgaaaataagattacagcaacaatgatgctgaggtctttttttgttattgctaaagttgttattgttttgtaggccatcttgtcatattttaaataaagattttaagtcatttttcatgttgtcagtgaaatctccacttgaaaatgttcactttttgccacaacttaa

SEQ ID NO: 862762 - DNA, 606 bp, Homo sapiens
tgggaaaaatgtataaaactgaaactatgcagaaattataggaaatgattggatttccttatcttcacaaatatgtgggattacatcggtattaacatgagtagaatttattgtagcacttgcatataattaatgtagaacttacacatgcagcatgatgtcccttgaaatttcagtgtcctgtcaaacctacaaaatgattgaattgaatttataatttaaaaaataacatagtggtacaaagtgtagagaatcttctctytagagagaaaatgagaactcagtgattcgaaaccgaaaagcagaacagttaaaaggaataccaatatgaaggagagagttgcttataaagctttcctcaatcactcaaatgggagaaggggttccatgagctgattgttgttcacttgtttacagagtttaattaaaagaaaaaagagcagaataataaaatagaacataatgataaaagaagtgtaaaaggggtataaataaatatggcaattcattgtcataatgcagaaatgcataggaaaacccacttcagatatgaaaaacatcatccaagtgttgacaggtatggctatttgaaatggccaataggta

SEQ ID NO: 862763 - DNA, 617 bp, Homo sapiens
cattacataatggtaaagggatcaatgcaacaagaagaggtaactatcctaaatgtatacacacccaatacaggagaacccagattcataaagcaagttcttagagacctaaaaagagacttagactcccacataataatagtggggagtctttaacaccccactgtcaatattagacaaatcaatgaytcagaaaattaacaaggatattcaggacttgaactcagctctggaccaagcagacctaatagatatctacagaagtctccaccccaaatcattatacattcttctcagcacctcgtcacacttatccatatcaaaaaataattgaccacataattggaagtaaaacacccctcagcaaatgcaaaagaatggaaatcataacaaacagtctctcagaccacagtgcaatcaaactagaactctggattaagaaactcactcaaaaccacacaactacgtggaaactgaacaacctgttcctaaatgactaccaggtaaataacaaaatgaaggcagaaataaagatgttctttgaagccaaagagaatgaaggcacaatgtaccagaatctctgggaaacatttaaagcagtgtgtagagggaaattt

SEQ ID NO: 862764 - DNA, 617 bp, Homo sapiens
cattacataatggtaaagggatcaatgcaacaagaagaggtaactatcctaaatgtatacacacccaatacaggagaacccagattcataaagcaagttcttagagacctaaaaagagacttagactcccacataataatagtggggagtctttaacaccccactgtcaatattagacaaatcaatgattcagaaaattaacaaggatattcaggacttgaactcagctctggaccaagcagacctaatagatatctacagaagtctccaccccaaatcawtatacattcttctcagcacctcgtcacacttatccatatcaaaaaataattgaccacataattggaagtaaaacacccctcagcaaatgcaaaagaatggaaatcataacaaacagtctctcagaccacagtgcaatcaaactagaactctggattaagaaactcactcaaaaccacacaactacgtggaaactgaacaacctgttcctaaatgactaccaggtaaataacaaaatgaaggcagaaataaagatgttctttgaagccaaagagaatgaaggcacaatgtaccagaatctctgggaaacatttaaagcagtgtgtagagggaaattt

SEQ ID NO: 862765 - DNA, 559 bp, Homo sapiens
accctcccaagtctacaccacaaagaagtaaaatcctgaatagaccaatgacaaattctgaaattaaggcagtaactaatagcctaccagacaaaaaaagtccaggaccagacagagtcacagccaaattataccagatgtacaaagaggagatggtaccattccttctgaaactattccaaacaatagaaaaagagggaatcctcctgaactcattttatgaggccagcatcatctgatatgaaaacctggcagagacacaacaaaaaaagaaaatttcaggccaatatccctgatgaagattgatgcaaaaatcctcaataaaatactggcaaactgaatccagcaccacatcaaaaagcttatccaccacgawcaactcggcttcatccgtgggatacaaggctggttcaacatatgcaaatcaataaacgtaatccatcacataaacagaaccaatgacaaaaaccacataattatctcaatacattcagaaaaggcatttgacaaatacaacagcctttcatgctaaaaactctcaataaactagggatggatg

SEQ ID NO: 862766 - DNA, 630 bp, Homo sapiens
cagctcagcgagagcaggatagggcactggtcacggttgtgaggccccctttccaggccctagctcctggacatttctagaaacatactggaccagaagagaacatgtggccgtgagggtaagaactcagtcttggcaggatgcgtcacctattaactgaagaacccttgggccttaagtaaccagcagtaataccacagtactacactgggccttgggtgagactcagacttgctggcttctagtgattctcagcacattcccagttgtggtgatgatgaagcaagactcctgcttgagaaagtggatggaaaagtaaaggcractatttcctgcacctcaggtatgagttcagccacaggagttagtgcaccaaacaggctcttggggtccccaattccaggagttggcccttggataacatttcttgacttgccctgtgcgagaggagggcccattctcctggagggtgaatcgcaggtgaggcagtattcaccacaacctgactgaataacccttgggccttgagggaacatcagtggaagtctggcaatattctctgtggacatgacttggcagtggtcattgagtgaaactcttctgtctttggaaagcagagacaaaagtgag

SEQ ID NO: 862767 - DNA, 622 bp, Homo sapiens
tgtatgagaaaatacaatctgcaccaattattaaccactattatttatattgtatatatctgtttttaagtatatatgtctatatttactttgaaaggaaggcatacatgtatatttactcattgatgcactcaacatttacgtattgcctgctttttgtcatgttgattgccagggatatggatagtgtctctgctgatattcctgtgaaggagatattatgtagacatatatatgaaatatgtaaaaataagatagaagaaaatatttaataacataaaatatcatatcacagagagagaaatcatcaactctrcctttcagaaggcttcctaaaagacaacatatgaattgggttttgaagcatgaatctaaattctccatttggataagcaaatatgtgaccatctagtcaaaggaaactgttgcctaaatggtcatagattgtaaacttgtactgggtatgataatgacatttcaacaacttgattctgatgaagcacaaagtgtgctgggaaagctgtgatcattgagattggtgacgaaggcagaggccaaatctgcctttgtcgcagtctcaatgaccacaaagagatttgtgcattcctaaggttgagatctg

SEQ ID NO: 862768 - DNA, 615 bp, Homo sapiens
aagattttaaaaaacaggcaatttttttagctttagtactgttaaaataggactaccttcacagttttgtgtaatcaattttggttctgtattattgataggaaagttcctatagatggtacgtatatgtcaagaaaaatgtgcatcaactcctcctgtctgaattttactcaaaktaagtagaaaagagtaaatcatgtaaaaaagaagtttgatctgggaaaattttctgtgagatgcttttgtagagaaaacatattgtacattataaagacatagaaatctcaaaccatgtagtaataactgcctctcatttagaaagtaaatttggaaatcaagtttttccggactgcatttatcagaactctagtgtcttaagacgaaatgaaatattggctctgtaattgtaagggggttctgtaatacagtaaatctgaagaatgtcctctaccatactctctcatggagcttcaagacacatatgagcatctaaaggctcttaactatcccacagcaaagtggcctgtataaagcatcccagcatctccaaagcttacttaagccttgaacattttgttcttctcagtatagcttttaaggatcctgcaaaagacc

SEQ ID NO: 862769 - DNA, 615 bp, Homo sapiens
aagattttaaaaaacaggcaatttttttagctttagtactgttaaaataggactaccttcacagttttgtgtaatcaattttggttctgtattattgataggaaagttcctatagatggtacgtatatgtcaagaaaaatgtgcatcaactcctcctgtctgaattttactcaaagtaagtagaaaagagtaaatcatgtaaaaaagaagtttgatctgggaaaattttctgtgagatgcttttgtagagaaaacatattgtacattataaagacatagaaatctcaaaccatgtagtaataactgcctytcatttagaaagtaaatttggaaatcaagtttttccggactgcatttatcagaactctagtgtcttaagacgaaatgaaatattggctctgtaattgtaagggggttctgtaatacagtaaatctgaagaatgtcctctaccatactctctcatggagcttcaagacacatatgagcatctaaaggctcttaactatcccacagcaaagtggcctgtataaagcatcccagcatctccaaagcttacttaagccttgaacattttgttcttctcagtatagcttttaaggatcctgcaaaagacc

SEQ ID NO: 862770 - DNA, 615 bp, Homo sapiens
aagattttaaaaaacaggcaatttttttagctttagtactgttaaaataggactaccttcacagttttgtgtaatcaattttggttctgtattattgataggaaagttcctatagatggtacgtatatgtcaagaaaaatgtgcatcaactcctcctgtctgaattttactcaaagtaagtagaaaagagtaaatcatgtaaaaaagaagtttgatctgggaaaattttctgtgagatgcttttgtagagaaaacatattgtacattataaagacatagaaatctcaaaccatgtagtaataactgcctctcatttagaaagtaaatttggaaatcaagtttttccggactgcatttatcagaactctagtgtcttaagacgaaatgaaatattggctctgtaattgtaagggggttctgtaatacagtaaatctgaagaatgtcctctaccatackctctcatggagcttcaagacacatatgagcatctaaaggctcttaactatcccacagcaaagtggcctgtataaagcatcccagcatctccaaagcttacttaagccttgaacattttgttcttctcagtatagcttttaaggatcctgcaaaagacc

SEQ ID NO: 862771 - DNA, 615 bp, Homo sapiens
aagattttaaaaaacaggcaatttttttagctttagtactgttaaaataggactaccttcacagttttgtgtaatcaattttggttctgtattattgataggaaagttcctatagatggtacgtatatgtcaagaaaaatgtgcatcaactcctcctgtctgaattttactcaaagtaagtagaaaagagtaaatcatgtaaaaaagaagtttgatctgggaaaattttctgtgagatgcttttgtagagaaaacatattgtacattataaagacatagaaatctcaaaccatgtagtaataactgcctctcatttagaaagtaaatttggaaatcaagtttttccggactgcatttatcagaactctagtgtcttaagacgaaatgaaatattggctctgtaattgtaagggggttctgtaatacagtaaatctgaagaatgtcctctaccatactctstcatggagcttcaagacacatatgagcatctaaaggctcttaactatcccacagcaaagtggcctgtataaagcatcccagcatctccaaagcttacttaagccttgaacattttgttcttctcagtatagcttttaaggatcctgcaaaagacc

SEQ ID NO: 862772 - DNA, 452 bp, Homo sapiens
caacagaaactcaaacaaaaccccaaggtgctgattctttggaactcctcttcctcccaggctgggctccacctggggctctcatagcagttccagcctcagctcatagtgatccagtggctacagcagctccagatgttgtttcagaacacatcaccatccaaagaaagaacagytcctctggcagcttccttgcaaggaagagaaacctcccctttccaaaagccctagaaaaggtgttctcgtggtttgctggctttgaccaggacggatataccacgtggtttacacctacatgtagtatcagcccccaagcacacatgggtaaggatgggaagtaaattcaggttactgttcttggaaggatgagaactggaagcactctctcaaacagatgtccactgcagagatgatttgtttagatgacagctaatataaatttaaaataatgg

SEQ ID NO: 862773 - DNA, 452 bp, Homo sapiens
caacagaaactcaaacaaaaccccaaggtgctgattctttggaactcctcttcctcccaggctgggctccacctggggctctcatagcagttccagcctcagctcatagtgatccagtggctacagcagctccagatgttgtttcagaacacatcaccatccaaagaaagaacagttcctctggcagcttccttgcaaggaagagaaacctcccctttccaaaagccctagaaaaggtgttctcrtggtttgctggctttgaccaggacggatataccacgtggtttacacctacatgtagtatcagcccccaagcacacatgggtaaggatgggaagtaaattcaggttactgttcttggaaggatgagaactggaagcactctctcaaacagatgtccactgcagagatgatttgtttagatgacagctaatataaatttaaaataatgg

SEQ ID NO: 862774 - DNA, 641 bp, Homo sapiens
atcaaggggtgtgaacattttaaggttcttgagtgcagtatcaaattgctctggtaaaggattgtaccaatttacactgctaccagcagggtgtgggtgtacattttcaacaacttgccagcaccgaatttcatcatttaaaaagggtttacagattgtacataatttaatttaatataaactaataaattactgtgtccaacttttgagcatgcttaaaattttttccccatttcttttttggtggcatccctactatttcgtaaactgcttgagggcagtttacaaaccttgcacattgtagaaaatcaataattgctttttgaaacaatgaataattcagggaatccctgytcccaataattcttcagttttgataatagcagtgggttttgggttgttttggtttcaagataaactaaattacactttatttcactgatgttggcagccccagaggactctgtttgcaggaaaaaaaatgtatgaagattttcctaggtgggaagtagacctctcccacacaacgagaagagcagctaaatcattgctcttttctcccagtctctccctgcactcccatctgatttcctgtctgctcctgaaaagccagctcaatatgaactaaggaaaagctattt

SEQ ID NO: 862775 - DNA, 641 bp, Homo sapiens
atcaaggggtgtgaacattttaaggttcttgagtgcagtatcaaattgctctggtaaaggattgtaccaatttacactgctaccagcagggtgtgggtgtacattttcaacaacttgccagcaccgaatttcatcatttaaaaagggtttacagattgtacataatttaatttaatataaactaataaattactgtgtccaacttttgagcatgcttaaaattttttccccatttcttttttggtggcatccctactatttcgtaaactgcttgagggcagtttacaaaccttgcacattgtagaaaatcaataattgctttttgaaacaatgaataattcagggaatccctgttcccaataattcttcagttttgataatagcagtgggttttgggttgttttggtttcaagataaactaaattacactttatttcactgatgttggcagccccagaggwctctgtttgcaggaaaaaaaatgtatgaagattttcctaggtgggaagtagacctctcccacacaacgagaagagcagctaaatcattgctcttttctcccagtctctccctgcactcccatctgatttcctgtctgctcctgaaaagccagctcaatatgaactaaggaaaagctattt

SEQ ID NO: 862776 - DNA, 702 bp, Homo sapiens
tctcaccaagacttgatattgtgatactgactttctgattatagccatctcagtaggtgtgagtggtatctcaggtggttttgatttgcatttatctaaggattaaggatgttgagcagttttttgtttgcttattagccatgcatatcttctttgaagaaatgtgtattcarattctttggccattttgtaattgggttatttctctttttattcagctgcaagagttctctcattaagatctgacaggttaatacaacaccaatgcaatgataaatgcaaaaaacagggactctgaaattgcgtggttgtactcagttataaggtggtcatccatgagatccagaatcaaatttgatgaaatggttaagattataatgttttataatttgtttatttgaaaatatacattttaaatgtttgctagagagctctaatatcctcaagaatacctacaatgtaaacactgttctatgcatagactaaatccttagcaatagacagaaggaactgagtgctctttgagtgagggaatgggcttgaccagtgtttgaagatttaaaaatgaatatgaagacatgttgtgacactagggtatgattatatttttatatttaagtagaatctgattatcatcagaaaaactctaattttaaaatccatagctggcaatatccatgaattcagcccaggtcatcaaat

SEQ ID NO: 862777 - DNA, 621 bp, Homo sapiens
gaatctgattatcatcagaaaaactctaattttaaaatccatagctggcaatatccatgaattcagcccaggtcatcaaatgctgaaagcacatgggtcagattgactgtctccattttttcttgcttacttcaaagctatgaagaaatccaaagcccttgctgatactcttccatgatatattccttttaaatgcttgaaaagttttcccttcctacaggaatcccccaaacacagctgtccttacrctgagcccctattcaaattttggttcctctttctaacattggtcgtcagtcaattttgctggtctataccaactgcagatctagagccaatgcttatagaacttttctgagaattcttttaatttcagataattttttaaaattaccacaaaattagtttagaagaattcgcagagaggtacattgggagggaaatagctttgaggccctttatggatttatgaccaaagctatccagtcaaattcctccaggtatttttgctatttcctatgggtatactgaaattacacacattttaaagcttccttaatcaacttaaacaaatacaaataataaaattcagtgtcaatgagatactgaatctaaaagata

SEQ ID NO: 862778 - DNA, 637 bp, Homo sapiens
tcttaattctttgtagtctgtgctacacatacaaagattacacagatttcttttctaaaacttttaaattattttctagtttcactagaaacaacaggtgtaagattctatttccaccacaaggtgtcagtccacggtaatttaagcttcaaagggctttaaactaatccaaggaaagtcagtgactacagaaaatacttatattaaaacatgctttgttaaacggatgcttgaaggcggcatgctagttaagagtcatcaccactccctaatytcaagtactcagggacacaaacactgcggaaggccgcagggtcctctgcctaggaaaaccagagaactttgttcacttgtttatctgctgaccttccctccactattgtcctatgaccctgccaaatccccctctgcgagaaacacccaagaatgatcaataaaaaaaaataataataattaaaaaaaaaaaagtaaaaaaaaaaaaaaaaaaaaaaaaaaaacatgaacagtcttcggtgccctagcagtgaataaaaaacaatcatggaaaatgtggttgcgcgtttattttcctttgtgttttctactcagcttagtcctgagaatgttgtataccaaatccccagaattttgcaattca

SEQ ID NO: 862779 - DNA, 611 bp, Homo sapiens
ctccttcctgaacaaaatgagtccacctggggtttattttctttaaagatttgctcaatagagattttattatctttggtttaaaataaaagttaaaatgatatatttactattttaatgagttacatttaatgttttatggcaacaaaaaagaaatatctgattctgatgtgatttttcagatcatagactacatgtctaaagaagcctataagaaattatggcctatkaagtgtggaatctgagactgctggcaagatggccgactaggaacagctctggtgcacagctcccagcaagatccacgcaggaggtaggtgatttctgcatttccaactgaggtacccggttcatcccattgggaccggttagacagtgggtgaagcccaaggagggcgagccaaagcagggtgggacatcacctcaccagggaagcactaaggtcagggaactccgtctcctagccaagggaagccattagggattgtactgtgcacaccagcccagatactacgcttttcccacgttcttcacaaccctcagaccaggagattccctccggtgcctatgccaccagggccctgagtttccagcacaaaactgggcagccg

SEQ ID NO: 862780 - DNA, 611 bp, Homo sapiens
ctccttcctgaacaaaatgagtccacctggggtttattttctttaaagatttgctcaatagagattttattatctttggtttaaaataaaagttaaaatgatatatttactattttaatgagttacatttaatgttttatggcaacaaaaaagaaatatctgattctgatgtgatttttcagatcatagactacatgtctaaagaagcctataagaaattatggcctatgaagtgtggaatctgagactgctggcaagatggccgactaggaacagctctggtgcacagctcccagcaagatccacgcaggaggtaggtgatttctgcatttccaactgaggtacccggttcatcccattgggacyggttagacagtgggtgaagcccaaggagggcgagccaaagcagggtgggacatcacctcaccagggaagcactaaggtcagggaactccgtctcctagccaagggaagccattagggattgtactgtgcacaccagcccagatactacgcttttcccacgttcttcacaaccctcagaccaggagattccctccggtgcctatgccaccagggccctgagtttccagcacaaaactgggcagccg

SEQ ID NO: 862781 - DNA, 637 bp, Homo sapiens
aagtaggaccttgtgggaggtgtttggaacatgggagcagatctctagaagctgagcaaatgccagcaccatgcttcctgtaaaacctgaagaaccatgagccacttaatcctctttttttataaattactcagtctcatgtgttactttacagcaaggcaaaaatggcttaataccttgggcatgctccagtagagattagaattcacatgaaacaacaaatgagaaacagggagaaaactattaagaggtctatggtagggaagattgtggctattgtctccatttacttttagaatttcttcgtgtgtgtgtgtgtgtgtgtgtgtgwgagagagagagagagagagagagagagacaactagtagaaacagagtaaccaaatctcttaactggaaatgactttatatgttgtattactaaaagacgtccaatttccaacatcctgaatatatacagtgacagaggacagataactcactattttatggggtagtttattcatttttgtaaataccagccattgttcttaatattgttatcaagggtctcaacccgaaaataaattcatctcccctacccatctttcgcaacaacaaagcaaaaaattccccttccagactttgtcacatctgt

SEQ ID NO: 862782 - DNA, 624 bp, Homo sapiens
ataaatccaaaattgggaattcatattctgcaaaatccaaacatccccagaaaaggacaaatttgtttggtgggggtgggtctaatccacatatggcttgcacacgctctggggatatctgttgggattgaaccgtcccccagtgattgaggatgcagccaagggggaagtcgggtgagattgaaactgagtttcttgtcttctgtctgtagagaacaaggaaaacttgaaatttagagcrttctggcctagggccacacactggggcgtcccccattgaagggcctatgctggggttgagggccaagagggcatcccctgcttgggcctcttcatgacatgccacatgtctctggccttagatgggcatcagcaccacttgaagaaggattccgccatatttggtgacctatgattaagtttccctttagtccccaggtgctgccctcagcttttggcatctctgtagctggccaaaatagttttcttccccaaatggtttccttaactattgtggtaactgtagtttgaagggcaaggaattgcagactccccagcttgaatttgttaaagattggcctcttgataagggaagagaatgccctctgaccagataaactacat

SEQ ID NO: 862783 - DNA, 660 bp, Homo sapiens
ataattataattactaacaagttggcaaggatgtggagaaattggaaaccttatatattgtcggtaagaatataaaatggtgtagtctggccattcgtgaaaaggataaaacaacgttacttactatatgacccagcaattccactcctagatgtacacccaggaaaaattaagagatatgtccacacaaaaacccgtacacgaatgttcatagcagcatcattcatgataggcaaaaagtggagacaacccaaatgcccatcaactgacaaatggataaataaaatgtggcatatccatataaaggaagattattcagctataaaaaatgaagtacgataaatgttacagcatggatgaaccttgaaaacaggatgctaagagaaagaagctggtcaaaaaggattacatgttatatgatcccatgmatgtgaaatgtccagcatagaaatatccatagagatggaaaatagattagtgcatgccagaggctggaaggagggaggaatggaaatgactgcaattagatatggggtttcttttaggaatagtgaagatttaaattctgttaacacttataactaagacactgcactagccctttaaatatttccaaattttaattttttaaaaaaagtctaccttgctttttttgaaccc

SEQ ID NO: 862784 - DNA, 641 bp, Homo sapiens
gggcactacagcaattaaagagcatctccgaggccaagtgcgggggaagtccacgctacctcggcaagcctgaaattacctgtttgtaaattacccaaccaaaacataactttttattgaactgggttgaatcagagcgggtgagctggctggaaacttttttccccagtacggctgcactctgaagtctagagaatcccgttagagacgggctgagacgccgcgagtcgtcggcgggcgcttcccgggacagtcggcccccagtgcccggccccgyggaggcgcccgagacgccggttcgggacgcattccagcggcgagcggcgcgcaccgcctgcccggcgtctccgcatccgagcctggctccccggccgctcgctccccacccccacgggcggaaaagccccgcgactcgggaaccgacccccacccccaactcccgcggcgcccctcggccggcgctccctgcccggcccgccgacttacgtgacggccgaagggaacggctcctccgacgaggggccgatgagcaaagattggaaaagtgtcagagtcaaggccagcaggcagccagcagccatcttcgcgatcgaagatcaatgccccctccctgcccaagcgggggaaggagcggcgctgga

SEQ ID NO: 862785 - DNA, 656 bp, Homo sapiens
catgttgacaaatcataaggattgttgttaagctgttatagtaaatgatgtaaatgtgcagtaaatacagttaatatattacaggttataaatgagcaagaagtcgcaaatcagtatctactattcatttaagaagaaatattttaattagtaagttagtgaagtattgcaggagatttttgcatttaatcatttctagaacaaagtttaaagagatttaattcatgcaaatcactgacctttacctacaacaaacttgcgattggcaccttttggctaaatctcagtttttaattcayatatttaatttgttcatatacatttcattttttagtaactaaaagtgaataaagaacaataaaaacttgattgccatgaaatgtttattcttcctttttttaggtgatactgtgaatgttggcagcataaaattatgtttttgttgtagtttttatatgagtatatgtatgtacaaacatttttctgtgatttttttcagtaaatcaaatctaatttcttcaacattttgcctgaaaaaatgagacagagtaacctaattgaaattatttaatctttctctctttttgttctcatgtacaaacaggcaaacccaaacactgaaaaggaaaataattatccttagccaaaaaaattta

SEQ ID NO: 862786 - DNA, 637 bp, Homo sapiens
cgcacccagccaatactaggttttttatattctttaaacacagtaaaacacctttgtaagctagcatttttctataaaatttggatatgttttggatcaaactgacttcctgaataatataactcattatagtaggctacagataacatagtctattagatgagtgtccatagaagcaccacaatatgatgttgctaggggtttctccctctgaagtaatgagcatgggagagaaaataagacagcagttggccagatgcggtggctcacccctgtaatcccagcactttgggagaccgaggcaggcagatcacgaggtcaggagatcgagaccayggtgaaaccctgtctctactaaaaatacaaaaaattagctgggcgtggtggcgggtgcctgtagtcccagtactctggaggctggggcaggagaatggcatgaacccgggaggtggagcttgcagtgagctgagatcacgacactgcactccagcctgggcaacagagtgagactctgtctcaaaaaacaacaacaaaaaagacagcattttatttttgtggccacatattttagaatgatagaatttaaatgcctaccattatcacaaagaatacatgactggatggacatactagtgaa

SEQ ID NO: 862787 - DNA, 567 bp, Homo sapiens
agatttagataacctagacatgaaatttcgctaaatatgcttttcttataacatggataagtatacaattaattgttttggtataaagggagtgcttgttatctacattaaatcgtaggattgtttgtgagatgggtgtcatgccagaaatgttagttagttcctgaaattattctcaatttaaaccattttcaataacactgctgctctgtttttagaaagctgtttcaacttgtgaagtgctttagtattccatttttgactagagtaatcctgtaagaaakgcagaaaaggatgtactcatgctaatcagtggaaaggtaaagtacttgagagtaggaaaaaagactatcactaaactctgattcctaagctgttcatgtttctctgccttcattttctgttttttttttctgctcgtgtgtgtgtgcgtgcatctgtgtgagtgtgcagttaatccacattacaaatttcatattcatagatctcaaaggccatgagatctacttttgttcataagatcttcttttcatgagatctaaatttattttcatgagatcttctttt

SEQ ID NO: 862788 - DNA, 669 bp, Homo sapiens
tccaataatgctattacagaactcatagttaatgtactaggacaagaaaataaatacaaggtaaaagctttgggaaagaaaagaacaaaaacttttattatgtagcaatatgactgtctacataacaatctaaataaaactgatgaattactaaattaaaccaaggttaagtatgaaattttggaaaatcaatataagaactgtaaagaaataagtggagcagtatacagagaactagaaattatcaggaaaaaatgattaaaattagtgataagaaactcagcctcattaataaccaattaaataattaaaatacacaaaaatattttattacaaatcagataaacaaaattttttaaatattgacaaaactggaagagataggtaaatggagggatggatggatggatggatggayggatggatagaaatagagatatacagatatagatacagaaatagatataagtagatacacatactctttgaaagcaaatcaggaaatattgttcaaatattttcaaagtgaaaaatacctattctcaatttatctctaggtttctatcacaagaaaatgctcaagagtgttcactgaaacagtatttgtaatagaaaacaaatggaagaaacccaaatattaccatctatgggaactccttaaacagttta

SEQ ID NO: 862789 - DNA, 557 bp, Homo sapiens
tacaattctgtatttttttattacaaagttaacgagctttctgtgtgtattttctcctccataaagaagtagatttttgagggcaaggcacgacctgtatttctttgtatttagcacagtgcttagtaaatatattcaatgccccccaaatattattgatttcattgtagactgtcttaattgccsacagccccaaacagcatgtctttgaggtctctagggtgaaaatcagttactggtgattgcctcgggctctcctgactccaggaggaagcttaatgactgaaaacacattggctgtccatcagtaaaacaagaccacgtgtcactgtgtttctgtgtcatctaaagctgggggatagaaaataggtgttccaaagggcatcttcagggccttaagccccctacctcttgttaaatatgagaagtctgtgcttcttttctcaaaaacatacacaaaaaaaaatctgcctggtgtccaattcatcagcctgggagatgggtaagaaatgtagttagatcccaaacatggctaaatcctttaaaaacaaattttt

SEQ ID NO: 862790 - DNA, 654 bp, Homo sapiens
aaataagcacctatatgtacatccaagaatctaaaacctcaaagcctattctccatacaggtatgcggacaccttgcctcttcccattctttctggtatatggagcagaagaactagaagtagaaaatatcttggggaatttttcctgagtagcagtcttcactggagacacttctgcattttaakgcatttctcgcaataggcatgcacaggacatgtctaaatttgctgagaagtaaaaaaaaaattcacagcaattcagagtacctcaggatgttaaactccttacctcaagccaaacgaaaactaaatctcacacacacacacacacacacacacacacactccccattatctggatttgcaaatccccaaaaaaccctctttcatagttaatcattaccactttacctaaatctcaaatggtgctgctgagctgccatccacataggtgtcaccaaacacatgacaagtcatttttaaatataaactttgatcaagacaccaggcctgtatatatacttcaaaacatcaggtacataataaatatatacaatgttatctgtgcattaaaaacacaaaaaacaggccatatctcacatgtatttgtatctagacactttgatcagtcttccaaaaactgttcagggcttc

SEQ ID NO: 862791 - DNA, 598 bp, Homo sapiens
aacctaaaggtagttgctttaattctcattttacaaataacaacactagaagtggaaatcaaacaatacccaacatatatagttagtaggttaggaattggtgatttacatgtaaatttatttgacatcaaaattgatatagttacaactctatatatgacatctaggacttgattaattttgcttaggattaaaaaaaaggattatactatagagaggatgtattaaagatagaggagcatttgcaaagccacggaagtgtgaggaggaatagtgtagtcaaacaacggtcaggtaggacatcagatacacacagaatttaaggtgccaggggaaggaatgagcgagaaggrgtgaagaattaaccttgacccaagcagtggaaagagactgtatgagccatggaaataagctgcaactttatccttcagtacatgaacaaaagacttcagtaaccctggtgacaatttgcaaacaggttacctgcgacttttaattttaaaattacacttgatattgatgaacttcctgttacttagtcttgaatccactgtgcaaatttgtttctgggttttcatttactgtatttacatgagta

SEQ ID NO: 862792 - DNA, 551 bp, Homo sapiens
gtgtgtgtgtgtgtgtgtgtgtgcacacttcgaagtccctagcatattgcattgcacatagaggaacttggtaaatgtgtgtagaaattaatacgtttccatggtgaatattttagtgaatatatgcataatgaaagaaacatatttatgacatatagtttcttaagagtagaaatgtgagaatttaggaaagctattttaaatttttccagtaagtttatttctaattctttcagccatgccttcttacttatctcaattaccctattcttagtacaacagagtcttggaaaataaatggatttagagcaaaaacaccctttgacagcaatagcctacaattttattttgattacygtattacttaaaaataagacaaattgtctagattttattttcattaaaattgtactcttttgaatttttacttactaactcgttttgctcatttaatgtcattgtgttctgtaagaaattcccgtcatcaaatgcttttgaacaaatttgcatgccataagaaagaatgatgttaattccattttaattttctt

SEQ ID NO: 862793 - DNA, 505 bp, Homo sapiens
ttgcataatttataaaattgtttcctgatcccttatcatcctgaatttccattgtatcttctacttggcataatgcagtttattagtgtcctcttaaaatgtgtttccaagaataaaacacaatacacccgatgatgcgacaagagaagtacgagagacagttacgtctcatgatctgaatgttatttttctratgttactggatttcttatcaatagaaatttcctaaattatgtaatttgttattttgaaatgaaatacagttgtatttatttttctaagtttggttctagttatttgagcttagtgttttatattagccatttcttgctttatttaaacttgagatatgataaatattatttccatgctttcacccaaattgccaatatacttttcctttttttttttttttttttgaaatgtagtctcactccgttgcccaggctggagtgcaatggcgtggtctcggctcactgcagcctctgcctcccgggttcaggcg

SEQ ID NO: 862794 - DNA, 641 bp, Homo sapiens
tttttagtagagacggggtttttccatgttggtcaggctggtttcaaactcccaacctcaggtgatccacctgcctcagcctcccaaagtgctgggattacaggtgtgagccaccaagcccagcctaaaatgacaatttttaaaaatttaattatactttgttattattagatcaaatattatcataaagaataactttccctcccttatcatccaaagctctttggacagtatgaattatcaatcataaggaaaattcagactaaattcttgattatttcattttagttgctaatttaaggaacaggtgttggtgccaaatttctccagtggtgttgttcaatgaatttcttgattcctttacaattcctgcacccccagccccaccttgttctctctctcatctcyacctctttcaatctctcatcacataataaactcagaaccctattttaatgttttatataattcccttaatcattctttcttatgttcaaattattctcctatatttgaaaaatgtgagctatttatgttggtttctgtgtccttttacacaaaataacagagtttgacagatgcttgattattgactcactgaaattctccaggttgatttatatattttctgccacatggct

SEQ ID NO: 862795 - DNA, 619 bp, Homo sapiens
tcccaggagagaaatctaccttgaaacatgatggagctctccactgtctgtagtttcctactgtctcctaaaaacctatcactcttgatgttatccagaaaattaatggcaaaggtaaacccaggttcatctttagaaaaacaatgctctctatatagtcatgagatcaccaaacatctcatacaatggctggtaaattctaggtactcaagcagaagtatttctttttcctataattttaagtccgtgccctgatattcactcaacaaatatccattattccataaatatttgaggcatcattctacrtgctgaaaatactgccctaaaaatgtttatatttactttgagagacagacaataaacaaacatatgatgtaagagtatcactacatacttaggctttaaattcaataaaatatttttttacctatgtcacctggaatgccaacaagaatattacttctaaaagtgagtttttggtgtaaaaatcatgagacaactgatttaagtatcacaaaccaacacttaataattacctacgatgtaagttagcaatattcattttccagcaaattggaagcattttcacttcaatggatttatatatttctaaaaa

SEQ ID NO: 862796 - DNA, 545 bp, Homo sapiens
cttaatgttaaacacagttaacactttttaaaaaattaacagctttattggggtataatttacataccataaaaatagcctgtcttaagtgtacagttcaatgatgtttagtatatttacagagttgtgcaaccaccaccacaaaccaattttagaacattttcatcactccaaaataagtctcatgctcatttacctcactcccattctaacctcagcccaggcaaccactcctctactttctgtctattgatttaccttttctattctttatcttattctgagaaaatgacgcagtgtgcaggtactgtgacagcagtctccaagcaggtgaaatgacttctggaaaagcytgaggtgaggatggggtggcaggagtggtgctttagggctgctaaccccactgtttgcagattctccaggaggggagggccttgccatatttgccttctatcttaaggcatgcttgcactcagctccactggtagcctggaaatcattaagctcttgatgctaggggaacccatctctctcgtctgatttag

SEQ ID NO: 862797 - DNA, 576 bp, Homo sapiens
tgttgatttctgcttaaagccatcagtggctctttattgtgctcaagaataaagtccaatttcttagcatgatagtcaaggcccttgacacccaggtcccagcctaactgtcctgacccatctccagcattctacatggccactggcattggcacamataggtttggcacataccctctttgtgtggatccaccacttaaagcacctcctccttcttacccactgctcacggatgaactcctacccatctttaaccccacactcaaatgccgcctcctgcatggagccatccccgacacccttaggtctgaagcagtcctttctttgtttcctcctctatcccttcccttctcttgtaacgtagtttttccactttattgcccttgaaccacaataacacatacattttatgttataatccagtacacacacacacacacaaacacagaatccagctgtactattttcctttccagcctattctaatgtcttctattcatttcacacacactgatcatgacccactaaattgactccacagtccactcttgtgtcacaatccatagtttgaaaaat

SEQ ID NO: 862798 - DNA, 670 bp, Homo sapiens
tgctattcctagcaagaaaccctaaggtttctaggcttgttctggaaaagaggatattgccagagttggtaagtagaggaaagtgattagtatttaagaaactgaatcaagaatggttccaaaaatcttaaaatccagggaaaccagcttaaggtcaaaggcaagtgctagataatgaaattaacaccatatgagtacaaatttacaaaatactgtacttcaccataggctatggaactcagtggaaagccaaaaaagcactggacaggtggtgggagtgcttgacttgtggtgaatttatttcatctgcttatacatttgtacacagcacagttcttctccagaatgttgtttctgtggctgggaccattggactgtggctccaaaagaacaasagtctgaagatgggatgttgacaagttttggaatgtcaattggggaatcataatttgtatttatttaggttttttttggtgttcataaaatgcttatgtaatatttacatatgtcaaataaatcttaaaattttataaattacatgacttttctcattctggccaccagaatcttgactgcaatattcagtaaaaattacccaagccaatattttgtgctatgaaacctggaggtattcatcatgttaaatcctaagagagataaaaggattact

SEQ ID NO: 862799 - DNA, 670 bp, Homo sapiens
tgctattcctagcaagaaaccctaaggtttctaggcttgttctggaaaagaggatattgccagagttggtaagtagaggaaagtgattagtatttaagaaactgaatcaagaatggttccaaaaatcttaaaatccagggaaaccagcttaaggtcaaaggcaagtgctagataatgaaattaacaccatatgagtacaaatttacaaaatactgtacttcaccataggctatggaactcagtggaaagccaaaaaagcactggacaggtggtgggagtgcttgacttgtggtgaatttatttcatctgcttatacatttgtacacagcacagttcttctccagaatgttgtttctgtggctgggaccattggactgtggctccaaaagaacaacagtctgaagatgggatgttgacaagttttggaatgtcaattggggaatcataatttgtatttatttaggttttttttggtgttcataaaatgcttrtgtaatatttacatatgtcaaataaatcttaaaattttataaattacatgacttttctcattctggccaccagaatcttgactgcaatattcagtaaaaattacccaagccaatattttgtgctatgaaacctggaggtattcatcatgttaaatcctaagagagataaaaggattact

SEQ ID NO: 862800 - DNA, 627 bp, Homo sapiens
tctcatctttattcatgctttccagacattctggaattgtgcagaactggacacctgtgtctagaatcagtagctcagttcatcctggatttgcatactgtgaataacagacttcaggtgctttctgactttattgaaagtagtagttagggagagaaatcaccagggaaggaaagaaaaataacagtaattagactatttgggaagcaacagkctgggtcattcgttttatcatcacgatagctctgtgacgtaacattatcatcatcattttatagaggggacactgaagctcagaggggttaattggcttgtctaaggacaagaagtggttgagttgggagcacccccaaatctgtccaacttcaaacacattgcctttctctgcatggccacaagtgccccattgattaatacatctaacagaaagctaatcttgaggcctaacagaaagctatctaacagaaagctatctaacagaaagctatctaacagaaagctaatctaacagctaatcttgagtcctgtgtcccattgagagctggtactagcatgaacatgtgaactctttgccttggatgggcagacacccagaaagccccgtctgtagcctgtgctgcttgaccc

SEQ ID NO: 862801 - DNA, 616 bp, Homo sapiens
actggactcattgtaaggtaaactatttgcaagacttcaaatatatttgagctccaaattcctcactcttgtgaacaaaagtgggtgggattttgagttcctggaaattagtgtcaactcagagccaagagccaacggctaataattcctcatggatgcaacacatactatatttgatgtgtgctgttgtggcccatttgccagaagtaaccaattgagtctgcagtttctgaatgaagtctggagtaatagaaagccctgaagcaccaggtcctggctgcccctttctctcctcccatttttaaactcaaattcttgttattttggcaaaacatatcrttttctcgttttgtataaatttttggaagatatgtgcaagaattctatttaggtgactgcttttttctttgaacttctggaaggtctcctataaacccttgagagccgcgctaaaatataacacttctgtgttcaagaaatatctgttattccctaaagtacaaaataaagtccaagcataaaaaagtgtccacagtccttgtccttgcattctgtcttctccatggctcttttaagaaacttctacttcatccaaagtggtctgtcataaaaatga

SEQ ID NO: 862802 - DNA, 545 bp, Homo sapiens
ttaagaaatgaaattgtaagctatgtgtttcacatgttcttttagctaaatttaactctggtaattaacactgaatttaatagatgaaagatatgttgcttcagtttttgattggatgtctaaagattatattagctcttacagatttttgttctttttttttataagtaagatatacgccaggttctctctgaaatttcacttttctattggccctcaagtaggactgagaaaactaaccttcagattgatgccaaagcatcattggaagtagagactttctctcctttctccattatgtaaagttaaggaagatatcctggacagggctgaaagtcttctaagaaaacctaaagcggccgggcacggtgactcatgcstgtaatcccagcactttgggaggccgaggtgggcagattacctgaggtcaggagttcaagaccagcctggccaacatggtgaaaccccatctctactaaaaatacaaaaattaggtggtggcacacccctgtaatcccagctactcaagcaggagaattgcttga

SEQ ID NO: 862803 - DNA, 584 bp, Homo sapiens
tttgcttacatattcccttatatgtatatatgaaagtgatacaggattttaaaatctacatccaaaatgtctaaaaacttatttccacaggtataaaataaaaagtgcaattaataagaagacactgtatcatagataagctagcaagggttttttcctttctttcttttctttttttttttttaaacgggagtctcactctgccaccaggctggaatgcagcrgcaatcttggctcactgcaacctctgcctcctgggttcaagtgattctcctgcctcagcctcctgagtagctgggactacagtcatgcaccatcacccccagctaacttttttgtatttttagtagagacggggtttcagcatgttggccaggatggtctcgatctcctgacctcatgatccacctgcctcggcctcccaaactgctgggattacaggcgtgagcgaccatgcctggccgttttttttttcctttcttaatggtacataacataatggtatatccgaacatgtacaattcaataaaacatggtgtgacgtaggtttggttgactcctattattttatgcaacaatacttg

SEQ ID NO: 862804 - DNA, 633 bp, Homo sapiens
tccctttgctaaccaaggaaaaaaataaatgatgtacaactttaagtctgaaggttagtgtaaagataaggctatgtgaaaaacacagttgttattgcattttcaaaggggaaagggaataacaccatggccatggtattacatatgacttttctctttggttgagttcataccataaggaacatctcagaagttctggaaataagaggctgagaactgaattccattgagaactgagcaagattttataagcaacataatcaagcaactcttcaaaacccttcatgtaaggttttagaaatactggctttaaataaagatttatcttttcccaaaactaagcacctgctcttactgttttcttggcatataatcatgaatttgtacctgatccctgtatatatgatattcacaaacataacttttccattgacaataatcccartatctcatattttgttcttatttgctctgacattgttaatctagctctcccaaaccaaagtcttgttatttctttctgtttccctattgtagccagaggacattttcatacctctctagatttgtttctctagcttgttagttctactgcttccctgaaatatctttctcgtttattaatttggcatc

SEQ ID NO: 862805 - DNA, 624 bp, Homo sapiens
caacaaagaatgttaccttccttccctcaccaacagaagaaactaagccaggcctcgtaactcctaacccctaacctatcatagaaggcagtccaggcaggctcatcccttacctgagctgaacaggagtcccactgacaacagaaggtaagcctggcagcacaggcaagggatcaaccaactggcagcccactgagaatcaggagacagaaggatgttccttccccactagacatgagactcctttctcaccaacacacacraggcagctgggcagccacagcaagggggaatctctccacaacaagtgcccaggctgggaagcctctctactccactcagacgttgctggtgagaatgtaaaatgctacaggcactctggaaagcaattttacaatttcttaggaaactaaacatatagctaccacacaacgcagcaactatactctgagatttttatctcagataaatgaaaacttatgtttatgtaaaaacctgtgcatgaatgttcacagaagcccaaaactgtaaatatcccaggtgtccttcaataggtgaatggcgaaacaaactgtggtacatccataccatgacccattacttagcaatacaaatgaatgagtt

SEQ ID NO: 862806 - DNA, 587 bp, Homo sapiens
ttgtgaagcaagtgatcaattctttgtattacaatgttattgctcctaggttctgtatctcatggaggatggtgacatcagaagggaataaatactctaaaacatgatctaaggaggtagtctgaatcctgctggactcaatattcccttgctttttaacagctaatatttaataatgcctcctttaatcccctgaaatagaatccagataaaacagccagccttttacatagaatttttwaaaaaaatcaatataatgccctaacagtgatgtaaaggagaaaccaaagaaggcaattcataatgactttgcatttcaatatgtaaattctgatggctgactacactgaaagcataatgaagttgttagatacttccaccttcgtataatgagtatgtctggatgtagaaatagtagaagattaaaagctattccatgtgaaaatacaggagaacaaaagagcacagatacaggtggacactacaacgagaactagcgttaaaaggaaagaaaacaaaccattcaccacagcgcaggtgaatcttacaagcataacgttgagccaaggaagtcagacataaaagaa

SEQ ID NO: 862807 - DNA, 666 bp, Homo sapiens
tcaccctaatgtagatatccagtttttttaatgccaatcctgaagagggcttttatctgtttaatcctcacaaatccttgaatttgctaatgtaaatttgttaacaatgatgtattgaagttagcatggcatttttgccactaaaatttggtaagtttaaagaaggtaataaatataaaatgatttttattataaaaggagtaataagatccttgcattttatgtccctaaatacatgaatataaatgcaataactaatcaatataatttaatttacttgaaatgtattattttaaagtgggttgcagctaatgtttctgttttaggtactgagcagaattttgttatttgttagggaaatgtcaagttagctattagaaggtggtagtctcagtcttttatgtacagtttgctagttcaggtctccttactggataggccaggacagagcagcagtgctagttgcctatccagtggctgttctctgactacccttcttctctcacawatccttggttttaatcagctattaggcacctattattatacagtggtggctgggttcctcttgagtccccagagtgaatcttgattggtcagtcgtgatattccatttcccttacccattgatttctttaggaatgcacacttgaatcaattcttcag

SEQ ID NO: 862808 - DNA, 660 bp, Homo sapiens
agggacccacaagttttctgccactttgctgtggaatctgactgtgaccacctttacttgctaggatgtcacacagcttccactgtaagtactgagactcctgatgggttctgcaggtcagggcaggctccatgcagccatggttgctaggttcctgggttgcatattggctggtctcctgcagtagtataaatcctggcttaagtctttagttgatccatgattcagaatgaaaaggatgaaatctaatttgaatatgaaaaaacagraaacatgagacacctctgaaccctagaatctaagtgttttttctggtggcagttattattgtggatgaagtatcacagccaggtcagatttataaaatttagttttttctttttacaaggctaatctgttggttgtatttagatgtttgcaattatatttatgttttagttaagtttctgcaatttagttttatataggatgtgccttataaattcctgatagataatttctgctggtcaaattttccttcatatttaaaaatattttattcattggtaaatacagtagtctgaagacaaaattaaaacatatgctaaataataataaatcaactgccccaaataatattaattgattatgttaaactgaaggagtatatataatggcagg

SEQ ID NO: 862809 - DNA, 623 bp, Homo sapiens
tttccagttttcattgccatcatttttggaagatttcttcctgagagcatccaactctggctttgtgttgctggcagtgccacgcttgtggttgttttttatctgacatcaaacctttacccattttcttttgagaccatctcatgctaggcaagaagctgctttgtgtgaggttgctcttagaataagtcctgggtcccttcttcaggggtcacatcttagcacacacaaacctgggcccaaagatgggtgggggcaatttgmtgagccaccacttactggacatgagagaaaagtatttattacttcagatcttttatgtttattatcctgcttctgactgatgacagtatcccctcttctccctcatttctgggatttgtgatagagaatgtaggttatttatttggcttatcagcagggaatagtgactaggaagccttatttgaagttttaagtctctcaaaagcatcttgatcttgcctgtactataagcttataggatgattaaaaactagggggaaaaatgcaaaaaaggagccttagaataaaatgattttttttttttaccttttttcattttgatgttgttttaagccacatgtctatctttacatccaagg

SEQ ID NO: 862810 - DNA, 662 bp, Homo sapiens
tgtgtctctgtcgccttcagttgtgctctgatcttagttatttcttgccttctgctagcttttgaatgtgtttgctcttgcttctctagttcttttaattgtgatgttagggtttcaattttagatctttcctgctttctcttgtgggcatttagtgctataaatttccctctacccactgctttaaatgtgtcccagagattctggtgtgttgtgtctttgttttcattggtttcaaagaacatctatatttctgccttcatttcgttatgtacccagtagtcattcaggagcaggttgttcagtttccatgtagttgagcggttttgagtgagtttcttaatcctgagttctagtttgattgcactgtggtctgagagacagtttgttataatttatgttcttttacatttgctgaggagtgctttacttccaactgtgtggtcaattttggaataagcaagatatggtgctgagaagaatgtatattctgttgatttggggtggagmgttctgtagatgtctattaggtccgcttggtgcagagctgagttcaattcctggatatccttgttaactttctgtctcgttgatctgtctaatgttgacagtggggtgttaaagtctcccattattattgtgtgagagtctaagtctctctg

SEQ ID NO: 862811 - DNA, 608 bp, Homo sapiens
aggactgagaatactgaaattctaaaggaggaagagaacagtaaataagtgattgagtggataattaaatgaaagagagtttcttccacttagcaaatgatctgtctaatcagtagttctgtttagcacagtgtcatgtaataaaatgtccttgaaaaaaactgattctttatctccgtgtctaagaagccacttttatctgggaaggatatcaaagaaayatgttgacgtacttaggtaactatgacataggagaacaaggtacttttatctaatatgcaccaaagaccataatttgtttttaaaaattaccattatacatgtctgtcgtccctttttttgttttaaaatattcagatttaatagctatattatagatacatgggttttcaattattggtgactgaaaacctttctgctggcaggtatattatcttaatcttagttaaatactaaaatgcaaatagtttaaattactttaaaaataaatggcataatatgtaaaaacatgaaaaattattttgaaagtccaaaattatccagatattcaatttactagaagcagctacattttggactctagaaaatcatgctagatgttcatcaac

SEQ ID NO: 862812 - DNA, 608 bp, Homo sapiens
aggactgagaatactgaaattctaaaggaggaagagaacagtaaataagtgattgagtggataattaaatgaaagagagtttcttccacttagcaaatgatctgtctaatcagtagttctgtttagcacagtgtcatgtaataaaatgtccttgaaaaaaactgattctttatctccgtgtctaagaagccacttttatctgggaaggatatcaaagaaatatgttgacgtacttaggtaactatgacataggagaacaaggtacttttatctaatatgcaccaaagaccataatttgtttttaaaaattaccattatacatgtctgtcrtccctttttttgttttaaaatattcagatttaatagctatattatagatacatgggttttcaattattggtgactgaaaacctttctgctggcaggtatattatcttaatcttagttaaatactaaaatgcaaatagtttaaattactttaaaaataaatggcataatatgtaaaaacatgaaaaattattttgaaagtccaaaattatccagatattcaatttactagaagcagctacattttggactctagaaaatcatgctagatgttcatcaac

SEQ ID NO: 862813 - DNA, 596 bp, Homo sapiens
tcttaatccctagtacctcagaatgtaaccatatttggagataaggtctttacagaggtgattacattaaaatgaggcctttttggtgatccctaatctggtcttactggtatccttctaagaaaaggaaacttgggaaacagaccacctycccccaatgccccccatgccaagattgtatgtgcacacagaggaaaggccatgtgaggatatagcaagagggtatccatttgcaagtcagtggaggaggcctcagaagaaaccggacctgccaacactttgatcttggacttccagcctctagaactgtgaggaaataaatttctgttgcttaagccacccagtctgtggcattttgttatattaatagcaaccccaaaaggaacaaacttggaaggggagccgcctcccgaggctgggtttcagacctcattgtagacattatgattgtggcctattggatgtcagagaagtttgctgagttgtccaggccagagttggtccatactttccagtggagcagaaaatttctctccagattataggcaacttgaggctggcaggcctggaacacctctcatgggttcaggtgggcc

SEQ ID NO: 862814 - DNA, 577 bp, Homo sapiens
tcctttacatttatattctacttattgcacattatttcaattaatttccttgccactttctccactggaaatttcttgagaggaaaaatcatatgccttattcatcttattcaatgtgcctcctaaataatagagactcagtagatatttgttgggtgataggatggatgcatgggtgaacagactacccatagccaaattatagtagcacccattgtcttcattatagtagtraccatagcttacattatagtaatatccatagcctggtattttcctcttcctcattgctaccggagtgttctctctgaaagattagtctaatccttttacaaagcattataaatccttcagtgactttcaacattcatatgataaagtattttaagcaatgtttctccagactttaacagcccaaggctgcagctgtcaactcctactgcaggttatgtttccctggggagctttgaaaattccaggatatctaggccctgccccagaccaattaaattaatccctgaggttcagcctcagtatgggcatttttcaaaaagcccatgattctaactctgcagca

SEQ ID NO: 862815 - DNA, 577 bp, Homo sapiens
tcctttacatttatattctacttattgcacattatttcaattaatttccttgccactttctccactggaaatttcttgagaggaaaaatcatatgccttattcatcttattcaatgtgcctcctaaataatagagactcagtagatatttgttgggtgataggatggatgcatgggtgaacagactacccatagccaaattatagtagcacccattgtcttcattatagtagtaaccatagcttacattatagtaatatccatagcctggtattttcctcttcctcattgctaccrgagtgttctctctgaaagattagtctaatccttttacaaagcattataaatccttcagtgactttcaacattcatatgataaagtattttaagcaatgtttctccagactttaacagcccaaggctgcagctgtcaactcctactgcaggttatgtttccctggggagctttgaaaattccaggatatctaggccctgccccagaccaattaaattaatccctgaggttcagcctcagtatgggcatttttcaaaaagcccatgattctaactctgcagca

SEQ ID NO: 862816 - DNA, 638 bp, Homo sapiens
aaaatgatcagagaagcaaaatactggtagcgacactcaagtaaaccacgaaatttccataacttatgtcagcaaagtgggaatattgtacagtgtgtgttgaagttcctatacaacattgtttatctgccttttgtttgtttgtaaggaatgtatatactaaaagttcttcttgctgtcaaaagaatatgtgtgaataagtcattttaacttattctgtttttctyttatcttcctgccatcatcccacagccttactttagaaattttttttttagaaaattgaacaagtgctccttgtggtggcacatacctctaggatgggaggcaggggtggaagggtcacttgaggccatgagtttgacaccagcctggccaacaaagtgagaccccatgtctacaaaacaatttaaaaattagccaagtatcgtcatgtatacctacagtcccagctactcaggaggctcaggtaggaggatccttagcccaggagttcaaggctgcagtgagctgtgatagcactactgtactcaagcctgggcgacagggtgagaccccatctcctaaaataaaaaacaaagaaaaaaaatagttcaagtagcaagttgtatgtggcttactctgaatatttctaaact

SEQ ID NO: 862817 - DNA, 664 bp, Homo sapiens
aaggctgaccctctatgcttcaaggccaacttttggccatggtaagaagaatgagaagtatctaataagaaggactgaggtcctcattgttccaactataggacatacctataaatcctgatagaagtatattcagcatgtcactttaactaatattcatccttaaacttgggtgatcatctgtgargaaggaagtttggggaatctattgttagcatgcttgcctttttcagttggtccttatctttgattctctgaaactctcctctattttatgcttacagttttgccaccaaggcttataatgtctcatatttcctgaattacctgggttgctgtgacacattgacattgatttaaaaagtgtattgggttctaatatcccagatactgtcttagacgcttaactaactagcatcttgaactagcatttaagttgctcttatctgatattcagccacctaccctccccagagctcactctccatgcttgctctacctttgttcaatggcttgggcttctgcttttgcctatattctctgagtttctcattgagttaactgtctggttcctgtccctccacgctttgccttgctatcacaattccttatatgagaatttggtgctgagtttctgagcctcatcctcatatctgggatcctg

SEQ ID NO: 862818 - DNA, 645 bp, Homo sapiens
agactgcacgtctttctgtcagaagtaaccacttgatcttgggaaagtgttttaccctctctaaacctcagtttcctcactcgtacagtggggataataatagcatctgcatcacagggctagttttgaagattatacatacttagaatactacttgtcatttagtaactgcacaataagtgttacctgctctcatcattaatcatcattattttctctgtctcctaatactcagcatttaaaatatatttttaatttatcttgataaattctgatctgactcctaaaatccaagtatgagtgactaaaacctagtattttctttttcctcaaggaacttttgcccttcttaccccaaccccagtaatgtccaacaayactacttaattttcttgctatgaatctcatgaagaaaggttaatagtctattaacctttccatttcaattgctataagacaatggcaaactgaaaaaagatttttaatatcttatgtaacttggtgagaaaataatttttacaatggcatattccaagtgttccagaaagcaaaccacactgatgaatgctgcattgaatacagaatagtcgcactaagattctagtaaaagaaatgaaattatatcaggtctaataggcataacag

SEQ ID NO: 862819 - DNA, 582 bp, Homo sapiens
ataagacaatggcaaactgaaaaaagatttttaatatcttatgtaacttggtgagaaaataatttttacaatggcatattccaagtgttccagaaagcaaaccacactgatgaatgctgcattgaatacagaatagtcgcactaagattctagtaaaakaaatgaaattatatcaggtctaataggcataacagacaccacccacacatacacaggcacacacacacaaaattatgcacatacaagctcctgttaatgctgagaagaaactctggctgagaaatacagaccaaattagataagggaaatctcttggctttgctgtgagactgcccaactgcataagaaatttagtgtctccatataaatctggactgctgaattcacaaagaaggatcaaaagtattagaagtgactaatgagatatggttgaagaaggataacaaggctcctggggacaagggtgatattgtcaatgaggcacacacagcttggtactcaagggtttgtgtcaaccagttttagagcaaagagttgcctggtgattttaagatggaaagatcagatccattgaagcacagt

SEQ ID NO: 862820 - DNA, 633 bp, Homo sapiens
agaaggatcaaaagtattagaagtgactaatgagatatggttgaagaaggataacaaggctcctggggacaagggtgatattgtcaatgaggcacacacagcttggtactcaagggtttgtgtcaaccagttttagagcaaagagttgcctggtgattttaagatggaaagatcagatccattgaagcacagtacatagaagtcggctataatcaagaacagtgacccgttggtttaaacatgtactgcttcagaatgaaaagaaaaaaaaaaactatatacatctcagaaattgaactacagattaataccgaatcataatatataaaggtatgaatgaactcaagcactatttctaagacaacatgaggttaatatccttgtatctctagttgcacatgtatagagattgtccacatatrcatgtatgcatacatacatgcagaacattacatgttttacgtacacagagagatggacatctgtatacaaaaaaatcaatattgttagtattcaggatgcctacaacatagtgagcatgacttgtttagattttaatgtactcattagagttgacacattaaatttacaagtccttgctcgtgtattactcagcagatcttaatacagaca

SEQ ID NO: 862821 - DNA, 569 bp, Homo sapiens
tttaatgcacagttgtaccaccttgagtaaactatacaattgcacagacttctagttttcaggaatgaggtggagaaaacattatgtacaatagctagggttgtgaaaattaaaatatgctatacttaacgtataacaggcacgccataaacagtaataactagtatgttttggtacatactaacaatatctatttgttaatgaatgaaagagtgtgtgaatatatgaactgtacctctctgttggatatttttaagttggaaataattttcatcatatctgaccaagtacaaatggtagaacatttccttttctttccttcaaccaacaatgataggcrgtggatgggtatcatctgaatcagagagatttcatccattcaaatgtccatttaatcctgtttttagtttaacttcaagttctgtgataaaatcaccccttttaatggagatgttctgaagagcgtggtgtaaatactggcccaatttttagataagtcctttaagtcagtgaatatcactatgaagcttcttgttaagtatttcccaatgtatgtgcttcattttcta

SEQ ID NO: 862822 - DNA, 491 bp, Homo sapiens
gtttcttaattccaagaaaaaaatctcatcattctcttctatttaactgactaaaaatcttatttgcctatgtgtatgctgggtcactattgtagggaaaaaatatcttttcatcccattttaggttccatagctgagactcctataataagagtttaacaatagaaaagctatacatttacttaatatatgttttatgtgacaygagagccttcataaggaaatgaagacccaaagaaacagggcaccttgtgtattttttatgctaggtttgatgggcaagtagatagttgtggaaaagtctgattggattaaaaaagcttcatctgatggagataagctgggggaaactcagcaagacctgtttgttgagatttttctttgtatccctgtatcttcagagatgaggatgttcctttccttcctttctctgagggttttatggcttcaggaaagaaagacatgagggaaggtcaaagagacctccctgc

SEQ ID NO: 862823 - DNA, 601 bp, Homo sapiens
taatcatagaaacacaaagaagtgctaattcttaaacctcagtttagtgtctactgaagcacaactacataccttcaaatttgagacttttgctttgcaaagagtacaattaagctgtcgctcacattctaaacctattttaaatgtgggaaggtagagggcagttgtttacatccccaaaatgagttgtctggaagttttctgtgatcagaaattataaagattttctttcactacaactgtaatcactcaagtatgtaacagaagtactttctgattattaaggaatttttttttttttactgtgccccttggctataagaggatagatamatgatagatatgcagaccttaccacaaggagaatttctgctatttctataaactagtaactcttagttcataaaacaagtttattaagaaaaaaaaaacatgcaaccgctaatgtcagctgacatttctcaaagtaggccagagtagaagagagattacttctagctaaagtgaagcaaattaaattttaagaagttgaatatattcattctcactttcatcatattgcccaccatcaaggtgattataatatgtatactgcttctta

SEQ ID NO: 862824 - DNA, 558 bp, Homo sapiens
ggctttctgaaatgatttaaaactgcatcagaactcaatgcatgcatgccaaacatcatcatcagaaggcaggtctgacaagatttaattacttagaaacttatcagatttttaatcctcaacaataaaactataaatgacttttcagtaagatgtaataccaaaatgcatatttctcaaaacacaaaattagacatgttaagaataaactcaatttaattttaaaccagtagttactctgatgtaaacattgatgttatactgaaatgaattttaccattcttcccaaaaygcatttgccttcatattaatcttactcatggttttaaaagaatcctttactttcttgtcagtttgcattctgtatcaaactgacggaagccaagatctttcacattatttgtcagtttcactgccctttccaaatatatctgtagcaaaaccttttcatttgtctgatccagttgaaaatcttttatattcattttactgagacatcagtcttcaatttttcccttccattcactattcctagatgtgacacttctaacaatttgt

SEQ ID NO: 862825 - DNA, 617 bp, Homo sapiens
acttgcttcctagattgcaaatttattgcaagttaaagataaaatttgctttctgaaattatgagaaattttcttttgatagctttaaaaaaaaatcatcagggatcatataacagttcagttacactcccataatgttggtactcttgtttatatacaaagatttgacttacagacaccatttaaacaaatatcactaaatttcaaaacaatttcttcagctaatgtaagtcaagattttcctttttaataaaaggtaatagagatctacaacagctaatccaaataaaatatgcatgtgttatgtgattaatcttcaaacagttaacacccaataaagattagcaaattcttgtattatacctatgttgacaattcaattatcactctaggagtttcacytactatcttcatcaaacggttcttagcatatcaaaaggatcaggataatcatttgaattttctaacaatacctactgaaaatagcagacttaggtgaataaacagacttcaatgttcgaaagaaaagcctacagatacaatcaattactttggatctatggtacaatgaacatgcactggtaaatcagacagatctggtttccaattctggtgct

SEQ ID NO: 862826 - DNA, 481 bp, Homo sapiens
gttcttcatacatttcatttatctgcagattccccatctttgtttattaagaccatattcttctcttatgttttgaacatatttactgtatgagggctgctttaaagtcttctagtattaaagccaacatttgggmtatatgaaggtcaatttctattggctgtgggccatgttatcctgtttctttgtctagtaatttatatatttggagacaaggtcttactgtcatccaggctggagtgcagtggtacaatttcagctcacagcatcctcaacctcttgggctcaggtgagcctcccactcagcctgttaagtagctgggactacaggcatgcactaccacgcctggctaatttttgtatattttgtagagatgcagtttcaccatgttgcccaggctggtctcaaactcctggactcaaaggatccacccacctcggcctcccaaagtgctgggattatggatgtgagccactgtgc

SEQ ID NO: 862827 - DNA, 758 bp, Homo sapiens
attcttcaaagaattaaatactagaatgaccatcaagaagcagttctctaaattactaccacccagaaaaatgtttaaatgaagtgagtgaaatttaaaaactcccagtgatttcaggagtcttacagattcattattaaatgggccatctttcaagacaaaataaaccctcaggttaggaatcacatgaacaatttatctggatcaaaaaactggtggctgagttgagatasttgcagaataaccaggcagcttgttgaatgaatcttcttttaattataaaaaatttttttagagacaacgtcttgctatggagtatagtacctattcacaggcgccatcatagcacaccacagcattgaactcctgggctcaaatgatcttcctgcttcggcccccaagtagcagggactacaggcatgcaccaccatgctcagcttgagtgaatctttttaactggagaaattctcttttttttagacatggtcttgttatgttgccccagctggtcttgaactcctgggcccaagcaatagtcccaccttgtcttcctaaataaagtgctaggattacaggtgtgagtcactgtgcccagccctactagagacatttgaaatgcagatatttgaaagctgtataatcagtagttaatatggacttacatgcaaatatgtttgacttcttgataacctggcagttagttcagtgttgcagcatgaatcttctccctcttttccttgaatccttggttgtgggtg

SEQ ID NO: 862828 - DNA, 664 bp, Homo sapiens
aaactaaacctcttaatgccaaacagttagccaagttgtgaatgcaaaggaaaagttcttgaaggaaattaaaaatgctgctatactgaacacatgaatgataaaaaagcaaaacagccttattgctgatatgaagaaagttttagtggtctagatagaagatcaaaccagccacatattcccttaagccaaaacctaacccagaataaggccctaactctctttaactatatgaaggctgagagacatgaggaagttgcagaagaaatgtttgaagctagcagaggctgcttgatgaggtttaaagaaggaagcagtctccacaatataaaattacaaggtaaagcagcaagtgctgatggagaagctgccacaatttatctagaagatctagacaagacaattgaaggtggctatagcacacaacagattttcmacatagacaaaacagccttttattggaagaagatgtcatctaggactttcctagccagagaggagaagtcaatacctggtttcaacgcttcaaaagaagggctcaggtcagtggcttatacctgtaattctagcacttcaggagaccaaggcaagacgatggcttgagctcaggtgtttgagactagcctgggcaacacagcaggaccctgtctctacaaaaaatttt

SEQ ID NO: 862829 - DNA, 640 bp, Homo sapiens
gtgctgggcagaggcagcgagccccagctcccagtcagccatgagatctggagggtaaatcaatactctacagtgcagtgtgttgccaaacgattttacccagttgaaggctaatgtaagcgttctgaacacatttaaggtaggctagsctaagctacaatgttcagtagtttaggtatatcaaatgcattttcaacttgcaatatcttcaacttataatgtgtttatcaagatgtaactccaccgtaagtcaaggaacatctcaaatctggaaaacaagttttacagaaataaagagttgatcataatgaaaatcaataaccagctagatgataagaagaaacacttctagaaactgaacacagccttgggtgtttataattagacacatttattgagtcttaggcaaaattaagaagtaacaatttatattttataataccttgatgaattttttaaccaaaacacttctattttagtcttcgaagaaactcttttcttcttttccaagataatcatgattaacttacaaaaatgggtatacatcttcaaaacatttcccttaataggaaacttagctttacaggatctaaacactaaaaggcaaaaaaaaaaaaaatctattttcttttcattacaa

SEQ ID NO: 862830 - DNA, 640 bp, Homo sapiens
gtgctgggcagaggcagcgagccccagctcccagtcagccatgagatctggagggtaaatcaatactctacagtgcagtgtgttgccaaacgattttacccagttgaaggctaatgtaagcgttctgaacacatttaaggtaggctagcctaagctacaatgttcagtagtttaggtatatcaaatgcattttcaacttgcaatatcttcaacttataatgtgtttatcaagatgtaactccaccgtaagtcaaggaacatctcaaatctggaaaacaagttttacagaaataaagagttgatcataatgaaaatcaataaccagctagatgataagaagaaacacttctagaaactgaacacagccttgggtgtttataattagacacatttattgagtcttaggcaaaattaagaagtarcaatttatattttataataccttgatgaattttttaaccaaaacacttctattttagtcttcgaagaaactcttttcttcttttccaagataatcatgattaacttacaaaaatgggtatacatcttcaaaacatttcccttaataggaaacttagctttacaggatctaaacactaaaaggcaaaaaaaaaaaaaatctattttcttttcattacaa

SEQ ID NO: 862831 - DNA, 628 bp, Homo sapiens
agcaaaatctgatctaatttagtattctttcttctggtgggatttcaaactcagtgatatcttgcagtaccatattgacaaagttatcaaatcctagaagagtatcaacaatttccttatcagttttcatcacaatgagaatttttgattcttayatttgtctacaagctctagcagtagcagctgtaaggagctggtactagtgttagccgccataactgtgatggaaatggccttggttaacttttttttttttggacagagtcttgctctgttgcccaggttggaatgcagcggtgccatcttggctcactgcaacctccgtctcccagattctaacgattctcctgcctcagcctcctgagtagctgggattacaggtgtgcaacaccatgcccagctaatttttgtatttttaatagagactgggttttgccatgttggccaggctagtctcgaactcctgacctcaggtgactcgcccgcctcagcctcccaaagtgctgggattacaggcgtgagcccaccacgcccggccttgattaacatttttaattttaataacaagcaaataattctacaagcttctagacaagaaaaaaagataggtcacacaataacgacagat

SEQ ID NO: 862832 - DNA, 628 bp, Homo sapiens
agcaaaatctgatctaatttagtattctttcttctggtgggatttcaaactcagtgatatcttgcagtaccatattgacaaagttatcaaatcctagaagagtatcaacaatttccttatcagttttcatcacaatgagaatttttgattcttatatttgtctacaagctctagcagtagcagctgtaaggagctggtactagtgttagccgccataactgtgatggaaatggccttggttaacwtttttttttttggacagagtcttgctctgttgcccaggttggaatgcagcggtgccatcttggctcactgcaacctccgtctcccagattctaacgattctcctgcctcagcctcctgagtagctgggattacaggtgtgcaacaccatgcccagctaatttttgtatttttaatagagactgggttttgccatgttggccaggctagtctcgaactcctgacctcaggtgactcgcccgcctcagcctcccaaagtgctgggattacaggcgtgagcccaccacgcccggccttgattaacatttttaattttaataacaagcaaataattctacaagcttctagacaagaaaaaaagataggtcacacaataacgacagat

SEQ ID NO: 862833 - DNA, 599 bp, Homo sapiens
gattatccaggagctctaatggagatacacgaggaggttaatgttgttttcatgcctgcaaacacaacatcctatctgtagcccatacgtcagagaatcatttgattttcaagttttatttaagaaatacattttgtaagcctgtagctcgatagatagtgagttctctgaggatctgggcaaagtaaattgaacaccttctggaaaggattcagcatgctagatggctttgtaaaacaaagtgtctgagataggtctcaattaatttagaagtttattttgctaaggttgaggacatacctgggagaagacacaaaatcacaataggatctgtggttcacactttttataaagaggattttgagggtttcaatatttaaaggggaaagagcaggcagaaggggaaggaagaaagaaaaaaaaagggagggtataaagtgaggtaagyggtcacattgttgtgaggctttgataagtgtttaccgaatccacatgttacatgtgaaaggaggagggagaggagcagtcaattaaacatttgtcttatgcatcagtaagtcggcattttacacaacataaaaataaacagtaaaggaagc

SEQ ID NO: 862834 - DNA, 641 bp, Homo sapiens
tcaagtgctcttttcttcttccctttaatccctgtgaaatcttctttgaaacaatgaatttacatcaatgggttgtttttatcaggtggctgtagatttgggagacacatcccaacatttaaatactaatacttgcaaaactcatagaaaagtgcctaacattgtaagacttatgtaactgcttgttaattctagaatgatacracattttttcttctctaggaagattgcttaagtggacttgtgtcctggctctcacaaaatatagtcctaaaggaaactatttactcacatttaacaccaaactggttaccatcatattggttagctttatgatgaagtataaacagttacatgccaacatgaagaaaaccttccaaaaatagtaaataaatagtttaggtatcacgataaggggcaactccttggaaatgataatttgcaaaatgatacataagcgcccttctgactttgtgtttctgacaattataaattttccttgaagtgcattggctattctttataattaggcctttacattaattgtggcttattactgattaactcaagtatttattgcaaaaagttttctatgttgtaattacctctttattaccaacgacttaaaagggcaaagactt

SEQ ID NO: 862835 - DNA, 627 bp, Homo sapiens
acagaaagaaaattacgcatattatttgtttaaaggtgggtggaacaaattgtgtattgctatgtcattaccttagaattttggactgtaaatgtctagaagggaggtaccacgtatgtcaagtagcctgattccttaagtattaaataatcatcagatagattgccaaacatcctcccattctattttgacaacagcctacatctataaatgaaaaacatttgtgcatcaagtagtttaaattctattattctgacttgagtgactgtcttgaatacaaacagattttagacatggcgaattaagatatttttatccagaagggatgtggaagakatttggataagaactggagaaagttcaaccgtggaaattagccacgtgttgaaaagtttgcattatttatatatacttatacagcctttgttctagtactcaaaaatgctagagtcctctctgacacaaaagagaaatagaaagtttttaagcagagaaaatatccatttgtatgtgctacaactaaatagcaacgttttcactgaaaactctttagttttctaatagttaagatcagtattatttacagtgcagtgaattactaaacacattatttaagctctagcagaa

SEQ ID NO: 862836 - DNA, 702 bp, Homo sapiens
gccatctcacaactgtgtgtatatccaaaggaaggaaatcaatgtgttgagggaatatctgcacttttgtatttattgcagtactattcacaatagccaagatatggaatcaacctatgtgtccattaatggatgaatggatagagaaaatgtggtataaatagacaatggaatcttatacaaccattaaaacagaatgaaagaatgaaatttttttttgtcatttgtggctctagatgagccaagagaacattatgttaagtaaaataatgcaggcacaaaaaaaataaataccgcacaatctcacttacatgtggaagccaaaagagttgatgtcatggawgtagagagtagaatagtgtttaccagaagttgggaagtgagtggagagagggagaaataggaaaaggttggttaatagatacaaaattacaggtagataggaggaataccttctagcgttttacaacactgtagagtgactacagttaacaacaatttattctgttttccaatagctagaagaagggattttgaatgttcccatcacaaagaaatgataagcgcttgaggtgatggatatgttaatttaataatcacacattgatttaatcattacacactgtagagatgtatcaaaatattactctgtaccatataaccatgtacaattatgtgtcaattaaaattttttttaaagag

SEQ ID NO: 862837 - DNA, 672 bp, Homo sapiens
gttaagtctagcaattatgtggttaatttggtcactctccataatcatagagattcatttgttgggggtgggatcccctacaggcattggattctcccagttgactggtaataataacaaacaggcttaccagaaacaaacagttrtaaagtctccactatattacgtgttcaattgatgcagttgaaatatcaaacctagcttttcttttccctaatgtcagcaatgcagacaaataacaggcgtttggaaaaaagaggattttttttaactctgagatattttaattctgtcccagcagagagtcaaagaatcacaggaacaaaatatattattcatacaattttatatatatatatatgtatatgtatatatgtgtgtgtgtgtgtgtgtgtgtgtgtatatatatatatatgtatatatagtatatatacagagagagaaagagagtctgatctgttgcagtattggagccttgggaataaagtatctttttgggaatctctgtagtatattattagaagatcatgattaatgtcacaggacttaagcaatctttgaaaagaagtcaaaatgtgccacaaaaattcacttgattgtgccagtgggaatatttcctaacatagtcccaaacttcaaaaacagtataaagcatgcaaatggagtaagggg

SEQ ID NO: 862838 - DNA, 504 bp, Homo sapiens
aataagtggtaattgtgcctttggttgcaagtaaaaaattacttattttactctccaagatttattttttatttttattttttacctacatgggtgtcatcaaatagataagctggatctaatcaaatagatcacccccagagggaatgaatccattcatacaaagacctgccaggctgtttgacactagtatctctgtcctatgtgtcctatgtggaaggtggktctagggctgcccttaaatagatgtgaatagtgtagacttttcaggttccaagttgatgaaacttccaaacctttggtgatctattgggattgaaagttgattacaactttcccattgctaaatatctgaacaccacctcaagtcagtcacacaaggagctagggccccaagcaccctggaaagactaagaagccagacttgccaccatccttaggctattactttggcctggtacttactagctcttaagcctggtactcaatgatttactgttcaag

SEQ ID NO: 862839 - DNA, 504 bp, Homo sapiens
aataagtggtaattgtgcctttggttgcaagtaaaaaattacttattttactctccaagatttattttttatttttattttttacctacatgggtgtcatcaaatagataagctggatctaatcaaatagatcacccccagagggaatgaatccattcatacaaagacctgccaggctgtttgacactagtatctctgtcctatgtgtcctatgtggaaggtgggtctagggctgcccttaaatagatgtgaatagtgtagacttttcaggttccaagttgatgaaacttccaaacctttggtgatctattgggattgaaagttgattacaactttcccaytgctaaatatctgaacaccacctcaagtcagtcacacaaggagctagggccccaagcaccctggaaagactaagaagccagacttgccaccatccttaggctattactttggcctggtacttactagctcttaagcctggtactcaatgatttactgttcaag

SEQ ID NO: 862840 - DNA, 671 bp, Homo sapiens
aagaagaggtctggctagcaaaggtggtcttgttatgtagatgaaacctcactgttagcagccctcagggagaatacgttttacatgtttttttcagacctttaaaagtgtcaggatctcagttaatctgtcctagatccggacaaagaaaggtctgcctgcmtcaatgcagaaatgcaactagacttaaatgctaaatggtcacacttgttccatcatagacctaacttctaattcagtaatagagtcctttccataggcaagtagtagtaaatttatacaaaggccatccatagcttttaaggtggagctacaaagtagatacttacatgatacaattgttttttaagagtctaacgttgattcagctctgaaatcctcatgtttgttcttaagcgtgaagtgggccataatgcagcactcataaagaattctgacctgttgcaatggatgtcatcttgaggaatgcaactatgaaaaaagtgcatcatcatcataagatattgcctattatgactaaagtgcaattccatttctcactgtttcttaaaggggaccatattaaaattttgagtgtgacaagtctttgttatgtgggactttttggtgtctctgactaatagtcactagttgctaatatggtatcccagtcattggacaatgaaaaatat

SEQ ID NO: 862841 - DNA, 657 bp, Homo sapiens
aattcaataaatggttctgggataactggctcaacaaatgcagaagactgaagttgcaccccttccttacaccttatacaaaaatgaactcaaaatggattaaagacttaaattaaaaaaacccaaaactataaaaaccctggaagataacctaggcaatatcctcctagacataggaatggacaaacatttcatgtggaagatatcaaaagcaattgcaccaaattaaaaattgacaaatgggattgaattaaactaaagagattctgcaaagcaaaagaaactgtcaacagagtaaacaagcaacctatataatgggagaaaattttcgcaaactatgcgtctgacaaaggtctaatatccaccatctgtaaggwacataaacaaatttacaagaaaaaaacaaacagcctcattaaaaagtgggcaaaggacatgaacacttttcaaaagaagacatacatgtggccaaaaagcatatgaataaaagctcaacatcactgataattagagaaatgcaaatcaaaaccactatgagatgccatctcacagcagtcataatggttattagtaaaaagccaaaaaaaataacagatgctgttgagattgcagagaaaaggaaatgcttatacactgttgatgggagtgtaaattagt

SEQ ID NO: 862842 - DNA, 619 bp, Homo sapiens
tattaggaggtaataggggttaggacttcaacatatgaatttgggaggaatataattcagcccataacaggccttgaagttacaaaataattcttccactaatgtgggtcattacagcttagtccacagtatattccccaagtactcacaaagcctgtcagatggtattctctttgtrgggtcactggcagttgggaaggtacttgtttcctgcattcgtgccttttttattccttctaaacatctgaagctgagcataaatctcccccttctccctcctccctctgcaatatctcttgccccaattatgcagttagcctaagaatcaggaaactgttccagaaataaacttaacctgctgatctagatagtgactaaatcctccaataatgtggacatctactagaaaagctaggttaacaggcttcttttttagaagtcatctgtttggttgtgagataagatcaaggctcaatcatatccaaagtccaaaagacttcaaacattacgtgatttttgccccactccctatcactgcagtgcagttataactggttctggagttgagaaaaagccaagcaatcttaactgttgtcaattttataccattgaaattgtg

SEQ ID NO: 862843 - DNA, 656 bp, Homo sapiens
gactgtggacatttgagttaatgctgaaatgagtttagactttgggggactgttgggaaggcatgactggttttgaaatgtgaagatatgagatttgggagggaccaggggcagaattatatagtttggctctgtgtccccacccaagtttcatcytgtagctcctataattcccacttgttttgggaaggacccatttggagacgattgaatcatgggggtgggttttcccttgctgttcttgtgatagtgaatgggtcttatgagagctgatggttttaaaaatgggagtctccctacacaagctctcttttgcctgttgccatccacataagatgtgacttgctcctccttgccttccaccatgattgtgaggcctttccagccatgtggaatggtaagtccaattaaacctctttcttttgtaaactgtccagtcttgggtatgtctttatcagcagcttgaaaatggactaatacagacatgaaccaatacttctcaaaagaagacacacatgcagccaacaagcatgtgaaaaaaagctcaccatcactgattattagagaaatgcaaatcaaaaccacaatgagataccatctcacaccagtcagaatggctattaataaaaagtcaaaacaaaaacaacaaaggcaaa

SEQ ID NO: 862844 - DNA, 634 bp, Homo sapiens
ctcaagttatttgattttcaagttatctgcttcaataagctttttcacccacattatttatgagtttgttttggtagaatcaaccaagaattcaagaccttgtcttgtacctatatatttgttgcttaccaattattctggtaaaactaccatatctctctatctgggttagggaaataccacatagaaaaattcctttaactgtaaccacattatatttcttatccaactgaactttgatacccagaattccacctcactccctaaatggtatttgaagagtctttaatactttgatttatggctctcaagatacttgccagtttcttcttcttygatgggaaaacaagacttacattttttatatggttgttatgttgaaattaccatcagcaaattaatgtacttaataattgtcaaataaagtgaaaaaatgtgtctgaaacatagagacaactatatttaggaatcccttcagcttcttacaggcatcagataacaagataaatatcattatgattttgatctaggggaccctgtcatttaaaatttaggtgaaaaaagatgttctttattcagctagatctgagagcaccataatgaataaaagtcatttactttatgttgcctttaa

SEQ ID NO: 862845 - DNA, 557 bp, Homo sapiens
ttagcacatacggtgctaatttttgctgccagatgatttagtttttggtgcagaccttgattggtagctactcctaccattttatttatctcgagtcccctgagactgcaagctgagctatcagaaatgccgtttttatttccaattcatctatgtgaattaggaatatctctacactgtgcaaccaaaatcttacagaagaataagttagatgtgaaagctgaacataagaatacaactgtcacatagaagcccgtattttaaaggattgcattcatcaaaactttattcatgtgcttaaacagggtggatttgaacttaaaagattctaacatatgtttaaatattacagctctatgtgagattccatttgayttaaaaaaaaaaaacctactgttaaaaataaaatttagaaactactgtcctaagtaaattatgagctactcacaaagtataatggggcaaagtcaattacaataaataagtaaacacttggcatcccaatgactagcctgttcaaaagagatgcctggaaaggatgtgcacctatattgcta

SEQ ID NO: 862846 - DNA, 557 bp, Homo sapiens
ttagcacatacggtgctaatttttgctgccagatgatttagtttttggtgcagaccttgattggtagctactcctaccattttatttatctcgagtcccctgagactgcaagctgagctatcagaaatgccgtttttatttccaattcatctatgtgaattaggaatatctctacactgtgcaaccaaaatcttacagaagaataagttagatgtgaaagctgaacataagaatacaactgtcacatagaagcccgtattttaaaggattgcattcatcaaaactttattcatgtgcttaaacagggtggatttgaacttaaaagattctaacatatgtttaaatattacagctctatgtgagattccatttgacttaaaaaaaaaaaacctacygttaaaaataaaatttagaaactactgtcctaagtaaattatgagctactcacaaagtataatggggcaaagtcaattacaataaataagtaaacacttggcatcccaatgactagcctgttcaaaagagatgcctggaaaggatgtgcacctatattgcta

SEQ ID NO: 862847 - DNA, 577 bp, Homo sapiens
caatgacccagctcaacagtcaggcagttaatttaatcttcctctgtctttttgccctcttcaggccctcaacagattggatgatgcccacccaatctgtttcagtcattccaccaattcaaatgcatatctctttcagaaacaccctcgaagacatacccagaaacaatttttaacgagctatttgggcatcccatggtccagtcttgttgatgcattaaattaatcacagtgggaaaaatttaaagtggcctstctctgataagattattctcttgacataaggcagggtttctcaacctcaacagtactgacactttgggttgaataattatttgttgtaaaggactgtcttttgcatttgtaggttatttagcagcattcatggcctttacccacttgatggcagtaacacaactccccaagttgtggcaactaaaactgtatacaaactttgccaaatattgcctgggaggcaaaatcactgacacagggttttcatggatgtaatagagcagtttcacgtaaatgacacaagattttcatgctcacatgcactcccctattgacacatgat

SEQ ID NO: 862848 - DNA, 694 bp, Homo sapiens
ttcacctgaatgcccctactcacacacacacacacacacacacacacaggtttgccacctcaaagtaccttcacttgccattttccccaccatccttatttcagtcaatgtaccctatagctcatttcagaaacctccactgcaaagtcctatcaattccatgacttattatcccttctatatatccccatgcctccatccacacaattaccattcatatcttgactagactactacattcgcctcctaactattcttcccacttttattccctatatgctccattgattctcctcaaagctttcaaattgatcctttttaaaagattaatcagattgcatctgttacctgcttaacccttccaagggcttccacttgaattcaagatataaaccagatmctatataatggccttcaaggtcctataaaatttggccccagactacctctctggcctcatttcctaccacttctttcaatctcgaccaccaattccccattccttgattataactggtctctctgcttccattcttatctaccttaacacagatgttttatcaacgtattagcctagtcatcacaaagtgttaaaatgcaagattgctataattgcctagttatttaactacagcactttaaaaaatctatatttccacagactattataaatacttcaaaaccatttctaaag

SEQ ID NO: 862849 - DNA, 610 bp, Homo sapiens
cactataaacaattttccaaacctctttgattgtggagacttttttacatggcactgatagcaacattttctgaaacagtattatgtgagatatagtttgaaagattctgtcatgatccaacagcaacaactttcttcaaagatttactattttccaattacaaatgccccattttaatattatcaacatatctgctaacatacttctagtcaaaaattacaatgagaaatgctatttcttctgtgttccaattacgtgtagataggttgctttgttatgttgaaatttattgttggatgttatctgtcattgataaatggactttctaattaaatttcatatctttagtattaaacatgatttagcgcatkatatcaatttgcatttccagtgaagggggaaaaagtgaaaattcattgctaaacatctagtaagaaattaccttagtgtgtacatgatttatctacttcattctatgtcataaatgataggcatatcccctgtgatccaaaaccttggaaattaatgttttataataacttaatagcatagtatacagatcacaacatttaagagaaagcaaataaatctatcatttactattttagg

SEQ ID NO: 862850 - DNA, 610 bp, Homo sapiens
cactataaacaattttccaaacctctttgattgtggagacttttttacatggcactgatagcaacattttctgaaacagtattatgtgagatatagtttgaaagattctgtcatgatccaacagcaacaactttcttcaaagatttactattttccaattacaaatgccccattttaatattatcaacatatctgctaacatacttctagtcaaaaattacaatgagaaatgctatttcttctgtgttccaattacgtgtagataggttgctttgttatgttgaaatttattgttggatgttatctgtcattgataaatggactttctaattaaatttcatatctttagtattaaacatgatttagcgcatgatatcaatttgcatttccagtgaagrgggaaaaagtgaaaattcattgctaaacatctagtaagaaattaccttagtgtgtacatgatttatctacttcattctatgtcataaatgataggcatatcccctgtgatccaaaaccttggaaattaatgttttataataacttaatagcatagtatacagatcacaacatttaagagaaagcaaataaatctatcatttactattttagg

SEQ ID NO: 862851 - DNA, 710 bp, Homo sapiens
acataaacctttataattaatgagggtaacttttcacctttttgaattatgttgaaatgtacacagaatccaggtaatacacctcaaggactactgttttcttcaaagttaaaatgttgtcttacagctctcaacttcctagggttcatttattcaagaaacatttgcagagtacttgctttgttccaggtatgttagatacactgttagataccatgagggataaaaaaggaatcaaacactgtccttaccatccagaagcttaaaacaaaggaggagaggtacaacatttatgcaggttagtgcactatcaygctaaatatgtttgttaagtgtcatagagagaaagaaaccaagttgtttccttgtaaaaatcatttttgcacaactaatagcatgtagtaatttattatatttgccacctcttaccccacaaaaagctatgaacatgcaaataaaatacctttgatctatagttcttgcaatacaggaaaatatataaaattgattaaggctttgatcaagaaagcttatcaattctccccttcatttataaatggcctaaagatgataactgcatccctctttcccctcaaccccatgcatacttctttcttggaatgtatctatacttacttatttacttctttatttatttgtgtctctgtatacatatatattatatgcacatgtgtataaatatgtatcta

SEQ ID NO: 862852 - DNA, 710 bp, Homo sapiens
acataaacctttataattaatgagggtaacttttcacctttttgaattatgttgaaatgtacacagaatccaggtaatacacctcaaggactactgttttcttcaaagttaaaatgttgtcttacagctctcaacttcctagggttcatttattcaagaaacatttgcagagtacttgctttgttccaggtatgttagatacactgttagataccatgagggataaaaaaggaatcaaacactgtccttaccatccagaagcttaaaacaaaggaggagaggtacaacatttatgcaggttagtgcactatcacgctaaatatgtttgttaagtgtcatagagagaaagaaaccaagttgtttccttgtaaaaatcatttttgcacaactaatagcatgtagtaatttattatatttgccacctcttaccccacaaaaagytatgaacatgcaaataaaatacctttgatctatagttcttgcaatacaggaaaatatataaaattgattaaggctttgatcaagaaagcttatcaattctccccttcatttataaatggcctaaagatgataactgcatccctctttcccctcaaccccatgcatacttctttcttggaatgtatctatacttacttatttacttctttatttatttgtgtctctgtatacatatatattatatgcacatgtgtataaatatgtatcta

SEQ ID NO: 862853 - DNA, 624 bp, Homo sapiens
atcatatcccaagatacaggctattgacatggcttattattgataatgttgaccttggtcacattgctgaggtagtatttgtcaggtttcaccactgaggtagtatttgttagttactatttttccccctctctgtattctactcttagaaagcaggtcattatgtacagcctctgctatggtccacctacttgraggtagggtatcttcataaataacttggaatttctttgcgagggagatttgtgtattctcccccttgtatttgtttagtcaaccacttatttatatcagtatggactcaaaattacttgattttataatgtgtgttataatccaatatttctttattttgttgtttacattgttccacctttgactactgagagttctttcagttggcttttctacccctttgacataaccccattattgtgttttcttattgttttgctttattttgttttgtttaagaactgctttactttctggaactagaagatactccagcactagtagaagtatattttacttcccagtctcagaatcagtcatttctccgataatccctcccagtatgagtaccatcagggaaattaaggtccagtttttttttaaaaagta

SEQ ID NO: 862854 - DNA, 643 bp, Homo sapiens
cagctgggaacttgttagaaatgcaaattttctactaaatcagaaactccagggtgaagggggagggagtaaagtgggcagagggcagatccaggagaggaatagggtagtcacctgtgtttttacaaatccttcctgtgattccaatgcacaacgtttgagaaccactacttgctattatgtcattcttcctgtatttcagagacatttcatctccttcctgatattttcatgtttcttcctttccctactgtgtgataaacaactatcatttacctgatgtgccatttttttcttatgtaggtctgtgaaatatgaatcatttagtacatattttcttaagcacacatcaattttctccttatagtagytggaccgattatggacacggaataattttatactgtggatatgagagcatttaagagattattaggagaaagtattctattctagttacttcaagttttcttacttcaactatactttttgcaggacctatatcttatgaattttgcagtctatatgtataacatgtgacaaagattcttaggactagcaccaaatgtggaatagaatatccaccaccactgaaaatgcaagatggaaaatgatgataatatagtattataattggaatcaa

SEQ ID NO: 862855 - DNA, 706 bp, Homo sapiens
tataaatacaaaatccaggtatataagaataatatataaaaatatacacaggtaatgtgattatagggtacataatgaaaaaacattcagaaatactcctctaagagtgactactatgaatataatatttaaggcaatttaatgtatcctgtaagtataagaacacatttaacaatgctatatgtttaagtgaaccaacatgagattcaacactgattaaaaaggtggttttgccagctgcagtggctcactcccataatcccagcacttcaggagactgaggcaggatgactgctcacaacatagtgagagactgtcttcacaaaaaaaaaaagaaaattaactaggcttggtggcacacgcctataatcccagctactcaggaagctgaagtgaaagagtcacttgagcccaggaggtggaggctgcagtgagcyatgatctcaacactgcactccagcctgggtaacatgagcaagaccctgtcttaaataataataataatttacctttggaaagcatgacttttctttaaatgacatatactgtgatacctgaaaatcaaagtccttcaaggaccctaacactactccttgtcacagttatcatatcttttaattgtagtcagtgacaacttgtgctgaatatactacttaaagaaactatacaaacagactccaagaagtgttgggggaaaaaaaaggtc

SEQ ID NO: 862856 - DNA, 584 bp, Homo sapiens
aagcatgacttttctttaaatgacatatactgtgatacctgaaaatcaaagtccttcaaggaccctaacactactccttgtcacagttatcatatcttttaattgtagtcagtgacaacttgtgctgaatatactacttaaagaaactatacaaacagactccaagaagtgttgggggaaaaaaaaggtcatattakttggtggcccctactacttctaaaagaagaaatatacatttatttatcaaaggaatttgttaaagtagcatttataaagaattttaatatgggtaatattaaaaattaattgaaactaaaactttagacaagtggtatccaacagaactttttataatattaggattatctacatatctgtgctgtccagaacagtggccactagccatagatggttactgagcacttgaaatgtggcaaataccactgagaaaatttctcattttaatattaattgatttaaatttaaatagccatatgtggctagtggctaacatttagacagcagaaatctaaacaacaactgctggaaatctttatattgtcaatcataaaggaccatttcaa

SEQ ID NO: 862857 - DNA, 569 bp, Homo sapiens
cagctgttatctgaaaaataaactcagtacctaatcctgtgaaagcttagccagaatcacacaattccaacaatccctccagtttttcttgtataaaattactcaggcctcgtcattgctgacatgcttctgattatagatatctaaatgaattcctgaaggagtataaggactttctctcctgtggctgtctcccgctgatcctttagtctaagaagtttgttcttcgtcggtccattcctrcaatcagtgttggcctctgatgcacaagtctgtggtgaatgaattcatagagtattctttttgtgcaagcaatctaggaagtactcggcatttctcttttgctgatggggtttcttcttagttcttgctggctgcccatctccaccctctgctgtgagaccttcccttagaagccataaagcagttctttagtctcaaatcagagtccacatctcctaacaacagtgagcagcttaggtaaagctacatgacttacatcctgtttatttatttatttattcattattctttcatctatttatttttttcttggtccgaccaagttt

SEQ ID NO: 862858 - DNA, 568 bp, Homo sapiens
aatcatatttatttatttctaactgatttatttaacaatggcaagcatgctctacactggggatagagcggtgaacaacaatagatcaaagccactgctcttatggagcatacattataaagggatgggaggagatataaaataaacaagagaaacaagcgaaatacaataaatcagagatttataattttttgtgargaaaataaatcagggacactaacggtatttgtttgaggtttgatgggaatgagttgcaactttaaatagtcagccaaggaaaacctcattgagatgctaagatttaagtagagtctttaagtagtggaagagaaaattatgcagacatctgtaggacagccttttagtcaggggaacagcaacagaaatggctatcgtaaacgcaatgcctggtgtatttaacaaaggcaaaaactgctatgttggagcaagcaaaagaaataatcataggaaaataataaaaaataggtaaagaatgggaggatcagatcatgtagagctttgtaggataatataatttgaagcctttggcttctttttgtttgttttc

SEQ ID NO: 862859 - DNA, 568 bp, Homo sapiens
aatcatatttatttatttctaactgatttatttaacaatggcaagcatgctctacactggggatagagcggtgaacaacaatagatcaaagccactgctcttatggagcatacattataaagggatgggaggagatataaaataaacaagagaaacaagcgaaatacaataaatcagagatttataattttttgtgaagaaaataaatcagggacactaacggtatttgtttgaggtttgatgggaatgagttgcaactttaaatagtcagccaaggaaaacctcattgagatgctaagatttaagtagagtctttaagtwgtggaagagaaaattatgcagacatctgtaggacagccttttagtcaggggaacagcaacagaaatggctatcgtaaacgcaatgcctggtgtatttaacaaaggcaaaaactgctatgttggagcaagcaaaagaaataatcataggaaaataataaaaaataggtaaagaatgggaggatcagatcatgtagagctttgtaggataatataatttgaagcctttggcttctttttgtttgttttc

SEQ ID NO: 862860 - DNA, 575 bp, Homo sapiens
tacataaaagagagggaatttagaccagccacaaggtaaatattctcagcagtgagaattggacaagaaaatacattactaagggaggataccaaaatgctaagttagctaactagtacatttaaaaaataagtcaaagaactaactatagtaatagaatgcagattttagcttacagtaacctgtatatgactaaatatatgtatatttttaacttagagctaggtaaaagattataagtatgtatgcattattactgctttaagcttgagatgcactatggaatattttttcctagctattgaaaagcagatttgttttactttttttctgaaacagtatctttgttttttctaacttgaayattgtggcaataaactaggcacaatagtacacacttagcagacactaaacagtctgttcaattaggctgaaaaaagtcttcttctggctatttgcatgtactcaatacatttactccaagattcttctgacaagggacacttttagccaattccccaatagctctcatcattataggattaaaaaactaggcctcctgtgaatttaaaaat

SEQ ID NO: 862861 - DNA, 576 bp, Homo sapiens
ccaggatacaagtgcagaacatacaggtttcttgcacaggtaaacatgtgccatggtggtttgctgcacctatcaacgcatcatctaggtattaagccccacatacattagctattgatcctggtgttctccctccccctgcaccccgacaggccccagtgtgtgttctcattgttcagcttccacttataactgagaacatgtggtgtttggtttcctgttcctgtgttagtttgctgaggacaatggctttcatgtccatgcaaaggacatgatctcgttccattttttggctgcatagyattccatggtgtatatgtaccacatttatttttatccagtctgtcattgatgggcatttgggttggttccatgtctttgctatagtgaatagtgttgcaatggacagaatgatttacatttctttggatatatacccagtaatgagattgctgggtcaaatggtatttctggttcaaggtctttgaggaattgccacactgtcttccacaatggttgatctaatttacattcccaccaatagtgtaaaagcattcctatttctccaaagccttg

SEQ ID NO: 862862 - DNA, 617 bp, Homo sapiens
gtactcacaaagatatgtattggaattggaacttatgtttaaaagaggagagcataaaaatttggaaaatttgcagcctgacaatgcaataaaaaagaaaaacccattttctaaagagaagttcaagctggctgcataaatctgcataaggagtgaggagtcaaatgttaattgctaagacaattgggaaaatatctccaggacatgtcagagaccttcacagaatcccctcccatcccaacatcccctcccatcacaactcagaaggcctaggagataaaaaatgatttcctgggctgggaccagggcctcagtgctttgtgcagtctcaggactcggtgcctgcatcccagccgtggctaaaaggggccaatgtagagctcaggcmattgcttcacagggtgcaagccccaagccttggtgacttacacatgatgttgggcctgcatgtgcacagaagacaataattgaggtttgggaacctcagcctggatttcagaggatgtatggaaacacctgggtgtccagggagaggtgtgctgcaggggtggagccttcatggagaacctctgctagggcagtatagaaggaaaaagtggagtatgagcccccacaca

SEQ ID NO: 862863 - DNA, 577 bp, Homo sapiens
cccaaagttatcagaagacaagaaataaccaagatcggagaggaactgaaggagatagagacatttaaaaataccctttacaatatcaataaatccaggagttggttttcagaaaaaaataattaaatagatagactgctggctagactaataaagaaaagagagaagaatcaaatagacacaataaaaaatgataaagggatatcgccactgatcccacagaaatacaagcaaccatcagagaatactataatcacctctatgcaaataaactagaaaatatagaataaatggataaattcctggacacatacatcttcccaaggctgaacaagggagaagttgaatccctgaatagaccaataacaagttctaaaattgaggcagtaataaacagcctacccactaaagaaagactagractagatatatttacaggtgaattctaccagaggtacaaagaggagctggtattattttttctgaaactattccaaacagttgaaaaggaaggacttcactctaactcattttatgaagccagcacatcctgatacaaaaacctggcagagataca

SEQ ID NO: 862864 - DNA, 612 bp, Homo sapiens
atgagattacaagcatgaaccacccatgcccagcctcataacactttttaagaggttgacattaaaggattaggcaaaagaatttccttgggaaatagttgaattttttcctaaccttctcagggtggggaaggggtgttttctcattcaatttgagctaaaggtgtttcctaagagccatttgtagagattgacttgtgattgctgcagtataaagcataaaggcagcttatgtttcakccacctgcaaaaagtttaaaggcctgggctggagctggagctgctgttgagtttagtaaccaagcagagcaggagagggctggctttggaagagctgccatctcaatgacacatggggcaatggaggagcctgcttgggggggtcttcaggacctcctagagtgctaatgttgccccagaggagggagagaccttcagaagcccagaggtttggggaggacattttcagtagccaaaagggtgagaggcctgggcccccttttcccttactcctccttctaagcctgtccaactatggtgtggctagaaaccacagctgcacagtggggaaggaggtggactcaataagagtggtggtggtggtgggggaga

SEQ ID NO: 862865 - DNA, 612 bp, Homo sapiens
atgagattacaagcatgaaccacccatgcccagcctcataacactttttaagaggttgacattaaaggattaggcaaaagaatttccttgggaaatagttgaattttttcctaaccttctcagggtggggaaggggtgttttctcattcaatttgagctaaaggtgtttcctaagagccatttgtagagattgacttgtgattgctgcagtataaagcataaaggcagcttatgtttcagccacctgcaaaaagtttaaaggcctgggctggagctggagctgctgttgagtttagtaaccaagcagagcaggagagggctggctttggaagakctgccatctcaatgacacatggggcaatggaggagcctgcttgggggggtcttcaggacctcctagagtgctaatgttgccccagaggagggagagaccttcagaagcccagaggtttggggaggacattttcagtagccaaaagggtgagaggcctgggcccccttttcccttactcctccttctaagcctgtccaactatggtgtggctagaaaccacagctgcacagtggggaaggaggtggactcaataagagtggtggtggtggtgggggaga

SEQ ID NO: 862866 - DNA, 608 bp, Homo sapiens
agatggggtttgccatcttggccaggctggtctcgatctcctagcctcaagtgatctgtctgatcggcctcccaaagtgttgagattacaggggtgagccaccgttcccgggcacatcctggagactttcaaatccacatttttttagctgtcaggcactccttgacaccatcctgcctgcaccttgaaaccagcatttccccagtacgtcctcctcctgacttctttgttgttcctagtttcttttcttttctttttttttttttttttgagacagagtcttgctctgtcacccaggctggagtgcagtggcacaatctcggctcactgcaagctccgcctcctgggttcasgccattctcgtgcctcagcctccccagtagctgggactacaggcgcccgccaccacgcccagctaatttttttgtatttttagtagagacggggttccaccgtgttagccaggatggtctcaatctcctgaccttgtgatacgcccacctcggcctcccaaagtgctgggattacaggcgtgagccaccgcacctggcctgttgttcctaattagtttcatggtccctttggtgtcgcaaaccagacacctcagc

SEQ ID NO: 862867 - DNA, 608 bp, Homo sapiens
agatggggtttgccatcttggccaggctggtctcgatctcctagcctcaagtgatctgtctgatcggcctcccaaagtgttgagattacaggggtgagccaccgttcccgggcacatcctggagactttcaaatccacatttttttagctgtcaggcactccttgacaccatcctgcctgcaccttgaaaccagcatttccccagtacgtcctcctcctgacttctttgttgttcctagtttcttttcttttctttttttttttttttttgagacagagtcttgctctgtcacccaggctggagtgcagtggcacaatctcggctcactgcaagctccgcctcctgggttcacgccattctcgtrcctcagcctccccagtagctgggactacaggcgcccgccaccacgcccagctaatttttttgtatttttagtagagacggggttccaccgtgttagccaggatggtctcaatctcctgaccttgtgatacgcccacctcggcctcccaaagtgctgggattacaggcgtgagccaccgcacctggcctgttgttcctaattagtttcatggtccctttggtgtcgcaaaccagacacctcagc

SEQ ID NO: 862868 - DNA, 632 bp, Homo sapiens
tattcctctacagtcacaacttagctaagtgtttggcccaggaggcctagctttcagcctgtctcagcttttggcatgccaccttcctcatcaagcttaataatttcaagcttctgatcaaaagtgagagatgtgcaattcttccattcacttgaacacttagaggccattgtaggggtatagatcagccctaattttaatattgttatatcctagtaaatagggaggcctgacgagagggagagagttgcrggaacagctggttggtggagcaatcagaacacacacaacatttatagactatgttcaccatcttatatgggtgcggttcgtgatgccgcacaacaattacaataacatcaaagatcacagattaccataagagatatcataggagtaaaaagtttgaagtattgtaagaattaccaaattgtgacacaaacacatgaaatgagcacatgctgttggaaaaatggtgctggcagatttgctagatgaaggtttgctgcaatccttcaatttgtaaaaaacacaaatatctgtgaaacacaataaagtgaagtgcaataaaatgagctatgcctgtacattttgcttgttgacttatttctttacaaatatggtttacctgc

SEQ ID NO: 862869 - DNA, 657 bp, Homo sapiens
ctcattttcccatctataaaaagggagaaatcatacttgcccactgtaagagttttgtaaaatgtatgtgaaactgcttagaacacaacaaatggtatgaacatagaattgttgccaacatttcaacctcatgcgtgttttttcaatgagaatctgaggtccttgagggcagaaccaagtcttttgcacagtttcgtagtgttctctgtaacatccaacatagggtcttttctgaaactgtaggtctttaataaatgttaggttsagcaaaaaacaaggaggaggaagccacattcccaggtaactggctttactgtctttccttgtacatctgtttccatcttattatggtttcatagcccttctccaggccacctgggcccagagcacacatcttcggcccacaggttctctctggatagctgcatagacaggcctggattctgggccagctctgcagtcattgagctcacagggcaaatcacttgacggtgctggacattagtttcttgctgtctgatgtaatgtccatgatgatacatcaatgtttgcccagaaggttcttgtcatcatcagtggcccttgagttatgaaaagatgacatgtaaaggaaaggagccagtagtcagactggccctcaataccatgtctaagtct

SEQ ID NO: 862870 - DNA, 657 bp, Homo sapiens
ctcattttcccatctataaaaagggagaaatcatacttgcccactgtaagagttttgtaaaatgtatgtgaaactgcttagaacacaacaaatggtatgaacatagaattgttgccaacatttcaacctcatgcgtgttttttcaatgagaatctgaggtccttgagggcagaaccaagtcttttgcacagtttcgtagtgttctctgtaacatccaacatagggtcttttctgaaactgtaggtctttaataaatgttaggttcagcaaaamacaaggaggaggaagccacattcccaggtaactggctttactgtctttccttgtacatctgtttccatcttattatggtttcatagcccttctccaggccacctgggcccagagcacacatcttcggcccacaggttctctctggatagctgcatagacaggcctggattctgggccagctctgcagtcattgagctcacagggcaaatcacttgacggtgctggacattagtttcttgctgtctgatgtaatgtccatgatgatacatcaatgtttgcccagaaggttcttgtcatcatcagtggcccttgagttatgaaaagatgacatgtaaaggaaaggagccagtagtcagactggccctcaataccatgtctaagtct

SEQ ID NO: 862871 - DNA, 602 bp, Homo sapiens
ttgttaaaccacagcttttagctaaaatgaggtatacctagatgtcaagtaagacagatccaaggtaactgggtaggaaatcttttgacatcttaactcatgttgagtttgtgctgtggtgtcaccagaattccagataaacacacagcctttcccatacctttttttttcttactataaaatattataagatccattgatgtccaaataataccaccragcatctcttcacctctcctcctcttggtccacttgctaatgcccagttttcttctccatttccactttttcttaggctccctatttactattcattttgacttccttctgttttatttttttccctttagcattgcatgtgaataagaaaataatgtttaaagaaaaaaaaaaaaaagcaaacctccaaaacgtggacctaaccattgcttcacttacacttcacccacagctggagttcattcaactcttgcttttcacaaaatagtaaccaggagatgtttaatgtgcctgatttaatgtttttaataatcacagcaaatgaaaggtggtttagttataagtgaagcatggttgaataccagctggggagacactaggga

SEQ ID NO: 862872 - DNA, 570 bp, Homo sapiens
ggaagtagccagatctgtctttggctaacatggatgctgaaaacccaagctgaagggattcagaaaggatcaggaagaagacacttatctgtactcctgattcctgcaaggctattgtcaatacaccagcatcatttccttacttgttgaatcaccactctgtagaacactctgtcagtcttcacctaaataaatttcccttccatccaagtttttctgctggattatgaccaacttgataacctagtttagtatcctatgagtgccttaaatacagaggatgctyaatgaaaatttattagactgcccgctcagcagctcactgggattgaatatgcatctggcattgaaaagaattgaaattatacaaatgaaggtagctgacatattcatgtaaaaagaaccaccagatatcatccattccttgggctgggagctacttatccctgacacagtggtgattcagaggcagccatgggggtcactgcctgctttttcctaatcatcttcagggcccagaggcaaggggaaggttcagaaaactacagttgacttcaaaacccaaaactc

SEQ ID NO: 862873 - DNA, 583 bp, Homo sapiens
tcaagaaaactttctctcttgctcatcactgaatgccagaacttgccagattacttggcacacaaaaggactgagtaaacatttgttgaaaaactgcatgagtgaataaattcacagtcattcactgttcctaagaaccattcttcaccacattagaatgcaatatatgagtttattgagtattaactcacacgatcacaargtcccacaataggctgtctgcaggctgaagagcaaggagagccagtctgagtcccaacgctgaagaacttgaagtccgatgttcaagggcaggaagcatccaccacaggagaaagacgtaggctgggagaataggccaatctctcttttcacatttttctgcctgcttatattctagctgtgctggcagctgattagattgtgcccacccagattaagggtgggtctgcctttcccagcccactgactcaaatgtcaatcttctttggcaacagcttcacagacacacccaggatcaatactttgtatccttcaatccagtcaagttgacactcagtattaaccatcacaggcacgctagttatgttcgccatcttgattt

SEQ ID NO: 862874 - DNA, 583 bp, Homo sapiens
tcaagaaaactttctctcttgctcatcactgaatgccagaacttgccagattacttggcacacaaaaggactgagtaaacatttgttgaaaaactgcatgagtgaataaattcacagtcattcactgttcctaagaaccattcttcaccacattagaatgcaatatatgagtttattgagtattaactcacacgatcacaaggtcccacaatargctgtctgcaggctgaagagcaaggagagccagtctgagtcccaacgctgaagaacttgaagtccgatgttcaagggcaggaagcatccaccacaggagaaagacgtaggctgggagaataggccaatctctcttttcacatttttctgcctgcttatattctagctgtgctggcagctgattagattgtgcccacccagattaagggtgggtctgcctttcccagcccactgactcaaatgtcaatcttctttggcaacagcttcacagacacacccaggatcaatactttgtatccttcaatccagtcaagttgacactcagtattaaccatcacaggcacgctagttatgttcgccatcttgattt

SEQ ID NO: 862875 - DNA, 583 bp, Homo sapiens
tcaagaaaactttctctcttgctcatcactgaatgccagaacttgccagattacttggcacacaaaaggactgagtaaacatttgttgaaaaactgcatgagtgaataaattcacagtcattcactgttcctaagaaccattcttcaccacattagaatgcaatatatgagtttattgagtattaactcacacgatcacaaggtcccacaataggctgtctgcaggctgaagagcaaggagagccagtctgagtcccaacgctgaagaacttgaagtccgatgttcaagggcaggaagcatccaccacaggagaaagacgtargctgggagaataggccaatctctcttttcacatttttctgcctgcttatattctagctgtgctggcagctgattagattgtgcccacccagattaagggtgggtctgcctttcccagcccactgactcaaatgtcaatcttctttggcaacagcttcacagacacacccaggatcaatactttgtatccttcaatccagtcaagttgacactcagtattaaccatcacaggcacgctagttatgttcgccatcttgattt

SEQ ID NO: 862876 - DNA, 608 bp, Homo sapiens
agtttttcttaagctctttcaggaaagcagccacttccacttcttccatatgcacctcaactctttcaaaatttgcacacaatcttccaaatacctacctgtataggaacagaaagtggttcagatttgtaaacattcctacactgtctggaaaagctagatgctgttagacacaacttcagcttamctaaaatgataacaataataataattttcaattccaaaccagtacagcttcagtgtgatttcacatttcctcccaagaataatgggtccccatgtctaagctctgtctatcctcataaacagccaccatttgcttatcccttgggtctaggggaacacatgcccatcatttcagcgtagggtaagatctccagtgggcactccttctcctccagtgaggagggccagagcagcccttctaaatcatggagccaaggacagaaacctctagcctgaaattagagatggaacagaatggaaaagtcagataacttacagaagttaacttccgttatgccagaagccactgaaattacaaagcctttcctcacttcacttaatttagacttggtgataattattgacaattattctctgcctaa

SEQ ID NO: 862877 - DNA, 680 bp, Homo sapiens
gttctgccagggtgtttttggctgagatcaacttctgagttagtacactgagtaaagcagcttgtcctccttaatgcaggtgagcttccttcaatcagttgaaggcctgaacaaatcacaaaagctaaccctcctctgagtgagagagaatttctcttgcttgactgccctttaactggaacaattggtctttcctgccttcaaattgaaatattggctcttcttgggtcaagactgccagcctttggagaggaactaccccatcagctctcctgggtctctagttggccaactcaccctgtttctctggagaaccctaatatacttacaataggtgctcagtatacatttctgaaaatgtttcattttttcttacccatcaggacataaatgtggttcctggattctaygtttgtaataaatgaatttataattaacaaaccgtaactatgatataattatatcaaaattaagccagtgtggtttaagagaaatacagagttttaaccttacatatgctattatttctcttaggtagaagaaaatggtatttgttattttctggtgctaacgttaagaatgtaaatattttataactggaatatttttaaagagcttaataaatattggaaaatgctaacagaagtttggaaagagtatttgctaagtgtaataggaag

SEQ ID NO: 862878 - DNA, 680 bp, Homo sapiens
gttctgccagggtgtttttggctgagatcaacttctgagttagtacactgagtaaagcagcttgtcctccttaatgcaggtgagcttccttcaatcagttgaaggcctgaacaaatcacaaaagctaaccctcctctgagtgagagagaatttctcttgcttgactgccctttaactggaacaattggtctttcctgccttcaaattgaaatattggctcttcttgggtcaagactgccagcctttggagaggaactaccccatcagctctcctgggtctctagttggccaactcaccctgtttctctggagaaccctaatatacttacaataggtgctcagtatacatttctgaaaatgtttcattttttcttacccatcaggacataaatgtggttcctggattctacgtttgtaataaatgaatttataattaacaaaccgtaactatgatataattatatcaaaattaagccagtgtggtttaagagaaatacagagttttamccttacatatgctattatttctcttaggtagaagaaaatggtatttgttattttctggtgctaacgttaagaatgtaaatattttataactggaatatttttaaagagcttaataaatattggaaaatgctaacagaagtttggaaagagtatttgctaagtgtaataggaag

SEQ ID NO: 862879 - DNA, 629 bp, Homo sapiens
acagaaaaatatagataaaaaccctgctattactagagttatcatgtaatgtgtctagaagttataataagacaaataaatgatgatcccaataaaagaggaatatctattggagggaaagtaacacaaaagtacaagaatttctataaatatgaatgcatacagttactatctttccttatactagtaataatatactcaagaatttactttggacaccaattttataagaagcaacaaaatgtagattatacaatagaggttgtatagattgaaaatattattgagaaattttttaaagttaactatttagagaagcaaatcatataacttccttacaagtattaatttagaggtttatsattatcctctaatacatgatttttttggtcaaactagataacgtcatcctctgaaacatctaaaacaacattcagtttttaataaatttcaaaatgttaataaatcattgtgatattgtaggataatattaataaatataaaatactcaaagctatattaatttatcctggacattttagaatcaagaatttgaataatggttcaaacagtgtgtgtgtgtgtgtgtgtgtgtgtatgtgtgtgtaagttagattaaccataggaaa

SEQ ID NO: 862880 - DNA, 606 bp, Homo sapiens
agtacattctttgtgatgtggagaggctgctgccctgggattgcctgggcaccatctttcctggcacccaccctctataccagcctttcttctcctcctcagtcaccaggaaactgacttcttttgcaaagcagcagtgatgaaaactttccaagtttcagcgggtagaagatatccagytttgaccctcaaagtaaacagagcctcagaaattccatggagtaggcagggaccaggagcagagctcttcaaactttttgaattcacaacactcttactttaagttttctggttaactaaatatatagtagtacagcaaaaattaatattggtacagaaccaataagccagatattcagaaagagtctgaaaaagcagtaattaaacattgagaataggagttgtgggacacatagtaaaatcttcctctctacttattatggtcctcgtgtaggccaaaacgtgataaactgagtggatatttcatctgtcagtgcaatttgctttctggagtggttcttggttatacttgagtataaatatactgccacaggatgaagatgaccatataatttggaaacagaagaagagaaagaaattgcttcc

SEQ ID NO: 862881 - DNA, 606 bp, Homo sapiens
agtacattctttgtgatgtggagaggctgctgccctgggattgcctgggcaccatctttcctggcacccaccctctataccagcctttcttctcctcctcagtcaccaggaaactgacttcttttgcaaagcagcagtgatgaaaactttccaagtttcagcgggtagaagatatccagctttgaccctcaaagtaaacagagcctcagaaattccatggagtaggcagggaccaggagcagagctcttcaaactttttgaattcacaacactcttactttaagttttctggttaactaaatatatagtagtacagcaaaaattaatattggtacagaaccaataagccagatattcagaaagagtctgaaaaagcagtaattaaacattgagaataggagttgtgggacacatagtaaaatcttcctctctacttattatggtcctcgtgtaggccaaaacrtgataaactgagtggatatttcatctgtcagtgcaatttgctttctggagtggttcttggttatacttgagtataaatatactgccacaggatgaagatgaccatataatttggaaacagaagaagagaaagaaattgcttcc

SEQ ID NO: 862882 - DNA, 634 bp, Homo sapiens
actctcacacctccttcgaggttttgtctcccatatcagcctctcagcaaggcccaccctgaccaatctatttaaaattctcatactttctcctcccaaccctccggaccctgatctagtttttctcttttctgtatcactaaccacctcccaacatactgtgtatcacatacytcaattgtttattgtctggccccctatcctagaatataaacttcctaaagagtgatattttcattttgttaaccaaaaaatatcaagtgctcataactttgcctggcataaactagggactcaatatatattattacataaataaattcaaaatgcagaggtacttttaaaaatgcaccaaataatcaaataagaatgattcaacagttgtgtttctcagacaaaaagccatacgatttcatagcactgggatgcagggttgtagcggcatttcatgagcctgggacatgaccttcagtgctaaatttagtgctcctggtgtttctaagattcccagttaccagtttaacttcatctatctaggatgttcataccaagaatgtttctacaaactcaattatctactcaaaataagaagcaagcaaacctggacctgcttttcccatctccatgtaacaga

SEQ ID NO: 862883 - DNA, 650 bp, Homo sapiens
ggcaaaatcaccagctaacatcataatgacaggatcaaattcgcaaataacaatataacccttaaatgcaagtgggctaaatgccccaattaaaagacacagactggcaaattggataaagagtcaagacccattgatgtgctgtattcaggagacccatctcacatgcaaaaaygcacataggctcaaaataaagggatggtggaagatctaccaagcaaatggaaagaaaaaaaaaaaaagcaggggttgcaatcctagtttctgataaaacagactttaaactaacaaagatcaacagagacaaagaaggccactacataatggtaaagggatcaattcaacaagaagagctaactatcctaaatatatatgcacccaatacaggagcacccagattcataaagcaagcccttggagacctacaaagagatttagactcctacacaataataatgggagactttaacaccccactgtcaatgttagacagatcaacgagacagaaagttaacaaggatatccaggaattgaactcagctctgcaccaagtggacctaatagacatctacagaactctccaccccaaatcaacagaacatacattcttctcagcaccacatcacacttattctaaaactgatcacata

SEQ ID NO: 862884 - DNA, 614 bp, Homo sapiens
acaatagcaaagacttagaaccaacccaaatgtccatcaatgatagactggattaagaaaatgtggcacatatacaccatggaatactatgcagccataaaaaaggatgagttcatgtcctttgtagggacatggatgaaactggaaaccatcattctaagcaaactatcacaaggacagaaaaccaaacatcacatgttctcactcataggtgggagttgaacaatgagaacacatggacacagggtggggaacatcacayaccagcaactgtcacggggttgggggcttggggagggatagcattaggagaaatacctaatgtaaatgacaagttgatgggtgcagcaaaccaacatggcacatgtatacctatgtaacaaacctgtacgttgtgcacatgtaccctagaactttaataaaaaaaaaaaaaacagttgcaaaaaatacctagaaaaatcatcaaaaaaaaaaagaacgaagttgaatttgttttgaggatatcaatctgtctcacaaaatcttgcaacagagagtacacccaggcttcccaggcaaagaaacaggaactagagagccaacacaagttcttccaatctctcttttctctctct

SEQ ID NO: 862885 - DNA, 617 bp, Homo sapiens
actatgggaagagcaggccttgttagcagttttacaggggtatatgaatctggaatagcagtggattacaaagtatctaaaattgtttttatttctaatgacctcatggttatttactattcttatcattaaaccttaaacaagctcctctatctctcccacttccttcttgtccttcttcacctctcccttcattacctcattctgctccttttaattcttcttgtcacatttccatgtaaaatggaaatcctgtttggaattacttctctttagatcttcccagttaactacttttgttaaatctaaaatggaaagagtaaacttcactctttgatacacaggaaattagaggctttcaaatgcattataagacaagttctgtaattttgaaaaaaagagwttaacagttcatttaattgctgttaaattagccaaaaaagtgaaacattttttggagtgttattcacaatagttaaattaaccattcaattatttgagctagagtaaatatataaaaatatatcagcatatcaattttcacaaatatgtttgcacatagaattatatttccttgccactatgagcagagttaattacacatatgtgagttctag

SEQ ID NO: 862886 - DNA, 647 bp, Homo sapiens
aacatggttatcacacggctaaaatcaaggtgtcagcacagctgtgttcctttttgtgggctctgtttctttgcctttcctagtttctagaggctgtctgcatttcactagctcatttacctccatcttcaaaaccagattcaaagcctcttcagatctctccctgattgatctcttcatccacttccctcttcccctttaagaacctttgtgattatattgggcccacctagctaatccaagatcatttccctattttaagrttatctgattagcaaccttaattcttctttgccaagtaacataatataatcacaggtctagggattaggacatgaatatcttaggggagaattagtctgccaaccacaggtagtgtctgcaaggtttttctacagtaaagtaactatttttctcatatatatttttgattctcagtttccttatctgtggaaaagaggtgataatcatgtttccctcatccagactgcttggaggtttaaatgactgtagtgaaagtatctggcatatggtcccccgaatggtagctgaagctgaatctaatggctatcactctctttctataccttcttcctccaaggcaggaatatgattattcttaactgtgaaataagtgttcttaattt

SEQ ID NO: 862887 - DNA, 596 bp, Homo sapiens
aatttggatcacccagggaccgctacaaaaacttctacaaaaatttcagagtttttattgcctcctttaaaaactgtttcaaaagacaaataaaaagcttaaatgactaattgttaaaaaaaaaagtagaatctgctaacgtttggcttagctactatcccatcccaaaggtgaaaagaaaactgcataaagtatttatagaaggtggctctcaggtaaagtaggctttcttctttttcagaggtatccacgctgagtccaggcatagaagacagtttttggtcctatttgttaatggcctccaccctgaactatgtaattttagttaagaaataaaagytaagtcaaaaagctctcctgctgaactaaatcagtcatcaaaatacagtcatgtgctgcttaatgatagggatacattttgaaaaatgtgtcattagacaatcctgtcattgtgtgaacatcatagagtgtacttacacaaacctggatggtatagcttactacacacctacgctgtatagtgtagcctattgcttcttggctacaaacctgtatagcatgctattgttctgatgtaatacaatgctgagtatttg

SEQ ID NO: 862888 - DNA, 585 bp, Homo sapiens
caccattttgatttgaatccagtatctattacttactagctgtgggatcttcagcaagttaagttaccatctataagccttaattacctcttcaaaacagtgggatagtaatagtgcccaacaaatataatcaaatgaaatgacaattatgaagcgcatgaccaygtacctagcatagcataagcacatgataaatcttattttaccaagctatttttttctggagaaatgcaacttcaactctcataaggactttgtaacagaactgtatacgtatctttcccccagtttaagatataaacttatggctgatctaaacattcacacacagacacacagacacacacacacgtcgtttctctgtgtctgcctctatagcgctctcattctctttcctgtatacatacatgcacacatacacacatatacatatataagtgaatatagtgtgtattctacatacatacacgtttttgactatcagataaatatctatgacttcacaaaatttggatttatgaggttgttaaaaggaaccacaggacaacattggagtaaggagagaaaagaaagacattagtgtga

SEQ ID NO: 862889 - DNA, 664 bp, Homo sapiens
cgtttctctgtgtctgcctctatagcgctctcattctctttcctgtatacatacatgcacacatacacacatatacatatataagtgaatatagtgtgtattctacatacatacacgtttttgactatcagataaatatctatgacttcacaaaatttggatttatgaggttgttaaaaggaaccacaggacaacattggagtaaggagagaaaagaaagacattagtgtgaaatcaatgtcacaaatcacaacaytggagtgcagtcaagaaagttgtgtatgaaacttgttaatccgtcttctccctggaaagctttactttttctgagagaacttaatatcacctaggaattattatatttttccgcagtctcccctgttaactaattcccttgttgcacacatagaggtacaacagtttaataaaacaaagagtgacttgacattgccagcacagggttgtttgtgttcacctgtgacatttacaagtgaagacatacagaaccttcttttgtttcctggataatcgttcaggtgttaaagaagttgattcagttttaaatggcatgattttctcaagccttggaaaaataattgatggattttcttcttttttcatagctcaagtatacaaactgcaaagtcatgtctaactgtttaat

SEQ ID NO: 862890 - DNA, 664 bp, Homo sapiens
cgtttctctgtgtctgcctctatagcgctctcattctctttcctgtatacatacatgcacacatacacacatatacatatataagtgaatatagtgtgtattctacatacatacacgtttttgactatcagataaatatctatgacttcacaaaatttggatttatgaggttgttaaaaggaaccacaggacaacattggagtaaggagagaaaagaaagacattagtgtgaaatcaatgtcacaaatcacaacactggagtgcagtcaagaaagttgtgtatgaaacttgttaatcygtcttctccctggaaagctttactttttctgagagaacttaatatcacctaggaattattatatttttccgcagtctcccctgttaactaattcccttgttgcacacatagaggtacaacagtttaataaaacaaagagtgacttgacattgccagcacagggttgtttgtgttcacctgtgacatttacaagtgaagacatacagaaccttcttttgtttcctggataatcgttcaggtgttaaagaagttgattcagttttaaatggcatgattttctcaagccttggaaaaataattgatggattttcttcttttttcatagctcaagtatacaaactgcaaagtcatgtctaactgtttaat

SEQ ID NO: 862891 - DNA, 613 bp, Homo sapiens
caaacaatgccatgttttaaagtttctaaagagaaattataagtttgttaattgtttcatattacagaattaagatttaaggctggctgataaccttaaatacagtagcaatagggatgtcatttccaacaacaacattggctatataatrgaaataaaggtctaacataggtgatctgtgaaaactatatagttctgaaactatgtatgctttgttcaggaaaaaaagctttgaaattttcttaagcgtagtaaattttgtttattgatagcagtatttttttagttagttctatgactacgtggatccttggagctacgtgcggtgtgtttggatgcttttcggcattcatttcctcatgtgtggtatgtgtttgtgtttgtatttgtgtgtatggtttggttagaagtttttcctgtaggagaagcctgctataactcatggatcgtaatgttagaagttctgtgttcatgcttaattgaagaatgtgctaatgcactcataccaaagagccagaattaaattttccatagaaaatggcatactcctgtgtggtagttaaatctttcctgttgatttatgagtataaacccatgactttgacattataat

SEQ ID NO: 862892 - DNA, 619 bp, Homo sapiens
ctaataagcatacattatagatttgaggacagtttaagtgttactggcacaaaagaatgtataaatcttattactaatacttcagtcatatatttagtaactataatataaaaatataactagatatagttaataatgtttaaaaaacaatgcttttaaaaagcggccagtggaacttttttacattgtgtgtatttaaatataaataattttattatatagtaatgcattttctgtgcagaatatttagaaaagatagattaaacaaaaatgaagaaaattccctgtaattgcactgcccagtgaattaatagtaatatatagcttacttaaaaaagatactgctgctcaaaagtcttgaaataattagagtgattatgtatatgcatatacttmtaatttatctcccatatatgatttcatcatggtagataaattagaactatttcactaataagaatagtaatatattttcctcattaaaaatatctttttaaattattgctattgctattttaaatcttagacataatattttgtgatttaataagtttttggcatttctgtattttctaggtaataaagatgattactatttctgatgctctattttctagcc

SEQ ID NO: 862893 - DNA, 606 bp, Homo sapiens
tacttccactttagatgtgcgttgtttcatcttgtttctctttctcagtgtttctatgctgtattagtgcaactaaacttttgaataaaattgaactcataagagttttctcactaaatctgaatttcctaaccatttgaagtgctcttagaattatgtgtggccatagtcccagatgctataagcatacataaatgtgttaaaattagagcagaagaagggaaagacagcaaatgaagttcaagtcacataatttttttttaaagtaaaaaattcagaaaccaagtaacctttcagaaaaaaatagagggtagctaagaagaaaaaggtacaggtgtaggaaacgatgaaggtcartgtaagcaagcggcatgcaggtgatgaacaggtgcagcaggaggtggaaaaatgagtgatctattatggaaaagtcacatcaagggtatgtttctgtctctgttacccgaggagactagatgcactaagtgaaatacatcagtgcagattactaacaccttaccaatttaagagaggttaacagtaatagaagagaaagtggggatgcagccttaaatgctattttcttaagtgatgctataataagac

SEQ ID NO: 862894 - DNA, 606 bp, Homo sapiens
tacttccactttagatgtgcgttgtttcatcttgtttctctttctcagtgtttctatgctgtattagtgcaactaaacttttgaataaaattgaactcataagagttttctcactaaatctgaatttcctaaccatttgaagtgctcttagaattatgtgtggccatagtcccagatgctataagcatacataaatgtgttaaaattagagcagaagaagggaaagacagcaaatgaagttcaagtcacataatttttttttaaagtaaaaaattcagaaaccaagtaacctttcagaaaaaaatagagggtagctaagaagaaaaaggtacaggtgtaggaaacgatgaaggtcagtgtaagcaagcggcatgcaggtgatgaacaggtgcagcaggaggtggaaaaatgagtgatstattatggaaaagtcacatcaagggtatgtttctgtctctgttacccgaggagactagatgcactaagtgaaatacatcagtgcagattactaacaccttaccaatttaagagaggttaacagtaatagaagagaaagtggggatgcagccttaaatgctattttcttaagtgatgctataataagac

SEQ ID NO: 862895 - DNA, 634 bp, Homo sapiens
attctgcttgtataagttatataaaatagtcaaactcacagaatcaaggagtggaatagtggttgcaaatgactgagtaaaagaaaaaatggggatttgctaatacataggtgtaaaattgtgttattcaagatgaataagtgctagagatctgctgtacggtattgttcctatagacaacaaaactgttttgtacacttaaacatctgttaagagagtagaattaatgtttggttcttaccaccatacatttaaaaaagaaatttaaaaaatttctttgtggggcactgtggctcacgcctataatcccagcactttgagaggccgaggtgggtggatcgcttgaggtcagaagttagagascagcctgaccaacaaggtgaaaccctgtctctactaaaagtacaaaaattagccagatgtggaggcatgcgcccgtagtcccagctactcgggaggctaagacaagagaatcgcttgaacccaggagacagaggttgcactgagcagtgatggtgccattgcactccagcctgggcgatggagcaagactccatcaaaaaaaaaaaaaatgcgtgaacatatgtaattagagaaaaatattagggaaattgcaaaataatttattagcctt

SEQ ID NO: 862896 - DNA, 622 bp, Homo sapiens
aatcactgaggcaatgataatggaatttatctgatttatttattccagttatagccaatttttggaactggggatggttaattctaaccaaattgattgtcaataaagccttgggaaaaaatgggggtaagccttatgcatgttgtgtaggtacccacaatatatatctactatgttatatgaaatttgagattgtggatacataactgtttacttgagatgggcctgtgctgttagatagaacctatgtttatttctactgcagayggtgcattgtacctttaagttaggacatgaatataggataatacctgttttaagttaaaaccacgattattgggtggttttgcccatcttcatccagctatctcttccaaagaagatcaagtatgcctttctacattgttgatgatatggtttggctgtgtacccacccaaatcttatcttgaattcccacatgttgtgggtgggacctggtgggaggcaattaaatcattggggttaggtttctcccatgctgttctcatgacagtgaataagtctcatgagatctgatggatttataagggagagtttccctgcacgagctctctctttgcctgctgccatccatataagatg

SEQ ID NO: 862897 - DNA, 609 bp, Homo sapiens
aagtactgtttttgctgcatctcacaatatttggtaagttgtattttcattattatttagttcagagtgtttttaactttctcttaagattgttttctttgacttatgtgttgtttttaaatgtagtgttttatttccaagtatttggggattttccagctacctttcttttattattgatttctaatttgattctattgtggtctgaggatagccattatgtaatttatatttacttaatttgttatggagtattttatggtccagratatgctttatgttggtgaatgttccatgcaagtttgagaaggatatgtattataatgtcattggatgaagtagtgaatagatgtcaattataatattcaattatttgatggtgctgtcaagtccaactatgtccttagtaattttctaccttctggatttctaccttctaccctctataatagaggggtgttgagactttagattataatagtggactaatctatttcttcttgaagttctatcaaatttgtctcatctattttaaagctctgttagacacatgcacatcaaggatttagatctcctcagagaactaactgctttattgttatgtaatac

SEQ ID NO: 862898 - DNA, 558 bp, Homo sapiens
ataaaagtctttcaaatttaattaacttagtaatcatttaaaattatcaccacatcctatgtaaaattttgagggttttttttttccagcaaaagtgttttcaaaaagtttatcttattgaattacttggctgtttatttcacaagtactttattttgtttttccatgcctggaatgactacattttcttaagatgactacaaatgttatgccagtgacatttgtaggtggaatcaaaacagtgttaattagttgtattgaagagttccctgactttagcctgtttgtcagtaacaaagacacagtatattttccttagctctcatgagtaactagtccttcaaggatcaacatattaccttaaaacacctctgctttgaaccaaaggaatacattagtaacagagattctgtgtgggaayatttttactgagagaattggtagttaatgaacatgtttatcttttttctgttggaaaatgtttttatccagtcccaaaatggtgcccataagctttatattaattaatttttattaatcagttgaagtttatgcatt

SEQ ID NO: 862899 - DNA, 649 bp, Homo sapiens
aaaccccctttgaactctttcttaaatccatgcccactgggggtgtggatgaatgattcctctcttttcaacacaaggaatggtgaattggggtccaagcagagccccctaatctcacaatgggttgtataaactgaaaagatacttgggaaaatgttatttttccaatatctgtcttcaggtgctctccttttaattcctccaggtactcatttcagttcagggcttacctttttccactccatcatcacaggataatatcccatcagaattcargcaatgcctcatttccagttaccccccaactaacttttctctaaaaattcacctgttctccttatgccattaagctcctgctttctgcttgactgagagtagatgttgtcattatgcctttaagtttgagaaaacaatcggatcaaatgtcaagttgctcttaagcaagattttactaatcaggcaaaaagtggtcatttctagaaatcacccagaaagaaaatacaacatgtggagattcaaagcttggggttgtattctaaggtaagtctctaaatagctcaaaagcatgaacagactcctcctttctcctgaagttggtgaactctgctcccagggaagtctgtttcccagccctaccgatgcttccagg

SEQ ID NO: 862900 - DNA, 652 bp, Homo sapiens
gaagccagcaatctggctgcagactctgcccttgattactaatgtatgttacctcatcaatctgcattcacgtgggacctgggactaagctactgttgccaaacacccactatgccagcccagctgggtcaccgggggtgtcagggtcaaatgcatgctatactcaggccaactctccacatgacagacaaggtaggttctggctytgggtccagtcttcagtccatactccttccctttcatcacaaaagcctcttttgtcattcttttaggttgagagaggatgaagcacatcagaaagcactcatttcctttcttaccaatgaattgcatatggattcctctaaatccatcataaaatactgaataatgtggaaactcaaaataggagtggtggtctcaactcatttgctccttaaggtccctttgttgctatgcaaaccttttcccagcaaccagtgttgtataaaaggggtattaagaaggacattatttctctagctataaaatctgtggtattatacctttccccaaagcaatgcataacaacttgcctgtcatttttttttagtttagaaaggttactcaagtgatgcttctatcttagatggagcattaactggcaaattatatgtcagtttcaattgatcaa

SEQ ID NO: 862901 - DNA, 652 bp, Homo sapiens
gatttgtctctagattgtgagggtgttaggtattaactgcaagaaacttgtaatttataagcaagggacatgaggcattctcttgccctcaaggagtctgactgtatgcatactttagaaagacatcttgtggtgttcaacagatgtaaacatgaggctatagtaaagtctgaaaagaggtgatgaagtctagaaccagaaccatagaaatggagatccacacacaggagagttaagaaccaagagagaaatgaaatgtcattcataataaaatggaaataatcttctggtttttataagagaaagagttgctgtttagtttactctggagaggcaaaagaaagaaatytgggcaacatagaatgctggactgaatttgaagaaatagggatttttatgagcacgggtatgtctaatgtttacttttaagtggtttgtgttgctgtgatattactgtggtaaatttcaggtttgtgactatttattttgtttgtttttgtggcaataaggaaaacagtctggatttgacatacaaaggtctacatggtatatcaataataacccataaatcaaattgaattgggaaaatcaaagctctgtctgcacacggtttagggtttgagccagtttcattctgcatctcaaaagatag

SEQ ID NO: 862902 - DNA, 561 bp, Homo sapiens
ggtcattgaacaaaaactaatatgtgaaaggtgaaatatatacatgcccagtgaaaaagggctgtttaactacaagttaattcttactttttcctactaaccttggagtattaatataacaaaagtctgtttttttctttttttaatttggttgtgttgtgttttcccctctacacttaaagaacagagctctaagtgacttactatctttaataaaaactcctgtaggctgggggatataatattgttccggttagattttctgtggtttaacacagatggcraaagtattttaagaagcttagctattttgttaaatgtttatgacttgtaaattcccagccttttaggattatctaaatgtgttgacattgatggtgaatttgaagggaaattagccaaatatgtttttgtctaattaaccagtggggcctaataatagcagggtttatgggtaaagcagggctacttatttattacatggagatatgttcatattattttcatttgaagtttaaattttcaaattctttcccaccactttctggagtcattgaatga

SEQ ID NO: 862903 - DNA, 659 bp, Homo sapiens
aagaagtggataagctaactcttgggcaaaacctaaacataaaggccccccatgctgtggtgactttaataaataccaaaggacgtcattagctaacaaatactagactaactagataccaaagcttgctctgtgaaaaatccccacataaccattgaagtttgcaacaccctaaaccccgccaccttgctcctggtatcagagagcccagttaaacttaactgtgtagaggtgttggactcagtttattctagcaggcccaacctccaagaccatccttaaacatcagtagactgggagctgtacgtgcatgggagcagcttcgccaacccctgcaaagtgactctgaagaagatgacaagccctgccccagtcacacctggaagctgactggtccttgcatggtcaaagcatgaggaaactcatcgcaggactcatttcccttaaaatttkgacttgtacagtaagaacttcaactgaccttcctcagactgaggactgttcccagtatatacatcaagtcactgaggtaggacaaaagattgctacagtcctattattttatggttattataagtgtactgggactctaaaaggaacttgtttgtataatgctattctatacaaggtatgtagaccaggaagtgaccagcctgatg

SEQ ID NO: 862904 - DNA, 617 bp, Homo sapiens
gcatgcagcctctgacttcatcatttcatcttaattacggtccgattcgcggactttgggtgggaacagaccagagctagagagactcatccattagttactaactacccagaggggagagcagtgctggcagtccaaattgcaaggtgcgctgccttcagcgtgcggcgtcttcgccctggagaagcattacgctggcccgcctgcctccagggccacacggaaacgtgttctgcaaactttctccaagggctcgggggctagattgtgtctcgctccgctgcctctccccctgcctcaatttcgactcstgccagacagctcagcccctccctctggcagtcaccccgcccggagtgggagtggtcaacgaagctgcaaaatggatcgcaagtccccacacacgtccgacccctccccgcgccctgaccacgaacgcatccctgacttaaccgccacactcgggccgtgagcgcctgccagcagggccttccgccacacacacacacacacacaccgcaagcagcggcgaccagggcaggagcccactccccgccacctgcaggcgtcggacccgaagtccacgagccggaactcagagcaggagccgaaggacc

SEQ ID NO: 862905 - DNA, 538 bp, Homo sapiens
tcatctttatgcaaattctgttatctgatagagaaatgattactagtgtggggcatgaatttattcatgtatgcattgcatataaaatattttaatataaatttaaagaaaaataaaaaaggcttctattttccatgttagcatttatataacatttttctacattcaaataagtcatgtatattaatagcttaagattgtttctctgttttcattttcattttttttgtgttggtggggcaggagaatgaggatggtaaaatcagttaccatactttaaaattttacattatgctaacttttctgttatgtttaaagaaatacacacatgctttcatcattattccyacattctaaaatctatcctggtgatctccatcttcaggttgcacagtcctgcattaggcacagataaagatgcgctaattgtggacagtgttcttattagtcataatatccattctgattggttggagccaaggctatgttgtttaccatatattttcagtatcttctcttcttatactttcactctcac

SEQ ID NO: 862906 - DNA, 617 bp, Homo sapiens
atatcccccttttttctttattagtctagctagtagtctattttatttatttattttttcaaaaaaacaaaaaacaaaaaacaaaaacagctcctggattcgttgatcttttgaatagtttttttgtgtcatctcctttggttcagctctgattttggttgtttcttgtcttctgctggccttgctgtttgcttttggttccccagttttatttttagagagctagatgtgatgttaggttgttaacttgagatttttctatctttttaatgtgggcatttagtgctataratttccctcataatactgccttagctgtgtgccagagtttctggtacagtctatctttgttctcattagtttcaaagaacttcctgatttctacctttgaaaattaaaaaaaaaagatcaactttattttttagaattaacaaagtcaaattgacaatatgtggatgtatgatggctataaaaatggaagttattcacaaacataaacttatttctttgtatgaacagcctatttcatgtttctgaaagctcaataacctgaatcaatgtgtttattgacatttccttctatttgaaaagtgtctatttttcataataaaaaagcg

SEQ ID NO: 862907 - DNA, 550 bp, Homo sapiens
aatttgtctgaaaagaactgcatgtctttcaaaaaatataagaaagctgtttttttaaaaactggaaattatactttaaatttgcagaatgactctaagagaaaaagttttctaatttttcaggatagattcaaargcccgttgagaaggaaccagtttaaagcagtggaatcaatgtccactacattggacatgtatacatgacatgaatttccaaaaaatagtcagaatgctcataggatgtggaggaggaggggtgagagggagaataatggagtaattttatccaactttagccattgcaccacttccttggagatcaaatcatgattttctcttgctctaaaaaggagcttttcaaattgagccagtttccttggccccaaagctgcttaataaactgtacattttatattatctgttagtaaaatgttttggggtaaacattttaataatgatacaagacaaatgtgaataaataaataactgggatacaaaattctcatggctaagaagagctgctttgggctgggccatcagaaccaacaaa

SEQ ID NO: 862908 - DNA, 694 bp, Homo sapiens
agcagagagttttgtcttttcacctgagtataggctaatggagaaggcaagccatttagacaattaataaataaaattcaaacatctgcagcagaagtatttcccagtgccctgggagctcaaaacggaggggattaattctgccgggaagatatttgcttttactagttatcgtctctctgaaatctaatacaccagcactaacagattctggtgtgagtgagtgttaggaacacagagctacacatgctccagaaatggacttttccttttttactataagaggtgacatttaaaattacatagtaaatatatgtgaatgaaattgtgtaacagtggaatatgttgamcacccaacttttctttggatattgcacttaaacgtttatcacagattctttccactccatagttcaaacagaaatgttatttgggtgacaatttgcatggctggggcatttattgcatagaaaagaaaatgaaatcagtacaaaacactgagaaaagatacttttaaggcaaaagaaaaacaggaagtttaacaacccaattgctaaattggaggccgaaaacatatgaaaatgttgcagaatttgggatctgctgtcccatcaacaccagtcctggctggcaggagaagaaggaaagagagaacacagcgattaagtttaagcccttaaaggctatgaaatca

SEQ ID NO: 862909 - DNA, 532 bp, Homo sapiens
gacctcttgagactgtttccagggccatggtccctcatattgaatcagaataaaactctttagctattttacagagtttgctttttttctgtcaacatataaatattccatgaagataaaaaacaatatttttgccttctcctaccagttcaaagytaccaccagttacatatgttgtacatacatgtaaacacattaacacaatacacacataggcaaatacaaaatgctaaaatgaatttacaaatatatggaaaataggtctatccacagagtagtaatcaactgcattatactgggcataatgaatatgcatttctaggaacaaagataatttgcattattacttattttccaccataaataattttaaaatagcccaaagaccaaaaaaaaaaaaaaaaggtaaagataatctggatgggtccattagacagaactccagcagtttctgggttcattttaaagtctttcacaatgtttttctatatttatttctttgtatattttagtgttttagctctcttgccta

SEQ ID NO: 862910 - DNA, 638 bp, Homo sapiens
gtttaaatggagagatgcttagggcaagtcagaaagtccaagaatgtctcagatggtctgtgtaagtcatgaaaagatttgtgaaagggaatttatgcaagaaacgttatacaattcaaagattgttaggcctcctaaatgcttcatgaaatgccactatgactcttactgaacaacttgactgctttacagctacataaggactggggacatgtggagctagccacaccccttaactatgctggrgactcagctcttatctgcacttttgcctggtgtgtcctaggctaggctccacacctagtacacaattaaaatctcgaatttaccaaggttttcaccaaaaataaaagttgctaagggttaacattataatatgtaagtgaaactactaaagaaacaattttacatggaaggtgtgtaaagaaagtaaaatgtgtttttggtgaaagattataagaagtcatggaaatgtggatttttttctgcctaaagtgttaaaggattgttttaagtaagaaaaaatatctaaaggtttaaacaagttgtggaaggtttataaaaattaattgtaagagattctgtatgtgaacatattggctaaagttaaaagggtattattcattttttctgtgaat

SEQ ID NO: 862911 - DNA, 639 bp, Homo sapiens
cagcataacatgtatttgagaactgaagaaacagttctatacacaggtgtctaaggaaagtagaatgcaattttaccaaaagaaggcatgagaatgtggatttcttgcctaagtttagagggttaaaggattgttttaagtgagataggaaaaatctaaaggtttgaacaagttgttgaagatttatgaaaaattaattgtgaaagagattctgtgtgtgactatattggctaaagttaaatgggtattattcagttattccataaactgaacattggaataaaagcacaacagagttttcttagaacattgttctgctctttagcaacaacaacaacaagtgtaaagggttataaaaggtttataagaatcttaccttatggtcataytgattaatattggatagatttgtctataaggttttattaagaattaggtgtgacatcaatagtgcactaatgcaagggtaagactggctttctctcttgaacaagattttcatgtaatattttttaaaatgaaagatttttgtcttccttttttttttttttttttttgagacagagtctcgctctgtcacccaggctgcagtgcagtggcgtgatctttgctcactgcaagctccgcctcccgggttca

SEQ ID NO: 862912 - DNA, 640 bp, Homo sapiens
agggcatgaagaggtttagtgggttcttattttccatgggcttttggagagtttcacataaaatgtcaaaaacaagcccaaatatattattatgacttgaactaggcccagacaactttggtatttccagtaggactgaaattattaaaccaatagccattcccttagcatgtgtgaacttccatttctaggccaaagtctagctagaaaagtgctgacattttgaaacgttatgtagcagaagagggcagtggaatgttttgtaacctcaaaagatgtttagtttgggattcaatgccaggtgtcatggtaagttagacaggtgacagtgaggtatccaaggtggatacataactcacagggtgaccaggagctcaaaagcagcattggaagtgaggtcccaggctcttgagcatgaatctgttttatggtaatttctaggtgacagcccagcaaagccctcctcctctgtctccactattattctgatacytccactctggtcattgctggggagtgctcagagataagccaagaagaggacaaggactgtaattgtaatagagggatgctgagaacacctgtcagagggcacccagctacacacaaaaacctctatactctgatagctgcccaggat

SEQ ID NO: 862913 - DNA, 624 bp, Homo sapiens
gtatccatattctttctcatattatagaaacaaacattcacttattcctagtagagtttttgttgttttttttcaacgtggagaatgggtgttgctttttcaggacctattataatgctaatatgctttttttctttgaacctactgtgataaattatgaatkgaatttctaactctaaatcattcttgcatcctcacaataaattgaacttgcacacaaatatttgtttgttgcttgtttgactaactgggttttgtttaagagctttaaagcttatgtaagacattaattgttcatgtttacaaaggactgtttatgttttctttcctctattacattgtcaaattttgatgtaacagctacactaaaatgaagtagattgcttctcataattttctaagtactggattatattagctaggttaacactacctagttgctataacaaacaacccccaaatctcaaaggcttaacccaatatgtttatttttaaatgatgacacagttatatgtgggttaggggcagtggtatgctagggctggttcatcctggatcatgagaactgattatgtgcatccattccaaactgtgttcagtgacatcacgttggttgcctaaaag

SEQ ID NO: 862914 - DNA, 596 bp, Homo sapiens
gtgacaaggattaaaacagacagcatgtctgataaacagctgtgacattgctggctcatggtagacagtctcaccttcttacctcgctctcattccaaccatgctcctccccaaaaggagggccacgtggtagcagagcttcggagtgtgggacattttctgctccttctacacccttcttagtggaggggatactcctgaaggagaaggaccctcttttccctgttcctggaggctggctgcatgcagcccattcattctatttccacagtcacggaaaagagggctcaaggaatgaaaatctgctgaggtcaaagccccatatagactactgaatagaagtaggggtaaaacccagactggaattgaattctgtgttccttgtagattttatatccccctcaccccgcccagcctctgggttccacaggagctctggaatcacagaaagtcagcaaamaagattctatttctaccaaggatccactgagctccttctccctgtccacagacattgcaaatggatgtgcatacagacctccctgtttggcttttgttctaatttccttgaaatagttagagatgattttgtgtga

SEQ ID NO: 862915 - DNA, 590 bp, Homo sapiens
cctgaatgtaaactgtgatattaagtacattgattgcttgttcacagtggagccccagaacctggcttagataccaacacgtaggaaccactgctactgttactgttaatgactcaatgagccacgtagatagacacgagtaaaacacaagctttgcccaaataattgcagacattgaggtgaagtagggatcatagtggagtaaaaaaatggataggattaktttgggaaacatttctaggagtgaaatctgagaagccttctgaaaggcatagagaatggaaggtaggaacttgttccttctctgtagaccagttcaggcagaggccttgaagcggaaattgagaaactggttctgaaaaacaagaagcacagtctggctggaacagagggaacttggagaggagaagtcacagatgagagtggccatagggtggtgctgggtgaaggagagtttgaaggcaatggtcagaagtttatatttggtccagatggtaatagcaagccaccggagggccatgtttacacattttcaaaatccaattaggataccacatgtttttgtgctgtaatcacccattttggaccca

SEQ ID NO: 862916 - DNA, 640 bp, Homo sapiens
gacaatgtagaaatacataagtaaataaaatagaatttgatacatgcattgaatcaatgattactaatgtttcccatcgcaccctgtttttttggttctctctccaccattgtatattgggcatgttgggtaccttgtgagaactgcacatcacccattaatcttaaacttgaagtggggtgaaaccatcaaatgagattttactttttctttctggagactgagtgagtatattatatatgtcatatatggatgtgggacactctctctctctctctctctacatacacacacacacacacacacacacacacacacacagatatacatattagcactagaattgtatatgaatgttaggcagccaagagrttaaccgcagtgggtggttgctatttgtttctccatcacctgtttcttcttctttcagtaccagacctaatattttgtatgggatctacttcttctcagtccacacagtctaggtatgggtccacttacagctctagaaatgaagtgcatgatgtagtcctaagtcattctgattgcagtggttgattgaaggatgggtatgaatggagcaagtccagttaaagtgaatcccaggatgtggaccatgttaggaaagactctcactagt

SEQ ID NO: 862917 - DNA, 649 bp, Homo sapiens
tcttggttttattacccatcttacccacagtttctaccatacataagttagggtagtaggttactcttataaaaatatttcctcaaatttagaggctcaaagaacaagaagttaatttttctctagaagttcaagatgagaggtcaaggtctctgggatgtacgcagccacmcagattcctctccttttgtgaccacatcatcctttagggccttgccatcatctgcatggtagagactgagttacagacatacccaggatctaggctgcaggaggagagaagaagccagttgtctcagttcaagctgctataacaacaacaacaaaaacaaacttggtggcttataaacaacaaacatgtttctcacagtattggagactgagacatccaagaacaaggcactggcagatttggcctttggcgagggccctcttcatggtttgcagatggccaccttcttgctgggtcctcagatggtagagagaagaacctctggcatccctttctcctctcacaagggcactaatcttagaatgagggctctgctctcatgacctcatctaatcctaattatctctcaaaggctccatctcttaataccatcacattgggggttaggacttcaccatatatattttggctggatac

SEQ ID NO: 862918 - DNA, 556 bp, Homo sapiens
caggctaattttttttttttttttttttttttgagacggagcctcactctgttgcccaggctggagtgcagcggctcgatctcggcttacttcaagctctgcctcccaggttcacgccactctcctgcctcagcctcccaaatagctgggactacaggtgcccgccaccatgcccggctaatttttttgtatttttagtagagacggggtttcactgtgttagccaggatggcctcgatctcctgacctcgtgatctgcccgcctcggcctcccaaagtgctgggattacaggcgtgagccaccgcgcccggcygcaccgggctaatttttgtatttttcatagagatggggtttcaccatgttggcctggatagtcttgaactcgtgacctcaggtgacccgcccacctcagcctcccaaagagctgggattagaggtataagccaccaggcccggcccccttagatgttttctaagcatggttaccaagaaacccacagaaaaagaatattttcccccaccccttcatgtagttaaggtgacaagattgatcca

SEQ ID NO: 862919 - DNA, 622 bp, Homo sapiens
ttattttcaaacaacaaaagggctactttcctgttcatttgtacatgtaaaagtgattctgaagaccagtgaaggctgcatttatacatcctgcctttgttccaggtgcacagcatgcatacatgtatttgttattttttttgcactgatactacaaaacatccttattttgatcacattttgaatgactcattttgtttaaagcaataaatttcatgaacaaaatcaactctatcaaatgaagaacagtaatatgtagtaaaacaatagactaaagggttttttgtttctttcaatttttacaccttcttcttaaragtgtactatgacccaaatagccatatgtgattcatgtgtggactttcatgacattatacacatagcagaacaagtatgtatggttcaaacattgacagaaaatacaaagtttctatcctggccagtttggctgtctttgtaaagattcagcaagtttcttaaaacagacggatgaagtcaattgcccaagttctgtgtcagtaaagttaactaatgttgagctgtttttagtctctcatatccttcagacagaacctaatgaacaaatccaatcaaacacagtagccttaagtctgaatcactg

SEQ ID NO: 862920 - DNA, 641 bp, Homo sapiens
ctgatctttgccctacacttgctaggagaggactaggacagatgcttgagagctgagggtgaagcaggggaagggagaattgggagctaatgttgaggttctgaggatccttcctgaatgagcatgggaggaaggaacttctgtctttgaaggtaacccaaaccagaggaagaggtgcccaggagaagtaaactccagcacatacccccttaaccaagttgttgaaggcaaagccaagatcaggccctccaagcacaacygcgtattgaggtacaaaagtgctccctgctctcactctctccaagctcttaaagaaaattagaaaattacaagaaaacacacattattctgacttcatactgaagttctaaggaggaagacaagaaaaggtgacacaaatgtccaggagaattcattagaacaaagatttaatagactctttagattttgttaaaaaatattatggtaactagttgcataatatctatatctatgttatggtaagaagtaatgcgcaggtcaggtaagtatttaataaaaagctcttggagggaaaacaaaaagagcatttgtagcatttgctaatttccatggtgtaaataaccccaccatagccaattaggaaattagaaagaggtgca

SEQ ID NO: 862921 - DNA, 603 bp, Homo sapiens
tatgtgctaagggatatcttcaatgctcaagcaggcagttcacaacttttccttaaccttcacttattgtttgtgcagaaccccaagttcattcatcagtctcttagtgagattataagaatagcagcaagaatgacttttatcttatccagcatgcagcagaacagactcttctcctttagccgatgaagcctctattgacaatttgattatggagaagaagtaactaatgcttttatactctgtgtttggcaaaagaagtcatgccctttagattgtttgttttacaaagaaacccgttgcatatcttggagtttctcttcatgtcctgtgatattgcacaagtaactaaatgtcaaacagaatatagtttctacagtttagttctttatttgttatagccatgccattccttctctgcatgaaaatacaagcatggctatttgtttaaagaaactgcaacygacgatcatgttccaaggcagttgcaagatagatcactaaagcaactttcaataagtaactttctgcatcattccatgattcatgccacttagactgaaatgtaacccacaaacagatttagtgtcaactctggcagta

SEQ ID NO: 862922 - DNA, 706 bp, Homo sapiens
ttcataatgtatgagggctgaggaagttatgaccagactgctgagaaagaaaataatagaaaagcaagggatggatttcgaatggggcaattgtggcgagaccaaaaggataaggataagccaaagccaagagcatgagtggtccatctgaaaaacaaaagcagcatgtgtcaaggccatgaggcagaaaaagactgacatgttccaggaaccaaaggggcactggagtggaggcgatgaagcccgagaagggaggcacgagtaaggtctttgaaatgtgtatgacacaggttatgcaggactcactaaggctttccaactgcattcttcatgcaatggaagtcatttgaaaggctttaagcaggataatgacatgattgggtttagatttacaaagatcactttggctgacagctctagttgctgtaatttcctttatatgccttgctcagcctcataatgtaccttcctgattgggagttggtgcaaggttgatgtacccccatattcacagtccctggccccccatgccttttccattatgccctatgcttgtgcctccayaaaatactgagccccatatctgtgaggagaacttccttgacttagtttcccccttagcatttcccactttccaagcttcaagacatccacaagcaaacatccttgggacactttcctactcacatgaaagaagcagggttcc

SEQ ID NO: 862923 - DNA, 633 bp, Homo sapiens
tatcctataatagctgttattattattattattattattattatagtttactctctttcatcaccataacgaaagttccatgacattgattgctttgtttactattatatcctctgcacttagcatggcccgaaaatgataggtgctcaagaaatatttcagaatgaataatgccctggattgtgtccaatttagtccttgaatacttccctcacttaatagttttaggttcttcagctttttttttctcattcttcttaattacttcaatatttttttctcagtctattttcstatcatcatcatcatcactataatcatcacgtaaaatggctagcatttctatatgtggagaacttaaaaccttacagcccttcatggcaatagctccctggcaatccacctacaggcacagaaagggctggcagttgcacctcaagctgaacagtctccaatctccttcaggcagaatgcttcatttgtgaaattcatttctcagggtatatttctctccaggtcatttatgaaaagggactaactttgttggataaaagcaaagtcataaaatcacttttctggtggtatcatacatgaggggcaaatggcatgctggtgttctagccccctgaattg

SEQ ID NO: 862924 - DNA, 534 bp, Homo sapiens
ccaattagtgcctttcacatctttatctgatcattcaaacttcttacaacagggcttctcatacttgggctttgacttaacggtgatctttgaacttctgaaacttgatgataaatttgtgagtatgggttcttcagcagttcctgggagaggacctcagctttcatcaagctctcactggtggtaatgcccaaaacagttacaaacccaaggctgctcggtcagcaatatgaagaccatccaaaatgtggaagctacttttttcattgatctcagacttaactgccctcatgtttgttgtggtkgtttttttttttttttttttttttcatcttctgaaaactaatttctggctaaaattcacacacatatatgcatactgctatacccacccactggtgacttattcttaaaatgatgacttctttcagaccagtattttcagttttatcagccaataacacttaataggatgtgtgtgtgtgtttgtgtgtgtgtgtctgtgtgtgtctttgaagggtggctggctgtcgg

SEQ ID NO: 862925 - DNA, 577 bp, Homo sapiens
tatatttgtattatacagaacaggcgtttaaaagtaaagcttgagggctaaactttacttttaagcacctgtacaatataaactgtcaattactataaaattaaagattaaaaaaatagtaccctcaagtggaaggtatttataatctagtggaaaataagataatatgcacrgtgtagtgggttgaatggaggcctcccaaaagatacatccatgacataatccctggaaagtgcaaacatgaccttatttggaaaaagagtctttgtggttgtaattaagtgaaggatcttggattatctgagtaggccctaaacccaatgacaagtatccttacgagaaaaacacacagtagagacatggaaaaagccacgtgaagacagaggcagagagaggagttatgtagtcacaagccaagaaacacctggaatgaccagaagttgcaaaaggcaaggaagaattaccgctccccacaaccccccagggcctttggaagaagcaaggtgctgccaataccttgacttcagattttggcctccacgctgtgagagaataaatgtgtgttcttttgagtcac

SEQ ID NO: 862926 - DNA, 587 bp, Homo sapiens
cttgtatagcctgcagaaccatgagccggttaaacctcttttctttataaatttcctaatagcaatgcaaaaaaatgggctaatacacttctttgtattaaaaataagttgtctagttttgctgaaccccagacagtttcttgagtttaaatttcatatgataaagttaatcatttgttacctgtcagctagctcttattggtagaatgttaacttacctcttgcgtatttctaaagaatactcagctacagtcactcagaaaacagtggaaatttgttttcgcaaaaaaattttttcttccacatgagggcactgtctactttggatttggctttsccagttttgtaagaacatatttcccattttgcccattgatgttgtggctccatttctaaatccgtttaaccccactgcacctataaatgtcaggatacaattttacacgggagctgagcatagtgcagttccttgtttggtagagaaggcgaagtcagtagtacctctcttccagcttttttctgctgcttaaaagcaacctgaacctccattcttagccaagcaatgtttggtggcctggcttggcatg

SEQ ID NO: 862927 - DNA, 590 bp, Homo sapiens
agcaatctacagatccaatgcaattcctatgaaatcatcaattgcattcttcatagaaatggaaaaaatcctgaaatttctatggaaccccaaaagaccccaaatagccaaagcaattctgagcaaaaatagctggaagcatcacactaccagatctcaaaatatactacaaagctatagtaatcaaaacaatatggtactgtcacaaaaagagacacatggatcaatggaacagaatagcaaacccagaaactaatccacatatctacaaccacytgatttttgacaaaggtgcgaaggacactaattggggaaaaaacaatctcttcaatagttggtgctgggaaaagtggatatccatatgcagaagaatgaaagtagacccccacatcacaccctatacaaagatcaattcagaatggatcaaaactctaaatagaagacatgaaactataaaactgttagaagcaaatatagtgaaaatggttcaggatatgggtctgagagaagattttatgaataacacctcaaaagcacaggcaataaagcaaaaataaacaaatgagattatatcaaactataagcttctg

SEQ ID NO: 862928 - DNA, 623 bp, Homo sapiens
gaaggcaagagctgtttgcttctaaacatgtatcaatatgtacctggttctgatcttttgtcctttctggtacaaagagacagatacagtgatgaggagtaagtgggctgcggcatgaattgtatgaccattcccttccctccagcmtagagagaccaatgtttatttttgagccctgtaaactctttttttgattacaaacctttttcctccccagaagtagtaggtttatcttatttctctttttttgttttcaaattccactaatccttcaaggttcaacacacatgctgcaccatctggaaaccttccctgagctccctgtcagagggaattattcactcctctccgttctcaggaaatcttgttttggcttcctttatggctctctgcatcagtgtgattttcatggcaggtagttttagtgtccttctgtgctaaactgtcagctccctgagggtatcttcctcaaatctgcagcacctggctcagtcagctcttttgaaaacagcaatgattctcaagctttagcagctgagagatgaaatatacaaccagacaatggccagagtatagatgacaatgaaacctaacccaacccaacccaatccaacacaacacaa

SEQ ID NO: 862929 - DNA, 588 bp, Homo sapiens
cttctccctgattcctgtcacatgccttatctatggctgggtggatttgtaatgggggaagctccttcacttctaccagctactataggttggggcaatgcagaggtaacagagaaaggggcagagaactttatacttactaattcaccattgtaatcctttcttatacactgcagcttccccagccagcaatgggcagttagtcccttctctgkgtaaatatgtaggtgttcttctctctagggacttaagcatggttctttcaaggcccttgcaggaaggcctccaaactgcatagttgccactacagacctctggcttctcctcttctaccccatttccctgtccctgcctctcagccgtcaccctgtagtctcttgtttcttgattctacttgtctaatactaaggcagttcaggcacagctaccttgaatatatacccacctgatccaatgggactgacacagctttgctatgacaaaaggtgggactataagccttcctcttgtcattcccattttgtcctgccacatctcaccaactcccatctcctctagctcaaataggcacaggagggcttatgagca

SEQ ID NO: 862930 - DNA, 589 bp, Homo sapiens
attacatcacaatgttgtgaaattattactactatttccaaaattttctcatcaccccaaactgaaactctgtaactgttgagcaataacctcattcctgtatctctcccaaccccaggtaacctcaaatctttctttttatctttgagacaaggtctcattctatcactcaggtaggagtgcagtggtgtgatcatagctcattgcagcctcaaaatcctgggctcaagcaatcctccttgagtagctaagactataggcacacattaactgcgcctggctgattttgttttttgtagagatgtggtcttgctatgtttcccatgctggtcttgagytcctggcctcaagcagtccttaagattcatccatgttgtggcatgtgtcagaatttcatttgtttttatgactaaataatattccattgtatgtatatacattttgttcatccatcttctgatgaacactgggatatgtctaccttttggctattgtgaataatgctgcagtaaacattgacataacaagtatgtatttgattgcctgtttctaagttcttttgggtatacatcttgagtagaattgctag

SEQ ID NO: 862931 - DNA, 596 bp, Homo sapiens
ggaacaaagaaaaccacatgaaatggaatgggagctggaaaagcaatgttaatgaaaggtgtgtcttttctaggaaccacaaagaagtgctgccttgaggtcataggaagagaaggcaagaaagaaggctttgaaactgaaggcaggcttccctcctctgcggctcccagggtccagcgaggcccatggtgcctcttctgaattcagagcctgcattcagaagtaggaggaaaccaaatggttggagaggagagcatgaggccctgaccgggggcagagacaggcccagtgcatggtggtgtccttccatgaaatacctkggctggtggggtccaggttccccggcctcctgttgggctgtggccactgtcttcccagatggatcaccgagcgcctaagtggaacttcagctttatccaaactcctcctgctgatggtttcaataagcggcatgactgtgggtttaaaatggaaagcaggggttgtctgagctccaccaagtctgttctctgactgtagcaatgtgaacactagatttacagaaaccggatttggctatccagtttactgtagcgtagcctacttctcccaagcct

SEQ ID NO: 862932 - DNA, 596 bp, Homo sapiens
ggaacaaagaaaaccacatgaaatggaatgggagctggaaaagcaatgttaatgaaaggtgtgtcttttctaggaaccacaaagaagtgctgccttgaggtcataggaagagaaggcaagaaagaaggctttgaaactgaaggcaggcttccctcctctgcggctcccagggtccagcgaggcccatggtgcctcttctgaattcagagcctgcattcagaagtaggaggaaaccaaatggttggagaggagagcatgaggccctgaccgggggcagagacaggcccagtgcatggtggtgtccttccatgaaataccttggctggtggggtccaggttccccggcctcctgttgggctgtggccactgtcttcccagatggatcaccgagcrcctaagtggaacttcagctttatccaaactcctcctgctgatggtttcaataagcggcatgactgtgggtttaaaatggaaagcaggggttgtctgagctccaccaagtctgttctctgactgtagcaatgtgaacactagatttacagaaaccggatttggctatccagtttactgtagcgtagcctacttctcccaagcct

SEQ ID NO: 862933 - DNA, 611 bp, Homo sapiens
aagtaaaaataagaggttgaattctccttgctgaaaataagagaaaagacttctctcctcttttttttcttacagcatttactttcgaaaacttgtaagttcttttctctgtctcttcgaaatggatgtaaatctttttagaacctaaataagcctcttgccagctttatgactggggcatgcctttctccaggagctggcagtcagctctttgaaatgtgagcattaagggagatgcacccctatctccgagcttaacttgagagggtacctggctccaagttgcaaaactccctgttgtcataaagataggactttatcttccctttaaaatcagttaactaacacagatggtggccccacttaccaggtaaatttaggatgaactatgtgtaagaaacagtgctgtcaagccctctttcttgaggactgattatcgtataycttgagaacatatatgtaatgggttctatctgatggctgtataacaagggtaagatttgtttctgtctttgcgtctccttgcaaattgcctgtaatgcatatcacattgtggtttaatgcttatttaatgataaaattgtttcctttctgttctacctttgtggaga

SEQ ID NO: 862934 - DNA, 635 bp, Homo sapiens
agaggcgggatggaaagccttggcactctgcttaaagatcagcccagatcaatgaactatcactgtctaggttatcataatgaatatgctgaagtgggttttgcaagaaaagctgttaatggaatccctgaggcccagtaccaatcrtgctatttttaagatatgtgggtgatatggtaggatggcacttggtgcccaattcagccttcctgtacggcagatccaaaaccctggctgctaggcttttagatgcaaacgaggtctcatcaagcagatgcatttcctcatggtttgggccaccattttccatagcttctgccgttgccactggcaagcatggctattgggattctgagggccactctttgccagctttgtgggtgttcagggctcactgcagtggggcagtggcagcttcccaatgtccagatcaagctatgtgatgagcccatcacctcagccattctaggattggtctcctgatttttctcatgactgttggtggtagagacagcagctcccctggtgggccagttctgcatcattgttctaggagtcattccagaaggcctttcctagagcctgctccattccttctaatataaccatccaccacatgccaaggcctgatctgt

SEQ ID NO: 862935 - DNA, 569 bp, Homo sapiens
actatttggtttagccattgtttcaatgacatattgctgtgtgcttggagagacaaactgggtgaggccctttgcagagagtacaaccatgctgaaaaagagagaaagcaaattggaaggaagggaggccttgcagaagaagaggaaaatgaacatytccatcacccctataagaaatgccatattctttaacatccaacaccaaattatacccccgtccccagtgttaggcaagcactaatctactagcattgtaaggcattctggttacagaaagaaaatgtaagggaccagattgcaattaaatgtaaattatgaaaattacatattcattgatgatgaccttggagaaaggaaagggagtgaagaagaatagcagccagagagtggaaggaaggagaataagggaggaagaaagaagatgacccacaaacacttcctgccatcagggccagcagggccacctggcttcctgcaaactcttgacatctgaatccaaactagtcatggccaaagaagaagcacgtggaccaagcgctgtgccgtggtaaatgtagagcagcctgctg

SEQ ID NO: 862936 - DNA, 569 bp, Homo sapiens
actatttggtttagccattgtttcaatgacatattgctgtgtgcttggagagacaaactgggtgaggccctttgcagagagtacaaccatgctgaaaaagagagaaagcaaattggaaggaagggaggccttgcagaagaagaggaaaatgaacatttccatcacccctataagaaatgccatattctttaacatccaacaccaaattatacccccgtccccagtgttaggcaagcactaatctactagcattgtaaggcattctggttacagaaagaaaatgtaagggaccagaytgcaattaaatgtaaattatgaaaattacatattcattgatgatgaccttggagaaaggaaagggagtgaagaagaatagcagccagagagtggaaggaaggagaataagggaggaagaaagaagatgacccacaaacacttcctgccatcagggccagcagggccacctggcttcctgcaaactcttgacatctgaatccaaactagtcatggccaaagaagaagcacgtggaccaagcgctgtgccgtggtaaatgtagagcagcctgctg

SEQ ID NO: 862937 - DNA, 689 bp, Homo sapiens
tcttgacatctgaatccaaactagtcatggccaaagaagaagcacgtggaccaagcgctgtgccgtggtaaatgtagagcagcctgctgttaatatgggtttagtgtcggaatccaggacagccaagactgtggcccactgaggctccccagcacacctgattacatggaggcacagtgagggggatgcaaccttgcactgcacttccagggcagcagggactgcaagactcctgactgtcctcctgaagcacgttctgtgtccatgcctgggccccatccctacctctttcctctgccaagctgycctgagtattataggcagctcctagctggctattatggggacttatccgggcttttatacctggggttaaccatagagtagaagtacctccaatttctataattaaattgagtcttaatatctttgagttggaacagactttcaaaatcacctagtcaaagacagcttcccccgctacttcttatgtgaaataatggcatgaattcctaacttctagcaagcaagaaggagctgcgctgtaagtcacttattgcatttgaggcatcggatacacatggaacttcagctgtgctggcaagacaagaagacaaggcattggacaattgggtcaatataggggcactgagatgaaaacatctaataggtgaggggcctgagacatg

SEQ ID NO: 862938 - DNA, 638 bp, Homo sapiens
cccccatcccacacctaataacaccagaaggaccagggaagcaccttttttcctcttgagcaggacattaggaagttaacaggagctcaaatggagccagaaaatgaaacagaccagaataatattgcagggtctccataaactaagttgtcattggaattatagcccgcaaaagtacacsacaatctaaacgctaaaccaaaatatggcaattgcctgctaaaatagaaaatttaagtaagattaagactctcaaaaaatcattcatcactccaaaaaccaggtaagccgtaactcaagtgaataaagaaaatcaactgatagcaatactgagataaatcaggcagtggacttacctggcaaagatgtaaagctgccaccataactggaattgcttcaagtaactacaaactcatttgaaacaaacttaaaaatataaaatatcagcaaaataaaatagaaataattttaaaaatgaaaatgtttgatatgatttcgttgtgtccccaccaaaatctcaacttgaattgtatctctcagaatttccacatgttgtgggagggacccagagggaggtaattgaagaatgggggccagtctttcccatgatagtgaaggaatccagtgtcagctttcta

SEQ ID NO: 862939 - DNA, 641 bp, Homo sapiens
tttttgaagggtttttcgtgtccctatctccttcagttctgctctgatcttagttatttcttgtcttctgctagcttttgaatttgttttctctggcttctctagttcttttaattgtgatgttagggtgtcagttttagatctttcctgcttttcctgtgggcatttagtgctataaattttcctctaaacactgctttagctgtgtcccagagattcttgtaccttgtgtctttgttctcattggtttcaaagaacatctttatttctgccttartttcggtatttacccagcagtcattcaggagcaggttgttcagtttccatgtagttgtgcagttttcagtgagtttcttaattccgagttctaatttgattgtactgtggactgagagactgtttgttatgatttccattattttgcatttgctgaggagtattttacttccaattatgtgatcaattttagaataagtgtgatgtggtgctgagaagaatgtatattttgttgatttgggttggagagttctgtaaatgtctattaggtctgcttggtccagagctgagttcaagtcctgaatatccttgttaattttctatctcgatgatttgtctaatattgacagtggggtgttaaaagt

SEQ ID NO: 862940 - DNA, 544 bp, Homo sapiens
ttaaagagagccaccatgccttctaatagcaatgaagcaatgtctttctttattaagcttttctctggttaatgcaggttttgaactagattccagagttctgcaaaagttgaatctgacagtttttgccagcttattagttgtttttgtggtaggatagagcctggaagtccctattccactgtttctggtgatatcacgctgcaatattttttcttacgactgtgtgtgtatgcataattaaatcaaaaytaaaagtttaatttagaattttaaaaattaattaaaatactgccgtagagggaaatcctaaaatgccacttacaaaattgaaccatgttaacaccagtagcaatatagaaaaatataataaactgatcaatgatcaagaaaatcagtcagtagatgtactggaacattacattcctcaaaagagaacatgcatttttccatttgcccatataacactgaaaaaaaattgatgattttttaggcacaaagaaaagcttaaaaaatttaaaacttaggaacttgacaagtcatg

SEQ ID NO: 862941 - DNA, 692 bp, Homo sapiens
aaatttagaatttatactttgtagagttggttttaagtacagcagtctattttcttttccatgctgaaatctcataattcagtagtgactttgatctacaataaaatattgttgacttgcctcagaaagattttcatttgagtctctctaagaaacaccaaacatggtgaactgcaaaattaaaactctctgttgaaagagcatggaagtttttactcttgacattctagaaactctcatagataaacaaatctccttttgggtcattccattaactcacttattcatttaggtattcactcatcaggctatgaacatcaagtatacccaaaaatataggctctttcccaaagtggtgaaacctagtggcagaagtcatataagttaacaatcaaaataccaagtaataagtcttatgatagagttgytcacagttttctctgttagcacaaaagagggatagctgactatccagggagtaacgagtgtcagcaaggtctccctgaaagaaggtagcatttcatctgcatcttgaaaagcaagtagaagtgatccagttgatgaacgcgaagtcaagagctttaaagagaagaaaatgcaagcacagtctctaggtcagacaaaacacagcctcttcctggaaccgctagagtcgagtgtattcagggaaaagtaatgagagaagagactgg

SEQ ID NO: 862942 - DNA, 623 bp, Homo sapiens
ctaaatttctagcttcctatctataagattggaatataaatacctactcctaggattgttctttggatttagtgagttaaaatatgtaaggccccaggcacagttccctgaacatagctgacactttaaaaatgttacttcccttattcattctttcctttggtcttcacccattcttcctggaattacaaaaaatatgtrcttttctctggaaaggcatcacaatctttttttcagaatgaaacaagtgtattagatgtgaaacatgttgtcttctaaaacctaagatcctgaatttaagtcctactagtcctcaccatgtgttcctgctaccaaaagtttatatccaatgattttcacttcttactctgctgaattgtatgacttctttaacaggaaacaaatctacaagaaatgtcttgatttcctgagggagtttctgaatacaccctttcacttcagtgatgtggagacattctatactgaagcacatggttctaacaacagtattcattaaccctacagcaaagctagtgctaacgacattctgtgaaaaggaggtgattcacagtgtgaggtgcacattaccttgagaccattaaattatattttagaaaatgcat

SEQ ID NO: 862943 - DNA, 696 bp, Homo sapiens
ttaaatttttcttattgtggttactcttaaatgctctcatccattctaataatttagtgtgttactgacaccttaataagttatttatttgatttatctgggggttttctagtaagctaaatactgtgattacttagaatagcrtatcaaatttgaaaaggagaaatcatctaaaaaacagccacaaaaacataatatccaattccaatgtagcaatatgttttggaaactcttaggcctatcttaagaataaggtattcaatacttattttgtaaaagcacgactattctaaatttgttcttatgagatatcaactctatctcacaaagatgatcttacattctatatccataatttaactattttttctttttcataatttcaactattaagtggtattttatactgaaaatgcatatagattgcattacatatcctgctttgcaggtgtaaaggtagtgtggaatagtgaagaagcaccatctgaacagccagacatgtaaaatagttccttctaccacttaccgtgggcaagttttaagcaagttgtgtcatttctctgggtccagtgaaataaggttaatatttttcccatctcaaaccaagttgctggacagtatgatccagggaagagcttaagagtatgatctttgcagtgctaattactagccatgcagccttgggtgagtcactta

SEQ ID NO: 862944 - DNA, 696 bp, Homo sapiens
ttaaatttttcttattgtggttactcttaaatgctctcatccattctaataatttagtgtgttactgacaccttaataagttatttatttgatttatctgggggttttctagtaagctaaatactgtgattacttagaatagcatatcaaatttgaaaaggagaaatcatctaaaaaacagccacaaaaacataatatccaattccaatgtrgcaatatgttttggaaactcttaggcctatcttaagaataaggtattcaatacttattttgtaaaagcacgactattctaaatttgttcttatgagatatcaactctatctcacaaagatgatcttacattctatatccataatttaactattttttctttttcataatttcaactattaagtggtattttatactgaaaatgcatatagattgcattacatatcctgctttgcaggtgtaaaggtagtgtggaatagtgaagaagcaccatctgaacagccagacatgtaaaatagttccttctaccacttaccgtgggcaagttttaagcaagttgtgtcatttctctgggtccagtgaaataaggttaatatttttcccatctcaaaccaagttgctggacagtatgatccagggaagagcttaagagtatgatctttgcagtgctaattactagccatgcagccttgggtgagtcactta

SEQ ID NO: 862945 - DNA, 568 bp, Homo sapiens
ataacaatgaaaacaaatcctagtaggtaaaaccacagtggatttgtttgtgtcaggtcacatctgccgagcccagaaagcctgctgaggacactggttaatagtaaacacctttttggagctgcctgtcacaaggaccacatcagggaattccccttaataaaatcagtawctttatttaaaaaaaaaaaaaaactaaaaactaaagtcatcaacttatatttaaatttcaaaaagagaactagctttttaaaaaaattacaaacaaatgtataaatctagattttgtatgctatactggatctgcttaaggtgccacatgcctgtatttagaatatgtcccacaaataaaaataatattctatgaatgcaataaaaaacagagatattggctagctgttttgcttaatctgtaaagtgagatatgaaaagctgatataaaaagaataaccatagcattaacaatactgatgtcatggcagctggcatacctacaatgttttaggccctaaactacattttctaccgtcactgtcacgtggcgagccacatattgtgcaatatgctt

SEQ ID NO: 862946 - DNA, 568 bp, Homo sapiens
ataacaatgaaaacaaatcctagtaggtaaaaccacagtggatttgtttgtgtcaggtcacatctgccgagcccagaaagcctgctgaggacactggttaatagtaaacacctttttggagctgcctgtcacaaggaccacatcagggaattccccttaataaaatcagtaactttatttaaaaaaaaaaaaaaactaaaaactaaagtcatcaacttatatttaaatttcaaaaagagaactagctttttaaaaaaattacaaacaaatgtataaatctagattttgtatgctatactggatctgcttaaggtgccacatgcctgtatttagaatatgtcccacaaataaaaataatattctatgaatgcaataaaaaacagagatattggctagctgttttgcttaatctgtaaagtgagatwtgaaaagctgatataaaaagaataaccatagcattaacaatactgatgtcatggcagctggcatacctacaatgttttaggccctaaactacattttctaccgtcactgtcacgtggcgagccacatattgtgcaatatgctt

SEQ ID NO: 862947 - DNA, 576 bp, Homo sapiens
tgcaattcctagtcttaggggcatatgacctacaaataaatattcagttcctacctccccacccacctcattctatcccttttttctatccattgtgtgtctgtctcatttttgatttacctatctttaccccagcttggtatacaagtaagctcaatatacattttttatttgaaaagacagtgatttgcagataacagaaatarcaccagtctcactctttcaatataaaatgatagcactacaaaaatgaagatttttttcagcctataaaagcaatacctaattattggggggaaaacatggaaaagaaatagaacaacaaaaaataaataaaaatttcttgcaatcctgtctctgagaaaatctcactaaaccttttggtatatttcctctcagatttttaccttatcacatctatattcattttttcacttaatgcaagattattttcttatatgtttaaaattatttttaaaaaatcatcttattgattaactaagaatttaccatgtataatttatttaatcattctcaaaaaattactataatacagagtagtcaatttaaaaaaat

SEQ ID NO: 862948 - DNA, 626 bp, Homo sapiens
tgggatatcttcacatctctcctgatgtactactttggtctccattttatctgcacatccagttttctctgcccctctctcagtgtcttgtgtgtatcaaatgtcattaaagtttaatagaaaacagatgactcttgccctgttctttcaaaggacagtcacatgaacaccagtactccagaaggatgaaaccacaccttttctgagcacatggactcaggcctgrgtagaggcccaggacccagagccagtgagggataggcccgtaggaagtccagcaggaagaagaggctgaggagagaaagccaggataatgaagaccacttcaagggcaactggaagctggtaacaggacatgccctaaggcagcaggccccaacctttttggcaccagggcctagtttcgtggaagacaatatttctacggaggcaggggaatggttttgggatgaaactgttctacctcggatcatcaagcattaggttctcatagggagcacgcaactacatcccttgcatgtggagttcaccgtggggttcatgctcctgtgagaatctgatgctgccactgatctgtccatggtccaggggttggagacccctgccttaagggatatttcttttac

SEQ ID NO: 862949 - DNA, 588 bp, Homo sapiens
ctcaaggtcagaggttccagaagaaggagcagacacccatctttgctgttctccagcctccttcagtgacatctccaggcgcgggagcaaatcaagatcagagaagaattgaaggagatagagacatgaaaaaccctccaaaaaaatagaagaatccaggagctggttttttgaaaaaactaacaaaatagatagaccgctagctagactaataaagaagaaaagacagaagaatcaaatagatgcaataaaaaatgataaaggggatatcaccactgatcccacagaaaaacaaactaccatcaaagagtactataaacattctacrtaaataaaccagaaaatctagaagaaattgataaattcctggacacatacaccctcccaaaactaaaccaggaagaagtcgaatccctgaatagacaaataacaagttctgaaattgaggcaataattaatagcctaccaaccaaaaaaagcccaggaccagaagaattcacagccgaatcctaccagaaattcaaagaggagctggtaccattccttctgaaactatttcaaacaattgaaaagaaaagattcctcctt

SEQ ID NO: 862950 - DNA, 647 bp, Homo sapiens
ttttccttccttcttgcctttgatggggtcaaggacatgccaccccaaaaataactgtagaagaccagaatatgccaagtacgcctcttcagcacaagaattacttgagctggctatttgagaaacagcagacacagaagaagctctaaaaaatcactcttttaaaaaagaaatttatatctataaaggaaatctccatttgtaaggatgtctctctctctctgtaccaggaagagaaacatgactaaatcactagagactcttagtcaatgaagacrgcaccgatttaaatctgcataacaagccttacccttgtttcacagtgcttttcctgcttcagagatcaatgggatttaagatgtctaagacaactctttgggatctactctagatatctactcatttctctgggttatctcccatgtatacaggatatatacatgttattaaatttctgatgttttttctgttattaatcttttttttgctgggagtcccagatgagaactcatgaaaagtgaaagagaaaattatttttcctcccctacgccttcttttcttccttccttcctttttccctacatattcgctggagttcagaggaagtgcacagctgctttaggcaactgactgagacgtatcagttt

SEQ ID NO: 862951 - DNA, 637 bp, Homo sapiens
ctgagtacctgcacacagtgggtcctgagctcttgtccagcatccaagaagaatgaggtcacgctgacaaactgaaggacaatgaaggaggataattttattgagtgatgaaaacagctcccagcagagaggggagctggaaaggggatgggaagggcaagtcatcttctccaaagtcaggaggtctcttccttgaagtcaggcctctctctctaacaactgagtctggggtctttataggcccaggatgggggtggygtgggctgtaggtagtattggaaaaggcaaaatctgattaatcaaaaggcattattcagaaagaatcaatcaggagagagcaagcaaacaggaatagaagttctcactctgggccacggttttcaggctgttttttgcttgaaggtgggatttcaccagggacccacccccatctgcctaggatttctctgcctcctgcctctattaatatgatgtgtgcttccaactgctatcctctccaggttgcctaatattcatggtaagtatacctttaattttgccaaagaagacactagcatagctaccatgtaggttattccaacctgcctacatccaattcaatagattaatcaaactggaagaaaagcaaaactaagaa

SEQ ID NO: 862952 - DNA, 637 bp, Homo sapiens
ctgagtacctgcacacagtgggtcctgagctcttgtccagcatccaagaagaatgaggtcacgctgacaaactgaaggacaatgaaggaggataattttattgagtgatgaaaacagctcccagcagagaggggagctggaaaggggatgggaagggcaagtcatcttctccaaagtcaggaggtctcttccttgaagtcaggcctctctctctaacaactgagtctggggtctttataggcccaggatgggggtggtgtgggctgtaggtagtattggaaaaggcaaaatctgattaatcaaaaggcattattcagaaagaatcaatcaggagagagcaagcaaacaggaatagaagttctcactctgggccacrgttttcaggctgttttttgcttgaaggtgggatttcaccagggacccacccccatctgcctaggatttctctgcctcctgcctctattaatatgatgtgtgcttccaactgctatcctctccaggttgcctaatattcatggtaagtatacctttaattttgccaaagaagacactagcatagctaccatgtaggttattccaacctgcctacatccaattcaatagattaatcaaactggaagaaaagcaaaactaagaa

SEQ ID NO: 862953 - DNA, 585 bp, Homo sapiens
gtccagcccactactcctagactgccctgtacgtaagtcttcaatacactttatgtctcattcactggctccaggtctcttcttcagccactcagacatattgccatccctgttggagtcaatagaggtctagcacatcagttctgtctctctgaagaacgccgacaaatacagaatgcttgtactttctccagagtaatttgttttcaaatgtttccttagaccttttaaacagtttctgaattcccctcaacactcatttgtaaaygagggctaagtatttgtttcaagtcaatattattcatcagtcaataatgctagtgctgcaaaatttgctcatagactagatgctagatctgccaaagaagcctttaaattgtccaaacagaaaacactcttaattgaccttagtgacattaaaagattcaaactttgacagagtagttaatatttaaatcatgccaagtaatatgctgcatgcttagtttggaaggcttagattggcagtgaagatcatctctatctctgggattaaaagaactggatactttggttgacctataatgggttctgtcgttacttttt

SEQ ID NO: 862954 - DNA, 610 bp, Homo sapiens
gagtttttaaaggcagaaggcagagcttacaagcaaagtcgtaagtcaatacatggaggccacacattgctttgacctaaagaggcttacttaagaactcaaagtgggggcccataggttataggtagacttgaagattttctgatttggaattggttaagraggcgaagctttgtctaaaaattcaagattagcagaaaaggatgttagctgtggctcctgggttgtgacatcctccaggcccctcaggaagaaatttaggacaaagaatggcagtcagagtccagtcctcagtttcccctgaggggtctacctgccagtggatccatatggtggaggtgtgcatttctgaaaaacagctcagggatgtatgttaacatattctctttggtttctacaggaaaccaaacattcttgtggctttcttggctattgttttaagctactattaacttcttgcttattaagttgctaatttacttctcaaggctacctctgtgcctggagtttcccttgaagaaactcaacattttcatttacttccatgcttaagggagcttgcaagcccctaagaggggtccctgctccatccaatagtatctgaaataag

SEQ ID NO: 862955 - DNA, 624 bp, Homo sapiens
attttgagttaataatcttttcctgaaaccactttatatttcacaattatttctggcattattccctctttcccaaaggaaatttccttaagtttattgctagcacatacataaaatggtcattctaaaatgctatgatattgtttgactttttagtttactcaaactaatttaaaaacagcataaattagttkacttaaactaatttataacatttgttatgttttaatataaggatttaaagaacaattatgaaataggaaaattttcagaagtacttggtcttaattaccaagttatttaatctaaacaaagccataaatttatctgtttacttctcttcctccatttcatttcaacaacaaatacatgggttcagtgggatgattttagtttggtttagattcattctccatcatacaactgttaaattcttcaaaatattaacgacttgggcacctcaggtattccatattacttagaaattgggactttctaaaaaacccttctcatttaaataaaatttatcctattgtagattgacatagttgtgaattatgacctagactgctttcatttctatgtctttggctttgaaattttacctaagtagctcatatgtga

SEQ ID NO: 862956 - DNA, 631 bp, Homo sapiens
aatgatgtaactgtgggaaagcgagttgaattttctggatgaaaccaatttcttattttattttgtgtgacagacttcaacaaatatctcttgggcactgactaggttaaacatattatgcaaaggggctgcagcaattaaaagatgtttaaggaaacaatttcttctctaaacacctttgaatcttttagaagaattaagtaaacggatgaccatattacacaattggataagggaagaatgaaggtaagtaaaatatgataygacatagtcaaaggaggaaaagatgatttggtgaataaatttgaaaaggcctttagagaaagtaaatctgcaagtgactttttgaaaagctaaaactttacatgaggaaagaagtcaaattaaggaaactcataataagagaaggcgaatgggagcagggaaacagaaaacaagtcctaaattcctcactgactcatctcataaaaaagggaatttacagatgaatgatttggataatgcttatacttaaaattattagctaaacaaacaaggaacaagagaagaagaaagtacaggaaagaggcaagggagcaagtaagagagggaaggagaaagaataacacaaaccccccagattagaaaacta

SEQ ID NO: 862957 - DNA, 631 bp, Homo sapiens
aatgatgtaactgtgggaaagcgagttgaattttctggatgaaaccaatttcttattttattttgtgtgacagacttcaacaaatatctcttgggcactgactaggttaaacatattatgcaaaggggctgcagcaattaaaagatgtttaaggaaacaatttcttctctaaacacctttgaatcttttagaagaattaagtaaacggatgaccatattacacaattggataagggaagaatgaaggtaagtaaaatatgatacgacatagtcaaaggaggaaaagatgatttggtgaataaatttgaaaaggcctttagagaaagtaaatctgcaagtgactttttgaaaagctaaaactttacatgaggaaagaagtcaaattaaggaaactcatmataagagaaggcgaatgggagcagggaaacagaaaacaagtcctaaattcctcactgactcatctcataaaaaagggaatttacagatgaatgatttggataatgcttatacttaaaattattagctaaacaaacaaggaacaagagaagaagaaagtacaggaaagaggcaagggagcaagtaagagagggaaggagaaagaataacacaaaccccccagattagaaaacta
